United States Patent Application Publication US 2015/0052636 A1 - sequence listing, part 12

SEQ ID NO: 39401 - DNA, 442 bp, Arabidopsis lyrata
  Intron number 2 from transcript 318448 (locus 318448) deri ved from phytozome v7.0 (chr-ID scaffold_3; pos 7180174 to 7180615 reverse strand)
taaggaggctgaaaaggatcaggacacttctggttagtatttcatatactcttttgttttttagtttttgccgcaaaagaggttatcattactcgtagagtctcagaaactaaaaccctgtggtggatcgatttgacaaggataacatccggttctaccgaattagctacagtttagatcagctgcaagaaaaaagtttctgcttatcttcttaagtttagcaattgaatttcttctgttcgaccattttcacatgaggtggaaaatattgaatgtttcgaattatacattctttcgttatatattatatatctcttgttaccgtaagttcccttgtatgcactagtttatgtctatctttgaggtttgtttttctgtcaccaagttcttgtctctaagaccaattttaatgatagatcattatttgtagcagttagctgtg

SEQ ID NO: 39402 - DNA, 350 bp, Arabidopsis lyrata
  Intron number 6 from transcript 475045 (locus 475045) deri ved from phytozome v7.0 (chr-ID scaffold_2; pos 1241568 to 1241917)
ccatttataaaaaaccaaaataaaaagttagtatttatgttcgtgtggtaagtaaagttagattttccgaagatttatagatccactgttggaaatagaagattctaagaagtaataattttgtgcaaaacattttttttttttttttttgtcatccgaaattaattaaaactcaaaagacccattcctgaggaatgttgtttacatacgtgatatgaatcggttatgtacgaatttttcgtgccagattatccgcaaaagattcttggaatctttagtttattgtgtgtgtgtgttttttttttcttgaaaggcaagtaggtttgctttgctttatatttgcataataa

SEQ ID NO: 39403 - DNA, 504 bp, Arabidopsis lyrata
  Intron number 1 from transcript 488617 (locus 488617) deri ved from phytozome v7.0 (chr-ID scaffold_6; pos 7235728 to 7236231 reverse strand)
cttgcgagaggtttgttgtatcaattcaattatcaaattttatatctatttttgatagaattcacatcgtggaagagataatgaaatcgaagcaattagtatagttttgcagtctcaattaaacattgatctatctattaatgattggctttaatgatctatcacattttctgggttcttaatacgttagatttaaacattgatgctttgtgttgtcctgtttggtattagaatgagtactatatctatgttagtcttttcgttcaactatagctttgtgattatagattaaagacgggatctttgtctacttgaagcatgagttcttgaataggtatctttctttttttgagttttgagaaacattactgagctccgtggatattactaattattacctgtcttcttccatatctgcttattgccttgtttgaacattctgtatactgtggtcattactcacatttgtgttctcctacaatctgtgcagattattaccatatc

SEQ ID NO: 39404 - DNA, 590 bp, Arabidopsis lyrata
  Intron number 1 from transcript 901618 (locus 901618) deri ved from phytozome v7.0 (chr-ID scaffold_4; pos 17947148 t o 17947737 reverse strand)
gcgttatatcaacttctctcaaaaaacataattcaatgtttggttttagtagtttcaagaccatgataggagattatcattcaagcctaattgttccttttttttaaaactcaaacgcaaaagtatacgtggtttttacgtctaaaacaatcacagctctatagtttgatataaattgggataacacaatgttgagtctcttttatttgtggatggttcttggacgtttaacatatgttagaagacaaaagaattgtaacggttttctatatttgtcgtctgtggctttgccaatatcatgcattaaatttgagtacttaacatttagtgttctctatacaaactaattattggtaatgatgtaaaaaaaacaagatggtgagaccgaagatgacaccgatatataatattcttcaaaatagcgcttcttagagtactatttattttttcttcgaattctttcaattaattattttctatcagacatctctcttcctttattgacttaatctgatttaatttccatatcgttcatgtattttgcgtataaatagtccagtgatcgctcaaaacttattcaatctggggat

SEQ ID NO: 39405 - DNA, 488 bp, Arabidopsis lyrata
  Intron number 2 from transcript 472205 (locus 472205) deri ved from phytozome v7.0 (chr-ID scaffold_1; pos 8392200 to 8392687 reverse strand)
gtaattcttcaggtatgaagacgatgagttttttaattaattaacatcgagtaaatttagaaacttttattgagacgatctgattacataaaaaataaaaaaaattatttgacattgtattttggacaatgagaaagcaacaatattatttgattgtgaatagatgtccaccggcattttgctgctttttttttgctgtttgattttgattaatactttttttagtcactgttctttggtaaacctgacgacacaaaagttttaatcgattttcatgagcctatatacttatcaaattaagatttagtttttattcaatacgtgacagaaatttttttgatgtaaaaataaacaatggtcaattatgttgtgttttcaaagatttcgactataggatcaagaaccaaaacgttttatgagttttatagtagttatttgtgtttatgaaattagggttagagagtagtcacttaccgccggagataagt

SEQ ID NO: 39406 - DNA, 632 bp, Arabidopsis lyrata
  Intron number 1 from transcript 904392 (locus 904392) deri ved from phytozome v7.0 (chr-ID scaffold_3; pos 6123252 to 6123883)
cggttatcctcagccggatcggccctacgtcgccggtttgtttcattttctcatctctcattatatggacaaaatctgatatcatcagagtttggttttgtttggcttcatatttttgcttgatctattactgtatattgaagaccatttttgataattttggtttggatattttattactttttctctcattaattaaagatgctaaaactcgcattggattacgatttgattctttcgtgtgatcctttgtgctaatgtattcgaatatgatccagcaattagagagaatttcatgtctttttatagaaatcaagatgctagattcacttgagaacaaggagatgaataaatccttttttttttttttaattgaaatagaaaatgcagatggaaggttctcttttggcgtttacgtttacaattgacaaatgattttttttttttttgcttagtataaaaaagattgtggatgcatttggaaacagacattaaaatcccttaccttatctgtcaaaaatttgtagctaaactctagtatcttaaaaattgtcacacacaccacttggctgttctaaacctcgttatggtatctctagtttttcatcagctatagtcttttgtcacaggtt

SEQ ID NO: 39407 - DNA, 752 bp, Arabidopsis lyrata
  Intron number 1 from transcript 925072 (locus 925072) deri ved from phytozome v7.0 (chr-ID scaffold_2; pos 3534044 to 3534795 reverse strand)
aggtatattaataataattctgttccgattcatttgtctttttgaaatcaaagagaagaacccaaaataatctaatcttagggtttatgagatgctagattcatggttgatttgaacaattggggaatgatgaatttatatgtaaagaggtttggttttggttttaggttttttgtattatgtgaaactgctcttattactagggaagaacaaaaacagtaatctattttgtggtgattgatgcttcactggaacaattaggcaatgaagctttcagatgtagaaagtcttgattttggatttagtgttttggtggacgtaatctggtcggaattaggagcagtggagacgttgaaattcatgtggtgtttctctagttgattagaagttctaatgtatattccattgacgaattcttgtggttttaagctagtgcactttcatgtttgagtctttcatgttttggttgatgatgggtttgactagttagaagtgaacaaggggattcctaatttgggcaaaatcattgcctagaatctgctttggtctgaatatacttgcgttctcattgttagaacttggtcgaatggaagaagctgcagtagcttccaaaaaaggctatgagataaacaaagaagacgcctgggcacatcactgtgtgagtttctcaaacaattttacatgacattgagcatttgcatcatttattctcaagttccattgaacacttacttatttgttgtagttgtgtc

SEQ ID NO: 39408 - DNA, 228 bp, Arabidopsis lyrata
  Intron number 6 from transcript 492204 (locus 492204) deri ved from phytozome v7.0 (chr-ID scaffold_7; pos 6808289 to 6808516)
aagaagtggctattaagcttgtgagttcttctttctcagttttttcagtcatccctttttaataatttgatgatccatgtcgtagatgttgctaataagtctatatagtaacattgtcacaacatgttttgtttgatcaagtccactatgttcaaagctgaaattttgattctctttgtttttgttttcccaggaaagtgtgaagacaaaacatccgcagctgctcta

SEQ ID NO: 39409 - DNA, 656 bp, Arabidopsis lyrata
  Intron number 1 from transcript 317378 (locus 317378) deri ved from phytozome v7.0 (chr-ID scaffold_3; pos 1858388 to 1859043)
cgcactagagatcaacaactcgcagatctgaaacagtaatcatcctctctcgcgatcttcttttttacttactttgagttccaagcgttacagattcaagctccgaaacttgagtggctagtaaatttcttgaggttccatttgatgttagcttagtgattaaagtttggttattgctatatcaatctcaaaatgtcggaatgcaaagatggaattgatgatatatatatatatatatatatatatatgtatgtgaattcactagctttatggcctctttaagtgattagaaagcgacattgttctcagtttttgaatccatatctgtaaggtaatggtttaatgttactatgttgggatcaagatcctatgtatatctagtgagagcaaaggatctgattgctgcttagtgatttagctgtggattgtatttttatagaattgttttatcaatgtaggctctttgacgagatcctataatgttctgctaatttcttgattcttaatagtcactgactttgcataaccagttgttaaattatcatttcttattctgttttttataatctgaagatttgagctttctctgtgttggctttgtctgatttcacttccttggaaaatcaggtacaagggtatatcccattacgaaggag

SEQ ID NO: 39410 - DNA, 485 bp, Arabidopsis lyrata
  Intron number 1 from transcript 493066 (locus 493066) deri ved from phytozome v7.0 (chr-ID scaffold_7; pos 11076006 t o 11076490)
gtgttcacgttctccactgttgaggaattttggaggttaggtttttgattttttttccgactcaatatcttgtttgttcaattattctgcatctgggttttgtttagatttcgatttgttgaggaaagttatgttctttattggtggattagaagatttcattgaagtcattgtttttcatatgtttctgatgaattgctatgtttggtgtttgaattcgtagctaaagcttatgttagggtttatagtagatagctaagatcttttgttcacttgattgcttcagatgaactaaacattgaaccaaaagtttgtgagtaaaagagacgaactttgtgggtcaagatctttcttagtgattttctaggtatcaggatatatgtattgtgaagctcttcctcatgagattctttggtttgtgtattgttctttcgacttcttattttgaaagacgttttgctttgctttgcagtttgtacaataac

SEQ ID NO: 39411 - DNA, 844 bp, Arabidopsis lyrata
  Intron number 1 from transcript 945551 (locus 945551) deri ved from phytozome v7.0 (chr-ID scaffold_7; pos 7182452 to 7183295)
ctcgtctgttgttgcgtggcttttgatagagacattaagtagtatttagtaacgcgtttatgttgtaatttgataatgaaactaaacaaggtattccatattcacgtgcggtggtggggtaatcaaagatcaccatgtggaattgtctaatcaggtagtatttacttacaactaattaagtactccttatgatagtgaaaacggcacgcaactctttattgtatttagtaaacggaccgacgttttagaaactaccaggaagctgctgctgtctaattatcaagttggattaggtatttatttggtttgtcttttttcttacattagtcaacatttttctttattggatttattatgactgttggaagttttaaacacgtcttctcagtttccttcttatgaaataatctatcgaagtttctaatgtaacttttcctttcttatttatataccgaaaggcaaatcaataccaacttacaataagaaacgttaatttttattttttttggtatgaaataagaaacgttattacaagtaaggaaaaacttaatgaacgtaaattagtattacaaaagaggaaacacttatcgaattgtgttataaaaaggaaacttaattgccctacagaattccggaagaactaagaacattaatagacatcctctatatatttaaaactatagactcgttgatagagctcacacaaaatcttgaattgtctctcataacaagtagcgcgagaagtagaagaaattaaagaagatgatgaatgtgaacgaaacagaagcattaattaccatgcgagggaggctgtggactctacggaacccgaaagaacaacaat

SEQ ID NO: 39412 - DNA, 506 bp, Arabidopsis lyrata
  Intron number 1 from transcript 897212 (locus 897212) deri ved from phytozome v7.0 (chr-ID scaffold_5; pos 11068724 t o 11069229)
tggactggagatcgtaagtgaccttcagtatcttgacaacaaatctatattggtgatcggagctactggcttcttaggaaagagtactgatctatatctctctgtataattgtctttagatatattggcaataacgcttcttaaaattttgtaacgtccattaattagttttaattttttacaaggggtatttgctaacaaatcctttgaattaattatacgagagtcaatttcataaagaggatgaaagcaatatcagcattttattaatggttcttgacattgaagcagctggatcgacatgtgttcaaaaataaaataaaaacttttttgtttatcaagaagatatacactaaacttcaaataaatattgtttttttttttcttttgaaatttgtaataagtattgttagttgttcttaacttttatgttagctttcttttaacttgtatgcagtttttgtggagaagatactaaggttgcaccaaacttgaggaaactatat

SEQ ID NO: 39413 - DNA, 626 bp, Arabidopsis lyrata
  Intron number 2 from transcript 483869 (locus 483869) deri ved from phytozome v7.0 (chr-ID scaffold_4; pos 22849866 t o 22850491 reverse strand)
gggatttcgcaattcaacccgcgagctttgattaggtaatttcttagctattgataccatcgttcgattcatggctcgttactctcagattcagtgataaatcgtcgcgatctatgccccacattcgttaaaatggtgttatcgtctcgattttgagtttagtacctgcgttatagtgttgtcttgcataatcggagagcattggtatgaagtttgttgctagtgatatcagatctcgctagttattcatcgtttcaagcatctattatctgtttcttctcttgttctcgtcatattatccagatctagcaccgtcttatttttgggtatttctattgccagattttgaatcttctttgggtgtcattctgttttgatttttcaaattagaagacgaagaatcagagtgttgtttctctgggttctaaatttgacattcctattgattatcatccattatagctcaatataccctgcgttgtactgctttcgttatctgcctgcgtttgtgttgttacattcagaaataattgtgatctatatacgagtgactaggtgttcgttgatatttgcattcttttccccagcagatttgttaaccttgtggtgataaatttcaggaaaag

SEQ ID NO: 39414 - DNA, 462 bp, Arabidopsis lyrata
  Intron number 1 from transcript 345529 (locus 345529) deri ved from phytozome v7.0 (chr-ID scaffold_4; pos 18222333 t o 18222794)
gtcaagcaaacgaggtggtaagaacgtctccagtaagtgcttctaaagagtctcttaaacataaaaagaaatgattattttgttatgtaattaaattttaattttaaaaagaaaataaaccaatatgggagagacatgttgcttagaagggtttaattaagagtccctcttcatgctattatttaagagtccttcttattctctttcttttttttcaatattttgattgaatttttaattaaaattctgctaattaaggatcctccattggaggtggtataagatatatcgttttagaatcaagtcggtttccatttttaattgattgacatcgtaaaataataaacttatacccatgcaagtccacaattcagttctatctaatagtaatttcgtttattttttttttatttttttcatacgaaagcatctagttccaaggagccatcagaccattttatt

SEQ ID NO: 39415 - DNA, 914 bp, Arabidopsis lyrata
  Intron number 1 from transcript 494099 (locus 494099) deri ved from phytozome v7.0 (chr-ID scaffold_7; pos 23667140 t o 23668053 reverse strand)
ccgtcgaagctgctaaaaccctacctacgtctcacgtaagacattctcagaagttcatcttttagactttttctatgcatttctctgtttttccaaaacaaaactattcatatattttcatcaatatatgtttttattactgttttggtttaaaattactttaattagtcgatataggcatatatagccattattttaatagtgatcataaattttttgtggggtaacatatatatgataatcaatttgtgcaagtcggatctacgtatacaaacaaaccaccatagatatttataggtgtagaggcaaattgtgagaaatgaggtcaattgaccccaatggttatttgctatgttgacattgattttttgttccatttgacataaaactacctccaccagttcgtttcttctatatgtttgtagatatttttttctttaaaaattcgatcccactagatttttcttctagatctgtcactccaaaaacgtggagtaaccgaccaatgaaaaccatttatacgaataaatatataaaaactaaattagaaaagagactaacacgtgtttaataaaccttaaaaaaataacaaagaacaccaacttgtctgatttttatttcgataacgacttttttttgctttgttttataacgtcttgtctgaattttagttttgtaaattagtagtatgaaataataatcaaagccacgtcgattcctcgtcagagttaaaagttaacacgttaatcacgcaatgagaacatatttggaaatcagaattgtcaactacacgacaggaatattcttccgtatacaataattccggtttaaaccggttcaactgctaatcaaattttatttgtttttttgtctgaccagttaagctcagtggtgatcaaaatcacagcgatttg

SEQ ID NO: 39416 - DNA, 587 bp, Arabidopsis lyrata
  Intron number 2 from transcript 950176 (locus 950176) deri ved from phytozome v7.0 (chr-ID scaffold_8; pos 16953141 t o 16953727)
gaggcacaggtagcttcttcacctttcttttgttatttctagaaatataaacagatgattgatttgttcgatttttggatcaaattgctttgatatagtttacctgcttaagagcttgattttgttacttgtccatgcctaaaatacgtttctataagtaatcttgatgattaatctgataagaaacttgattctacagtttgctgctgctttgtctcagtttgtctgtctagagcttagagttacctatctatgcttaatatgtgaatgtataagtaatcttgatctgtcgcagctcaattatgaaaatggtttcagtagttgatgcatttggctatgattagaaatacgattcttgattttgctgctttgacttagtttgtgatgttagtttgtgatgttacttttttttttattacttatccatgcttaaaatatgttcttatgggtaattttgatctgtctcagttcaattctgagatagttttagtggttgaatgcatttggctaaccctctgataaattttgggtggatgttcgtccgtttcacagggaaaaccacatttgtaaagagacatcttactgga

SEQ ID NO: 39417 - DNA, 432 bp, Arabidopsis lyrata
  Intron number 1 from transcript 889514 (locus 889514) deri ved from phytozome v7.0 (chr-ID scaffold_7; pos 6678758 to 6679189)
accgctttacagtggctctctcaggtatatatatatgtatcatccactgattagttcaacatcttttgaattaagtttactgtattcacttatgttgattttgatgaatatatgaaggtgatgaataatatttgggtatataacatgatttgaagattctgtttaaaaaatactttactagactaatgaaactgtataaaacaaaattctaaattatcgtttcttctgatgttaatgaacaatacctcgaaaacaacaatttaaaagtccgattctgatactcgtttacatatgaccgaaccaacttagtttctgtacctgattttatttttgttgtatctatggatagaaaaatatttcatctttaggtaaaaagaaaaaaaaaagttcatttccttgtattggatatgatgatagatacccgaaaaagtg

SEQ ID NO: 39418 - DNA, 367 bp, Arabidopsis lyrata
  Intron number 3 from transcript 492612 (locus 492612) deri ved from phytozome v7.0 (chr-ID scaffold_7; pos 8579714 to 8580080)
taagatccgtgtcgttccagattttcccaagaaaggtaactttttcttcttccttccttattttggagttgttatgctctgtttcatcgcatggaaaatgttgtttggctgaaaaacgtgaaaatgcaggtttcttagtctgaattttctaatatatattgttgccgacagaaatttgatttagacgttttttttttaaaagttttcttggtcttaaatatgttttgttttggtttgctatgaagttgtaatttgacaattcttatattttcctgagaaaaaaaacaagaattgttacatagagaaaaaaaatatgtgtaagaacgaatagagagggtaataatatgaggaaaaaaatgcaggaata

SEQ ID NO: 39419 - DNA, 1036 bp, Arabidopsis lyrata
  Intron number 1 from transcript 919355 (locus 919355) deri ved from phytozome v7.0 (chr-ID scaffold_1; pos 2317046 to 2318081 reverse strand)
aaagcccagatttgggatactgctggtcaagagaggtccgattctcttgttttcaaattcttaggataaggttttttaaaaatcatcctttttggattcgctgtagaaccatggtgtttgatttatgtatctgagaatctgtagcctactgatctggatattttaatattggttttgagtgatttggtgctataaagatcaagacttggtttgagcacacaagtcaaaagtttgttgttcatttttccttgttggttttactagtagcacaagtagggtggttttctgtgttttcgattttcagaacgaaacttgttgtgcctgaatttgtaagtctctttgacggagcaactagtagtcttaatatggttcagagtctcaaattgtgctgaatatggctcaaagtctgcagtttactgaggatctacttaggatctaatcacatttgggctactaatggttttcttttgtggcatagcttttgtgcttataagattcttgtgcatagatctctatccctcatatatgggtctgcttgattagctcatgcaatcctctcctgtctaggtccattcccatagtaaaactactacatgtctcaagtatcaacggttatctaacctctgttactgtactagttttttgcttttccacccggttcacacatagatgagctcgtgtgtgatggacttctaaacccaatatacttggtcaaaacaacaattctttcatctcctctgtcttggcttgcactagacatagatacattttgaattttgcagcagagttcttcatgaactatatgtgattgttactttataaagcaaccatttggtagataccatgaaatacctctgaaacatttgttatatgagcaatatgcttatcgtagatagtctaactttgtgataatgttactgaacttattactgtagttgttattgtacatatctctgttaacagcatctgagattattttggttttgtttatgctttgatagataccgagcaatcacaagcgcttactacagaggag

SEQ ID NO: 39420 - DNA, 799 bp, Arabidopsis lyrata
  Intron number 3 from transcript 490079 (locus 490079) deri ved from phytozome v7.0 (chr-ID scaffold_6; pos 22306132 t o 22306930)
agaagaacgcgatcttgttcacctatcctcttgaggtttgttccctgactattgaaagaatatgtttccttgagaagtcatctttgatagcttgtgtgcttttcgctacattcttgttttgtttgtaatgcaccgaatgtaggttatgtgttttcggtgcataactagagttatatcttattttctttctgatttttgtaagaattagaaatgtgtttttgctagcttcacatgtgttctagtagtgtttgcattatcttaagtgatcttgttgtttaccatttgagctatagagggagctagctacatttctctttctctccacccaccctaaatctaactttttctctatgtattatttgattcgttgaagtcttgataattcgggctgtggaagttcttgtatcttttggtgtttgtgattagttctgtcttgtttcttgagacatagttgttcaagatgatttaggaatgtgtagtttactcctctcgttaattctgtacaagaggatgagatttttgtcctaaacaattgatttgtgctcattggtgaggtcacaaataggaaacaaaagatcttcagttgttttgctaaaaagccagttcaattgtgatgaaaagttgggtaccagattattcactttctaatgtactttggggttatacatgcacatttttcatatgttttgctacggtcaggacatgtctatttggttgtttagctcttcatttgctgacttgaaattcggatggttgatatgcagggatcattcaccagcactggtttggtggtatcttc

SEQ ID NO: 39421 - DNA, 308 bp, Arabidopsis lyrata
  Intron number 4 from transcript 487077 (locus 487077) deri ved from phytozome v7.0 (chr-ID scaffold_6; pos 831990 to 832297 reverse strand)
ccaaagagctagctggcttgaaggtcctctctctctcacatccatctgattcagtttccttctttttattcaaaagtttcttccttttattctttgtgagaactgctaagaaataaatgtcttttgatttctacctagtagtcgttggtataatgtgtaggatggtttctgcttattagtctggaaagggttacttaaactattaattttactgtctctttttatgtgaaaatgagaatctttgggcctttgcttatgttaaaatttctcttttttctgttcctgctcacagaacggggataactgga

SEQ ID NO: 39422 - DNA, 461 bp, Arabidopsis lyrata
  Intron number 1 from transcript 940493 (locus 940493) deri ved from phytozome v7.0 (chr-ID scaffold_6; pos 4080031 to 4080491 reverse strand)
agaagacgctgagcaactccacaaagcctttaaaggtctctctccctctctgtatcccttcattagtcgtttggttagaactggtctagcattcgtcttctctgattgaatcctctatcggtttggttgatatcatagcgtaatatattcgctgatctatagagtatatagatctagtttggttgatggtatggatttatttaatttggtttatattactcctatcatcaaaaataatctattagtacttagtagaccttcaaatcttaaagagattatctcctctaaccctagctgatatgttgacagtactattattatttatgaaactagatgaattttactattttctaatcaaatatctaatttttcaatctattaattaatattgaatgaataatttcaaacctgattctgactctatgtttctttaatttaattgtgaatttgtctaatgcagg

SEQ ID NO: 39423 - DNA, 906 bp, Arabidopsis lyrata
  Intron number 1 from transcript 337776 (locus 337776) deri ved from phytozome v7.0 (chr-ID scaffold_1; pos 31297064 t o 31297969)
tcacattgcacctccatttgctcaatttggtaaattaatatttttttccctctttatctttggagaaaagtttttaagtttctataaccttatattttgacagaattatctctgaaattttttctttaactaacaataatccttcattcttacaatatatgttaaatagatatcactttaattaatcactataggtaatgttcgtatctttttttttggttaagtttttggtgaatcattattgctaaaccgtacttgtgtttaatgaaaagttgctaaaagtaatataaggttattggttggtgagattagatcgtgcctcacagtatgcttatatagttttgttgacgtaatcttaacattgattatttttttgcatatttaaatatcacaaacattctctcgtccacataaaaccattaacattttacattttgtgccttaactgaaaatctttctttttaattctgctttgagaattatagatgtggatgacaaacaaaattttcaactacttcaaattgaagctgagtttttagattagattattgtagaacacttttgatttctatatattctcttccttgaaaacttttaataaatatttattataaccaatctaataaagtatgtcaatgtggatgtatatgtacaaattacaaatcttatcatcataattccatacccaattttagcttaaaaacattttttattattttataatagcttaaaaataattaggtagggatgaaaaagcttatcttcaacaaccttactacaaaacctactgattcaccaaatttcctctttcttctctatcttctaatacagttattcatcaaatgattccatattcattatctcacttgtaacttttgaactattactattgacaggccaagaggc

SEQ ID NO: 39424 - DNA, 339 bp, Arabidopsis lyrata
  Intron number 4 from transcript 890688 (locus 890688) deri ved from phytozome v7.0 (chr-ID scaffold_7; pos 12624706 t o 12625044 reverse strand)
atctctgtcaaagtggtgccgtggaactgagagaggtaaataatgtctatgctttagagtgacattatgacttttatgtagttagtgatggcctcgtttcttttgggtatttgtcaagaaagcaaaagtatcctcattctagctatatcctgttctacctatctcattgctaaaacgtttttccttaattattgacatgatgtatatggcttgacagtcttccatcctatatgtcattctatctcgaaagcatctgataatgaaatcaaagagtgttcaacctagtttttagtattctagttctgacttgctacttattttatcacatcttatggtcag

SEQ ID NO: 39425 - DNA, 792 bp, Arabidopsis lyrata
  Intron number 1 from transcript 900411 (locus 900411) deri ved from phytozome v7.0 (chr-ID scaffold_4; pos 11261781 t o 11262572 reverse strand)
ggtgagagccatatagtaagttgtgttcaatcaattcacctcttaatttttttttgtgtgtctaatttgagttgccttctgtatcagaatctaccattcctcctaggtttaccgcaatacctaggtcgatcgaataaagagcactacgataattctaactggttatacagcgagtgcgatattaatttactcatacttgtacacatgctataatcaacaaaatttcatcaccattcaattaacaaaaaacacaatccatggcgggtttactctgcacccacccgcacctgatctttgactggctttttttttttacaactgagtcggttttgaggttgtgtatagatctaacggctaacaaaatttcgagttatctactttacctgacgcggcatgatctcagccgtcccttataaagctctttgcagttaacattttcttcctctcctatactctcgtggtaaactcgtcagatttcgatttggaaccctaaacaatttcaaaagacttgaccgatccttttctcgaagaaactcgattcttgtggattcgatttcattgaggattttgaattgttgcctgtgatgggtggtttggctatggaggaaatgcctttatcggcgctattcgagcaagctaggaaaattcatctcgctgcttaagagtccggtgttgatcgggtgaaatttttgtattcgaattcgattagggtgtttatctgaaatggttatttcggatccgaatcgcaagtatttactaaactggatatttccgcgatttggttttgttagg

SEQ ID NO: 39426 - DNA, 350 bp, Arabidopsis lyrata
  Intron number 1 from transcript 494508 (locus 494508) deri ved from phytozome v7.0 (chr-ID scaffold_8; pos 2992150 to 2992499)
gattgcttctacgttcaaggtctctctctctctctctctctaacccgaattgtatacagtcattacacgctttagtgagagaaagcaaagctttttagctcttccgaatcaaatttaaactgttggaattctgggttttttcaatctctgctaaaaaaggtttctttgtttctcgttggcgtttgttttagggatttggggaattaccaaatttcgaacttgaattagaaaagtgtgattttgtttctattttgtcaaattgtctccttttcttacctgattatgggattttgtttatgattgaataattattagtggagcaaaggaagcaaccggagttgcgaggactt

SEQ ID NO: 39427 - DNA, 331 bp, Arabidopsis lyrata
  Intron number 4 from transcript 914258 (locus 914258) deri ved from phytozome v7.0 (chr-ID scaffold_1; pos 27027508 t o 27027838)
tgtttgctcttccacttgtcttaagtgcaagcaaggtaaattatacttctatgtttttttttttttgaaaattattgtatctgcattgcaataaaatcttttggcgccacttgttacataaaaaattaaatattaggacaaatcggttcgactgtggaacatcgtaactggggtgtgtgttttgatcttttctggaaccaaaggccatcatggtgaagtttatagtgcggtgtgtaattgtatatatatatatgtttaattatacttttttgcagttttaattttgtgtaaattaccaacggttttctttgcaatttaggacgttaatcct

SEQ ID NO: 39428 - DNA, 418 bp, Arabidopsis lyrata
  Intron number 1 from transcript 925173 (locus 925173) deri ved from phytozome v7.0 (chr-ID scaffold_2; pos 4253735 to 4254152 reverse strand)
gccaacttttctggaggtacataatctccttttttttcctatacgtattattattttttttttcttacggcgtatacatatatatgaatatagtaatacaagaatcgagttctttccaaaactagattgtacgaactataccaataacatacatatatatatatatgtattaatatagaaaccaaaatttcacaattcttttcttgatttgatacctaaatctttattcccggtttgggatttttgttatgttattatttataaaggtttaacataagctttatttgattaatataattaagcactaaccagggaaaataaaaatctactgacgtggacggttcttgttcttgacttttcttttcttaaaaatctggcggcagggcttagaggaagtgaaggcaataggaagaatctc

SEQ ID NO: 39429 - DNA, 1011 bp, Arabidopsis lyrata
  Intron number 1 from transcript 922725 (locus 922725) deri ved from phytozome v7.0 (chr-ID scaffold_1; pos 17430537 t o 17431547)
tgccacttatctagaggatatagttcaacttgttttttagtgggcgaatgatttctacttgtttttgctttctggaagaattatttctttttttactgttttgtttttcttcttgactggtaaaaagataatacatatgagaagatttttttttgttttttcatttcttttcttctaccaacatcatccaatcagatcctcagcgaagaagatggaggtgaggtttgagaaattattattttagtagtttagtgttaatggcattgatgtaaataagagataaatgctggacaacaaagtctcataaacagtaaaaactacccaaaacttaaaccacaattaaaaccacctattttgttagttgcaaactaaaaatctacccacccacttaaaattcccttaaaaatacttttttttttgtaagaattcatgaaagaagatctataataatatataaatgatagtacccaatttattaattattaatcgattgtgagctcaaaactcataaaatttaatatggtatgatagtttagtttgttgattcaaataaaatgatttaagtctggtttattgctagttctagagtttgattaagttcgacgtaaaagttattatctcggaaaaccatgttagaaatctcacttaaaaagtgtgatggatacgttttcacaaaaaaaaaaaaaagtgtgatggataataaagtataaataacataagctaatccactagtttaccaattgactttttttgagtttgaaagtaacgacctatagcaatacacagaggacattggttaataatcgattttgagttaaaaattcataaaacctaacaatgcattagagtttaattatatgccaacctaaaccgaattaaaattggtcatggttgaatcggtaactttttaatatattttattgtctctttcaagtattcacgcgtgacgactttttttctctcccttttgcgaaagtttcttcacaccgcagatctgcattgcctctccgg

SEQ ID NO: 39430 - DNA, 734 bp, Arabidopsis lyrata
  Intron number 1 from transcript 952037 (locus 952037) deri ved from phytozome v7.0 (chr-ID scaffold_315; pos 6086 to 6819)
gtacccacggctcaaaacattagttagacagagactgagatagacttatgtttggtggaaggaaaatggtacctacggcttcaaacattagtctttaaactgagactgattcgaacattgatcccttatgttacccacgacttgaaaatctctagacatggatcatgttcgatttggtctttcagtttttagacaaagaaacagttacccacggcttttaacaccataagtctttagacaaagacttgagattcgaaaaaacaatccttaagacaaaagattggattggcttatgttttggtggaaggaaaacggcttaaaacatcataagtctttagatagagacttgagattccattttttatatttgatgagattttgtttgttgttctacggattttctatcaatattgttttactaaatttgggttgcttggttggtgttttaggtttacggatcatgggatcctcaatcaaaaccatgttcggacggacgagttgatgaagaaacaaaaaaaaactgttaaggtattattagttgttgtgtttagtttttttttgggtttgttcttagttttgtaatttaatgatcagttgattacgtttcaagatagcatgctggtttcatagcaaaataagtaatagttttcttatagaaataattaatggttttacgttcagtggatttgagatgtcaagtccgagaagacaagcaaaggtctcaaatttgacat

SEQ ID NO: 39431 - DNA, 525 bp, Arabidopsis lyrata
  Intron number 4 from transcript 485471 (locus 485471) deri ved from phytozome v7.0 (chr-ID scaffold_5; pos 15550848 t o 15551372)
gccaccaggtcctaagctttgtcaggtataaatcttatgtgttcgttgtttttctaactttcaatcgtgaatccgaatttgattgatccatctttagcaaatctaaaacctcggttacaatcgttaagcaattttttggatcataaaagttggataaagaattcctcatcaaatctctcgattttgaagtttcaattaaactcaacgaattgatacgatcttgaatcggtgaattatttaatttcaatattcaatctaataataaatcaatggataattggaatgtgatgtgaaagaaaccaactttggtgaagaagcaagtcttgtttgtttctctgacggctctttgtatgttgaggctttaatttccctatctttgaagataacgttatatgaaatttatttgaattttacaaaatataatcaagttttggtattgatacacgaaaactcagctgtgttcagcttttaactatgcggatttgaacaggttaaggtttttcgaacagaggattgtccagccaa

SEQ ID NO: 39432 - DNA, 920 bp, Arabidopsis lyrata
  Intron number 1 from transcript 347509 (locus 347509) deri ved from phytozome v7.0 (chr-ID scaffold_5; pos 10826141 t o 10827060)
gtcgccggagtaattacaccgccgttcctattcctctcgtggggtttctgtaattaatatattcttcttctcgtatggttcttttgttttttgttcattcttgttctatgactattaattaccttcttgccacggacatatggaaagaacaagatgtggtttgtgtataaaccaaaaagatcatgaagagtttacgtaacccgtgaatatataaaagtttagacgttcccgatcttgtatatattgttttcaatgtatataatatgtttactcataagataagatctataaagaaaaattgctgttaaattttacgtgggaatcttcctatgatatcaatgtgttcacactatcaaggtagatcccggccggccctgttatatatgaggtccaatacagatatttttttttaatgaattttgtagacaaatataaaaatagaccaaatcttaaattttcagaaaaattgggcctatttttgtaataaaaaatagataaaatttaaaatttaagactaaatcttaatgttttgaataatgaagcctctttttgcaataaaaaactattcttgaggcctaattttagtattaaaattctttaaaaatttagagacccagtccatttgtatcttgggtattggtggcgggccgggcctagatagatctgatcttgaagaagacagaagttagtatatttgggtcatagtcgaattattgtcttatccatattttttaattccactagacaaatagaaaaattattgtcttatccatgtttgagatttaagattaggtttgttttttgggtggtctccactgactccacatcaattaacgtgtcggatactttgttatctctttttggaatctttgtttgtttttttagttcttgacgaatcgtggcctatcatctttgatcca

SEQ ID NO: 39433 - DNA, 629 bp, Arabidopsis lyrata
  Intron number 3 from transcript 481476 (locus 481476) deri ved from phytozome v7.0 (chr-ID scaffold_4; pos 6070932 to 6071560)
gagacagagtaagccttttttatcagttactttctttctcaattcacatgtaattgagctaatattgatgcatataagtgtgtaacatacggtggattcactttattttattttatttggtaaatgcttttaaggacccttaagatgaatgttaactattaagaccctctctttgatgattttgtggtagaagtataaaagtgaagagtttttaaagctgccactcctctgaactggttagggtgattaatgggtttgaggactcaagttatttactgatactaaatatcaagtagagctgtttcgttagtgtttagtaagttaggtgtttgtttggacggtggttctataggagaaacggaattatggccgagtcttgaccggatcttgtgtaaggagtgtgaggggctctgtcttcaactgcctcagcccttagttatattttttcttaccaatataatctaagttccttcctggttctattattaggtcatatcataacgttgacattagtgctttgtgaaatttgagtgtgagctcactatgctaatgatattactgtactttatatgataaaaatttcttgtacttcatcagtttttcaaagaccgccactacttggacaagga

SEQ ID NO: 39434 - DNA, 522 bp, Arabidopsis lyrata
  Intron number 1 from transcript 472714 (locus 472714) deri ved from phytozome v7.0 (chr-ID scaffold_1; pos 11044324 t o 11044845 reverse strand)
atttttcccaccgacaacaatctctcggagtttggggactattacttctcatcaaccaattggatctcccagattccttctaatctctgtatgttccttctttccgacaaatctatcttatgttttgccagatcgggcttactttttaaaaattctgttttgtttctcagtctgttaataactaatatcgtactagtttaagactagtgttttgttgtagcttgtttattagatctctttcgttaatcttacggaagatttgattttttgcttctctttgaagacaagcaccaaaaagtttatatctttatgaatgtatgtctctgttctagttttaataatataacagatttgagattctctttgtctttttagtataattgtcttgtttttgatctgttgttgttatgtctctatctacttattcaaatctaaagcttcagtcttttttttttttttactcttgatctgatttggagctgatctgtgtttttcttgtatgactttttgtttagatcaata

SEQ ID NO: 39435 - DNA, 463 bp, Arabidopsis lyrata
  Intron number 1 from transcript 481300 (locus 481300) deri ved from phytozome v7.0 (chr-ID scaffold_4; pos 2848837 to 2849299)
gactccgagaagaagaagattgtgatcgagcattggtaaacgaaatgtcttccttatttttggtttatttggagaaatttggggggtaaatgtagtagcgagtatttagggattttgttctccgatattgaagctaatcttttggtttttgtctctgtttcgttggaaatttcgtgtttctaggtttttctttcttgttagggtttcgttcgtgaatctgcacacattcttttgttaatctttggtttattacacaatgtgtcattcgcctttatgattgattcaattcttgttctgaagaggaattggttttgtggtttctcttctttgcttaagttaaaatgcgatcgattatcgtctttgattatggttcttagtgtgtcttgattgtgattggtgatgttaaagtaaagaaaacttgatgttatgtctgatgtttgttgttgttttcttgaagcaaaca

SEQ ID NO: 39436 - DNA, 751 bp, Arabidopsis lyrata
  Intron number 1 from transcript 342754 (locus 342754) deri ved from phytozome v7.0 (chr-ID scaffold_3; pos 13144689 t o 13145439)
ggtttacaagagatcgttcaaaaccgtcgggacatgtacgtaactggatgaaacatgcatcataactaaggtttttttgtttgttttgaattttataaactaaaggtatgagttaataatttgctgttagattaatatacagaaaaatattgtaattaaagataagttcatttgatatctatgtatgttgtttcaaagttttaaataataatataccatatatctttattttataccaatttttctttctaagagacttgtctaactctatttggttttctagtaaaaacaaattttcttttgcaaatccttaaacactttttatcttatgttccactaaaatctatactatataaaagtcgaggctataagcttatgaggccgtccacgtaggattttaaacgaccaatcgcggttgcacatctcgctaattaacatttttagtcatcacattatttaacatttttaaattataagatattatatattaagatatttatgaaaaggaaaaaaaacaatatatatatatatatatatgtaaagaagagaaaaatgtcaaatatttgaaaaacaacatatagaaatatttgggtttaaataaaaagaaaaaatttaataatgaaaaggaaaaattctacttaacaaaaaaaaagagttagaatttagaatggaacacaaaaatattgtactttatattcttgcaaaaaaaaacaaaaaaaaaagctcaaagaagaggatctaggtttagagg

SEQ ID NO: 39437 - DNA, 683 bp, Arabidopsis lyrata
  Intron number 1 from transcript 927786 (locus 927786) deri ved from phytozome v7.0 (chr-ID scaffold_3; pos 808784 to 809466)
gcttccaagataaagtaagcgtcttcttccttattgagattcagtctccgatccctttttatgtcggtgggaatatttcgtcgattcaaattccgatctgggtttatctttttctcttgaggtttctttcttcattgttagagattgtctatgatgatgtgggtagatctgactagtttagggtttaatctcctgatttttagggattctatttatagcagcacattttctgattcttcccatttgtgtgatcgaattttttaatcttattaaggtgccgcttcacttatttaaaagaaacaataattccatggcagagttcgtagttgttgctgttgttgtctgtctttatcttgatttttatatgtcttctcttctactttccaattttgttaatctaagtctttattgattcggctgttgtatttaacatgagatacttcactagagtgagacacaaattgtagataaacaaaactagaaagttttttttttttttttgtaaaatctatgttatagagactgttgttactcattagctactcttatgttctgtgtatggagaggttttttgtaatgattttggcaagtgtaattagttctcacgtgtttttcttttgattgcttgatgagagacctttgttgcagaactggtttatctgaaaccactttgggaaaatcat

SEQ ID NO: 39438 - DNA, 670 bp, Arabidopsis lyrata
  Intron number 2 from transcript 493056 (locus 493056) deri ved from phytozome v7.0 (chr-ID scaffold_7; pos 11050452 t o 11051121 reverse strand)
ttctgtattcgtgggagaggacaaattattgaagtaagtttcttttttcttcctgctaaagtttcgattttttttggttctaaatattttttaaaaagtttcgatttttaaactcattgatatgatactttgtgttcctttgcctctcgcggcaatgggtttgtgttagtgatcgtgctaaaaaaaactaaagggtgaagtagaagaaagttggttccttttttaatctaaaacatttatatgatcacactttagcttcttctatattgaaattagggttcttgttctgttttcttagttttcctctgcttttaattgattgtgatcgtttctgttcaatttctctgaactagctgcagctgcaccgaatcttatataggtcttggtggtaactgtctctgttgatgatgatgatttatcccaatttgattttgattagggtttagggtttatagagattgaatcattagggatttgttttgaaaatcattagttattattgctagttgaatttgtcatcctctgtttgtgaaaattgtatccaacttggttaagaaaattatatttctctgtttcgattgaatcctcttttaatcatttgcctccatcagggtttaaaagaatcccccttttcgtcgttgttgcgaagaagcggagttaatcgaagtgc

SEQ ID NO: 39439 - DNA, 773 bp, Arabidopsis lyrata
  Intron number 1 from transcript 485637 (locus 485637) deri ved from phytozome v7.0 (chr-ID scaffold_5; pos 16199516 t o 16200288)
tctcaaaattagggttttcttccggcagctctctctctctctctcgcctttaaggtacctttctctctctctttcttcatctcattgcgcctctcttcttatcctttcgtgaatctttttttggttggggtccaaaattgggatttgaaactcttcttatcttaaattgaatcttgctctcatttttgttccaatgattgctaagtagcttaaacgccttttgattgatatttctctgagttttagctatgtacatgggtattgggtggttgttcttaattggtatcattgtggtcaatttcgtgtaaaaatgtctgaaataatcaaattaacaggttagattggcagcataaaaaatttcacttgcaattctgaacaatgtctcttgtgggatggagctggagttttctaagcagagatactattttctctttagctcttcttttttcttgctaatcactaccaagtcctatgatatcatggtttttttccgctctcaggggtcattcgtttcttaatttttgtttcacctgttgagcatttcatcgccctcttctttgtttgtcacctttttctttgttaactactttggaattccttttttagccgcattatggcaacgcgtcaattcgaacttctttttcttcttttctattggcctcttattgtttcttttccaacctttcctcggttcttttctctctccccacttgcttcttgcttctgtgtctcctccacagttgtcttgcaagcgttcttttctagatacttaa

SEQ ID NO: 39440 - DNA, 890 bp, Arabidopsis lyrata
  Intron number 1 from transcript 906735 (locus 906735) deri ved from phytozome v7.0 (chr-ID scaffold_3; pos 23034658 t o 23035547 reverse strand)
ggtgctgcgtgcgagcaatcgaggaactgagcaaggtaaatgttggcggattcatgatttcggaggatgatgctggtctcttccacgaatttgtatctaccattaattatactttcgtagagtgaacttctctagagtgatccaatgatgttgatgaccacgccaaattcatcaacatttgagaagtaataagtgcgatgaattttgattgggtggcttagggggaattccaaaagctgaagtttgggcgaggggagtctcttgagtgacctattatatactatgtgtcaatgagacgtggataattgtaagtggtttttaagagtgatgtggcatcttgcaaaatctccgcttacgtggcttcctctaaaatgcttttgattgtgctgatgtggatatattgagaggcctcaatgaacaccttttattagtaagagatgttgccagaactaagagttgattcgtattattaacactgctcaagccgcatgtatgtaatttaatttagatcactttttagctttgttttgaattattttggaatatgagttctacataacgtgagtttattttgtaagtttcttttttttttcttatactgtggagtgtgatcaagctgcttttggagaagtgaattagttcaatatgattcatgtttcctatgatcacgatattcttcatcactccatctacaaacttataaaaaaaaacaattgtaagtacacgattagattgtttgtgtgtgtgcttgatttagtgtttgtacatatttgttttgtaagcaatattttttttaattaaaatttaaaacaagtactaaacccaaactttatatatatatatatatataagtattgatttgttaggattttccggtttaattgagagtc

SEQ ID NO: 39441 - DNA, 493 bp, Arabidopsis lyrata
  Intron number 2 from transcript 925832 (locus 925832) deri ved from phytozome v7.0 (chr-ID scaffold_2; pos 11455168 t o 11455660 reverse strand)
ataacaaggtttgatttatattatctcttcctctttatgaattttttgaaagtgttcttgatgattagtaagtgatgatcattatatgtttgtttgtaacaacacattttacatgaagcttaacaaatatttaggagacatgaatatttgttacatatttatggaataaagaagagatctttctttatttcgagaaagatgaaacttaagatattttaggaaaggggaaaaaaaaaaagagatctttgagagatttgtcagattgttgatagaaaaaaaaaaaaagatgaattggttaaactgatttagacaaaaccttttgaaaaaacaatacaggttaatggttgaatttataagaccttttgacttgacttgatgattcatgtttttggcaatctttggtttatgataaaagctgatgattttctgtgtatggggcaaggacacgggttgtgcagaagctgattgagactttgagaacaaaggagcaaat

SEQ ID NO: 39442 - DNA, 677 bp, Arabidopsis lyrata
  Intron number 1 from transcript 925832 (locus 925832) deri ved from phytozome v7.0 (chr-ID scaffold_2; pos 11455839 t o 11456515 reverse strand)
ataaaaaggtttgatttatataatctcttcctttttatgaattttttgaaagtgttcttgatgatgagtaagtgatgatcattatttgtttttttgtaacagttcattttacatgaagcttaacaaatatttaggagacatgaatcattgttacatatatactgaaaaaagaagagatctttctttatttcgagaaagatgaaacttagaccatctccaataggtttctctatttttgcttctaaaatagaggaactctataatagaggtgagttttactccaacccactttattctcatctctaaaatagagaactctattttttcctctataaatagaagcaaatatagcaatctctattttagaggcaaatatagaggtaggttggagcatatttgcctctaaaatagagattgctatatttgcctctatttataaaggcaaatatagagatatgtttgagatgcccttaagctattttaggaaaggggaaaaaaaaagagagatctttgagagatttgtcagattgttgatagaaaaaaatatgaattggttttactaatttagacaaaaccttttgaagaaacaattaaggttaatggttgaatttataagaccttttgtcttgacttgatgattcatgtttttggcaatctttggtttatgataaaagctg

SEQ ID NO: 39443 - DNA, 427 bp, Arabidopsis lyrata
  Intron number 1 from transcript 487437 (locus 487437) deri ved from phytozome v7.0 (chr-ID scaffold_6; pos 2358751 to 2359177 reverse strand)
ttcaatcgattcgtgttcctttgattgtcaaatagttcatataaattttgatttggggataaaattctcgaagagaaattggataataattggatttcatgaattgaacaaaaatctgtttgtatacaataaaattcaaaatatgtaaaatgaaaaaaattcgatttctgaattcttcaaaatctttttctttcgttcgtcaattattagtagtggtcaggtcaatctgaactctgaatcatgtagaaactccggtttggctgccaattccggtgaaccggcggataaaaacccggttattgagattgtggcttagagtagagcagtatcttctaacggagaaacataaacgaagttcttgtttgtggttgatcttttgactttgatgggttattattctgcagataaagaagtgaaaggatttggt

SEQ ID NO: 39444 - DNA, 332 bp, Arabidopsis lyrata
  Intron number 1 from transcript 482049 (locus 482049) deri ved from phytozome v7.0 (chr-ID scaffold_4; pos 14760911 t o 14761242)
aagacaaacatagagaagaactaattgtagcaaaggttcaaattttccagcttcgattacccattttatcttctatctctttatgtttaatttcaaactcaaaccctaaacccaaagttaatcttttggatcctaagaacattttcatggttgaaaaatctttcatcttttagagaatctaaaactgggtttcgtttctaagattataaaagagctaatttttctgaaagtaggttcaaatttctgtgttttcgtcttcttaaagatggttgaatgttagttacttttgatttgcaggtgttaaagaatcatctagactcgttgaaccatct

SEQ ID NO: 39445 - DNA, 905 bp, Arabidopsis lyrata
  Intron number 1 from transcript 489661 (locus 489661) deri ved from phytozome v7.0 (chr-ID scaffold_6; pos 14126346 t o 14127250 reverse strand)
agagtattggcaaaaccgtcaagagctttcaacaggtttgctaaatagaatttggttttgaaaaatgaaaatgattgagaaaaagttgggaaatttatgaaattctggagttttgttgtggtaagcatgttgattgttgttggaatttatgttaaaggtcaaaaggagaaatttcatgtttcaggtgcttagtttttccattagttctgtttagatttgtgaggaattgatatgtcactagagaaaaattggaaactgagtggtatatgtgactttgctatatcgagtaaagaataaaacattcatttgcttgtaaacagtaagtttcattggtaactttgctgtatattatgaaccaaaacatgttatgttaggtcaaaagcttgttgattcagagaagatggttgaaaaaaggagaaaatttattcaattctggagtgttttgtgccaaatcatgtgaatagcttgctgattgtagttggtatcgatgtaaaatgaatgtgtttttggggtttcaattgcttagttgttgtggatttgtgaggaactgaaaagaacactcacaaagattggagaactttgcttttatagtgtatgtagatcaagaatagaacatatcgttagcttgtaacagtaaggtcattcattgacgactttgctgtatagtgtagatcaagcatgttgttatgttaggttaatctggcaatgtagctgtgatttaattattggagtgatattagtttcttccttttttcgataaaccttcttgttattgttatggctctcatgggttgcctgtttgtggtatctgtgttccttttatcgttttacttgcattgatgaagccttgtgtggtttggtataatgcaggctgcaaaagagttcgagtctgagcttaagataga

SEQ ID NO: 39446 - DNA, 580 bp, Arabidopsis lyrata
  Intron number 1 from transcript 916552 (locus 916552) deri ved from phytozome v7.0 (chr-ID scaffold_8; pos 13341036 t o 13341615)
ctattggtccttctattagactcgacgctgagcctgtgagttcttttgaaagtttcttgcttctttgattgaatttttaattaggttttcttctatttgggaaatttgtttaatcaaccgttttattggtctgcttagtggtcaaacgatcatcaatgattatttagggttattttccagtttggtttaggctatgttgcatagatatgtttaatatcttgtcacttgttttatctgtactggagtctaattgtccatggttttatctcccttgtgttagtcctgattggtagaatttgttagggtatatatatgtgtcttagtttgctttcatatgaaaagttgtttcttgcacctattgaagaaaccttatgttgcagtagagccttcactgtgttaattactggggtttttgttttctcataagcttgttttgtctctagcattcctttgcaaattatcattatacatttaatgcaatctttttacattttatttacatcctagtcctaacaagtttcgctctacgttatcttgttttacagccacctgaaatcaaatcattcattgacaaagtaat

SEQ ID NO: 39447 - DNA, 980 bp, Arabidopsis lyrata
  Intron number 1 from transcript 933375 (locus 933375) deri ved from phytozome v7.0 (chr-ID scaffold_4; pos 13298161 t o 13299140)
gctaaggcagccttcttcacttgtttttccagtcatcttccttgttatgtttgctttaggtaataatacatttaatcttcagatttattcatataaaatattcaaactttttcatataagcctaataatttttgttcaaactacatattatatgggatatccccccaaatgctgtaaatcatcattatgttttccttaagtgtacaatatatgtaaacgtttgttcataaaatattcaaaattttcacaagaaaattgttaatttcggctttgttcatccacatatgttccaaaggttatatatatagatatctccttggtatgctttctttaggaatttatttatcttaaggttttttagaaaaagataatcctccaaagatatacatatatacattttcctcaaaaagttactttaatgtaggctatattcattggatatgccccaaacgttgtagtgaattgtgatgttagccttaggtatgtatacatttaccttcatggtttttttataccaatatcttaacatatgatctataataggtttcatcttcagctctattcattagcatatatcagaatgttgtagttcaatgtaatgatttcttctaagttctactaatattttgttatctaaatattactccctctgttcctagaagtttgatgttctaggaaaaaaaaaaaaaaaaaaaaaaaaagtttgatgttctagtgttttggatttgtttcacaaagattaattttctagatattttctttatttttaattaattgattttaataaatcgtagatttcaagacgtaatgattaactgttttagattactattggttcatagtttattaagaattgtttaataaaaataaataattaaacaatgattgtttcttaaaatatgtgaaatctctagaaaatcaatcttctaggaacagagggagtatatagaacgattttgttggttatagttgaacaaaat

SEQ ID NO: 39448 - DNA, 941 bp, Arabidopsis lyrata
  Intron number 1 from transcript 941655 (locus 941655) deri ved from phytozome v7.0 (chr-ID scaffold_6; pos 8919186 to 8920126)
tggtacgattgtttcacctagttggtttttcttgatttcaatcagttcgtttgtattggctttctttagttttctaaattgatgcatctttgatcatttctggtgaagaagaactacttttgattagggttttcagtactttgtattaggattaaccatgagcttgatctgactcgtcattccctcatctagcttctatggtagatatctgtttactagctgtgaggtaaaataaagaggagaaaatgtgaaaatgatcacatggattacaagatacatcatggtaatcttattagggtattaccagagagattttgctcagagttcagtttctctaatgatgaatcctcggcttacttggaagtgacaggctgacagccatagctgataggtgtaccaaaaacttgtgaactgctaaggagaaatgtaaattttgaactctgttattgctgcatgatttttcatattgatggtactaaccctgaatattggagaattcaggtagccatagtcagtgtagtaaacaatcctatgactgatgagtgatgtgggtacttggccccattccaaaacttgtttgtgagaagattattgtggcaataagaaagacgtaggtggtttaatgttcatgacgcagaaaaaaattgaatgggaaatctataattaccaaggtttataagctaactcagttgtcggagtgtgtccagacatagccttagcttaagtcttaattggaaaagttttcttgataaaagtgtgtggagaacttgtgtcttctattcttccattttactttaatcctttttgaaagagatatatttgatcttctctttacatttgtcttttgcttaagttgtgctaactcaagctcctgtaattctcttttcttctttgtggtttgattaggggatacaagcgtttcttcagacgttccattcttg

SEQ ID NO: 39449 - DNA, 630 bp, Arabidopsis lyrata
  Intron number 1 from transcript 345494 (locus 345494) deri ved from phytozome v7.0 (chr-ID scaffold_4; pos 18019170 t o 18019799)
acgattggcgtcaaggtctacctgatgcttctagtttagtttgattttttattttttttaaataatttatttctcgatttccttttttccacaaatttttttaagatatttctgtaaacaaattacgtcaattttgaaaaaattatgtccgttaaatttatttattcttatgtaattgattgcttcgtaactccgtaagcaactgtgagcgtgtctgtgtgcgatgtgaaatctgacgttgactcatagtaagctcatctaacggtgtataaagatctcatactaatcggacggttattaattaatccacgtcttctcgttaaaacgacagcgttttgatcttcaccaaccgatttttttttcaaaattaaaaaacaaaactttcgtcttcttcccggctttactcctctttctctctccaccgtcggctcagatctagatgaacatgttccggtgaaatcgtaattgtatgatcaaatcatgaaaagatctcacatttcttctcctcgttcttattctcgaccagcaatttcaatcttgggtgttttcctcttgtttattctgggtttaacactaacttctcgaaaaccatcagattcatcctccggtttagctccaaatcggaactta

SEQ ID NO: 39450 - DNA, 512 bp, Arabidopsis lyrata
  Intron number 1 from transcript 938748 (locus 938748) deri ved from phytozome v7.0 (chr-ID scaffold_5; pos 18513249 t o 18513760)
tcttcatatctggtctcgttgtcaatctctttcaggtttggtttctgatttccccaagcttctttttaggtttgtctgattcgtttctggtgttactcgttttatgttctacattgtagatcctttcttctttttacctctttcgtattgattcactgcttttagggtttccttctccagaagtttgattctttcgttttttgtcggtgattatgtcttaatttcgagtgtgtatgtgtgtgagagagatagagagagaacacatatgaataagctcaaaatcgacttgtggagctcatgcactgagctaaagagtgttgtttgaatctgcgattaagtatcactttgttctgatttatgttgattttacaacatttatatcccaaattttcttatttcaacagttttttaggttttgggttcgaggaaggaatctttatgtctatgtgtcaaagacccttttttctctcaactttgtttgcttaactacatattgtttcaggcagtttgct

SEQ ID NO: 39451 - DNA, 643 bp, Arabidopsis lyrata
  Intron number 2 from transcript 931216 (locus 931216) deri ved from phytozome v7.0 (chr-ID scaffold_3; pos 19496511 t o 19497153)
catttgtttcccggagcatcaaacctgtgtggtatgtttgatcaaatcctatatttggtgttaccgcgaactgatagtttgatagagaaattagtctcttgttgtttggaaaagaagttggaaatttatgtggaagatatctaactgttgcaaagattgctgcttatgggaacggaagcatttggttttgtttagttattgatttttatctttgtgcatttgtaaaggatgttgtagatatacggtgcccaagtaattatgtggtaatttatagaattgacactctaaacaactaaatacttctaaaagtataaactccatctctgattttgtcaatgtagctgtttagacatttattgatgttaatttcacactgctccatcataacagacctgagatcaatattagtggcaggaagttctatttcatggggcatatatatatattttttgtgtcctgattgtatgcacaagcagccatctgctctattttatgatctttctgcaattgttttccttcgttataagttgaacaatgtcagaatttctcgttttctttttaccacttcatggtagacatggtgcgacaatgatagaagtatgtttttatcatgttgtactcaataggtccggacttattcaga

SEQ ID NO: 39452 - DNA, 469 bp, Arabidopsis lyrata
  Intron number 1 from transcript 485287 (locus 485287) deri ved from phytozome v7.0 (chr-ID scaffold_5; pos 14394771 t o 14395239)
agagaagttttgattgaataataacacttccacaggttttcttccactctcattatctgaaatttcacttgaaaggtcgaaactttttttgtctactgggttctcattatcttctatataactcatcaatttgtttaggatttagctttgtggttttgaattgggttttgctacttctcctctctcgatattgcaagttaaaagctttattttttttagtgttcttgagggttttagggtacaatttgttttcctcaggactgggttttgcttgcttgttttatatgtgttttaatgagcttgtgattttcaagtgttcttggaaaatctagaatgaaacagctttgaagaagacttgaggtttatcttcattcttatttggtgatttcttattttcccacagtgacaaggatatagaatccgcttcctttctgtcgaaaagatagaagattacagtggctacactaca

SEQ ID NO: 39453 - DNA, 380 bp, Arabidopsis lyrata
  Intron number 1 from transcript 937728 (locus 937728) deri ved from phytozome v7.0 (chr-ID scaffold_5; pos 14439480 t o 14439859 reverse strand)
gcttcttcatctcctgcgtcttgttcttctgatcggttagtcttttagatctctctccattgttgaaattagattctaagatctctcgatcttttttattgactttgttagactttcgtctcctttagatcaatgtgattcataatcattgaagattagataactaatagagtttaagaaaccaaagcttcaatttttagcattagtgattatattattgacatttgtttggttattttgatcgattcgaatgaaatgttcagctgaatctgcacatttaaagcttcatggctatttctggatgttttgttttctattttggtccaagtaggcacactttaacctctgtttcattgttttaggcctcgtcttaaatcacc

SEQ ID NO: 39454 - DNA, 464 bp, Arabidopsis lyrata
  Intron number 2 from transcript 933236 (locus 933236) deri ved from phytozome v7.0 (chr-ID scaffold_4; pos 12206839 t o 12207302)
ctaagcttttaccgaagaatcgcattctctccgaagtaagttaaattagggtttttcctctaattctttcgtgtactgttattgaattgtaattttgatataattcttgaatcatcgaaggctatgagatttacatgtatgcgaatgtcagtttaggagaatcatcatgcctttctgggtttcattttccctgtgcaatgccaactttttttactgatcagatttttcatgatttgtaattttgtaggttattttatagtctcttgtgagagtctggatcatgttttttcttacaagattgtttgattgagatcataaacttgtttataaacgtttaattatgtaactgtcagcagtgatgaagatagtttagacattcttttgtgttatcagtcacttctcaatttcctgattttgaagttaacagttgtattgttgttttacaatctggttttgtagagtga

SEQ ID NO: 39455 - DNA, 323 bp, Arabidopsis lyrata
  Intron number 4 from transcript 477663 (locus 477663) deri ved from phytozome v7.0 (chr-ID scaffold_3; pos 1333294 to 1333616)
tggtactgcaagtgctttcattggatttaaccgtatgtctttaatctctcactcattgattgtttcttctttgaattgggagaagagagattgttttaatcacttatgtatgtaacctgttccaaggaaaggtcggggtggatatgatgctcgatttgtgtggtttatgctgaaactatcgagattctttttgtgggtgatatgtttttaaagtctggatagaggaaacaccagtttcaagtatggaacttgcttgaaaaacattcagaatctatatttttggatgttgtgttaatagtgtggttcttgatttttatgcagta

SEQ ID NO: 39456 - DNA, 940 bp, Arabidopsis lyrata
  Intron number 1 from transcript 915673 (locus 915673) deri ved from phytozome v7.0 (chr-ID scaffold_8; pos 2809318 to 2810257 reverse strand)
atattatccgcggttttctcaccggtatttcgagtgtgagacatatgatcatctctcagcctacttcggaggtatatttattttatatatatatatatatatatatatatatatatatatatataatatgtgaatatctaactgtgtaattctctatgaacagattttcacctctatccgtttcattcctcttgcaggtgctttatcattactcgaaactcgaaccgattcccagattccataacctatctcatttgcaggctgcattctctagctcctcgttacaactgctgccagcctttcttgagagctgcccaaatttgaaaaacctcatattggtaaaaatcttttttgaatatgtgatttggctaaagattgttgaaatttattgtaacatcagcttgtttatttcgcagaattattcggttacagaggagccagagaaaatcgactttacaaccgtgcctcggtgtttaatatcgacgttggagtatgttgggattaagaaactaaaaatgaaagttgaaactgggattaaactagtaaattactttcttgagaattcagcagtactcaagaaactcaatctgagttttacggattctcctatggccaacgaagagtcagagagctacaagaagcttcttacatctacaaagctttctcgcacatgtcaagttatcattaactgacacgcaactgatgatgctggtgagcatatgagtgtaagaattgcagtttatgtgcattttatagacatggtttattaggtttgctcatcttagtgctatttggattgatcttatattcttttaaggtcaagattataaaacttttcctgctttgattttatggtttgaaatgcttcagtttgtgatgttgtttaacgtttgaaaatactacagattttttccgttgggattgtgataactgataagga

SEQ ID NO: 39457 - DNA, 421 bp, Arabidopsis lyrata
  Intron number 1 from transcript 474507 (locus 474507) deri ved from phytozome v7.0 (chr-ID scaffold_1; pos 28757735 t o 28758155)
catcagacagtgagtttcttcttcttcactttttctccgcttttgattgattttaagcttattgggttgttcaaagtctcaatctttttcgtatatccttcaattttattctgttttcattctttaccccaaagtttcagtctttgggtaatggtttttctccaaatctcaaatctttttagtttttttggactaaatcttgaacctttcttcttctctgttagtttctaatcttgagaacaaagcattttttttatagaatcttgatgatctcatcaagtcatggatcctaacaagcttttgaagtggacttgaaagcagaaactgatttatggttaagtttgtgttgattggattgtgttttaatggtctctgttttcaaatttgtgcagcttcagcattgaacacattgttcagtggt

SEQ ID NO: 39458 - DNA, 744 bp, Arabidopsis lyrata
  Intron number 2 from transcript 478079 (locus 478079) deri ved from phytozome v7.0 (chr-ID scaffold_3; pos 3185622 to 3186365 reverse strand)
gcgtctcagcctgcaggttagttcaattgaaaatctttttctttgggattcagcttttagggtctcgatttattgaattatccttgtgcaattttggtcggttcgatgagaccagacccgtcgagctgtttgatatgaaagttgtgaaattgattaacttcgacctagaattggatttatttagggttgtaagctttggatttcgtttacccaaacctcaaggatttccctgtaacctgattttatcagatcataatacataccttcaatcattgtctgtagattgttgtagctcgttaaatagctttcaaattatgaaaagttcgaattttgatctttgtaccttctgattgatgatttgtgataagtattaactctttggattgctcttagctttgattggccttagcttttcttgactcgattagatgctttctttttgaattgaaatttgatgccttttcttattcagcattgtagttctagtcgatgtttcacacaactttgcaatgatgttactaatactgtttctaatcatctttacagtttcacagaactttgcaatgatgttactaatactgtttctaatcatcttcatcaagtgtcttttagtttctttgcctgtgctgattggagttcagtctttctttcagaatattatctatctttttactcaacatgtaacatcttcaaaaaaattttgctgtaggtggttgtcctcctaaaccttgggaacaagaagga

SEQ ID NO: 39459 - DNA, 955 bp, Arabidopsis lyrata
  Intron number 1 from transcript 475559 (locus 475559) deri ved from phytozome v7.0 (chr-ID scaffold_2; pos 8764208 to 8765162)
cctggagaaggagatacatcttgggttgacatatagtgcgacttgtcagatatatcgggctatatgggatttccccattttctccctcgatcgagatatcctctgtttcgctcaaaaagattgattgaattttcaaaaatttgtaacgcgaagcgcaaaaaataaagtggaattaaatgcagggagtatttaaattgatattagattatcaaaatttttttatggtttacgtgatcggactaataaaatgaagtatccaggctccgtttagcaaaaacccaattgataattaatatataatatttttataattactacttatatgatatgtaaaattatgataaaaattctataaaaaaaattgaaacagggcgatctaaaactgttgctcaaatcaaataatataattcaaaattttttgactatttgacagaagacatgtgaaagaaatgaattgaaaaaaaaaagaaggagtagtaaaaaaagacgcggtatttggttcatttgtcctatatgtgcaaatcaaaatcgggcaaatttttccttttactcggggtagagcataaacctaaaaaatggaataaaaaaaggaagaagcccgttcaggaacaagaaaaaaccatcgccatttcaactgaatctcgatgaaaaaaaaatatcaatgaatcaaatgagtctgacagggttaatcaatcgttttattagaggattataatatctaatacaaggtacaaggcaccaaaactaaaattttcttttacttttgggagcaagcccttccgttataagttagaaagaaaaaccctctatgaaaaaaggggaggttggaatcgacacattgattttttcacaatttttgttgaaccgtatgcaccaaaaggtgcctgtacggctcctaaggaataaaaatttatcctaatcaaccgactttatcgagaaagattattttttttag

SEQ ID NO: 39460 - DNA, 606 bp, Arabidopsis lyrata
  Intron number 2 from transcript 475559 (locus 475559) deri ved from phytozome v7.0 (chr-ID scaffold_2; pos 8765387 to 8765992)
gcaattaccaaacgtatagcattccctcacgcttggcgccaatgagttttttttttctcgaaaaaaatactatgccttcgccatcgtaaatatgaattagttaagtaataatagcatggcacttcgaattcaatatgaaattttttagattaaaaaaaaaattcgattatatattgaaagagtagtatgagataaggaagaggtttttcaaatgatatcttacctattcgggcacatttcagcgtcacaaactttgttttcacaccgtacaaaaaaaaaaaaaaaagacactttgggattgctgaatcatagacgaatcaaaaaaatgatatataaagcaacggaaccatcatagtatttttttaactcctacaaaaaaaagaaggatggtaattggatgatttctggatctgcgtataatacaacctatattttgttttctttcgccaaaaggaaaggtcaaaaaagtcaattccattgtggagccgtatgcaatgcacaaaaaaagcctgtacggttattcaattttatctgtttttttttgttttggttatcccgtctcattctgcgaaatagaaaaaccttttctattatatcatcagggta

SEQ ID NO: 39461 - DNA, 172 bp, Arabidopsis lyrata
  Intron number 1 from transcript 492127 (locus 492127) deri ved from phytozome v7.0 (chr-ID scaffold_7; pos 6512782 to 6512953)
aaccacttgttgcttattactgtgagtttcgttttcttatccattatgtaacctagatgatcgattgagagtattcatgatccctctgtgctagtttttgttcagtttgacttcgtttggtgggtttttttttgtaatcgcaatttttgtgattgatgattaggtcggctat

SEQ ID NO: 39462 - DNA, 707 bp, Arabidopsis lyrata
  Intron number 1 from transcript 951366 (locus 951366) deri ved from phytozome v7.0 (chr-ID scaffold_8; pos 21834942 t o 21835648)
aagaaacaagtaagcttttttcttcttcttttgggttcgtttgttaaaattttcctcttttatacacaaattagttgaaattgctcgattttgattgtgtacatagaattggttttgcagagtctaagagtctttgaaaaggttaacaaaattgggatttgtggtttcttgatggaaaaatgaaatcatcaccatggaaactaagattatctaatgtgaagttttagaagatgttaacaaactctataagcaatgttagtgttgttgttctacagattatagttaattctaaagtataacaatgacaacattgctatgttactgttttgtgatacctaatactgtttttggttggaggtggaatggaattagagatttgacattgaggtcaatccatccccttttatagattcttgcacacagcttcttatatgttcttatcataacgtggtttcagttagacatgaatgttgagctttgcgatatcgtttgtatagtattttagatgaaaatcacttgctttggtttactgattgctgggatttcaagtagacacgaatcttgagctctaagtggctaatgcaccaaattaactttagatgaaactaagttcaagtcgaaattgcttggtttttggcctatacctgtctctcatttctggtactaaagatgtgttcttttggttgtgggtgatttaggttgctcgg

SEQ ID NO: 39463 - DNA, 781 bp, Arabidopsis lyrata
  Intron number 2 from transcript 495353 (locus 495353) deri ved from phytozome v7.0 (chr-ID scaffold_8; pos 15332811 t o 15333591 reverse strand)
agtttccgtatttcttaaggtaacttcagaacaaaacaacaaaagctctgttctttgtgtttttttttcagatttatatagttttattatgacttgaggttaatcaaggattcaatgttctttaggaatttttcagatctatggatttttagataagagtctgattgattgacaaaagctaccaacttggcaagttggttatgaattttttacatcttccagctgtcaaaaagattgaatctttggaagaaagaaataacttggcaagttggttatgttttcactaaattttaaggatttgatttctctttggtggtaaaagaatcttagaatctatgagtatatttggattaagagaatgatagagatgtgaaattctatgaatgaaaagtttgctttttttcttcctaaaaaaaatgatggaaagtggggtaggttagttgcacaataagcatgtggatgatttggcaaagacagagagagagagagagagagaaatagaaagaatctcacatgtgattctactaatttagttaatccttttctgctacactgttttttggatactattgaatccagtctgtaatatattagattacttagtaaaccaaaaatatagcaagttctaatagtaatgtgaatgagattgaatacaactttgtcataaatcagtataattagtgaattatacattgtatatttttgatgttcttggtaataagatgaatacatttttgaaatggcagcaagagaactcgagtattattgacaagtgcagctt

SEQ ID NO: 39464 - DNA, 537 bp, Arabidopsis lyrata
  Intron number 3 from transcript 488082 (locus 488082) deri ved from phytozome v7.0 (chr-ID scaffold_6; pos 5019083 to 5019619 reverse strand)
gaaaaagtattgtttccatctctgggttttttgctccttttttcgtattggacaaagaaatcttttttttttttttcttttcttttgtgatgactcctttgtcctaaggttggaaaatctttgagattagaagaaatgaaacattaaggacaatatacaccaagttgcatatatttctgtctttatttctcttggattcatatgatgagaggtcttggtttcttctattaagagcttcttattattgcctagagatacattcatgatttttctccaggtgtgcatcaaaatcatgtccaataaataggcttaggatcaaatatgaactacgtttatttttgtttccaccttgtatatgtttattcatcagtgtaaaatgttataacaagcatgagaatatatgttcagccatggaacatgttttatatctataattctagaggtagagatcctggcaacttattatgtttctgagtctggttatttttgtttgacattgtagaggcagttgctgctggaaaaggtaagagttcgctc

SEQ ID NO: 39465 - DNA, 681 bp, Arabidopsis lyrata
  Intron number 2 from transcript 488925 (locus 488925) deri ved from phytozome v7.0 (chr-ID scaffold_6; pos 8551747 to 8552427)
ataccagtgtaaccccaagtttaaatgtaagcgtctttcaatttctcctctctcttttcttaaactcaattgggaacttactgctttagctaagatgatttcttttgaccttgctaacgtgtttttttttggggtctttgtcatgtgctattttatcaaccacttgtgaaattagggctaacatatataagcattatttatcttactgaagttgtattcagatgagtttttgttatctttgacactttgctgttagggatcttttataatttatttttgttaatttctcaactgatattacattgatatcaaattgtgcgaggtattgtatgatgcgacagtgcttttgtcttaccggcctgatttatattgcagctgatttaatactataaagaatgtgttaccaaagaaaacagtcatgcaattttcttctctgagattctggtaacataaatgtataacctaagacagatgtaatcttactgttccttacttttgagttgaatctttctcttgattccaagtaaataacacaatttgattccgtcctgctattcatactctcgttatttaatgcctgcttttgtgatttgctatgatggcatacatcattttctatctttaagtgatttgataaacttttcagaaaccggagtcagcatcaattgaagtgggaggtcc

SEQ ID NO: 39466 - DNA, 389 bp, Arabidopsis lyrata
  Intron number 2 from transcript 911453 (locus 911453) deri ved from phytozome v7.0 (chr-ID scaffold_1; pos 6911282 to 6911670 reverse strand)
gaaattttttttttttttttgtcttcttcttcctaatttggagccaatgaaaattttgtacccaaatcaaaatcagcgattcgattttagaaatatgaaaagcgaaatctaataggagacgagtcccccatgattataacaacgaaactcgtgggagaatttctgcaattagaagaaataaaagcaaagtcgacgaagaacagagaaccaaaatcttgattctggttcttaagaaaattatcgcaaattagaagaaatcagaggaaaaaaaattgaatcggaatcatgaatctgcaaaagcgatctactactcctaacaacaacaaaaaaaaacctaagaaaattcaaaatgacgaatagggggagaaaaaaccagagctttacattga

SEQ ID NO: 39467 - DNA, 481 bp, Arabidopsis lyrata
  Intron number 1 from transcript 911453 (locus 911453) deri ved from phytozome v7.0 (chr-ID scaffold_1; pos 6911625 to 6912105 reverse strand)
tggaaacctcccagtcaagaaatcttctgattcgggtactcaaaagattttgattgaaagaaacttgaattgattctcttaatccctaattttggtttaatgggaacttgttttgttgattggtgtgtgaaatttaagaatttatgaaataaatactaaatcgtttagaaaaaagaacacccgtacatatattttaccttatgtatcaaattcggcctaaccaatttgaattggattgatgcaggtgaagattaagaaagttgtagacagacaataaaactggttatcgagacctagactgagagggatcgatagtggaagactgagagggatcgatagtggaagaatcaaactaattgggatctatggtgttttagatttcgacttgcagagatgaagagagacgagagaaaagagacgataggaggaaagagagaaattttttttttttttttgtcttcttcttcctaatttggagcca

SEQ ID NO: 39468 - DNA, 873 bp, Arabidopsis lyrata
  Intron number 3 from transcript 492272 (locus 492272) deri ved from phytozome v7.0 (chr-ID scaffold_7; pos 7090226 to 7091098 reverse strand)
aggactagcgttgaagggattctactggtatgattattttcgatctgctctacttgttatccaactcttctgtagttttctctgtgttgtttaactgccagctgtcttaaaatcggtggaactgttttgtggttcatgacttgtatggccatattgtcatttacataatgcctcttatgtgtcactttatttgtactattatcttagcgttctctgtatatatatgagttctctacccaatgtatcatttaaacgtggcagatatatagaactgtgtgatattttgattgaagtcatctacttccttttctagttgccatctcccactcaattttgtactgattgggtaaccttatattacaaataagctctaatcgcataagtggattaatctgcccatatagtcacaagctttacggatccaatgaacttagcctgcacttaataagagtcataaaagtgaatttttagtaagtcatgttttgaagggtgccatttagcagacatatttgatgcatgttgttgttttgtttctttcattgtttgtatgcacccttgcccttacaagctttcatattttcccatggagtatcatgtgcttcacattcataccctcatctcttgacatcatgttgggaacatatattgttttgacatccttaaagtcaatttgataaaccttataacccacagctacagttatctcgtcggtgcataagttaagcaaataatttgcatttaagtctagcaattactaccacctaatttgatttgattttagtgatatctctctaaccctaagattcttcttgataccttatgctggttaacatatcaggtgcaagaacacaaccatcctcatatacttctgct

SEQ ID NO: 39469 - DNA, 318 bp, Arabidopsis lyrata
  Intron number 1 from transcript 474944 (locus 474944) deri ved from phytozome v7.0 (chr-ID scaffold_2; pos 452328 to 452645)
gaaaaaaatttgagagagatatcttacaaaacaaggtatatatttttcttgttaaatcttgaaaatacttcgaaagtctctgcttgtcttatcaacagagaaaaaacggtcgaaaatattaaatcaaaggcattttctgttagattctcgaataagttaggttaaactgaaaatataagagataaaacaacatattttggttgttatcattcaatttttattattgttgcgacttatatctatggtatagatcttgatctatatactaatactctgttttgtttttgtttttggaagatcaaaatggatagcaaacag

SEQ ID NO: 39470 - DNA, 491 bp, Arabidopsis lyrata
  Intron number 2 from transcript 950055 (locus 950055) deri ved from phytozome v7.0 (chr-ID scaffold_8; pos 16366243 t o 16366733)
tgcctccggagttccgagccgcagctccgattccggtgaacttccgatgattctctgttttgtaactgtttgcttcaaatttcaaattttgtggtttatctttggtttactatgccgaaaaccaaattaaccgcttaacatcgaaagtaaaccggatttacccagaaaccaacccgattagtaaaccgccttccttcttcttcttcctcctcctcactgtttaacgcagcctccgtttcttctcttcttctcctccctacacaattcctctcctttttttcattctcttttcttctttataatccttctgattcgctggtgatcggtacgagaaagttagaatcacgaagaagctgtgtttcgtttaatcggaatcaaaattgggtgtggagaagaaattgaacaaatccaaatcggattgctaaaattacttgtgatcccaaaaccgactgctgctcttggtactgcctcgagtgcggcgacgccaccgt

SEQ ID NO: 39471 - DNA, 839 bp, Arabidopsis lyrata
  Intron number 2 from transcript 897251 (locus 897251) deri ved from phytozome v7.0 (chr-ID scaffold_5; pos 11416037 t o 11416875 reverse strand)
ttgtagtcgcacagggaagaggcgattccagagaagaagaagaagaagaagcaaagggattcaaatccctaaattggaattggggatttgttaatttctggtgttttgttggaattgtatccttgattgaacttgcaaaagagaagaagaacccatgagaagaagaagatgaagaacagaggaagaagcatcggaagaagaagacgatgtcagagaaaagacatcgtgaagagaagagtcaaaggaagaaaggaaagtcatcaaaccaaatgggtttgtgttttgtgagttgggccattggtgatttgataaggcccatacgaataagtgttttgtggttgtttggttaaggtccaacaagaagagttgtaataactaaagtaaactaagtcctagttagagtctaaaagagagagtaaatcaaggaactagtgttccaatgtcaatgtgtagggtggctaccttgcttgtgtaagagagtctagaactaggagtaaggtccaagtgcaagtgtgtatgtgtatgtagaaagtagaagtaaagtagtataagtatgtgtgtgttgtatcttgtaagaattatccttgtaatccaattaatacaatgtagaagattaaagcaaaaacgtttcttgtgttcctctctaagcaagaacaagaacatagtgtgataaagagagagacataaataaagagtgaactaacctcaatgatgttagatgtaagaattacaacatgtttgaatgatttttactttgttaatacatgagcaaattaagtaatgtacttatgacgttgttttctgctttttcacttgtcgaccaataaaggtagtgcccg

SEQ ID NO: 39472 - DNA, 671 bp, Arabidopsis lyrata
  Intron number 2 from transcript 482600 (locus 482600) deri ved from phytozome v7.0 (chr-ID scaffold_4; pos 17191825 t o 17192495 reverse strand)
tggatcaacagattcccccaggtctccttcctcaggtttgatcttttgcctcttccattttaatttcgcccattagattttgaaatttccttctttttttttgttgtcactaacaaagaaaaacccatgtggaaaaatttctcaaaaaaccagagacgaagattccagttttgtagttcttgaattttgtccaaaatagagtcagaaaaacaaagacaaaaaagttccagaattggagcatctgatgtgaaatgatatgattactgttgttgaatttatagacaatgcatttaatgatggctttgaatctcacataatcatagctttagatttcttttctttaaacagaagaaccaatataaatcactctagagccattccctctcaaaccaaatcaatcctgcccctttttttgtggaatttgattggtttttaagtgagatagactgatagtaagtagaaacatgttacaggttcatgatttgcttatgttcggttttatgttgcaagaatatttctttgaggaattttaataagtgcccatgagtgagtttagtcttgcgcaactttcttgcccttgaagatttcattttagagacaggacaataatctctgtttgtgtgaatcttattacaggtgttctccagaagttgttattaggattctttgtc

SEQ ID NO: 39473 - DNA, 378 bp, Arabidopsis lyrata
  Intron number 1 from transcript 486421 (locus 486421) deri ved from phytozome v7.0 (chr-ID scaffold_5; pos 19379580 t o 19379957 reverse strand)
agaaagttgcaggcacataaccagatccgacagtaaaactttcgtcgtctctcagtttttatcattctgtcaagaagattattgaagcttattattatatgtttgattatatgttctcacgactaggatctgagtaaagtttgcatgattgagctgaaagtaatcattctcttatagtgggtttcttgtttggtttctaataatcaagtagataagagtcttgctcgtcactggtctattggtttaggtttcttcttgaaatgtttaagagtttttgttttgaatctcttgactttgttgagccattttggggtttatgaatatgtattgattgaaaatgggatgttgattttgataatctgcagccgaagcaaatcc

SEQ ID NO: 39474 - DNA, 334 bp, Arabidopsis lyrata
  Intron number 2 from transcript 945115 (locus 945115) deri ved from phytozome v7.0 (chr-ID scaffold_7; pos 5450344 to 5450677 reverse strand)
aagggagacacactcctccggatcgatcctctgaggtaacacttcttccacatctcagagattttgataatacacggaaaaagttaggaaataattgattgtttacatataaattagtaaacacatcatgaaaaagtgaaatctaaaacgtcatttaaaaagaacaggacaacaagtcttattttaattaaggtttggatctaaattcaatacgcaaccaggataagttttgctatgattttttttgattaatgactaattgatctttgttttgtttgttatctatatatgtgatgaagtgtaacagcttagagattggtgggtctactaataa

SEQ ID NO: 39475 - DNA, 567 bp, Arabidopsis lyrata
  Intron number 5 from transcript 924268 (locus 924268) deri ved from phytozome v7.0 (chr-ID scaffold_1; pos 31408719 t o 31409285)
gtccaacaggtaaaatccgatatacataaatggtactagagtcatgctcgaaaactccatttcttgcacttttgacatctaagaattctttaagtttttctgttttgtagtaaactagtggcagattcctaatgatcagcaaaatcagtttcatcattatcaatagtctactacaactaatcatctacaatgtaaagaaaatactcaaacctttctctctttctaagtattgagtttgttttgtttgatatctattgcattttacagcttctaggtcaagattgcagatagacaaaaaactcgatttccttcacttttgacttctaaagcttcctttgatttctctgtcttgtagtaaaccggttgccgattcctagtggttagcaaaatcatcttcatcaaaatcaatggtctacaccaaataatcatgcttgtaaagaaaaccctcaacctttctctcttaatctttaaattgtttataacacttctacttaagcatttttatgaataactctactttctttctccataggtaccaaccttggcgctcctaccgttccaccagca

SEQ ID NO: 39476 - DNA, 785 bp, Arabidopsis lyrata
  Intron number 1 from transcript 470498 (locus 470498) deri ved from phytozome v7.0 (chr-ID scaffold_1; pos 1749468 to 1750252 reverse strand)
gtgctctccctattccgctatcacgattcccaaaggtaaacagaattttgtttgaagcttgatctgtgtccatgattacaatcttgctagatctgtgggtaaagtttactcctttttgtagagtgatgtatgaatttagcaactttatatcaaaatttggcgttgtatctgtttgtggaaataaggattggtattagttggcttttgaagttttggttctttattttcttttttctggtgctgaagttactgaatttgcatgcttttgagcttggttcgtgctagtttgaatctgagatgattagtgtactaagtaagtgtagacctacatgaattgtgtttcattcgttttaggtgctgtccttcataaaaagattatctcagttatttgtccagagtgttgattctcctattgtttgagttaaacaatagcattagtggttcaggttatgatttgtaaatttctcggattgtggaagttgaagtttactggctactgttctggtcatagcaaatcaacaaacaatgcagtttgtttggagtgtatgcattgtttttgcttttagaccgatttgattcatagaatttgtaaatttgtttggagtgaaaccaaagaagactgtagtatcagttgaaattcatggtttgtattgcttgttgtgacagatttcttaagtgactatatgtttctcgctaagctgagtttatattctttttcgtatgttaccaaatctaaaagattgatctttatttacttgtttcctttcttcttgcagaactcagta

SEQ ID NO: 39477 - DNA, 357 bp, Arabidopsis lyrata
  Intron number 1 from transcript 890818 (locus 890818) deri ved from phytozome v7.0 (chr-ID scaffold_7; pos 13480914 t o 13481270 reverse strand)
ttgcgatctcaggcaagtttcttcttttttaggttttcgattttgacctttgttcaattgtttcattagattttatctcaattcgttccgattagggatacaaattaagaattggattatggtttcgagatctgaatcatggcttttgatttgtttagtgtagaatcaataaggattttgaatagatttatactttttttgtagattagtgatcttggattagtcatcaatcttatagccgaggttgatggaggagaaaggcttaaccttttctctgaattgtagataatctataagagattcacattgtagggattaatgtagtctgtgttgaacttgcagctctgcgtgagaagc

SEQ ID NO: 39478 - DNA, 621 bp, Arabidopsis lyrata
  Intron number 1 from transcript 487312 (locus 487312) deri ved from phytozome v7.0 (chr-ID scaffold_6; pos 1888781 to 1889401)
caacgccgttgattcgccatcgtcgctacaggtgagattttccttcgattgtctttgttttttcttcctttcttccatcaattcgttctctttccatctgggtttgttcttttagctcaagaaaattgattccagagtcagaatcgtttatagttttgagttatgatgattcctcaattgataagaaaaacttaaaattgtattagtttctacgattcatggttgttcgatttaggtttcttctacattctatagggtaacatttgtttcttatgcttgtttttgcatgcttcttattctctttacttatcctgagcttgttatattaggtaaacttgctctattatactagggtttctgtttctcttctggataatgaatgagcatatttgctcaagaacacaaattgaaattttgtctacaaagtcatcttctttagttctgtatctagtaaacgagtaaagtttgtgtcttttgatgtgattcagtatttgtactagcttagctatagctatgcataatgtatatcgaaaatacatatctagtctttcacagttattaatatttcctgttttattgctgcagcttgtcttgaggtttccgactttttggctaatctcc

SEQ ID NO: 39479 - DNA, 522 bp, Arabidopsis lyrata
  Intron number 8 from transcript 490525 (locus 490525) deri ved from phytozome v7.0 (chr-ID scaffold_6; pos 24834827 t o 24835348 reverse strand)
aagtttggaatttaaggaattcaggagaatctaatctaagaggtactttcctctgctgtctttttccagtagggaaatgtgtctgatttgctccataagtctgtatctctcaagctttgtgttcttcgttgtccttaattttgaccttattagttgaagaagtaagcttaattatatgattgtaaaaggagtttgcttttgagaactggtagaggatcctttacttcttacttcttgtcttaatttatttctcaagaattccattgcagtgtttaggaaggataattctttcttctctttttaagtacgcctaagcgtggaaaattttggtcttgttctcttgttgtttgtttctcaagggtctgagattgttgtccataagtagaatttaccggagttgtaatttctacatctgaaactcattattgtaccgttgtgtgtggcgtgtctcatagtttgctgcttaatagttttcttgttcttcttcagcatttctaaagggacaacgttagagaaggttag

SEQ ID NO: 39480 - DNA, 533 bp, Arabidopsis lyrata
  Intron number 2 from transcript 483789 (locus 483789) deri ved from phytozome v7.0 (chr-ID scaffold_4; pos 22498781 t o 22499313)
tctccctctctctatctttctcactccttaatctagaaactaaagctgatcgatcgtttcgtctgatcgggaacaaaacacttctctcatatctccggttccgacctccgttgactttttatcttctttctctctcctgacagattccaaaaaagttttcatctttacttcttcaatctcatagattccgatttgtgtctgattgttacctctttaaaactactgggttctttgattcttgattcttccttccttaaattttcgattcactagtttctcgggaaaaattactaagtagggttttgattatttcctccttcagtacgcgtcgattccggaaaaccgtttttttttaaaaaataaaatctgctaaaagttttgcagaaatctttctgataagaattttataaaactttccctttatggatgctctgaaacataaagagcttttataagtttatttctttcccttatatattctctgtctgcaaatctgtcagaatatcttcacttttttgttttgctaatttagg

SEQ ID NO: 39481 - DNA, 461 bp, Arabidopsis lyrata
  Intron number 1 from transcript 939577 (locus 939577) deri ved from phytozome v7.0 (chr-ID scaffold_6; pos 462269 to 462729 reverse strand)
gtattttcggatccattttccctcctccttctcaggtaattaaagcttcgatttttttctcttttctggtattcttttcgatttcgatcgcgattgttaaaaaattcgaattttgttggggataatagaattgggattttttaggaattagggttttcgaaatcagatgatgatgaatctgatttgattgatggttttcaatttcgtatttcagatttttgaattgttgtgagtttttgtttgttgcaaataatggattttttgaaaaaggagatttttaaattattgaagaccccacaagccccaaattaagaataagaacactgaagatgaaggagaatttcatgattcgtgtcttggaacacaagtttctctccattaagaagaatttgatactagtattcttcttgatttagaaatttctgggtttgttcttgtttcaggttctgggaagagaatct

SEQ ID NO: 39482 - DNA, 579 bp, Arabidopsis lyrata
  Intron number 2 from transcript 916282 (locus 916282) deri ved from phytozome v7.0 (chr-ID scaffold_8; pos 11280322 t o 11280900 reverse strand)
tttctcggcccactcgtaagaaaacagaaaaaaaatcccttctcttgtagatgcttcgtaggctggtgtaggaagctcttcttcagtgattgtaacccattctgaattatctgatttgaaggcttggattttacaacagtttggtgacctctgttccaaaattaatgaagatatgttgaagattttaggcgataagtatcaacattcaaagtcagggtatcctcattccgacaaatcaaaaagtcatgccatgaacaagaaggataaacttgtttcacggaaacgtcaacgagaagagctcacatctttatcttctggcaactcttcatccattttgaagcatggattatatggacagattcccatggtagggatgcaaaagttactctgaactttgtaggttttgatgatacgtgggatctttacgggcttgcaaaatatattgctcaggtataagttttcaggaaaaatgtttccggtttgatttattttatctaactagcaaaaaatgtagctcaccctgttatgtttcatttatttacagaagatacaagtagatatctctgcctctccaatcca

SEQ ID NO: 39483 - DNA, 739 bp, Arabidopsis lyrata
  Intron number 5 from transcript 492339 (locus 492339) deri ved from phytozome v7.0 (chr-ID scaffold_7; pos 7343901 to 7344639)
tgttgtacagccatctctagctaaaaccaaaacaggtgaaaaaccttttttttttttttttttgtttgtctgtgttaaatgttctttctttcttgtatattagaggttctcaaatatcaagcttcttcaatatttcattagtcttgtgttatttatcttgtcacctgtatggattttgatactcattctctggctcaactttacttccaatatatattatcatctattattagtcatacttatcttaatcgaggttggtaagatttcataagagtgttcatgcacatcagcaagttagtcggtgactaggatcagtacattctttttctttttagatgcatcaggtggttagtggttttgtctatatttggtttgtttgtcttgatagagagtataggatagtctagaattcattcctaggtttctggtgtgttctttgttctatattcagtgagaaattaaacaaaatcagctctaggcctagcaaaagcatgccatgaggaaagaaataccttaatccattatatattggtcgtcatctccttgtaaaccccactgaaaacttatgccaatctttgagatttgtctgcatgatagttttttcacaaacttgacaaagtcgtgaaaactgagtttgtgatttataagagacgatgttgatgaatgctaactaacagttgaatactggttttttgattaaacagagaagaaggttgataaagcaccaaaggcggtaatc

SEQ ID NO: 39484 - DNA, 533 bp, Arabidopsis lyrata
  Intron number 1 from transcript 321902 (locus 321902) deri ved from phytozome v7.0 (chr-ID scaffold_4; pos 20612765 t o 20613297)
ttttgtggctggagcttctgtgcttggctatagaggtaatgctttttcttcttcacttatggttcgttactgtatcgatggttaagtagtttcgaactgatatggttttggggaagaccatttgaagttgctggaactagcagtatgtagttcacttcacgtgttttaggagcttagtagttattgatggacaaacaacgatttcgagttgtagtaactaagagaattatgatgggaagaaattgattcttccttacctcaagttaatgttatttggtgcctactgtgtagcatatctatatgataccacaagtggatcaagactttggtattgactattgagtatgtacaagaaactcccaaattctcatatagtaaagatcgaaagtacatagctttgagagacatgatgctatagatttgtgcattcttttgatgctatacttcattgtaatttggtttattttggtgataatttgttttcctttcttgttacagcaaggagcatcccaacagcgatagctgcaggtgca

SEQ ID NO: 39485 - DNA, 612 bp, Arabidopsis lyrata
  Intron number 2 from transcript 489350 (locus 489350) deri ved from phytozome v7.0 (chr-ID scaffold_6; pos 11017078 t o 11017689 reverse strand)
cgggaaaagttatcatcgccggaaatttcagattttttctctcccgcctctgctttccttgtttcgctacggtaatttacgagaacgaacaaaaaaaacccataaatctttttttctattgttgattttgctcttgggttgaatttttcgttgattaataacgtaaattcgatgaaaagtttcttcctttggattgaatttttcgtgtggttcttctgatttcttgaatttgatttagagagagagtttatatcttttggttaagagttttgtgtacgtttttaaattcatggagaagcttgaattacggagaaactaagtcgtattaatggaaagtccgtgttaatcgaatgattcttcttttggatggttggtcttctctttagctttccttttttctctcttttggtttctttaacaatcactcagttttgctttttgaatcctcttgtgatgtttatatgttcttctcgtaagctttctctgatcttgtttatgttctaaaatttctaaagactgaatttttaatggtaaaagattctgctttgatgctaatctgaaattgaactttgtttctctattgcagacttgcagtgtataagggtgtgtgtt

SEQ ID NO: 39486 - DNA, 409 bp, Arabidopsis lyrata
  Intron number 1 from transcript 947820 (locus 947820) deri ved from phytozome v7.0 (chr-ID scaffold_7; pos 22905712 t o 22906120 reverse strand)
tgccggagattggccaacgacgtcgttctgataaggtatcacacatattatatgcaatattcacttataacgaccatttaacattatccatcgtgaaacctacccaaaaaggaaagaaaaaaagttttgtgaaaagaagagaagacattaaaatcaaaaaaaaaacaaaagaagtcggaacttttgactccggacattaaggaacataacaatattcacaacctttttctttcatatatatatacaaacatatttgcatagattttccatcaaaatcatcagcttgcatgcatctgcaaacgcataaaagtgcatgcattggttcaaaacacatatattataatgcttatgattctttttcgtttttttttttgttgaaggtatcagcgtcgaaagtattgcaagagac

SEQ ID NO: 39487 - DNA, 764 bp, Arabidopsis lyrata
  Intron number 1 from transcript 494156 (locus 494156) deri ved from phytozome v7.0 (chr-ID scaffold_7; pos 24281166 t o 24281929 reverse strand)
gggtaagtttttatctttatctttatctctgttttttgtataaagcttcggtttttttggagaaagttttggattttacattccaaatttgactaatttgggtcttttatgtatctctttgatattttgttaaattgaataaaagatttggttttggattggtcattaacgacggatgtgtctttaggtaagtggttaaatctatttaactctactttctctaccggagttggacttgagttgcgtagtaggaatttgctatggatagggtcttgtcgatgtaaaacaaaagaatgattggtcattaatgatgtttatattcctggtattgttacaacataatgacaaatgaaagtcagagattgatagccagaatttattcatatagtctccatctaagtttttttcttaatgttttgacatttctattgaaatagttttgacttttgtgatgcaagcattttcactacaactgttttagtcatacttcttctctgttgtataagaagaatttggactctgagaatgcgatttcgcatatcttcatgcatacttgcttaggcttcagtgtactcaatattaactaatttctacattgactagatctctgtgaagacttaaaattggtaacattgcttgtgtttgctacaagtaggaaaagcttctccacttaagttgttttcttgcagtcgttacggtttataatccaatgatgagtaggcgatagttctttaatccgttatttggtttttccttttacagat

SEQ ID NO: 39488 - DNA, 190 bp, Arabidopsis lyrata
  Intron number 1 from transcript 911870 (locus 911870) deri ved from phytozome v7.0 (chr-ID scaffold_1; pos 8690968 to 8691157 reverse strand)
aaccgagataattatgtaaacaggcaagtttaacattattcgtcgttttttttgttttaattttgtgctgaatacttttttgatgttttttcttttcttttctatgagtgattaatagggtcataagtggggcatcttggagtggaaatggccagattttgagtggtcggtgccaagataacggcgggtc

SEQ ID NO: 39489 - DNA, 471 bp, Arabidopsis lyrata
  Intron number 1 from transcript 493423 (locus 493423) deri ved from phytozome v7.0 (chr-ID scaffold_7; pos 13685225 t o 13685695)
tgtatgtctcttcctcttcctcactttttcctgaattgtttttctcatatttgatattggtggaattaaccatttaatccaaatcttgattccttattaattaaagttaaattcctctcgttgatgtatttaacttctttgaaacaaaagtataatctcattaaccaaaaaaaaaaaagaaaaaacaaacaaggataatctaaagactttgaatattatttaaatagaacaaaacttgactagattaacttgattctgtcgagattagggtttaactcccgccagaatttgaactagagatgtaactttttttgtgtgtgacagaattaaagtatctttatgagttgggttttgagtaaaagtgatcttctttaaagggtccttctcaaatttcgaattttgtatatggtatgacttatttagagttggttgatgcaattattgtggaaacaaaaaaaaaacagataatat

SEQ ID NO: 39490 - DNA, 356 bp, Arabidopsis lyrata
  Intron number 6 from transcript 472130 (locus 472130) deri ved from phytozome v7.0 (chr-ID scaffold_1; pos 8068758 to 8069113)
aggtgcgtccttttcttttgatgtgcttaatgttataatctgactacttgcttgttcattactacatatgatttgaataagactctttagaacctttgtttctacacatcatcatgtcttggcctaaccaaaaatgttttgagtctgacaattcttgaatactcgtataaaaatattcttgatagaaaacttcttccttccagaacccaagcgcttcactttctgacaccattctgtcatttgttttgataaggtggaagtttgccctaaatatttgtagataatcttaaaggttctggatggtgatttattaatatgttttgtgctctgtatcttcatcaccctatagatccaaa

SEQ ID NO: 39491 - DNA, 482 bp, Arabidopsis lyrata
  Intron number 1 from transcript 915316 (locus 915316) deri ved from phytozome v7.0 (chr-ID scaffold_8; pos 313028 to 313509 reverse strand)
cttgaaccacacgcttcacagaaacagaatccattgtaagaagagtatttacactacataccctaagaccacaaagtatttaagtcaaaggagtagtggcattttcgtaaataatttgtgtgtttggtttgtcatgaaaagaccagtatacccctatgcttgtagagtctagcagttgcacccagacataattgcgaaacgaaaccctcggcttatgtgtcgtttgatatttgttaaaagcgacagtttcgcttttgcatttattgatttcgttacttttctctctgttgaaatttgaaatctccgttcttctccctgttaaaaacatatatatcacgacaccaaagcatataatgggatggggaaaagatatcgtggtaagatatctcgtagctgtgatttcttgtcttgccataattacttttgcatttaatgctactcctgtagcaacttcgggcagagagaattgccaagctcgatac

SEQ ID NO: 39492 - DNA, 430 bp, Arabidopsis lyrata
  Intron number 2 from transcript 493944 (locus 493944) deri ved from phytozome v7.0 (chr-ID scaffold_7; pos 22238542 t o 22238971 reverse strand)
tttgaagaacgaaaagcaacaaactttgagagtaagaaaaagtaagttttttttctgtaattcttagagttatatatatatatatatcattttgattttgcatgattgcttcaatttgtgaatttgatccattgatttaattctgaattttctacgattagttcactgttatgtttagtgaatcatgactattttgttgactcataacgactctgatccaattctattgaatgctacaagaaaagttaaattaatttatagaaacttgaaaatttggggatttgttttcatgttttggtaagtaagaaatcgtctttattggctaaattagtttcttctaatagaaagttttgaaattgaacactcttacctgaaaaaggttgggtttttttcattgactcttgtctgtgttaaagaaaaagtagttata

SEQ ID NO: 39493 - DNA, 566 bp, Arabidopsis lyrata
  Intron number 2 from transcript 933429 (locus 933429) deri ved from phytozome v7.0 (chr-ID scaffold_4; pos 13620973 t o 13621538 reverse strand)
gagtatcgggtggaactctttaacaagtactgaattataagactcatttggtttatttttcgtaatgaaattcgattttctcgtataagattagagattgatgctcttactgttgattgctaatctgttcttggtttgaatttgttttgatcacattgtttggggtttctcttttatgttcaaatagtgatatatagctagaggagtataagtttgtgactgctgttatgccgaaaaccgttacactgcctatcttgaggatgaaatctataatctttttatgaggaattctcgatttaggtgcacatgtattccgctgttatgtagagattagactttgataacatatggtttgatggtgttctgttaattttcaatgtgattccttgggttagagattatgaagaaagtcacatctttatatgtgtttcctttcatcctgatatactttgtttgacatactaaattagtggtgattggtccattgtgattatgcagaatgtcgcatcttttttttgtgtatccttctgataggccttgttcttgtaatgcaggcttgctcaaac

SEQ ID NO: 39494 - DNA, 568 bp, Arabidopsis lyrata
  Intron number 1 from transcript 317999 (locus 317999) deri ved from phytozome v7.0 (chr-ID scaffold_3; pos 4922653 to 4923220)
tcagcttggctctcgtcgcttccgtcttctatcaggtatctatctactttcaattaataagtaagattcttaaatctagatctgtcatttactgttcaaatcctgagtgtcggaattgtacttgtgaataaacaccgagcaacttagccttatgttctaaataattaaacccgatgatgcacagctttttcaggagaaaaaaaaaacaattttcccttgtgttcataggttttgtactaaatcctcccacgattgacaagttttgggtccagaaaggtttcattgttcatccttatgcttctaactcaaagttgttcttagttcagatttggattgtcaaatagtgtaaagctgttgattaattgcgagttaattagtcattagttttgttagtttgtgccgattttgtagtaccgagttgattgcggtgataggtagaagaagttattgaatgaagttagatactacttccaataatcgttgagatcccttttttggctcattttttctttcgatgttgtgtgattttgtaggttatctgcttaacggatttagaagctgattactt

SEQ ID NO: 39495 - DNA, 380 bp, Arabidopsis lyrata
  Intron number 2 from transcript 901700 (locus 901700) deri ved from phytozome v7.0 (chr-ID scaffold_4; pos 18344299 t o 18344678 reverse strand)
agtaagaaagctgacaatgatttcataggagaatttggtccggctaagatagagttgttttgtgggttattttgctatccattttttgtgtgtgtgtgtgtgtgtgtttgaatcgttattgaagtactgtttcggctgaagaacaaaaaaaattgagatagctatacgcactttaattgcaactgatttgatattttctctttataggtgccttgacattagatctagattcaaaaccaattgttcaaatatttataagctttacattaatcatgtgaaatttgaaaatgcataaaagaatttgaaatagttttcactcatcacaaaagtttaaagttgcattatagttgagttggaatatccgtataaacaaatgttag

SEQ ID NO: 39496 - DNA, 376 bp, Arabidopsis lyrata
  Intron number 3 from transcript 496615 (locus 496615) deri ved from phytozome v7.0 (chr-ID scaffold_8; pos 21326773 t o 21327148 reverse strand)
aggtgagttgagtcactatgatatgtgtgtgtatctttttttctggtttggtgatttttttgtatgatctcatagagactatggatatagagctttctttgttgttcttgtcgtatgttcccggggaatttagtgctgtgaaatttctcactgttagtaggttcaaaatctttttggattataggacaattcatgttttactatttgttatcgctaccacttggatgtgttctgtgtatcaggtttgggattgtttgttagtctactcggtttgatgtttccctagttttttttctttgacttggtaatgcggatttttattattagctgaagttgtttttcccttttttttttcagctaggcgattatatttcag

SEQ ID NO: 39497 - DNA, 569 bp, Arabidopsis lyrata
  Intron number 2 from transcript 496615 (locus 496615) deri ved from phytozome v7.0 (chr-ID scaffold_8; pos 21327238 t o 21327806 reverse strand)
tactgctagtggaagaatctgtctcacagtcacaggtgagcttatttagttgggactttagggttttgatcatttcattcgtttggtggaatctatttctattcaatttaatttgaatatttggttcttatcctcaatcattcaatagcagcagcagcagtagctgaggatttctcagatttgattttttttttttaagtctcattgaatgctttatttaactgggttttgagtttgttttagattgttatgatgatgataggttaaatcgattttgctagatattacgagcacaaaatggatgaatcctactatctgatgaagtgtttctactttgtttttgtgctacttgttatgagatttgaatttttggctgtagaatttgagtctactttttgaaatacatgaatagttggaagagtgggttaattttatgggtttttgattctgaataagaaaaatcaagttttcctagatgctgctgggttcgatatctctattattggaaccttctccagctgtttaatatcttatgtttcgtatccagaaccagaactagttttgcaata

SEQ ID NO: 39498 - DNA, 438 bp, Arabidopsis lyrata
  Intron number 1 from transcript 926990 (locus 926990) deri ved from phytozome v7.0 (chr-ID scaffold_2; pos 16971607 t o 16972044 reverse strand)
cgcgttgcctttctcctccatctccttcctttaccgtcagtactcttagttctctcttcgccttcaaattttgttctgagcttaaattgaatttgttctactgaaccagtagctaccacatgccattttataatctatcataattcctgtattgattaatttgaactattataatcgatcgacaagtacgtttaagaaaggtctggactttaaaatatgtttccttccttatctgttttatgattagtttcatgaaaatgtgaatggttcatttgagatttgtaggtatatttgttcctgtaatgaatctttcttcggttttcttggcttttagaatttgcagctaccatgacaatgcatatgtaatcattcttttttcaaatatttgttctagtaatcaatcttttttcggttttaatggcttatattgcagctacc

SEQ ID NO: 39499 - DNA, 514 bp, Arabidopsis lyrata
  Intron number 2 from transcript 492953 (locus 492953) deri ved from phytozome v7.0 (chr-ID scaffold_7; pos 10448675 t o 10449188)
ccttcgcttcttgcggccgctttcctctcaaacaggtcctacacataaacaattacatatagcatataatgatcgatcaagttttgtattttatgtgtgtttttgagtttcatgaaacaaactaaactacattaatagtgttttgtgtttgataggtttagtttagctatcgtttggttgtattgcaccagactttaggttattaaaatacgtagggttattaatgcgacgtttactatagtctatagatgagtgaagatacatattacctaataagaatatgtaaatctactttttatcagaattgttaaaataaattaaatttttgttattggtagtttccaaattaaactttttgaaagtgttatgtaattattgtatgcatatagtttttccacgtccattattttgttatataaacgtcacaatcttccaagattgggtccctaattaatgtgaactggtggataaatttattttatatttttctttgattttttgtaggttccggctt

SEQ ID NO: 39500 - DNA, 733 bp, Arabidopsis lyrata
  Intron number 2 from transcript 948717 (locus 948717) deri ved from phytozome v7.0 (chr-ID scaffold_8; pos 3644781 to 3645513 reverse strand)
gagtaccgttgcgactgtggcaccattttttcaaggtacactttttttttttcatcaaccacactaattaaattgaataaacttcatgtgaactatatatctccaaatacacatttatatatgtatatatgtgttgtcgtttgtattgatcatgttcgaaggctgtttagtagtagctttatagtgtctacatcttcttcgtttttgtcaataagtagtttgattaagttttatatgtatgttttgtcattttctatgtgtttgtttatcttcttgaagtagggtaaagtttcttgcttgggaaatgtttttgttagtgtgatgattgtggcaaaaagtggtacaaatttatagtaaccatgatgaacatatatatatatatatatatatatatatatatatatatatataaaataattgctaaatataataatatatacaaatacatggagttttatgtgtctatggttcaaaatggtaacacaatatgcggaaaaagtgtcaacacaagattgacaaatcaatagttcatgtgacggaattttgtacttggtttttctacttttacagtgcacataaagaaaaggcatctaaatgttttcatcaattataacttttgatatatatatatatatatatatatgcgttgagataagtcatgttgattaagacgttaatggtggttttggttgaaacaggcgagacagcttcatcactcatagagctttttgcg

SEQ ID NO: 39501 - DNA, 469 bp, Arabidopsis lyrata
  Intron number 2 from transcript 483239 (locus 483239) deri ved from phytozome v7.0 (chr-ID scaffold_4; pos 20266713 t o 20267181 reverse strand)
gcttcttcttcgacttatagagataattttctcaggtgaatcatcatatcctccctggtagattgagctcttatctatctctgagaattttagttactttatattgagctcataacacttgtgactagcatttcaaacttacacattcatctagtggcattttcagtttaacaactaggctgaatcttcttaattacttcatcaaacctcaaagcattggtatacttttgcctcttggagtagttgttctatatatcgagaagaatcagactattatagtgaatttggagaatgctattattgattattgtagctgatatctttttcctccattcgtaatcgctgcttatatttgttgttaccaaaattgtaaaaaggttaagtggttcatgtgtctgaatatgtttgatttcaatgactgatgttttttttttttgtatctttaggccaatagatttcaaactggggc

SEQ ID NO: 39502 - DNA, 1027 bp, Arabidopsis lyrata
  Intron number 1 from transcript 914004 (locus 914004) deri ved from phytozome v7.0 (chr-ID scaffold_1; pos 25397903 t o 25398929 reverse strand)
gttggtatttcgtgagttgtaactataatgcacccggtaattggatcggagagtaccattactgatcctcatctctaatttgaccaataataataattatgaataatctaatttgaatgactgtttcttaaaaaatattattgtctaatctcaagatgtaataatttataattttcacataaagaggttgtaatgtttgctttctttacaatgaatcaaatgctgtcgttttttttttttgttatcttgttaacataatgaggaagtccattctacttgtaaagttaatttcctatttatacatacaataattatttatggtgtaattaagttcgcagaaaacccgaatttaaaatcaaacttcagtattaattcgaaagaaaaaaaatcaatccgaacagtaccaaacttagatcgggtctatttgggtaacaattctttgaactgaacaaataaaacaaatctatattctgacccaaatcgatccattatgctaagtgttcaactctagttaattatatagtgtatcttataaattgtaataaatctgagtctagcagcaagaataggtcatcttttagaaaaacacttttttttttttttttctttgtagaagtttatttaagtttaaattttgtgagataaacagttaagcaaaattgcacatatcaaatttgttttgtgaattatgttgacatagctaaatttaaattctgtcgtgaattaacaataacattatcctacggtttttataatattagcaataaacaacaatcagtaatgacagcttggccgagtggtctagtgttatttggattatgacgtgtcttacttgacacctgtcaacttcatattggtttcctttgttttccctttgattacatttgtgtaatttactcatctataagaaatttgacttcatttgcttgtttcatctgctacaaaaattgattcttcttttttgttctaagtttgtgtgtgtatgattttagggcagtcaaatcttttgaagtctttggtgttagtt

SEQ ID NO: 39503 - DNA, 909 bp, Arabidopsis lyrata
  Intron number 1 from transcript 484112 (locus 484112) deri ved from phytozome v7.0 (chr-ID scaffold_5; pos 555681 to 556589 reverse strand)
cacctgagcctgaacgcaccgtcgaacttgctcaggtctaaacgactacttgtctttactttaattacatttttttgtggttaattgaagagagaagagttttgtaggtccatacatttccccatcgcaatatattagagaacgccactagatcaaaactcattttagttatactttgatccatttgttttatattacaatttatatgttgcctcgacttaaaaattgctaaacatttgagtgacggtgttaccaagtgtcgttagctcaactggtaaagaccctaggcgaagcttagaggtcgccggttcgagtgacgcttgggacgaaactaatattacatgctgtgctttcgggtctgggggattacgggcttcggccccaaacctcctggtattaacaaaaaaagaaaaaaaaaaagagggtgttatttactaaaataaaatttgttcactcatatagactgatatatacgaattgcaatgctctttagaatcacaagatttatttacaaacttttttgtttttagagtattctagctttgatcaagtgatttatccgaagtaggtttacaaaattttttgtttagagaatattgaatgaatgctaaggctcatacatagatttgcaagttatcaatcacttttggttattgtggttttaatcatataagttatccataatatgtttgtttgtagaagactctttgtagcaggagttacaatggttatggatagaactgtcaaattgtccgtccactcgtccatgtagacactatgtttaattgcattatttactatttttttagttgaattatttattacataataccactaaaaacaaagattatactaaatatgatttcttcgtatgtttttgatatggttcataggaaggattaagaaaaa

SEQ ID NO: 39504 - DNA, 749 bp, Arabidopsis lyrata
  Intron number 1 from transcript 906372 (locus 906372) deri ved from phytozome v7.0 (chr-ID scaffold_3; pos 20694694 t o 20695442)
gagagagaaaagaagagagagaagagagtgaagaagtaacttacttagggttttcacaaagactatattaagacattgatagtttcaaaccacttcaagtctacagttcaacagttcccactcggaatgcaccaacttgggaaggtcttgcaacctcaactgattcaatatagggttatgcctatgtgtgtggagatcccatgatcccgtgtaatggcctccagaagcgggcatgcagaacatttgatttcttctggaatacattacctgagagttgaaaaagctacttggggttctgatgttgacccatttcgaattcgaaccggaacatggcctacataagctaagttgaggtcccaagaacttgacagccaaaacacagtcctcttgttcaggagaagcggacatggtcacgttagtgacaagttgggtttgacaataaggcaaagtggcaaaaggaggcaatgaaatacgttaactcaagcaattccataggaactatcttttcagaaatcttgacatcacctttacaaggatcataatactcgaggtgcccaacgttatcacccttgaaattaaccccagaataatcgccgccgaggatgagatagggctgatgattctgggataaagaagatgagaaccgacgactctggtttcgtccctgccaaatatcaatcatgcatcgtaacaaacaaaaacataactcaacagagacatagagagagagagagagagagagagagaga

SEQ ID NO: 39505 - DNA, 697 bp, Arabidopsis lyrata
  Intron number 2 from transcript 900334 (locus 900334) deri ved from phytozome v7.0 (chr-ID scaffold_4; pos 10534202 t o 10534898 reverse strand)
aattcagtactaagtggtaccttagatcaaaacaagttggttggtgagtttttttaaaagcttactttttttgtgagtttttgtacatgtatattgtactaaataatgtgttttacctttgctatagatatcattggccaactggtgaatgttggggaaatccaaagcgtggatgtcaaaggcaagcctaccaagaagattgatttccaactaagagacactgagtgagtgttttatataatatctataataagtctttctttagagtttattttgatcatatttacttttgattttgaatttctatctttagcgataaccgtctaccatgttcactgtggggaagatttgctgatcaaattagcaaagtgtcaaaagattctattgggggacaggtcatttgtttgatccggtgggctaagttgtgccattacaaaggtattgcatgacatatttgtcggataactccatatattacgtaaaatattgttactgattgaaaaccattctgtttttcagaaatcagaagtatttcaaactcttttgatgcttctgacgttttgatcaaccctgtcttgacagaggtggatgattttaggcaaatgtgagtgttgtattttcatctaactgtctctttatatatctaaatataaattacgaaaactaactaattctacgtttctcaggcttccttctg

SEQ ID NO: 39506 - DNA, 765 bp, Arabidopsis lyrata
  Intron number 1 from transcript 932013 (locus 932013) deri ved from phytozome v7.0 (chr-ID scaffold_4; pos 27707 to 2 8471)
ttttcctacggtttcagaacctgcaacttttggatgcaattctcctctccttatgtaaacgtttattgcatcaaaagcttcgtttctatgtaattctgggtaactgtaattgcggagaacaaacctctaagtgaacaaatcacggcttaaatttcttggttattaattgcctagacaaattcgctgagtttaattacttgatttctatgtattttagactgtcatagacttaattaagcactcaattaagtgttgaaacttaattgatctcttcgttttaaattatgcagctatgctggacacgttttctactccaaaatgatgtaacgcttctgctccttttaacttaatcggaacctgcaaacaaagacatgccactttatatattctaggtaaacgcttattacttcttctcttatttttgatgtcaattagtcctatctattagtattttcgaaattagagggtattaattgtataaacagtatgtggctctggaatgtagctacctaacctctttagatataatttccagacatttgagtgtatttatgttgtctcaatttctggttattttgggcaaagtttctaactcctctctaaagcgttattttctttggtttcatgtgtgtttatacttgaacgatgatgatatatgcagtcaataaggctatcaaatacttaagtggagaggagtgtattctttttttgtgttggttcatatccttagaacccgaagtggggagtttactctttggaaggggc

SEQ ID NO: 39507 - DNA, 737 bp, Arabidopsis lyrata
  Intron number 2 from transcript 476608 (locus 476608) deri ved from phytozome v7.0 (chr-ID scaffold_2; pos 16405699 t o 16406435)
ctccgtcgttttcctccggcgtcgtccggttacaggtacatcatcctctgtttttttttaagacaaagaatgagatcacgccacgtggtgtttatacattggtctgtggtgatatcgttctctaccttgctggcttgctgtatcgtttaggctaatcagttaagatcctaatcattttgattaccaaagcagagctgacaataacgataaataaatccaattttctaatagttaatcataaactattagaagatagactaataattatcaagaaagatgaagatatggctattataatattattaattctttgtattagtttatgaataataaaacatacactcaaactgggtcgtacaagattccgctagtcaatcgaactacttaactggacttttggtttctttattccttcagtcaattttacgtagacgtatataacttctagaatattaaacttattattaaagaacaaagtcatttgagaaaggaaaattctggttagtgttggtaaaaaacaaaataatttagctagaaaattaatgatttgattgtaggccaaaaaaatgaaaagtaatgattagaacccaatttgtttgtaaaggcaaggcggcgatcagatacagtcactcacacataagaaaatcccaaatcctagtcgaattttcccgcgcaataaaccctaatttggatttggtgcaggtaccaattgaccagcaaatcggagcaatcgattg

SEQ ID NO: 39508 - DNA, 864 bp, Arabidopsis lyrata
  Intron number 1 from transcript 312350 (locus 312350) deri ved from phytozome v7.0 (chr-ID scaffold_1; pos 5625713 to 5626576 reverse strand)
acgtatttttaatcgcggtatgttagatagttactaatataacaatttccattaatttttttctttcttagttatgcagaaattcatgtggtagaaactaggattaaaaaatattttcataacattaatgatttaatttagatttaattaagaaaactgaataattgtaaccacaaatcaaagtaattgctaaaaactaacatccgttaaagttacagaagggaacaaatcacaaatattagatttgaagacgcaaatatttcctctactttggtccatgcatgtttaacatatactatatagataaatagatataaattaactatatttaaaaaaataattttcattaaattaattacaggactattgaaactttataaatcaagaaaatactctatacacaataacttttgatataaagctgagttttgttttaatttcatgttagtaatttctattttaaactttataaatcaagaaaaaaaaaaaatatatatatatatatatatatatatatatatatatacagtttaaaaagcaaaatatttggttcaatgtgtgactatagcttggtcacatatattacaaaagaagaagcaaaatatttggttcaatgtaaataaacttagggataatagcggattaaacttagagatattgataatggattggattaatagtagaaaattgtaacctcaacatttcttgtattattaaatggcatccaaaatactagctagaatattttagaaaaattgtagtttattaatactcaacaaaaaacaaatacattttatttatttatttatgattgaaaccttcttgtcagatatctaggacccaaattatagtggacactggact

SEQ ID NO: 39509 - DNA, 424 bp, Arabidopsis lyrata
  Intron number 2 from transcript 928472 (locus 928472) deri ved from phytozome v7.0 (chr-ID scaffold_3; pos 3294906 to 3295329)
tcaccaacattggaggtgtgtgtgtgtgtgtgtacctctcttcatttcaatggtttctatgattgtttctgttttttaaaaatgggaaatttaattttggcgacatttgagacccttgttagatcatagtcgttgttttgtttgctatctctctgtgattcatgttagaatagtttggatctctcgttgttctttgtttaccttcaaatgaatacaatcttcttgcacatgatctcagaaactggtgtggatttcaattttcatcatctatgttttatgtctctgcttgattatgcatttctttgtgagtaattttgtgtattcatcaagttaaggttgaaaaatgttttgcatttatagaattttggctctttgatctcaatacgcagagactcttgatccggaagtgaggattcttagcctc

SEQ ID NO: 39510 - DNA, 541 bp, Arabidopsis lyrata
  Intron number 2 from transcript 935473 (locus 935473) deri ved from phytozome v7.0 (chr-ID scaffold_4; pos 22028489 t o 22029029 reverse strand)
aatatacccaggttttcttgcactatatttgacttttttccttttttaagctatttgttgttttcatagttttcaataattatccccttcacctaattcatttgttgttttcatagttttagtgaaattttggagtaattgctaacttgtaatatatcggggatctcgaacttgacaattttgatctcaatgctactaatgcaacaatctttcagcacaatacctctgtagcataatgcagaagatagataagttaatagatgccttttgcaaaaaaacactgttttggttctactatccactgttgtggtgtcatgtatccgtgattcagagatataagatgagtaatcgctgtcccgttttatggtgcaaagcaaaaaaaacttttcaccattgtggcttttgtttatcgttacttatgtttctgtagtagtaaggagtaagaaagtgtacatattatcggacctatgtatcttataatgatgtgatttcatgtaaatttataggagtttcgaagaataaaaggaaatataaactcgat

SEQ ID NO: 39511 - DNA, 562 bp, Arabidopsis lyrata
  Intron number 1 from transcript 935473 (locus 935473) deri ved from phytozome v7.0 (chr-ID scaffold_4; pos 22029213 t o 22029774 reverse strand)
ttacgctaagctcggcgccaggtttactcaaggcggttcgttcttcttcctttccgcttgatcatgctctctctgtgttttttattccttttccattgctttggtatgttgcagttttgaatgtggagttagtagtccgtaatgtgatacggatcgaggaatcaattttggatgtgatctcttcattggattgaattttgatcgatactgtctctcagtctctgttatggttcctcaatgcttaaattcatttctgtgatgtagaatgaataaatctgaatgtgtttgaataatgttcccagcgaatttgtaagaattaaggtgaagtaatgctgcaattgatagtactttctctcagattttctgtgatttttccatgtgtaatcgactttgtaagaagagtttttgtgttttaagcttactgttttgcattagcattcagtttttaagaattgcattgttgtattacatattgttcttctcatgaattattagaaaatcttgaaatgaaaagttgaggtgcctttccttaccagatttacatatgttttggtgtcagggt

SEQ ID NO: 39512 - DNA, 542 bp, Arabidopsis lyrata
  Intron number 2 from transcript 321345 (locus 321345) deri ved from phytozome v7.0 (chr-ID scaffold_4; pos 17234983 t o 17235524 reverse strand)
atatcggtaacatcatcctctgatccctttattttggcttctcgatggttctgttttgttgaaagcttcctaattgttttaattgcgatttacttgacaactttcattaggattattcagtctaggattgtcaaggaagatgctttttatgagttacgctcctggattgctttgcttgtgatgactagtgtttctggtagtctagcgactgttagcttgcttagggtggtgcttcatcaaagttggtttttttatcacttagtatttgcgaaaatatagaaaaatacaaactttacatgagattattggatccggtgttgaagatgaatcagatggatactttcttacttgtttcgctagttttttttagtacttcatattttgagtatttttttctccttctccttgttttgagtatcagtaaaaatggttcctttatggtcttcaagtgtaccatcgttgatcatgtgaaaactgcttgtcttatggttgtttttttgttcaccctgtcgactagaaaacaaactctggtttgagccaga

SEQ ID NO: 39513 - DNA, 663 bp, Arabidopsis lyrata
  Intron number 2 from transcript 943837 (locus 943837) deri ved from phytozome v7.0 (chr-ID scaffold_7; pos 213149 to 213811 reverse strand)
tccgaatcatttgtacgactacacaaaatttagaggtttggatatgatctggaatagtctttcttctactttcctaagggtctgatgtgctttaattgatttactgatatgtttctttgcgacagaacctttgttcaagccgttttattgaaccggcagagattgaaggatggcaacttgctatagtctctgttttggatgttttgaacgtcacactctcccaattttctgaggtaaaagcgttgtcttacctctgaccttcttaaaagctttggcaagtatatcatatttcacataacagataatagccattgttcactgtttccaattgaagattttttcaaaataatcttgattaatctcttacattttgcaaacaaattgcaaacacacattgaatatttgctttggctagcaattctttgaacactctttctcatcctggtctataaattgttgcagagtactcattctggtcttcctgtgtttcatcaagccatgctgtcgtctacaacaaaaccaatctcagttgttgcagctatcacatcactgatttcttacttccgcaatcctgtatggactttcatccaaattcatagtggttgatgctttgaccaatcacatgtctaaaaatcaaatattttctgcagattatacaggttt

SEQ ID NO: 39514 - DNA, 715 bp, Arabidopsis lyrata
  Intron number 1 from transcript 910236 (locus 910236) deri ved from phytozome v7.0 (chr-ID scaffold_1; pos 1973302 to 1974016)
ataacattggagattgtgacccaacgttgcttgtggtaacataatttaactgagtaataatatactaatatatgtgttagatatataatagtaaaatcctaaagtaattaaatgagaacgttaaatgtaaattaaggactatgatcaaaagtcaaaacaaacttatacaacaagaagttggattataataatcgaatacattatgtggaagcattgatagaagaaagaggaagatgtataataactagaagggttgagttatgagtaatgagccgagagggaaagagatgtctgtatctgcatagtgcatattgcataatggttggtgttgatggggagaacgagaaagataaaaaaaaaaaaaaattgtaaatgtaaaatcctcaactaaataaaatgggacccacagtctctgtaaatgttaattaaggactatgattaagagcatgattaacgggggcttcttagccaaatcttaacaataaagttgaattaaattaaatgtaaaagcttgatttatactaaggaacgttccttagtcaagagacaaaactttagctaagaggcgtctacgtggcagaagctggttgtttttttttcttttctctctctctcattttgcgattcttctcgaggcagagaaacccatcggcgattcgtctgtgttttcgagtgattgggtttttgttgaaggtgggcaaaatcacggtgaccg

SEQ ID NO: 39515 - DNA, 783 bp, Arabidopsis lyrata
  Intron number 1 from transcript 495205 (locus 495205) deri ved from phytozome v7.0 (chr-ID scaffold_8; pos 14464363 t o 14465145)
ttacccaattcacggcctaggtcaccgaaaacgtggtatgtgttttctaaggctttcaaaagagtttagggttcggatcaatttgagttatgatgcaaacagtttatagcttagctttagctaagggattgagtcttgttgtgcatacctattgttcgatgaaactcctgaaagagttttggtcaattgataatgaacaaagtagagaactttatcttcttaaggtagtgacatgggagctaattcttctgtttgtgtttcaatcccactcaagcactgttaacgactgatactctctctatctctttgtgccggtgtatatcattttcttcttgattacaaacaacatctagctttacgaagagtaggaactagtacaattacttctttttcttgctactctgcttctagggctgtgttaaaggagcatttttgttaggtgactgttggagtttttaattgatctgcggtatttgtgatttcttgtttcatcatctcaagtttgtgtcttgttggtcactcactattagatcattctatggagaaattgtgttgatttatagtttcaagcgtttggagaaaattctgtagaattcgtagttttctcacatatatattcattgccaatgccataatcattgtgatataatctcatattaccaaaattttcttttgtccaaactctgctgaatttgtaatttaattgaatcaaatcctttgtacattttgcaagagctaatgatttctttgttatgtaatactttcttttgcagacttcttgac

SEQ ID NO: 39516 - DNA, 567 bp, Arabidopsis lyrata
  Intron number 1 from transcript 889083 (locus 889083) deri ved from phytozome v7.0 (chr-ID scaffold_7; pos 4803170 to 4803736)
actgaagaacaggtcagttttttaagatacaactttttttttttttttttgtaacttatgaaatgagctcacttaacttttgaaatgaacttgagatcatatttttgtttgaagaagatttaaaatctagatttgggtttactttctgtttgacttcactggattttggttagattgtgaatggaatcactctgctttggttttgggtttagtgggtttagctaggacattcttgttgttctgaaatgatcaaatgttctgttttttttcttctctcatcttgtttaggagaagttataaactgttttgtttaaaagattgtgattccagtgtttttgattagctgatgttcttggtagtaaaagttagaacctttgttgtcatgcaatagtacaaactttatttcttgaattgttgtaagcaaatttttgttgttgtttgaagggtgacataatttggagttttgtgaagttattctttgtgttttttttggtatttgtacctagtttgtgagctcatgttaatttttgcaatgacaggtatttgatctcactgaggtgaagcctc

SEQ ID NO: 39517 - DNA, 268 bp, Arabidopsis lyrata
  Intron number 4 from transcript 489124 (locus 489124) deri ved from phytozome v7.0 (chr-ID scaffold_6; pos 9522806 to 9523073 reverse strand)
tctttcggttactcggtttgatcccctttaagaaggtaatgatttttccttgcctataacattttgaattgctgactcttttatagattgcagtttgtagttcccatatacttctcttatgatgtgactctgaattttcttgagatgacaaagaaatatctctatcattttgattttattttagtgggatgtttatttgtgaaaatcattatttgtttcttcaccatatttaggcagagtttactccagaggatttgtcctctaagaa

SEQ ID NO: 39518 - DNA, 360 bp, Arabidopsis lyrata
  Intron number 1 from transcript 472046 (locus 472046) deri ved from phytozome v7.0 (chr-ID scaffold_1; pos 7678519 to 7678878)
ggaggcctaagttggagacgatcgtggagagctaaatgcctaaagtctcgaggatcattataatactatatatgtaaaaaaatcaattttcaatcgtagattagtattttgtttttttatttattcttgattttttgtccgagttttaaagagaaattgagtcttaattatatggttgttcacgatttgaaatttcgtgtagatacggtgattcaaatattcaattgtgtaattaggtctgattaatttataatggacatcttatggggaggaggataactagtttgtcttcgttttaattgcttagtatacattctaaactccagaacattgcttataatcacaaactagataacaacc

SEQ ID NO: 39519 - DNA, 600 bp, Arabidopsis lyrata
  Intron number 1 from transcript 493945 (locus 493945) deri ved from phytozome v7.0 (chr-ID scaffold_7; pos 22255655 t o 22256254)
cctgaaagtggcccatctagcacccaagtaatgtctatttttattttatattaatacattctcttaatcttcatacatacaaagttatgaaatgattctttacggattaagggagactatattcaaggaatcttgaaatttttgttgaaatacatgttgaatgattttgacactgtaaaattgttcattaaaactgttagatttatatggttacataaaatgtcttcttgatcttattattatgattgtaagttaaatatgatcttcaaaagatcacaataatggtcaaattgaaatggatttgtgattataccttttttgatctcatgtttatgattgttaatcggacaaaatttttgaagtgtcacttcaaactttccgatcaatatggttacatgcatttatactttttcttattctgtttttatgattgttaattgaatataataaattttgcaattatacgcatatagcttttttcttaattaagtttgcatgcatatatatactttttttgtcttgatttgaatgtaatgatcattaacttgtatcatcttttgaaaaggtattgtcccttttgattggcgtccctgtcgttgg

SEQ ID NO: 39520 - DNA, 719 bp, Arabidopsis lyrata
  Intron number 3 from transcript 481271 (locus 481271) deri ved from phytozome v7.0 (chr-ID scaffold_4; pos 2424389 to 2425107 reverse strand)
ggatttgcctctcaagcaatcagactctgcttcatgtaagttttttgtattcttttgatatttttaattgtcgccttatcttatcttatgtgtgacattgtcaatactaaaatgctgaatattataagttatatagtttgttttatgtgtcataacctataacaaaatatgtgtcattaccatattatatcgattttacgatatgtaacggaaaaaaatatatttttgtttacaaaagaatggttgtgacatttaaaaaaattaaattatagtttacttaaattaaagctgataatctttgaatttaagccattattatttaattattaatatatgaaattgaagtttacataaatttgatatatctctaatttagtatatacatactgactgaaaacatatacacactaaaaacatgttttatttttgtaaccaaaatattgccatgtttttgcaacaaagtaaattcatagtagacatacaaataaaccacatctttgtcattttctaatcatgtaaaatagtggtaaattgcccctaccatgtgttgttgttttcgatatatttcttggatcttttctctcttgagctttgaacccaccaaaaaagatcgcataacttttgagaaaagaataaagaatgatccttttctcattcatatgactaaactttaaaagattctctctgtaacaggattcgaacgtgacacaacacatctc

SEQ ID NO: 39521 - DNA, 582 bp, Arabidopsis lyrata
  Intron number 1 from transcript 493065 (locus 493065) deri ved from phytozome v7.0 (chr-ID scaffold_7; pos 11067588 t o 11068169 reverse strand)
gttagagaagtgtggaaggtaattagggttttttttcttcttttaatttagattatcttttaattaatttgggactgattagatcatcgagccgggtcaagattttctcgatcaagccttgatttaaggattagggtgaataaataaatattcttgattttagtgattatccagtgttccataataatgtgattcgttgttattacttattccatttgagtttttttttttttttaatctataattttgataaaaaaaaaaaaaaattatgatgtaacttaaaatagtaaacaccctttaatttctgctttacaaaatcacattgattgatcttaattatactttaattctttatatgagttacatgaaataaatatacaacattaatggagtttactgttttctttgttttaaagatatagacaaagatactgtttatttagcctttactttaaagttaaagattgaaagcaactttagttttggcgtggaaaataatcgattttatttagtaactacttcattaaacttccttccacgtttacaggttgctgtaaagtttatttaccttgcagtatactc

SEQ ID NO: 39522 - DNA, 731 bp, Arabidopsis lyrata
  Intron number 2 from transcript 488611 (locus 488611) deri ved from phytozome v7.0 (chr-ID scaffold_6; pos 7216065 to 7216795)
aaaggttctttttccccatctctcatatctctctctctgactttgaatcaaaactttctccaatctttcttttttgtccctttttgtttccattttctctattattctccatgctttttctcttttaaatattcttattcctctcttaaaattgcaattttatagctggccagaatatataattacaattactaatcatttgctcaatcctttgataggaaaaactgtaccaaacttttagaccgaaaatattatgggtcaaatggttccgaatctatctttatttacatatgttaaaagagtcccatgaagcattaccagtaaatatgatccaatcatatttttccatatagattttttttttctagtttttcctactttctagtaattttaaaataaaataaatcttgtaccctaaaaactaaagtaaattttcataaatatgctagttacttgaaaacaattatactgatatagtgatataaattttcatatcacaaaaacttgaactattcaaaaggccaaacattttcatgtaacgaagtctcttcagaagaagttgatattgttaagatttaaaccaagaagtgatgttttaagatttaggcaacttaaatgtatatatttggaaagagttaataaaatggtttattcatatttgcttttgtttatcaatgttgaaaccgaccggtacaggggtgaaatcggtggaggtgaaccggaaacagagc

SEQ ID NO: 39523 - DNA, 238 bp, Arabidopsis lyrata
  Intron number 4 from transcript 495841 (locus 495841) deri ved from phytozome v7.0 (chr-ID scaffold_8; pos 18097699 t o 18097936 reverse strand)
agctgagacagaggtgaattttgtttttcttccttcttgcaatttgctttgcattgcactgtggttattgaattgttctttgaggattctagtagtgttattggtttatcttgctttaatcgagtttgatgtttgagcttatctactttgatttgtggaagggttttcttgtggtttatgtggatttcccttactatgtgtagacaacaatcggatatagctagacttgaagctaaag

SEQ ID NO: 39524 - DNA, 642 bp, Arabidopsis lyrata
  Intron number 1 from transcript 497163 (locus 497163) deri ved from phytozome v7.0 (chr-ID scaffold_22; pos 65867 to 66508 reverse strand)
gagagccgtctcgttcattttaggtatttaatttatttttaggcgtataattgttgtagttaacctaatcattgacctttcctcagtttagctaaaattttttgttaatctccatagttggatatatagttcaaaaccagtgaatataatatcattgacagacggaattggccgtttgcttaaatccttgcacataataggcaggaaaaaaaaaggagcgtttattcgtttcgactcgatcaaaaattaaatttttttttgtcaatcaaaactataaaatataggtaaaaataaatcattcatcaatgtttgtgtttgttttttctgaagcattgatttatatcatattttattctcgtaaccgtcggtccaacatgtttgacactcgtccatgctgacgagtttataacagaaacggaaaaaaatgtaaattatcttttagcaaaaatgtgtactttcattttaaatgatttttaaagtaataatatttagagatacttatcctctaattaatcaatgattaatatttttaatgatgataattactttaaaatggaatattattgatattcttccatagagggagtatttgtcgatttatttgctgataatattttgtaataaaatgggttgaaataggaa

SEQ ID NO: 39525 - DNA, 557 bp, Arabidopsis lyrata
  Intron number 5 from transcript 482959 (locus 482959) deri ved from phytozome v7.0 (chr-ID scaffold_4; pos 19127404 t o 19127960)
tgtaaggttagtaatctctttttccagttattgttatttagttatccttagtattattgcatcattaattggtatattagagggtatggaccccaaaattatttatagtcttcatatattttcaaagatgttttaagaatcagataaaaagtctcaatcaaaaacgaaaatatatattcttaaattgggaataagccataatttttcaattttttcaatcgggaataagccataatttttcaataatcttctatacttattggattagtaataaatgcccttagataatacagaaaaatggttcaatcattcttcattagtcccttgtctcatagtttctattttaaaaccattacctgttacaacaaaataccattattaccagtgtaccactaattaaacaacaagtaatcaaaacttaatataatcaaaatgattacatcaattatctaccgaaagtcccacagagataataaaaatgttttgcttttcaactaatacaatgaatgttgttatgcacagttagcagacgagataaagccacatccagtagtgat

SEQ ID NO: 39526 - DNA, 544 bp, Arabidopsis lyrata
  Intron number 1 from transcript 947282 (locus 947282) deri ved from phytozome v7.0 (chr-ID scaffold_7; pos 19473043 t o 19473586)
atttcaggtaatatatttatctgtttaattatgcattgtctacaatggaagaaattaattttttcagattaaaatttcttgtgaaaaaattgaatagtataaccattcgtggaatcatatcaagaaaagcgtttgtttgcaattaagaatttagaataataaatttatgattttgtgtaaaaattgttgttaatgttttggttattaaccaaatatcaaatatgagatcgtgggcctggattgtattaaactttttcaggttttcacgtttttaaattatgattccaccaacaccatattctttataaacacaaaatgataaaacgtaaaaaataacaaattgtttttaactaatcccgcattctttaattgtataatagattatacagaattttattcatctactatgtcatagttttttttttttcggtatccatctgttttacaattttgttttaaatttatttattttacgagttttcttgttttattgcttctgctattttataatttatttactttgttattttgttgttcagctttg

SEQ ID NO: 39527 - DNA, 712 bp, Arabidopsis lyrata
  Intron number 1 from transcript 910750 (locus 910750) deri ved from phytozome v7.0 (chr-ID scaffold_1; pos 3984663 to 3985374 reverse strand)
attctcccttttacgaccgccagatcccgagccaggtacgttttgatgcagtacagtgaatgtttttgtgtcttgcttgtgttcttcagtggatcagaacaaaacaaatacttagtttcaccagtgacttactcttgtatacaagaacagagtaatagataagtagataagaaatatagtcattctggatcatggagatcttgttctctagaggaacaacatgtagatctaatcggcatgatggaatccaagttataggtgcttaggatttgaactttttaattgtttcttccactgtgagctacatctgtttcaaggttgtgtattagatgaagctttattactaattttgctattatgtgattttgtggagcatagccggttttagtttaatgatcgggaacagcttttattatagaggtgaactgcttagctgtgaactaggaaactaaaaaagactaattcatagacacattatataagcttctcttgttgatttaaacaccttttattgtagtaatccctttaattttctctgtatgtcacaatgatcctggtaattgcataacgctttgtttggttcttcaacttggtcatctgatgaatcatggatggtctgtgtcattgtatgctagatctagttgataaaaaatctaaagaattctgcctggttctgatggtttttttatacttgaatttttcagagagttga

SEQ ID NO: 39528 - DNA, 766 bp, Arabidopsis lyrata
  Intron number 1 from transcript 332445 (locus 332445) deri ved from phytozome v7.0 (chr-ID scaffold_8; pos 20328183 t o 20328948 reverse strand)
gctgaagaatttgggaatttaccagttattggtatgttcgtttttttccacttatttgctaaattacttattcttctttaccttttaaaaaattaattcaaaacatcatactaggtaaaagaaaattttctatataacaggataagtgatgggtggtgacagttaaacaggataactattggtcatcgttatttttttaattaatattataaaaaaggagagtaatgagtgttgacacagaaatcgagtaaatttttcttgtaattaattttaaatatttattattaaagcgtattagttaaaaatgacctgtctttttaaaatattagcaaatatttgcctagcacaaaaaatgagaattcgtttttttcctatacaaagttgttctgctataataaaacgggtaataccttaaaaggaataaaaatttctcattttattttctgtttttagatgataattaaaaagtacagctaagcagttgttactctagagtataattgtcactcacatagataaaatgagataagaaaagattagcggagaaaacttgagtactcaagcaagaagaatctgaggtcagtgtcgtagaagaaaaaaacactagaaacataaaaacgaaagatttcttaatgcaatgttattctaagattcttagatgatgctaacgatggtttcatttcgatttgttttatgtttgttttgaatgattgtaacagtgatatcagcagatttggacaggaacatagagcacgcgaggcgttgt

SEQ ID NO: 39529 - DNA, 315 bp, Arabidopsis lyrata
  Intron number 1 from transcript 490462 (locus 490462) deri ved from phytozome v7.0 (chr-ID scaffold_6; pos 24508955 t o 24509269)
cccaacgttgccgcagcaatcttcttccggaaacggtaatctttctttcgcagttctttctcctccaatttcgaatttgttttttgatcaagattcgagaatctttccaattatggagatttagggattgttgggtgtttaattttggaaattctaacctctaacagtgacattaatggaaatttctaaactttcgatcaaaacttgtaataatttagggtttaagtgatgtgtttgccatgtgtttgattaaatgtttgtgtgaaattttcttctgcagtttcatcagcaaagtgtgatcttttcaccggagat

SEQ ID NO: 39530 - DNA, 762 bp, Arabidopsis lyrata
  Intron number 1 from transcript 927381 (locus 927381) deri ved from phytozome v7.0 (chr-ID scaffold_2; pos 18741728 t o 18742489 reverse strand)
tgatctcaacaagctggaaccttgggaacttaaaggtaaaatttataacccttctatagttaacttcttctttaactataattatcaccacctaatccacacatttaatgtatgactattaatcatttcttgatcagtactatatagactatcacaatcaagatcatatatatttcaaattaattctatatagagcgagagaggtaagacagataaaatatggggaagtatgttgttggccttgcacaagattataagttagatgtcaaaggacaaatgtatacatagattgtggtaatattgtctagggagttgtctgtgtctccagggaaacatgcatctacttgtgtctttttaagtttgaagagttcttctcatatatcctgataaattattttccagtttttatggaatcatgaaacctttatacgtgtgtgcgtatatacaccaagaaagagacaaagttgtctattcacttatgtcttttagattagtaacagaagaccagagtgtaatgtcttgtagtatatgactacgaatgttattttgtaatattattttgtactaccctcaaaataagccaatgtcacattgcagacatataacaacccatcgccgtaagccataaatatatatatatatatatatatatatatatatttgaaatgactgaatagattttgatttaagactattattaacaacaattgtttttttccattatatttattacaaattttgttgttgtgtatatgtagagaa

SEQ ID NO: 39531 - DNA, 372 bp, Arabidopsis lyrata
  Intron number 1 from transcript 909031 (locus 909031) deri ved from phytozome v7.0 (chr-ID scaffold_2; pos 16126222 t o 16126593)
tttgggtaagttttgaatctttttactattaataaaagacatgtctatatgaaactatgcatgcttataatcagggccggcccaagggaaaatgatgcctaaagcaaaaaaaaatgttggcccatcattaaatacaattaaaaaaaatttctataaaaagtacactgagtaggttcgaactcggcagatctaagaagagactgaaggtgataaccactctaccacaataaatatctgtaaaatgatgcccttaaatcgttttatagatatctgatgcctaaagcccatgctttacgggctttagccttgggccggccctgcttataatatgtttatacatatgcagaagtattgctgtgcacaaccgccggg

SEQ ID NO: 39532 - DNA, 618 bp, Arabidopsis lyrata
  Intron number 2 from transcript 495081 (locus 495081) deri ved from phytozome v7.0 (chr-ID scaffold_8; pos 13794568 t o 13795185 reverse strand)
cgatttctgctctctctagacctataatctctcaggtggtaactttgtttgttcctttctctattgcttcagatttcgccaattcgaactttaccttattattgaattacaacaattgctagtgaacattgagagattaagattctttcatataattttcactattgaatattttgcaagaaatgttatgtttctaagtagttggaagagtaaaggttcttcttttaatccttgtggatacttcttgtgcgtttatttggatttcagaaaaattgtagctcacaatatgtttgttgagttgatttttgtgagtttattgagacctctgcttgtgatctcctgcaatggatgaaactctgatccatttctcggttctctaatcggctagtcgtttagttatgttttttatactgttttgtcattgagtagtataaaagtacatgtacttttagttaagttcatgcttgtttcagttaaatagtatgcctcgaagtttatattgaatccttttgttttggttcagcatctcagtagatttggtcctgtttaccttttatgctctgggatatttggaaacatttcctgatctggtttgagtatttgtatgcaggggtcaga

SEQ ID NO: 39533 - DNA, 566 bp, Arabidopsis lyrata
  Intron number 1 from transcript 482899 (locus 482899) deri ved from phytozome v7.0 (chr-ID scaffold_4; pos 18839122 t o 18839687)
tcaacgtctctctccatcgataattttcaccaagcgtatgtctaatttcttctctttgcttgtcactcccctcagatttgtattctctatcaatttgggcttaaagttttgttttttttttttattttcgtttctggactatagtaccgcatcctgtagttatagttatgggaaagaaatatagattgtggcattggatctggtatgtggtcttctatttcgttgtaatttgattgaaagaaaggtttttgtttctgtctacatgagaacccattaatcttcttgataatgtattgtctatttcaatttgttgctcaagtcttaggtttgttataagctacattgttgctagagaatgttatcactgtagaccagtagcaatttcttgtcatcaactggagctgccgtagaaatccattgatgtggtagcaaacagctcctgatgattgatcagttgtgatggccaaacactttttggaaatcatttgtggttgttcttgatactaactgttccttgttgcttctatgcagttttcctattgttgaacctgctccaggtcatacaa

SEQ ID NO: 39534 - DNA, 564 bp, Arabidopsis lyrata
  Intron number 1 from transcript 492601 (locus 492601) deri ved from phytozome v7.0 (chr-ID scaffold_7; pos 8530950 to 8531513)
cgcatctcggaaataagtaagcctacataacgaatcatataataattccattattttatttttctaattcttacttaatgatttatgtcacatatatgaatggaggcttaacattttcaaatttatgttaaaattaaaattttacgttgtaacaaaaactagagacttaagataaacattagtttggatcatgtatgttattcataaaatataaagctaagtcaattgcatgtgatccaacatgtttagtgtatttatgtgttatgtaaattatgcctaataataaattagatagttccaaataagttggtccaataagtagaacaagttttgatttgcattttttctttgaaatcaacttcaagacaaagtaacgtccttctctggcaaagataatgttaacttattttgtcaatcttcttgtgtttctattccaagattataacatatatatatccaccaacactttataaaatattataaattcttgtgattaatttgttttttaaaaccattggttgcattgtaggtggtctaagatagcttcaagattacctggaagaa

SEQ ID NO: 39535 - DNA, 837 bp, Arabidopsis lyrata
  Intron number 1 from transcript 912645 (locus 912645) deri ved from phytozome v7.0 (chr-ID scaffold_1; pos 12399055 t o 12399891)
tgaactattggagagcaagcttggaagactccaaggtaaaaaaatgaaacattggcttagggcatgtaaatttttggaaacttttaggggcaaattttcagtttttatttatatgcatgtactcaaatcaaataatatagctatagaaacatatgcttaaacattgaaacctttttgatatatatggtttacacaataaaaattatggttttataaatagctatgtaaacaatataatatagaaatattaaataatttaaacagtaggaggcatggagaaacaccattaccaccaccgcaattactttgaaatatcgacaaacaagtccaaaaccggatctcctttatacggaaacaaggagatagaaaatatgatggatgcatagaagcttggtttgctactagatgaccaccaagagaagtagaatcttttgaaattgtttggaaagtcttaactaagtgttgcactcgatgtaaaaacgttttttcgaacaaaattttacattttattcaaaaaaaaaaaaaagatattaaatgatttaaccatttcatctatgaaataagattgttgaattggttatcgtaaatcaacttgagtataccacatgacatattgaatgacttagccatccatgaagtatgattatattagttataaactttgattttaagagtttagttaatgataatgttgaaaagaaagaaaaagatgctactacaaatactaatttggtaattttagtcatttacatgtcttattaatgatagtaattattgtaataagaggggacattttattctttattgcttctgttgactatccacgtcgaagcatat

SEQ ID NO: 39536 - DNA, 447 bp, Arabidopsis lyrata
  Intron number 1 from transcript 920164 (locus 920164) deri ved from phytozome v7.0 (chr-ID scaffold_1; pos 5388291 to 5388737)
atatctgcggcggtgtttgtagtcaggtttgttctctgatctcctttttagtgaagatttgtgtgtgcctttgttctgtttctgagataacgaagaaaccacattgatgtgcaaaaacgagatctttacttcatttacttgaaatttgcagttttggatcttttaagatcttaaaaagtcgatccatttatttgattttacgcatgaacttgcatttgatgttaagcgattcttaattctccaattccaaaactttaatctctttttcttcactatttaagaatttaacttggatctgagttttagatttaagaatttctctttttttttattcaggtctctttgctctgctctgcatctcttgtgttatggttctaatgtttaacatatttgtttattctctatctggcaggaacctggaagattcttcagcttttctagactttg

SEQ ID NO: 39537 - DNA, 550 bp, Arabidopsis lyrata
  Intron number 2 from transcript 483815 (locus 483815) deri ved from phytozome v7.0 (chr-ID scaffold_4; pos 22608525 t o 22609074 reverse strand)
tctcttattgattttggtgttactctctccttgtggttagttttcttacaaattattgctgtttcaataagattcttcgtctttagttaatgaattatggttttggatcatcatccgatgttttcgtgtccggtttggagtcttaggtctaatcgggtttgattttgtttatagttgaagtttctgaaatttgttttcaattgcaaataatgatgatttggttggttggtaagtcgaataaattttaattgagaaagaatctggctctgatttttgtttgcttgtaaaaaaagttaggaactaattcttcagttttccattaaagcaaaacatgagattctcttattgtttaaaaaggagtttttgataggctttttggtgatggatctgtcggcaatcagaaagattcttcctttgaaagaaatgattcattttttgtcttcctatgaatagattcaaaacggttaataagactgcctaatttctgaatcacattgatcttgaatttgattctcaatctcttgtgtttcttcagagttatggtgaaata

SEQ ID NO: 39538 - DNA, 402 bp, Arabidopsis lyrata
  Intron number 3 from transcript 943233 (locus 943233) deri ved from phytozome v7.0 (chr-ID scaffold_6; pos 22453450 t o 22453851 reverse strand)
ttcctgacattgacaagaagaagtgagtaaattatacatattttctctatctctcttgttgggtcataatggtatcaaatcgcaaattagctttcaatctctttttgagcctaatggaattgtgatttgttccggtaatcctcttattgatattcattcacactcttttaatcactagctgatgagttagtcattgcaagggatgttctgttttggtgttatagaatttgagtctcgcttatactctaatcattatatggttctcattcttcaaagcttgtcctttggtagcagtttctagatacatattgaattgcatagcattctaatttgttggttttttgctgatcctgtttcttctctttaggtatcttgtaccagctgatctaactgttggccagt

SEQ ID NO: 39539 - DNA, 412 bp, Arabidopsis lyrata
  Intron number 1 from transcript 943233 (locus 943233) deri ved from phytozome v7.0 (chr-ID scaffold_6; pos 22454017 t o 22454428 reverse strand)
ggctaagaactccttcaagctctctaatcctctgggttagtttcttctcttactcttaataactttttgctttattgatgtcactcgatttaaagaattgttgttaataatgtttacttctttgtttctttcgatcttttttttttgctttggattgtgttaatgattctgatctttgtttgagcaactcaattttgattatcctgatcaagagtttgttggttatgatttggttctgattcgatctttgatattggttactctgtttctccaaagatttagtactttctgcctctggaattttactggaagttacttgatttgcatgttattaagctgcaaaatgtgttcatgtgtttgtctaatccgttagctgtgactgaatatttatggttttgttttgatctcagag

SEQ ID NO: 39540 - DNA, 310 bp, Arabidopsis lyrata
  Intron number 1 from transcript 924847 (locus 924847) deri ved from phytozome v7.0 (chr-ID scaffold_2; pos 2269627 to 2269936)
ttcttctcaattcactttcatcaatcgcaaggtctttctctcttagtttcttcgtctctcaatcaattgatacttgcttatttcttatcgcgatcaaaaattagattcgtcttagtcgattgttcttcgagatctaattttgaatctgtttatcggaaaaacttcactgaatcatcggtttctggtaattttcttagtcaattgatagattccatgtgtattacgaattgtgactccctaaaactttagaatttgcttaattttttcttaatctggatttggttttgagtgagtagcatcattgccgaag

SEQ ID NO: 39541 - DNA, 506 bp, Arabidopsis lyrata
  Intron number 3 from transcript 938059 (locus 938059) deri ved from phytozome v7.0 (chr-ID scaffold_5; pos 15865404 t o 15865909 reverse strand)
gtctcatatctccacttgaggtaacaaaatcaaaaatcaatgtatttcttacattattttaaacccaaaaattacattttcctaacatacaaacaatattataaaaagagttggataagaagtgatcatgtagattttgatttaactaaagaagacaaattactaaaatgctaccttttggaagaccttattatctttatgatcgattatcatccacttgttacaacactaaaatttttgtcgccataagaaactccatccacttgtttatggtcttgtttttttctcaaaccgacaccacaacaatcgagacacacagactactagaaaaatatgtcgtctgaatctaaaagaacaatttatccccaaaaataatgcaaaagataggtcatttaccttgttcaaatagttattagcttactttatatatataaccattctcttaactattgtctttttagtcatttctcctaatttctgtaaactaaatgcagttgggagaagga

SEQ ID NO: 39542 - DNA, 584 bp, Arabidopsis lyrata
  Intron number 1 from transcript 473376 (locus 473376) deri ved from phytozome v7.0 (chr-ID scaffold_1; pos 14478458 t o 14479041)
ttacagaaccagattcgaagaagaagacatttcaggtcagtacacgagtttatgaaaaaatctctcttttaaagatttttctcgggaaaataataaaacaaagagattcgttgctttgtttcttgcttctgtagaaacgattagtcactggtttttttttttccgatcaatcttttcaaaactattttttcccggaaaaaaaaaatattcagagagttttatttttatttttttcgttatctttttctgcaaacattttcctccactgtcacttgattgatttgatttagacagattcgattcgtcatttttctgattaacaccaaataagtttccaaaattttctcactaaacccaaatcaaaaactttccaggaaaatgttttcattcatcaatattaaaaattttcattttcattcaaaagtttcccggtatttattgttctttcattactttacttttttgagaaaacgccgaatttttctcaaaaagcaaaattcatcataaattgttttcgtccttttgtaacacatttattacaattactgtctgtaacactacactaatcttctctgcagccattg

SEQ ID NO: 39543 - DNA, 892 bp, Arabidopsis lyrata
  Intron number 3 from transcript 473376 (locus 473376) deri ved from phytozome v7.0 (chr-ID scaffold_1; pos 14480733 t o 14481624)
atactaaagaagccgtcaaaagcctaaccattcaggtctctctctctctctgaatctctcttctttctttgttgatccttctctgctttcactttattttattgcttttcactaattgccttgttcgtgaaacaaacaaagacacaaaccccaattaacgtatcttagaggataaagaaaaaagcaattgagattccaaaggatagagtttgaattcattagtatatagaggttactgttgtttaggacagagatcttacaatgaggtaacttcacgccaatttttggaatctttcaccattctctctttaatagttttcatgtcagtgtttgtttcctctctatatgactagacatatgaaagtcaaaacaactactgagacaatttaaacccttattgtatatatctttgagttatgtagcaagttgaattattaggactatagtggctgattaaagcttatattggggtcatgctttgatgaatattgctaatgaagattgatctaaatactttttttttttgtcaaataagctttagtggattcttacctagacaggaaataaaaagaacaaaaacaaaatatagagtgggccgttatgattgtgttctccagactgagaagacaagattaaattattttatacatatgtttaagggtttaattatgttagatctcatagctttattgatgttcttttatcaataatcatcatcgtagacctcctttttacttcgttagaattaaaaaatatacttggtcaaagttaaagtcctgaaactacctataatgtttgtgaaaagttgtattcaacattcttgtgttttatatgtgttactttgatctaattggtgtttttttttggtgtctatgttatgcagattaaagat

SEQ ID NO: 39544 - DNA, 613 bp, Arabidopsis lyrata
  Intron number 1 from transcript 334569 (locus 334569) deri ved from phytozome v7.0 (chr-ID scaffold_1; pos 5240401 to 5241013 reverse strand)
gctcagacttcgtggttgaggaagtttggcgacaggtttttacacaggagctcctgcatgggctcggcgagtactctccctcctcgccgctgaatctaggtttggttttaagtttctttaaatttcggttgtcggaacaattttgggattttacgaccggcggatctggtcatgtccggtcgtttccgtttctgacgtgtcgtttttggtctaatgttcggttgtctttatgggtctttgctgctgctacttagaatcttaagatctggattgtcctgtttgtttctgaaatttgggtgttgtttctaaaacaaaaatttggctcgaatttctgagtttattttggagaaattggtatgtgttcttctctgttagaaagttaggctttttctacaatctccttactctcatatccttcactaaaccatcatcatcgacgactcttccaaaaaaaaattcgatcttgagcttcaactttggttcaatattatagaacagagataacgctggttaaatactatagaacagagataactctcggtcatttcttcaactagaaaccattttcgaatgtatatgtgagaatctcaagttgaatttaattattgtttag

SEQ ID NO: 39545 - DNA, 625 bp, Arabidopsis lyrata
  Intron number 1 from transcript 952368 (locus 952368) deri ved from phytozome v7.0 (chr-ID scaffold_64; pos 5599 to 6 223 reverse strand)
caaggcttgcaaggttagttaattataacctaaatttggtattgttagatctttggtttctgcaaattacttgttccaaggttaatcaatgtttaatggagatatggaatctaggaatctgagctccttcctttaggggttttagttacttcattatctctggtagttgaaatcttttgaaattatttgaaatcttagatgatttgtttttggaatttaatgctttaatgatctgtctttaaaacgtccttttcatgtctttttgttaggatttttctttttgtaattttcctctaaggaagaatagtcaagaaaatttatagctactataaaagatagaaacttttattttgaaccattaatggcttactggtcccaatatatatatggacttgaattgaagataacttgtacttctcttgattaatcttgttcatttagataactgatttaattacttcaaaaggcttgaattagtagtaggaccaggtttctaagtctagaattaactaagacaaagctaagcttcataagctgtttctaattttgctaagctgatattcattctttttttggtctctgttgtgtagttttgcagctctgttacaacaatttgacaggaagc

SEQ ID NO: 39546 - DNA, 582 bp, Arabidopsis lyrata
  Intron number 2 from transcript 476049 (locus 476049) deri ved from phytozome v7.0 (chr-ID scaffold_2; pos 13649448 t o 13650029 reverse strand)
ttcttggcttcttctcaaatcaccttgctgatcaggtaaacttgattggtgttttgtgttgtttccttctcgacttaggtgtttgtttgagaagtttttttcatttgttgttttttttctctgtatgttgacatgttgtgttcatatatagcattgcatcaacggataggttcggatatgcagaatttgattgatgtatgaaagaatgtttgtatactctagcctctagctaggttattgagcaattgcttttgttagggtaagatgaagatagtgtggttcaaaattcatctggcaagtcttttcaatgatgttattatattggtgatgataagttgttaatgactctcaagtcttaattcatattttggttttgttgcgttgtagatgtgaatgttttttaacagaagctttcacaaacaaattatgattaattgagtgatcactccactattcttttttgttgtttcatatcgtttagtggataatgtttttgtgtaaaatatgattctgattcaagattttatcatatttttgaacccaaaagctaaagaatctttgagagaagcaagagagatagaa

SEQ ID NO: 39547 - DNA, 808 bp, Arabidopsis lyrata
  Intron number 2 from transcript 492278 (locus 492278) deri ved from phytozome v7.0 (chr-ID scaffold_7; pos 7114929 to 7115736 reverse strand)
aaagctggtaagccttttctttctctctttcttctgccttttacgtttttttttttttttttttgtggattacctcgatgaacaagcagtattgtaaaccactaagtgcaatgaaaaagcgaaattcaaatgcatttcacgaaatccacttccgtgttcttcccatccacgagaaggctctggtggactttctccttttggaaggaagtactaaacatagaccacatccacctggccacgtttgaagtttggaaagtacttcagaagaaaaactttagaaaaaaaaaaaagattagtgtaaaacggcattttctttggcgcaggatgtgattgataatcttgggatgcctatactcccaccaggccatgaatggaccattgagaaatccatctccttatcccccaaattgagtcactttccatccgcaatagcactgccatcttaattgcatttcattcctcatcactttacacacttggacatgcctctgcaatggagaagacactctgttttcattcacatcccgtctgacttccacatttttcagttgttccttgacatattaattccataatgcaaggtctgtaactgcttcactggtcatttggtttgcagagttttttaaggttctagatgttcaaaatttaatttgtaagttagcctatttgatgccgctgaaggagggagtacagtgttcgtgttcgctgaaggttcttaacctggtttacttcctcactgttaatgtactcagatctttgcttttggcttttctttttttctttttctccagggtttgcttttgtgtac

SEQ ID NO: 39548 - DNA, 588 bp, Arabidopsis lyrata
  Intron number 4 from transcript 340977 (locus 340977) deri ved from phytozome v7.0 (chr-ID scaffold_3; pos 3306228 to 3306815 reverse strand)
tgaaaaggtaaaactctacccaattagcttctcttgccttggacacatttttgtttttgctttctgcgtgattgaagaagaaaactgcttaagaaaattatcttctcgtgatacttgacaagccagaaactttcttatgaaatttttattcaaaattttgttagatgggccagtgataattgaaccagtgacctacattgtttgattttagcaagtgaaatggatactgaggcctacgctcgctcttgtgttgcacttgataccatgaaaacatatctttgatgattgctgtttcttttacctagtcaggattttgcctaaattgtcgtctaattaatattacgtagttagagagatacgaaactcatttggaggcctactttgttgcatcatcttgatgtgatgctgatatctttgcctacactgcctaatacaatctgctttggtttgagcaagtgaatgagtgattactgtgtgaatactagtatttaagaactatccatttttgttttgctattctgcaaatatgaccggatggggtttgttttgacagtgtggatcagaacgaccagtgggcgccaatccgcc

SEQ ID NO: 39549 - DNA, 567 bp, Arabidopsis lyrata
  Intron number 2 from transcript 350144 (locus 350144) deri ved from phytozome v7.0 (chr-ID scaffold_6; pos 3658809 to 3659375 reverse strand)
caggtactcctgttctgcctgtacgttgcaggctctttacttttgtaataccagtggctctctctagatgtctcttcctttcatctcatttgaaggcatagtatcatgtgacaccaaggaacaaatgaaagagagatcaatatgtgttcctgcatttgtctctttgttcttaatccccagaaaaaaacatagaaagagctcaaaccatgtattgatggaattacctatgcactcttgtcgttcgattatgttctttgacacttgtagttagctattccatcttactgatgaaagcaatcaaacgatttcttttatactgaaactagcactggttttatctgaattatcgagaacgaaagaccagttgtgaaccataaaaatatctgtatctggtgctttcatttccatcaatcttaaattattcaactatgctagatactgccactggatttccctgcgagtacaaatagtttcaagcaaacggctgttgtgaattgcactcctaatctctgttgtgaattttctttggcaggaaaacggttccttaatcaagtcaattgaagatca

SEQ ID NO: 39550 - DNA, 705 bp, Arabidopsis lyrata
  Intron number 4 from transcript 481615 (locus 481615) deri ved from phytozome v7.0 (chr-ID scaffold_4; pos 11302476 t o 11303180)
caagcttttcttacttggcgacggaaacttgcgaggtttggttatgttttacttcattcttctgttagtagaaggattgttgctgttggtagagtgggagattgattactcatattcaagtgttcgaacatttatttggcttctacaaagtccgatcgttttctcaatggtctagtacaatgcttttctatggttaaatggtggaacaagttgaggagagtttatacttgatataatgcgtataagctagcgactatgtttactccagtgctttccaaatattgtcacatactgcaagcttttggctatcacttatgacattttaattagtttactctcagtttttgtttattattatgatataattggttctgaggttacaagttgatgcatttatctcaaactagcacttgataaagttaaagtactttggcaatgcatatgtaagttcgttgtgtgttctagatatttgttttgtaccaaagaaaaaaactgggatagagtttagaatacgttttggtttgaccacgtttgttgataaaaatgcatccattttcacatcttgaagcagattatagctcactaaagatactatgttactattttagatgtatggtttgatttcattatgtgcaattttcgttgggacttagtgtacttatgcatccctacttgttctgctgtattcattcagcctcgaggaaa

SEQ ID NO: 39551 - DNA, 528 bp, Arabidopsis lyrata
  Intron number 3 from transcript 487938 (locus 487938) deri ved from phytozome v7.0 (chr-ID scaffold_6; pos 4421566 to 4422093)
acaaggagcttgaccacttcgtaacttaacttctctttccttcttaccattttcaatttccattattttattccttttttttcggtttttgggaaaataaaatcaatattcatttattttcgtcttttagtctatatttaacacggtttgacaaatttgaatatttgttttttttcaaaaaaaatttttataaaaaactagagaagaaaatggaaatttcattagtagaattgtactttgcaccgacacacatgatcagtgggttggataaatcgtcagtcaaaatttgaatattagttttgtacagtagtaatttgacagcggaaggtttattttgagatagatttttgcgagtgtaagtgattgagcaatttcattgattgcagttacggatacagtgatctgacaaaaactagtttgtcattttctgtatctatatccatattttactattcatggacgtatttgtatgattgtatctgttgtctgaaagataaagatatttccatgtttttgtgcagacgcatt

SEQ ID NO: 39552 - DNA, 839 bp, Arabidopsis lyrata
  Intron number 2 from transcript 927652 (locus 927652) deri ved from phytozome v7.0 (chr-ID scaffold_3; pos 352239 to 353077 reverse strand)
ctctacttgcctacaacaagaaactccttgctgaggtatgtatctatataaagtatgtgtttacatagtaattaaggtttttaattgataattcaactttcagttctaattaaattcgtttttttttggtattacaagactaataaccaacgtaacatgaatctagtaatacaattttcttttctgatttttggctttgattggtacaatttgtttagtttatatatgtctgtatatacatgtatattgttgttgtgtgtaagtaggattaaagtcatttaatacgaaatgcaatagattattgttaggcacatgatccaacactataagatgtttgtcaaaagtcagtaggtgttttgtttattaaataaaagattcttgatcagtctatacatttaattaatacattcccatatgactatcaagtaattgcatgtgtagggagcgctaaccagatttgacaagaatactttatatacattgttgattttttattagataatttttgtattttaaattattttactacttattagaatgtaatactgaagttataatatttttaaaataaatttagtaattaaatctataaattttacagtcttaaaataatttaaatgtatatgaaatgaaggtcttatagcttagtgtatgtttagtcaattttttattgatttttccgatctttttaaccatatattgaaataggtcttataaattgctatttatcaaaaatattatgacaaacgaaaaaactgtattccatctatagtatgtcaactaatgtttaaatttctaaaacataacatttgaattgtgtgtgatggtggttaaaggta

SEQ ID NO: 39553 - DNA, 688 bp, Arabidopsis lyrata
  Intron number 4 from transcript 479514 (locus 479514) deri ved from phytozome v7.0 (chr-ID scaffold_3; pos 8706273 to 8706960)
ggttttaagttttaactcttaaatcgaactaatttgaaaaatttctgcttttgttgtgtgtttctctttttctgaattctgatcaaattgagaaatttcgtaccgtcttgtacttggtttgtgtgtagtgtaacataggaaatagtctttgtatctcaagatttgagctaaatttgtttgccttttgtgaatatctgattaatttttgattgttgaaagtttcatgctgttaaatgtcaaccaggcgagcaagccatagatatttttgtttctcctttgtttattttcatgtgactctctttatttatctcattctctagagtcaagatttcatcaacctctttaatgaatttcgtttcatgagatatttgtattgtttactccaccaagttaaacgtttcatcttgcaaagtctcgagattggcctaataacattgctcatttccttctccattttgattgaggaacttcgaaacagtgactgaagattttgagaaaaagcatttcagtctatgtcctaaagtatggtccccgccattatgttcatgaaattagataggtcttttgagtggggttcttcttcaaaagcttgatggaaaccataaatagatggtcatgtatgactagattgttttcttttttcttcttaccatttgagctgattagcttcgttctttcttgcaggaat

SEQ ID NO: 39554 - DNA, 733 bp, Arabidopsis lyrata
  Intron number 2 from transcript 477540 (locus 477540) deri ved from phytozome v7.0 (chr-ID scaffold_3; pos 819600 to 820332)
accatcatcaaccttcattctcttcttgggaacaagtaatcaatcttaatttttttttaaaaaaattcccttaattactttaaatagaaattatatgtgtgagattatcatcaagagcaaaaatcagaaacagatcaatattttctaccaatcaatattattgtgctatataaatcttactgctttttattattagtgatttcaatagaattgtttttgctaaaactattagaagtttaatttattttgagaagaaaaattaaatacaagaagaagaaaattagactacactatggtaatgtttgattagataggttctaggcagtttttttttttttttttttttgtaacatttctttttttatatacagattaaattttaaagtttctaatatcttagcctctttttcattcggtctttatttacatatcacatatatgatatagtctaaaagtgtatattttaatatatgctattatttgttgttttttgttagttgatgtatatatagaagcatatatatatgaaaaacctgctacactggagttttcttggtgcatgcatacgtactcgtcaatgttcaatattaccaagtctataattagttatcttattatagcttgacaatgttatataatacgtataaagcttaactaacccaccaaaaattatatttttgtccatatttttcctaaaggtggtcgtctatagctggtcatctcccaggaagaa

SEQ ID NO: 39555 - DNA, 570 bp, Arabidopsis lyrata
  Intron number 1 from transcript 488829 (locus 488829) deri ved from phytozome v7.0 (chr-ID scaffold_6; pos 8202685 to 8203254)
gtcgcatagccatccccgcagatctggtaattccgggtagatttcttccctttaatcctaatttcaagaatttgctttgcttttggttgttttcttcttatcgcgtcgtttgtttttttcttaaaaataagttcttgggaatagggtttttttttttttttttgcccttttgagtttgatgctgattctgctttgatttcgcttctcgttttgtgggcgaaaggatttattctgagatgaagaccttaagggtctttgtgattcttcttgtgtcatgtttcgggagatttttactctttttttgaatcggaatttatctttgttaatatctccggttgatcgctggtgcaatcgtttgattttattccaattcaaggtttgacttgaatcggcatgtatatttgacttgtctcttttctttagtataaagctccaaacactctaagaggattgaattgtttaagctctttagtcttgttcggcttttgttttttttagataagtagacaagcataggttttggcttctatcttgtgctgagattctaccttttcttattgcaggttacat

SEQ ID NO: 39556 - DNA, 367 bp, Arabidopsis lyrata
  Intron number 7 from transcript 472066 (locus 472066) deri ved from phytozome v7.0 (chr-ID scaffold_1; pos 7754949 to 7755315 reverse strand)
ggaggcacttcctgtaagtccacatacattgcataaattatttaaaatttttaaggcttgagcttgaggcttggttcagctgctttaggcttgttactctttgattttgcaatttgttttaagtatccaggcaagatcaatctgttaaacatgaatgaaaatctgtctctaattttccagttacacaattcaggactgagaagagagaactttttgaccaatttctctaataatctagtttccacaaacataggattgggatattctaatcttgtgttgatgggcggggaagctggtcagtactcaaaaataaacatttagatgcttttttccttgttgcctgcagcatttctgggttgcaatttcc

SEQ ID NO: 39557 - DNA, 251 bp, Arabidopsis lyrata
  Intron number 3 from transcript 927204 (locus 927204) deri ved from phytozome v7.0 (chr-ID scaffold_2; pos 17919952 t o 17920202 reverse strand)
gtgtgttgaagctggagcacgattagcagaaccaggtcagagactcaaatcccttctatagatttggtcattgggtttcttctcctatgtctaacttaatctgtgagatttagctataagattattagaaacaggttctttgatcgatgtttgacttcatatgtgagttgttagctaaagattctgaatcctttttcttttggctggatttgcggtgcattcaggagagtttacacttcgtgcctttctaa

SEQ ID NO: 39558 - DNA, 541 bp, Arabidopsis lyrata
  Intron number 1 from transcript 947277 (locus 947277) deri ved from phytozome v7.0 (chr-ID scaffold_7; pos 19391972 t o 19392512)
ccgtcgccaacgtccatccgactcgggtccggcaggtactgtttatgactcttctccttcttgtgatttgtaaatgcttgattttgttttatttgctcgatttcatattagatctgctattatttttgatgtttagggctgtatagtgttcgattacaaccagtttttaactcgatttctctcttggctctgtttattccatgttagcttcatttctctgtttctctaggttttttggtttgattttaggttagtatattacttcagatgatgtttataattgctttttcgaatttcaaagtgaaaaaggtttgatttgtctttaatttgttctaatctgattgttaaataaagattctaagaaacgagtgtgttagtatagtggctgctcatctaatttgcttaagtttgtgtttgtatattgattctaagaaactactgtgtttgttgtatctctgttattatttgtttaagtatgtgcttgttctttacttctaatttacctttcaataactagtgtttcctttccctaagttaacct

SEQ ID NO: 39559 - DNA, 741 bp, Arabidopsis lyrata
  Intron number 1 from transcript 934167 (locus 934167) deri ved from phytozome v7.0 (chr-ID scaffold_4; pos 16834197 t o 16834937)
catcggtgaagtttcttcgacttctcgtattgttttttttggtgatttcgcgatttggttgtctcggatgtagtttgatagtgtgtttgagctacaatcccattagaggcaaatgatgtggcattacgcttctttagattagaattgggctcttcaatagatgaaaatgctgatttatttatttatgttttgttctgattccgtatggtaaaggtctcatctctagttgttatgaaacatctggtgcttctgttcctttttaatttggatattttgtgtcgtgatatttgatttgttgtagtccctttgcaatgcgagagttgagacttagaaagtagaatcaagagagagcttagtcttattatgtagatgatatggatttgttaaactagcttatctttccaagaaaaccatttagttacggttatgggacctcgtaattttggacattgctcaaaccattccttgtgagattcaagaatagagtgacaccaaactttgatgcattttattcatagagatagatatgtcttctggattaaagtcctatatttgtaagtgtgtttgttgctgggaaaggattttttttatgctaaggtcatacggccaatagataatgatactgttaaaccagccttgagttgtgtatatgagatttccattctcgaatgataaatttgttgtgttaactttctctctctggccttccttttatgcaggaggactcatcaaatttttgat

SEQ ID NO: 39560 - DNA, 212 bp, Arabidopsis lyrata
  Intron number 3 from transcript 945357 (locus 945357) deri ved from phytozome v7.0 (chr-ID scaffold_7; pos 6412250 to 6412461)
aacttggtatgtttcctctcctttctagcgccactgaagaagatgcttcttctttttggttagctatgattcataagtccatgtctggataagggaaatagaaatctcgtgtatggaaaatggcatatgtgtgtagttatcttttttttggttagctatgattcataagttcttaaattaatcaaacaggagttcagattattgaggtttgc

SEQ ID NO: 39561 - DNA, 588 bp, Arabidopsis lyrata
  Intron number 1 from transcript 491349 (locus 491349) deri ved from phytozome v7.0 (chr-ID scaffold_7; pos 3278944 to 3279531 reverse strand)
acctctgtctctcctccgtcgttagggtttctcaggtgagagtctctgcttctcctcttttccgtcttaatctaatttcgctgtaaattggtttctgcaatctctacttttcttctctttcagctgagaagacgaattaatatcttaatcgaattaccagttctcaaagttttgtgtccgttgagaacaacaaattcctcgaaattgattcattgattgaaattccaacttgatttttgatttctgggtttcttattaaaatgtagacagacacttggagagcttagtttccttaactataatctggtcataaacaatttgagatttaccttgcttcttaaagaactcaactttagcttgaggtctgttttgtaatagacatatgtacatattagtttagtaaccatgtcttgtggattatttatctttgttgatgtccctgtattgttgtaaacagcaatcacccttgttttgtaaatcttgtaaaaacttaagctttttggcttgaaggtggcttacatgagttttgttggtgtgaatttatcttttacaggttcacatctgttggaaacttattgcaacgtccaa

SEQ ID NO: 39562 - DNA, 613 bp, Arabidopsis lyrata
  Intron number 2 from transcript 492344 (locus 492344) deri ved from phytozome v7.0 (chr-ID scaffold_7; pos 7367415 to 7368027 reverse strand)
ctcaaagaaggttactttctcttctcaacactcattcttgttttcaattttcaacattcaagtgcttgtagggctgcatctttggttcgagacttcaagggagtactaaactcttactgtgtttggccattttaggagaatgcttaatggttactacttaaattgcggattttgatcataaattttttttttttatcttattttgtttcttctccattctattccttcctcttggcttcaagttttagtttttatttgtttgtcttaagaggatttcaattatattgggttagagtttggattctgcttctagacaattggatttgtaattaatgcgctccctttggtcgttctgagataatcatgtctgttctgtttctggggaactcctgggttcatatcccagctgagagtttatgtttcctttgcttttggtttctaacttgagagattgatgttttcattcatatattcgctttttgctgaagcttattttattgatacactacactatcatgtaattactgtgtaaggttggcacgatttgatatagtgtgtggttggtcttttgcttgcagattgaccaaagctcatatcttcgtatctggaatta

SEQ ID NO: 39563 - DNA, 494 bp, Arabidopsis lyrata
  Intron number 4 from transcript 359346 (locus 359346) deri ved from phytozome v7.0 (chr-ID scaffold_132; pos 16696 to 17189)
gagaaatattatcaagaagcattgtaagtgtcatctttttcttagaaaatgtttaaatagggaaatcatgtgggaaaatttgctaatgcccaatgattgatggataaaaatttagttggaaagtttgatttaaacaaaaaatattccatttatagaattccctaagcgacttcagttactttggtttggtcacgaatactattgagtaaacaatgatatttcactatctttgcttaaagatgataaaaatcaaaaaaaaaaatttaggcaaatatttagaattctgaactctagcatcatgtcaaaatttatggatatgcatcttaaaattaattgacaataaataagtatataattctttgtttcttatactatactaggtgccatacatatattttccgtggaactcttaaggaagaaagtttttcaaactgtatacttatgatgagcccttctacatgatcaggagggtttgtaagtctattgcgagaata

SEQ ID NO: 39564 - DNA, 457 bp, Arabidopsis lyrata
  Intron number 5 from transcript 494273 (locus 494273) deri ved from phytozome v7.0 (chr-ID scaffold_8; pos 530877 to 531333)
tcgccattaagaaactcaatcgacaaggtttacaggtaaaaaaaaggatcactttcttgtctaaactctgttttgttgctaatctaatcattaggatataattaagcaataaattgaagctaagagattcttcaaagttggtttgatgttaatattgaagtgaattctggaagaagaaaaactgcttagaatcgtgaaatagaagaagtttagattgatgcaattatgaagcaaattcaaattttgtcacttttttgaagtaaagtcgaagaaatttcgtaatcttgaaataaagatttagaatagtcaaatagaagagtaagtatgagtcaatggatgcatttattaagtaaactttgtccctttgtttctttagtaatgtcaattctgaaattttcttcaaaagttttgaattttcccttctctgtgtttgaatggtgtattagggtcacaagca

SEQ ID NO: 39565 - DNA, 557 bp, Arabidopsis lyrata
  Intron number 2 from transcript 928242 (locus 928242) deri ved from phytozome v7.0 (chr-ID scaffold_3; pos 2466793 to 2467349 reverse strand)
taatcatagaagacatacaagcccctattttcaaggtcctccctttaactctttttctggactaaatatgtttttccttggcatgtcttggtagaattttatatttgtagctttcaggagtagcttatggccttataagaagagatagctttcttggttccttaccttttctcgggtgagtgattgtggtgtgataactgagtgattgtggtgtgataacaggcttttctgtttacgagtgtacaatccgggaccttctcctggggtgctgctcatgggataaggttttatctttctacttctcttttggaatgcatgaatgtctatatgctaattcatagctgcactgtctccatttctcgtatgcagtaagttcatggagaaattttgttataggtgatcatgtcaaatttgaaccattttctgcttcacagctcgagttttctttgtttagagtggtctttagtcgatgtgaaaatttaaggttgaagcgtaggttgatacaaattcccttttccttttgttttattgtgctttttttgttgttgttgttgcag

SEQ ID NO: 39566 - DNA, 285 bp, Arabidopsis lyrata
  Intron number 1 from transcript 492401 (locus 492401) deri ved from phytozome v7.0 (chr-ID scaffold_7; pos 7595136 to 7595420 reverse strand)
atttgctacgttaagatagctaaaagtggaacaaggtaaacttatggaaaaaagttggctggtctattagttttgtttttagtttcgtttttttgatgtgttattataagtaaagaaggcatgtcaataggaatgcgttatacagtatatagtgatgctggtccaagatgacagtaatgatcagtggtccatcaactagaacttcaatttttcttggcactatctgagatcattcataagtttagttgaggctcacttgttacctcttttttatgaatagctgcc

SEQ ID NO: 39567 - DNA, 803 bp, Arabidopsis lyrata
  Intron number 4 from transcript 471289 (locus 471289) deri ved from phytozome v7.0 (chr-ID scaffold_1; pos 4613109 to 4613911)
tcaggtgtgacatttagtatacgacttagtctaaaagacttggtttgtgacacttaaatcgttcacataatgttatgctacaaaacactttttattgttattacagtattagagattgctagcttggctttgccttgcaagtcctgtaagagcctcccttggtattcagctaccggaatcgaagcaacagaagtgtttgagttaccaaatctctttggaagcagtagagattcactatatccatcatcatttatcttcttcattgtattcttcattcataggcaaagagatctcatcaaagcttttgatttccttagagatatctttacatttttttcttccaagccagccatgatgctctgttgctattggcggaagatccaacgtacattggaccttgaattccatctaaagctctcataccaacatgaaagaagatagtgttgtggtttgcataacgatcactcgagtcgataccttcaaactttctgagggaactgaacatagcagattctatcaccaccacgatcaagcatgaagcatattccttccctcaaagccatggggttgtaaatgtagtacgtggtaagaatcaagatggagaatgaatgggccattaagcattcatggctactgctttcttgttgtgatcatcatatcaaggaacggtacatagagtagcaatggtagcctgatgttaactgcattatagtagatgttacttgctaggtaggttgggttgaaagtacttgaaagtaaggaacatgtaaagaactggttttatttaattttggttcttaaca

SEQ ID NO: 39568 - DNA, 824 bp, Arabidopsis lyrata
  Intron number 1 from transcript 896343 (locus 896343) deri ved from phytozome v7.0 (chr-ID scaffold_5; pos 1977973 to 1978796)
cgtggcaagctctacgaattctgcagcagccctaggtataatctgtaatctttgatccactttttcttccaaagtttctatattttgatccattttagggttttgattcttaaggattatggaggatatgaaaactttgctgtctttcttgattttgttaaaattaattaattagttgattagggttcatttgttttgtgtgttcttagttttattatgcataaatcttgctcgtagatagtgagataatttaacaaaggatgatcaaagtacgtacaaagggtcttaattgctctagatgatgattaaagctagagactatggatgaaaaaagtacattagatttgtgtatataagctataaatatagttaaagcttttacacatgagatagagtgttgttgatatagtttccaaaggattgatccaagtttccaaagagacaaagaattgacctctggatatatacacaaagctgtaaaagatataaaaaaatactttgactacttctttaagttagtatctctctcaactacttatgatcttattaaagttaaagagacaactgtgatgatatatactcaatttcactacttatcttttgcacataaacaaagtattcttctttttgttaaaaaaaaacaaattcttgcaaaaacatcatgagattgatacccatcttgatgttcttggtttttatcatgcagattttacaatgctttaaaggtttttgtttacctttttgaaatattctcaaaatgaaattcaaagtttggttgataatatatgataaaaatatgatcatttgtttgtatggatagtggt

SEQ ID NO: 39569 - DNA, 504 bp, Arabidopsis lyrata
  Intron number 1 from transcript 491740 (locus 491740) deri ved from phytozome v7.0 (chr-ID scaffold_7; pos 4958396 to 4958899 reverse strand)
tttgtcttctctctctatcttccaaaaatctaaacttttttttttaatagatttgggtccctcacttctttgattttaacttttctttatgaagaaaagggttaacaaaatgtgcaaagggtttcagattttagctccttgaaaactcataacgcataaagttcttggcttcatcgttttctttcttgattaattttgcattttatatcttgtgtctgattctgtgcgaaaaaggacacaaatatgagaggagtttcgtctctcaagaactcacaaatcacagtttaagacaaaattatagtcttgtttctttcaaataatgcaaaaatcaagaatctgagacataagagaaacgtttatgtctctgtctattaatcaatgctatgttgctttgtttcaactgtttcaagcgacaagcgtttaattacatttcttgttaaaaatcttgataacttgttcttagttttgcagtttctccaacactttctacgagtcttgagagaa

SEQ ID NO: 39570 - DNA, 530 bp, Arabidopsis lyrata
  Intron number 3 from transcript 934344 (locus 934344) deri ved from phytozome v7.0 (chr-ID scaffold_4; pos 17660819 t o 17661348)
gagaaaggaggtaagcatatctccaaatcaatcatgaaatagacaagggagagtatgaagagaagagaagattgtttttactatgcttttgtttttagtctctgctttctatgaaccgattcttccttatcatgcttcattatctaatagtatacatcataataaaagaattaggctacttgatttgacctcttgtgcacgggtgaaatatatttgttttgttaatgccatttctagtgatctatatagctcatcaagttaaatagtacacatttttctcgatttccttttcattgaatacaaaaccaaaacaaaagctgaatcaaatgactattttagatagttttgttagtagcacttctgaatttcacaagagactgatttggtttttagatgaacgcttaggaagatcttgaagaaactgcatatggtgcaaaaagcacttgacttgtctaaactctctaccactttctctaaacctatatgtatctccagcagcatcggatcaatccagactcccttatttccta

SEQ ID NO: 39571 - DNA, 958 bp, Arabidopsis lyrata
  Intron number 3 from transcript 484006 (locus 484006) deri ved from phytozome v7.0 (chr-ID scaffold_4; pos 23314358 t o 23315315)
aaagtctttgttcacttttttggaacacaacagatgtgagttctcatcccttaaccttttccctcttccatttttttcttttcttcttatggtcgtactctgtggttgaatgctaagattttaattttaatgtttgttctttttgtcactgagtttcttcttcttagattagcgtggagaaatcagtaggcttgtttatcggcttcaatgttagattatattgttaggcaggatgcactttgttccccacacctaaatgacatcacagtttataatttccagtctttgatcacaacccagcctggtatacacatctgggttcatttgagctgttaatgttaatttagtggcagcgtaataaatttatgtatctatatagatataaatgtgtgtgattttcacccagggggtaccccgttgaatcactcacatcgtccttatgttgtgcctaatgtctctgtatctagatacttgggaacatttgcttcttcttggacatttatattgtgctgttggatttaacataattttctgatttgattttggttgcattctttccctgcaaagtatcttttccatgtgttaataagaagacggacacgagtaagaaggttttttagttcagagttttatagttagatacttagattgttcttgaagctttgggattggtttatttttgttttcctttgaaaattgttctcaatctgttaggttgaatagagaatagtgatgaattcattgtagtctagagagcattctgtgaacagcatagctttgcaagagccaaatttgattgttgacctgaaaaaaatggcgatgtagactgctcagtgctcgatttctgctctgccctcaagatcagtgagaattttgtttatatgtaatcatatggagttggtgacatttttttgttaattttttttattactgtgcagagctttctgcaatcataccg

SEQ ID NO: 39572 - DNA, 385 bp, Arabidopsis lyrata
  Intron number 1 from transcript 328786 (locus 328786) deri ved from phytozome v7.0 (chr-ID scaffold_7; pos 5372664 to 5373048 reverse strand)
gtcctagctgcggccacaagctcgaaggcaaaccagtaagtaatattcctttttccttctattttattttaattaacagaaaaaaaaaaattctttatctaccttctttttctcattttaggtcatttgtaaatgtttttttttttaagaaaataaaataaaaagaggaaaagaatcaatgaagaacatcaagaatgatgctctctgttttattctatcgcttgcagaaattcaaaatccaaattttaaagcgtctatatacgagtctttatatgtataattgtatatacttatattctcttgttctttttctttatattaattaagttttttttttttcctctttttagcaggattgggttggtttaccagcaggagtgaaatt

SEQ ID NO: 39573 - DNA, 639 bp, Arabidopsis lyrata
  Intron number 2 from transcript 484041 (locus 484041) deri ved from phytozome v7.0 (chr-ID scaffold_5; pos 149661 to 150299 reverse strand)
ctacaaagctcttttgctcttctcctaacttttgggtctgcctctcgattcttcctctgttttcgctttctttttgtttgtcaatttccctttccattatttgtcttggtgtattcttgattcattcaaaacttgtttaattttttcctcatccgggtaaattcagattcctagatttaactctctttttttctttttttcctttttctgtagcggcaatttatttattttgttgcaaaactcgactcgataaacttgtgcagtttaatttggtcaaaagaaaagaaaaattaatatatatagtttgtacagcttattgtgttctggtaaccaaccaggtttggttcagctttcacctaaaccaccatccattaataccattatagctctttcaattaatccacaaaactgttttccttatttaagtcgtttgatctcatcaatgttcaaactctttcttcatcaattcgctcgcagcttctaattcacatgtttatatatgttgcgtatggaatctccttagcattgaatgcaaatgctgaccccaatccattatttatcatttcgcagctaataggggaagaataaacaaggatttcttcagctgcaagcaagtttctttctttaccgtgaaacaga

SEQ ID NO: 39574 - DNA, 409 bp, Arabidopsis lyrata
  Intron number 3 from transcript 496022 (locus 496022) deri ved from phytozome v7.0 (chr-ID scaffold_8; pos 18894450 t o 18894858 reverse strand)
cttcatttgtagcgctttcgctgcttgttttgcagaggtatctctctcttttgtgcgagattagattattattcctctcttttcggtttttgagtcattgaattttcttagaattcgatcaatcactgtcactggtgaacaatccagagaaatgttaccttagatttactgtttttctgctgaatcttcgaaattgagctttagaagattaagaagctaacctataatggtctactctacgactttaaagtccattttctttgggaatttttgttatacttattgaaatgagctacatagactcaggaggtttagtgttttggaaattttacttttttgtgtgttaatgtgtttgttttgtagtctttagtcaaattctgagtcatgttttatgagtgattttgtagtt

SEQ ID NO: 39575 - DNA, 248 bp, Arabidopsis lyrata
  Intron number 1 from transcript 485593 (locus 485593) deri ved from phytozome v7.0 (chr-ID scaffold_5; pos 16018064 t o 16018311 reverse strand)
agcgtgtcgacgaggttttacagtgggttgattcggtaataaagtgttctcctttagagcttttattcctgttactagaaacataatctcaaattttcttttccttagggttttgccgtcaataatctttgaattgattttgttgtgtcatagtcatatatagatgagatataacatgttgattcaatcgatggttgatgtttgtatttgcagcttgagcataaactgaaagaagtagaggagtttta

SEQ ID NO: 39576 - DNA, 788 bp, Arabidopsis lyrata
  Intron number 2 from transcript 926389 (locus 926389) deri ved from phytozome v7.0 (chr-ID scaffold_2; pos 14520612 t o 14521399 reverse strand)
aagaagtagcttgggctactcatttctccttacatgtgcttgttaatctatggatttaactcacctggttgtctctttgttttctttgctgcaaactgatgtgttcttgcagttttagattgctatggtttgaggagaaattctcttgttaatgtctgttatattaatatcttgcaggcatgtcttctccccactctagtttatctaactttgctggtaaatccacaattggaggacagattctttatcttagcggtcaggtggatgacaactttatgacatctcttgcctccgtcatatagctcgacttgtttttgagctttgaaatggtacgtatactgcctttaatttcaacctcacttctattttttttattcattgatctttttgttattatgatgatcacaattccaaagtctacttatttgtttatgcattttcttcaaaattctcctaaaataaaagttgttagaaatcgttgtttcacggccatggttttatggccctctctagtaactatcatctacaaatccgatctactaaccaaaaaaactcaaatggtttgctcaaaactttgtacatcgtgtgaaaatgcaggatcttgggtgatatcttcatgggaccatatcacactgtgttcgattacgggaaagcaggagttggattcgccaaaactgcttaaacatgatcacttctttaatacccttttttatatgatgtttgtgaatgtgtatttagacaaaatcttaaaatggtttgtaataacttaaacataatgctatcctaga

SEQ ID NO: 39577 - DNA, 503 bp, Arabidopsis lyrata
  Intron number 1 from transcript 926389 (locus 926389) deri ved from phytozome v7.0 (chr-ID scaffold_2; pos 14521440 t o 14521942 reverse strand)
ggtaggtatacgagctctctctttctctcttcatcgctctatgtttcttctttctctctcgatttctagattgtgcgcttactgcttttgttagtcgatcggatcttttcttctattttggttgaatctcttcggcttactttgtaccttcgattatgaagctgatggattctttgctctggtagttaatcttaaatcggaaggaggatatcagcttttggattagaaatcggattagggtttagctgatttgttggttttaattggcttgtgtagaagtaacctagacatttctcttgggaattcgtgtgaatttaactctcaggtagtgagggattgtgtatttagtagaattctttgctaaatttctcatgttgttggtatgtttcgatttgcttctcccacgtgtgcttttctgctccttatgaatgatgattttgattttagtggtaaattttcgttctctaggaaaaattagttcgtggactgacttggattctgaa

SEQ ID NO: 39578 - DNA, 750 bp, Arabidopsis lyrata
  Intron number 2 from transcript 478325 (locus 478325) deri ved from phytozome v7.0 (chr-ID scaffold_3; pos 3969465 to 3970214)
aagaagagactaagcgtcttgctttgatccgtgaggtattttttttatcctttcttataaaaaatgattgctttttttggagaattgtgcttcaattttggtttttgttatggaaaaattggattgggatgtaaaattgaacatttggggggtttttatattatgtagtttatggatttaatccatgtttaaggggaaattgtaggacccaagtgttggaattttcaagatctgacaattgcattgaacaaattttttttatattttcctttggtttgtgccatctggggagaaaattttggggctttagtgttgggttttggattttaagtgatcaatagcaagagaacctggatttggttttcttctagggtttttcaattcctgggtcatgaaaaaaacagtgaaagtttctagttttgtagtggaacccatttgctaaaaataagctaagtggattaagtttttgtgaaaagaatcatttgcttcttctgggtgatttcaaagttcatgaatcttgacttagtctctcattttagtgtttttcccccaatttaagggctgcaaaacagtgaaagtttctacatttatagcacaaattttaaatcccatttacttgataaagattagctctatggatcaaagctctttacttcttatgaaaataagcatttgcttcttcttatgttgatgactaagaagctcagtggttaaattggatttcaggaacttgaaggtttagctgatccc

SEQ ID NO: 39579 - DNA, 840 bp, Arabidopsis lyrata
  Intron number 1 from transcript 484077 (locus 484077) deri ved from phytozome v7.0 (chr-ID scaffold_5; pos 362608 to 363447 reverse strand)
ttccttttcctctttgcaagctctgctctctcccaaggtaataatttctgaaatttcttctcttgaatctttaaatcaacttaaagaaacccatttcttgcttaataaatctgttgatttttctatgtttcttctctcactctcactcgtggaatcttcttctactttagtggtttaagttttctctgtttctttgtgtgttttttcactgaaggatctctttcttgtgctcactaattagaaaatgtgttgtttatgtgcttccttcatttttgcaaatcttttgttaacaactccataaccataaaaccaaaaaaaacctccacaaccatagatgagttctctttgttttctattaatgcaaaaacaatctgataatttcagggaagttttattcattttagatgattttttctgggtgttctcatgtcattaagggttttacttttccccaagaaagatgaagactttaattgaaaaatcttagttttttaaattaatattccaatgttcccattctttttaatggggaatgagaatctcaagatattgcatcccagctcatatgcttctcagtagtactctgcaatctaactggaccaaactgtccttggagctggttgcatccatacacttcagtgtaagggcattttcgcattttcgctttttcgcaccagccaatgacgaaactctttttgactcttttgcattagcaatttggttttactaatgcttattgtggagaattggatcgaccagtttacggattttcatgtgaattgtttcgtttttaatatgttatttcagattctttgatcggtgtgaatattggtactgaag

SEQ ID NO: 39580 - DNA, 829 bp, Arabidopsis lyrata
  Intron number 2 from transcript 351658 (locus 351658) deri ved from phytozome v7.0 (chr-ID scaffold_6; pos 12096005 t o 12096833)
aggcaatagtaaaagcaaaagtgaagagtgggaaagtgttttacatgttgtgtgtaatcggcttagcctctaaacgcgggtttaatgatcttgttcttcactaaacctctctcaactcctaattttcttcttctttattttcttttattttcttgactgtggatgtatatatatgtgtgtatttatttcggttatacttatggtgtaacgcagttttgtgtttgttttctcttttctatctctagtagagattctttatgtagtttagcacatatagtttggtgcaattctggcctagggtttaatttgttgtctcatggccactcctaaaagcgtttgtgggagattagggaagttataaccactaacatatcctcaagagcttctcaatcaaaaagctacgactctatccgtttcaatataagtgtcattttaacgttttcgaacggattttaaaacaagttaaacttttcattgtacttctaaaaataatattgatttttgattcttttaaaatatatattttacatattttattagttttaagtatggacaaatcatatattttatcagtcaaaatttataatgaaatcataaaatgagatatatttatatgaaatggatgaagtatgagaaagagagagaaaatccacacgagtattcttgatcacacttaaaagatgaaaaaagttgaagtcatgaatcaaccatggatcaactaattactacgaaactcttgccggtttagtattaactcgcaaagatcatgaacttcttcttcccccacatagtatataactttgttttcaaattctagaactatagagtg

SEQ ID NO: 39581 - DNA, 970 bp, Arabidopsis lyrata
  Intron number 1 from transcript 941774 (locus 941774) deri ved from phytozome v7.0 (chr-ID scaffold_6; pos 9491308 to 9492277 reverse strand)
aagctctctttcgaggcttacgaggtatatatgtctatgcaattcatatatatggtctttcatgaaaattttgctcaccaatattcttatatcctcttttatgtttttttttatctttttttgtgagtaagttcatcatgcctatcaagctactttcactccaattttgcacctgtcctgtttagaagtacagctttatctttgctccctgaaaacagtaccagagtttcttaaaagatgtccgaatctgaaatccctaatcttggtaatgacttgtacaaacaaactctagagtttaactcaatacacttacaagattttgtttggtgttatccaaaattcactcatccattctgaatgttttgtgtatttacaggatttactttattcctcggtggcagaacaaacaagactctcgtccgtgcctaggtgtgtgcgatcatcgctcgagtttgtagagataaaactcatgttccatgtaaagcctatcgaaatggaactcacaaggtactttgcaaagaactctgtaatcctcaagaaacttgttattcgtttgaaagattccgttgaagaagacgatcaagctgtgttaatcgctcttcttacattgccgaggcgatctagaatatgtaacatagaggttattggaccgagaagatgacttttatgtttatctgtgatcagagtttagattggattaaaatcaaaaacagtgtggggattttgatttcgttaaactctgttatttgtgtttttgtgagctttgatcaaacaactcttggatgatgtttgggattccaaaaacattttaaaggtttttgattttgttgtcatgaagatctcttgccacacttccgaggtatatgtctatgcaattcatatacatatataatggtcattcatgaaatcgtttctcacaaatattcacatctcttttctttttctttgtgagtagttcatcttagaagtt

SEQ ID NO: 39582 - DNA, 458 bp, Arabidopsis lyrata
  Intron number 1 from transcript 475001 (locus 475001) deri ved from phytozome v7.0 (chr-ID scaffold_2; pos 814804 to 815261 reverse strand)
tcacttggtcgttcccctgcttcctacttgataaaaaaaggttggatttttctttaaactctgacgattttgggcaattttgattcttgcaacaattttgaataccgatcagtatctcttggtcttctttgtctttgttttgcttgatttgggttcgatcatgttttctctttgtagttagggttcttgtgttgcttctgttccacgctttcacatactgtttcctctgtcgacaatcactcgtttattcctgttatgtagtgaataaaagatcgttactttctggtgtataaaaatcgttaatttgagtggaaattactttcttaatcgatctggatttagggtttctgttacttagtttctgcaattcgaattagtttctgcaagttatcctctaatgctaatcaaatttgtgtcctttttttttgtggttagcagtttgaaagattgaaagaaga

SEQ ID NO: 39583 - DNA, 721 bp, Arabidopsis lyrata
  Intron number 1 from transcript 487404 (locus 487404) deri ved from phytozome v7.0 (chr-ID scaffold_6; pos 2219035 to 2219755)
agaggatatcatcttggaacgaattagagctcctggtatatcttcatctttgcattttggtttgttaggattcgttgttcttatgctctgttttgattttggtggctaattagccagtcacatgttactgtttgtgtgaatggtcagtaagcacacctatagcaatgtcgttggtgattcgtttcaacactaaaacaggattaaacccagttttggttatggatcatcaactatatctttggtttcaatttttttgtaaatgtgtagcataacaaaagtgcccaattagccgatcacatattagccatatggctgctactttctgtgattggtcagtatgtcaccaatagcactatctttgttggtagccttttctgaatgtgagcaaattttgtgttcttctttcttggctgttaactgtacacataaagttctcatttttacataagtctctctatgggtggacacgttagtcagccacattattctatatgtgggtggccgtaatgcccacccagatgttttgttggtggcttctttcacgaaagtagatttctgctttcacttcctagctatcaactacatttttgagttaaaagtttttgatggagaaatatcttgctttaccatcttaagtgtacttttattttgaggttttgagatctttattctttcggaaatctcaggtagcaacgcggaacagtccacgatatcaggagat

SEQ ID NO: 39584 - DNA, 842 bp, Arabidopsis lyrata
  Intron number 3 from transcript 946577 (locus 946577) deri ved from phytozome v7.0 (chr-ID scaffold_7; pos 11977894 t o 11978735 reverse strand)
attctacggatccggccgtaagggtaagtagcttgttcgaattctgttttttttttaattatatattaattagatttacaaaaaaatcaaacaatttatatagcatgttaaaaagaatcggccacttaggcagtcaaatcaattgaacgttctaaacgcatcagttaaaaactttttcaaccgagttttggacctacacctctaattaattggttaaaatgtcggactaatatattttcaaattatttattaaataattacaaatatggagaaatattttgaatatatgaaaaaaattttggatataagaaaaacacattattattttatatttaacatcatattttattttactttaaaaattagaaaatatattgaaacatacataatttctttaactatcatatatattttattaattatagaaatataaaataatataaaaaagtttcccaataattatcaggaatggctcttttgagttctaattaatttcggatgacaaaaaaaaaaaaatagttaggcgtcagaccctcttcaagcgcttgattagtgcttaattttttttgaacactttattttgtgtttcttatctttcataggagaaacaaagaaatagtataggagtaacacttgtctcacaaatttttcacctaagatgtttatctttttcctataattgaatcctcttttgatttacaagtcaaagatatatgacacaagatttcgatacaaacgagattagtatatcgatccatcacatattaggatgcatacattttatgtatagtatgataaatgtgaaagagtaagcagggcggtgtggacatagagattgcaaa

SEQ ID NO: 39585 - DNA, 243 bp, Arabidopsis lyrata
  Intron number 2 from transcript 352044 (locus 352044) deri ved from phytozome v7.0 (chr-ID scaffold_6; pos 19692647 t o 19692889 reverse strand)
atagtgttgcagattctgacattgaaggtttaatcttaaggaaattttatgaattttttacttaaatctggatgtgcccattttggtagctaaatcgaaatatatgatctttgagttacaggaattgaagaagctcatgatgaaactaatggtattttgctctatactcgtaaaatcgaacctcgaaaaacggcttttttcgtattttctttacttaatgtttgtttttgtggaatgttttag

SEQ ID NO: 39586 - DNA, 782 bp, Arabidopsis lyrata
  Intron number 1 from transcript 897438 (locus 897438) deri ved from phytozome v7.0 (chr-ID scaffold_5; pos 12471246 t o 12472027 reverse strand)
cttgaaaagaacaaatacataggtaaaatattattatcatatataatatgttattggttttttgttagtgatttcattgagattttattttctattattttttagtatgaaatacaacttttggagaaacaactagcagatttaaaaacaaaacttgttgaaatttaacaattattcttctaaatcatccggattcgtattccatttacatgtgcacatctacaatttcaaggtattcttattttgatgaccttgaaacgaacagtttgattgataaaaattctaaccaatatgccatgtaaagtttcttttctttttgtcaaaccatactttatactatgtaatttttttaagagattagtgttgaaaatagtaacttagtgttgaattcaaaataaattatttaatttgtagattgtgtttgcatacgacatgtaatttttcttagtttaaaactagctgatattcttcaaatcgaattttcttataagtatcaactagccatcacaagaatttgtaaacacttcaatcaaaatgttgtgattttaaagaatatgttttactaatcttatgaacttttctcaaaatttgtgaaatatattatacttaaggtggaaaacttatgtttcgtatataagccctccatacgaacttatgaaaaacctatcttttttttcaaaggttaaaccaatcaaaaagtaataattcttagtacttgcaatatttttttatattttagtttattaattttttttggttaaatggttttagatccatcggtt

SEQ ID NO: 39587 - DNA, 403 bp, Arabidopsis lyrata
  Intron number 2 from transcript 487407 (locus 487407) deri ved from phytozome v7.0 (chr-ID scaffold_6; pos 2235486 to 2235888 reverse strand)
cttcttctgccttcagcggcaagctcaacatccttgtaagtttccttctcctgctaaagacttttttgttttctatgcttttttgatgaggtttctacacattggaatcttcaccaaatcttgaaatcatatatcaaattagctcagcatccttgtaagtttattagacttgtgatggtttaatacatgtaatgatcagctatctgtcaattcaatacatgtaatctaaggcttacgatttatcgttgaaccatatagtgatgattgttgatctcatgtaagtttccacctattatgcaagatcttatataacatggtcaacattacaggcacaagttaggggtttgaatcattctttgcccttctgaaaatttctcaactttgttttgttttcaggtaaaca

SEQ ID NO: 39588 - DNA, 880 bp, Arabidopsis lyrata
  Intron number 1 from transcript 494426 (locus 494426) deri ved from phytozome v7.0 (chr-ID scaffold_8; pos 1588628 to 1589507)
ggctctacctttgttcctcatcacgtaagtttccagaattttcatcacatttgataacttgttctgattcgcgagattagtgaattgggtgagaaagtgaagtcctttcgattaggttaggatttaagcttcaattgctttttatctctactgtatatagatagtttttagttgcttctgtagaatctaaactttcgattttgatttgtgtgaacctcttgaagtgtttaatcgtgggaaatggaatcatattggctcggatttgtgtgctgaatttacattagggtaaaagggatttattgattcatggaatgttttaatatcatgttgttttaaacccaactgatacaagtgggtgctttggtttatatcactacattgcaagtttaagcttatataatcttatacaatacacacatctgttctttggaatctgaacattcggatttatggtgtactgttcttgagttttgtgtcccttgtttggtcatgggaaagaaagaatcgtcctggctttgattgcgggttatctgaaatagggaaagaaagaatcgcccttgctctgattgcaggttatctgaaatagggaaagggatgatttgtttatagaatgttaagtagctctttcatttttgaatatcattttttttttaaggcaactgataaaacgagtgtttcagtatcactcagagtcttatgcacacttgtgtatttgaaaactggacctgtttggggtttataagtgttgcatgtgaagataaaaaaatcctgtatttcatcctagtttgaaacgtcagtttttatctcttggttatcttaatttcgctgattctctctggcttcagtttgttcaagtacggaatatcacttccaaggaaaa

SEQ ID NO: 39589 - DNA, 1042 bp, Arabidopsis lyrata
  Intron number 1 from transcript 484819 (locus 484819) deri ved from phytozome v7.0 (chr-ID scaffold_5; pos 10435687 t o 10436728 reverse strand)
ggaagctttcagcctattcgacaaagacggaggtctcttcttcttccctgctctcagatctcttcctcttctcgtttttttttggagagatcgtgattttctgcacatttcgtttgttgtttcatgtgattgaagaacgatctcgttttgattcgttcagtattttcttgctcacatctcgatagtgtttagggttgatttggcttctatagaaggatctatagaatatatagaatctcctttagtatatttgttgatgattactaagatttgtagttatggaaactagtttaattaggttaaacattattagatccttgtataattgcaattatcagtttaaatcgtacaatggaacagtgaagatcatttttcttgttgtttctctgtgatttgctttgattctggaccaatcctgtgatttaatcatgcggatttgtatcacaaaatgtagatagatctgcagatgtttcaacccaaaatctaaaaacgaaatttcgtttattctgtgatgttgccaaatggaaaatagagaaagaagttgataatatcatctccgttgttctgctttgtatcagtcgagaacttgcgaatttcttagcaccgggtgcatcttgtgatgcttattggccaaactatcatatttagaacattgtgcatctcctggcctttgattagaaagaggttttaaaggtttcttgatggattgtatgcaagaagtgtctttgttaacttggtagaggtttcccgaagaatcagttttacttgtcgtatcttcgtccttttaaccgaaatatactatgattggggttagtagtgtaagagtattttacaaagagcattttgagttgtgcttttatttgaaaacttgacctattacttgtgtcaagatatttggtttcttcatcttcctgatcttgttgccaatattagagttcacaaacttatgtatgctcggaactcttgcattataaaatctgaagttgtgtccaattttggtttggttgcaggttgcatcactacaaaggagcttgggactgtg

SEQ ID NO: 39590 - DNA, 916 bp, Arabidopsis lyrata
  Intron number 3 from transcript 491817 (locus 491817) deri ved from phytozome v7.0 (chr-ID scaffold_7; pos 5301185 to 5302100)
actaaagctgttgccaatcaggtattacattactcatttttttaagatcaatgtttgttatgtttttgttgcaaattggttaaaattccaattagtttggttactgtttactgtgatttgtgctcattagcttttatacatatgtcgggttatttggaaaatcttacggttaagtgctttagtgaattgatactttaggattgattatagtttggttttagagctgtgatgagaaagctaacacgtaagaagaggtattcctttgtggtgtatttcttctatgaaatatttttgttacgcttggcttctgagctagaaactcttagttattgcttttggacaatttagtgattttttttttggtgacaaatttcatctattaggtttgataatagtttggtttttgagctgtgatgagaaagctaacacgtaagaagaggcactcctttgtggggtgtttcttcaatgaaatacatttgttacgcttggcttctgagctaaatgcttagctatttgtttcgatttattgatttagtctattttagctgtgatgagaaagctaacacgtaagaagaagtactcctttgtggtgtatttcttcaatgaaatacatttgttacgcttggcttctgagttaataatagtatgaatcataatcatacctagaatttgagattactttatttagtttgcaattcctatcagtgatgagaaagctaacacgtaagatgaggtactcctttgtggggtatttcttcaatgaaatatatttgttacgcttggcttctgagataaatctttctactgtgtataatttcatattacttatgtttttccttattctatcagtattaaccgattgattgtcttaaacttttcaggtggtggacaactactacaggcctgatttgaagaa

SEQ ID NO: 39591 - DNA, 493 bp, Arabidopsis lyrata
  Intron number 4 from transcript 495516 (locus 495516) deri ved from phytozome v7.0 (chr-ID scaffold_8; pos 16458552 t o 16459044 reverse strand)
ggattcacaggagtcttggggtacacatatcaaaggttgtctctcagtttcctttctacatttgttttcgtgatactgcatttgtatacgaaagctcagatattaattcgattaataactcattccatttggctcaaattctctgtacaaattttcaatttggttttctgctcggtttctatatttgcaatttcattttatattttccatcacaagagctgaaaagtctgacatgaatgcattaaatctccccacctccttgtgccaccatttccttaactagaaaaaattgtcatctatccagtgtttacacacgaacttcaagcatttctgtacaaaaagtacataattcggtttttccctctgatttttgtatgagctgggtccttcttgtcgagtagatgttaactttagaagcataagctacttttttcttctaccaaaaaatctgagtgggctgatgagtgcaggttcgatctgccactctggacac

SEQ ID NO: 39592 - DNA, 707 bp, Arabidopsis lyrata
  Intron number 2 from transcript 495516 (locus 495516) deri ved from phytozome v7.0 (chr-ID scaffold_8; pos 16459199 t o 16459905 reverse strand)
cccgccatagaaaggtctcgaatctctgattttttgttttttttttttttctccgagctttgtggatttgggaatctatgatcgatctcaattcgattggatctgtgttttagcagctatcgttcttcattttcttcgacttcctgtagttaggagaggttttgtatcgtcgatccttcgcttttcgatcgattgagctagaatattattcatcagcaatgaaaatcggtttatctatttcgatttgttgtctaagaacaacaacagatcacgatcgggtttttgaatttatgatgattgttctattcaaccccggctcattgaatgttgaattctagtgttttcctattgaaattcgttttcaattgcttgatttttggaaacaatggaacaaagggatccaaggagcttagcgtcccctagggattttcatttgtgcttggtaggctttgagttatctcccgtgtttgaaactattggttgtagttgggacagcttttgtgggttggtgatgcatacatgttttatagaaatgatgtatgtcaagtcttcgagaacttcggtgttcatttacagaaacttatctcctacctgtggctgcaaagataattttttcgtttatagagtctattgcttgagtattcacttgattttggtgttacttatttgcagattcttgaagggcttcttaaacatccagagaacag

SEQ ID NO: 39593 - DNA, 513 bp, Arabidopsis lyrata
  Intron number 1 from transcript 487123 (locus 487123) deri ved from phytozome v7.0 (chr-ID scaffold_6; pos 1009069 to 1009581)
cctcgaatcatcgattatttcgtaattggctccttctctcttgatataatctttgaacttttgatttttcctcggaataatgatcagattcatggggtattaaatgtcaagacttacaatttttcgaattttaagatgctagagtgttgaattctgttagtctcaaaagagatagcttcatttgaattgaataacaaattggagattagaaagagaagaagatagtgaagatgataatcaggataaatgatcataatctgtgcttgtaaaactgaaaaataagcttttgttatttgcttgaggtgtgctcttggaaagttgaagatgttagcaatatctaaatcttagttttgttagtttttcataccgattatctttagactttactatgtttaagaaaaaacaatctgtagaggtcatgctttagtgaatcttactggtagaatgttcgtctaatcatttgttaactctttaagttttgtctgttcatggtttataactaggccaaattgt

SEQ ID NO: 39594 - DNA, 464 bp, Arabidopsis lyrata
  Intron number 3 from transcript 941535 (locus 941535) deri ved from phytozome v7.0 (chr-ID scaffold_6; pos 8384550 to 8385013 reverse strand)
gcaaacgttttcttcgcgccctcggcaaggtaaaaatgtttagtttatatcttaccagaagcagcatcatctgataagcaaagatgcgttgggtgtagctgaacaagttcagctggtgtactataactagcctaggactaaatgtagcggattgtatgtagctgtggtgagttggttagttagcaattagtgaggactgaagtttataagacttgttgtctctggttttgtgaattggaacaaggaaaacagttccatagatttcttcttatcattatcgctctgtgttgcgattaactatgtttgattcaaccttggttagagcttggtatggaagatatcaacaaggggagaacgaggagtacttttgtgtgtttatctgagagcatcataaacacagacattgaattttttctttttgtctcaactacttgtaggagagtcaggagcttgcagaaagagtg

SEQ ID NO: 39595 - DNA, 319 bp, Arabidopsis lyrata
  Intron number 3 from transcript 484709 (locus 484709) deri ved from phytozome v7.0 (chr-ID scaffold_5; pos 5865012 to 5865330 reverse strand)
aaaatttaaaaaaaaattgggagagaaagagaaatctccaagaaaatctgcatttttcaatctttaaagaaaattgatttttgaatccatacgtttcttcttcttcttcttcaccaatctcactctgaaaaagatcctcttttgctaagttttgacattaaagtctcaaactttcatgtaaagtttaagtcttttgtgattctttcttctgggttttttaatgggttcaaggttttgagaattagggtttaaagatttaagtttgttttagggttttaagttttggataagcttatttggtgatttcatttgtgtggat

SEQ ID NO: 39596 - DNA, 700 bp, Arabidopsis lyrata
  Intron number 1 from transcript 950476 (locus 950476) deri ved from phytozome v7.0 (chr-ID scaffold_8; pos 18350721 t o 18351420)
gaagacgaggtgatttctcgttcctttatttatttccgactatgtaaactcagagattaggaaaaaaatgtggaaacgttaatgaattcgatcttcttgaatctgtttactatagtaatttcgatggcttattggtttctatgtatcatagaggaattgatttgataaaattttacttttcttaatgtctgtggtggtatctttatcatcagatgagacttttcgagacaattatgggataaaggaaataactttaagctgtatttgtagagttgattcttcggttttggatgatggcatcttcttgattcccaagaatcttattttatggggcacatgttttggaatgttagaaaatactttggttcatggatttaggtttctttctcaaagctagtttggttcatcaacaatggcacatgagctagtttggttactgtcatgagtataataagtaggaagaagttgtgatttttagaggcaacaattattttgagatttgaggttggttttggatttaggaaatgtttggggttgctcttgaattcacctttagtgttctatggtttggttatttgaagtgtttttccctttgattcgttattggttcattgattcaaaaaagaaagaaagtctttcacacttgtgtttttgtattgaattagattgaactgaaaactgctcctgctgacttccggtt

SEQ ID NO: 39597 - DNA, 681 bp, Arabidopsis lyrata
  Intron number 3 from transcript 482239 (locus 482239) deri ved from phytozome v7.0 (chr-ID scaffold_4; pos 15625366 t o 15626046 reverse strand)
tgttttccccttaacgagtctccagatcgggtaattatctctcttccactttttttttttttttttaatgttatgattcagagccaggatcaatgattctgcaggtatttattgtctatgaatatggaattatgtgacctgtttagaagtacaatatactaatatataagtcttgtttcagttcttgttgaacctttaatggaaaatatgttgtccttccagacaaaacaagatctcttttggttttgacaatttatatctatattctgcaattaaagcattttttttttcttttcattatcttgaattcaaatggaatcgaatacctttagaattctgattccgggctttatattcctttcctgaatctgaagttgtatcagttcttggtgttaatgtcttacacatctccatgtgatttgaaatatagttgaagctatttgttctagcaattctcttgtccagtttcatgaaattctcttctacgtctgtgatagttttaaatctcattcgtgttggtttctttttctatgcagagctctaaatctgatgatacttgcgtgtttgttttaaagagtttactacattgtcacattttatttgcttgatgttctctgcttaacctttgttttatggttggtttcagagacttgcaatcgtatctttctgatctcagtattt

SEQ ID NO: 39598 - DNA, 557 bp, Arabidopsis lyrata; identical to SEQ ID NO: 38443
  Intron number 1 from transcript 323400 (locus 323400) deri ved from phytozome v7.0 (chr-ID scaffold_5; pos 13538279 t o 13538835 reverse strand)

SEQ ID NO: 39599 - DNA, 356 bp, Arabidopsis lyrata
  Intron number 3 from transcript 900664 (locus 900664) deri ved from phytozome v7.0 (chr-ID scaffold_4; pos 13154404 t o 13154759 reverse strand)
aagagtgagagtcatcaatcttgctgtaaaaggtaaaacacatagaagctttcttttgataaactcgggactaggtacaataatcagttgtgcagtttgtaattgttgttgttttgcctttcttataggtgaattaatcttttgacgctagagaaatggagtatgtgtggttagtatcttctgtttgtttgatacatggtgagatcacatttgttttgaaattgtttcctaatggtaagtttgataatatgggttttgtttgtattgcttcggttatatcttggcacgattagttttatgaaaatattgatggtgtttttatttgattgcaggttggagtttgtggaaacaacgtc

SEQ ID NO: 39600 - DNA, 544 bp, Arabidopsis lyrata
  Intron number 1 from transcript 484981 (locus 484981) deri ved from phytozome v7.0 (chr-ID scaffold_5; pos 12354945 t o 12355488 reverse strand)
gaatttgctctgatactagtgtgtttccagccgtgagctcaattttcccactaattttctcgatatgtagtgtgcttctctcgattttggtttcgtctcgtatacgaatcttctgatttcgattctggctcattttggtgtttcgttagatcagtaactggaatttggttttagatctctgagatttggtgtttatgtgatcgttttgtgacttatctaggattaaaactgtgcgagagagcttcctgttgagtttactctggttttttcgattccgatagctaaaatttgaaattagaagagttaacttagggcttcttgttcttgaacatttttttaagtgatttttcaatttcgatgatattttgttgtttctcctattgattgattcatcagtttttatgtaattgataatcactctagaggtttgagaataatagaggtttttggattgttgtttgtaagaagacttgaatatgttatgtgaaatggttttaatatgagtgttctttggtttaacaggcgaacgcagcatctggaattg

SEQ ID NO: 39601 - DNA, 672 bp, Arabidopsis lyrata
  Intron number 1 from transcript 906860 (locus 906860) deri ved from phytozome v7.0 (chr-ID scaffold_3; pos 23876498 t o 23877169 reverse strand)
acaccaaacctgttcttcaggaccctgtaaggatctctctctttctctgttctccgtacattgtgtattttcgatgtccttaacgatgatatatgagctaaagatcactaatttcgatttcaattttcgatttatgcctttggttttcggttttgttaactgagtgttatctggaatgtgaaagttaaatgattcattgaagaatgtgaatatgtagatagaaagagcacaaagagatcatcaagaataagaacagatcatgaatcatttgttcatttagaaagccatagaacttagagcttcagattaaacacaaatttttgtttttgtagtaaaagagccaattttcattcggatttgaagtagaatttcaaagccaattggtgaagctcacttcatttagaagccattagcaacttccatttgaatacattctagttacaaagaggatcattttccaccggtgtcgatgtttttccataatgaaattctgagttctttcttgtgcgggttgtactgttttgtgccaattgtttcaagtgttgatgtaacatctggagtccaatgcctcttcttacgtttattttctcaatacatgttatcttgaatgatttggtgaatcttaatgcagtttgtaacatttttttttattagattctgagatcggatcca

SEQ ID NO: 39602 - DNA, 562 bp, Arabidopsis lyrata
  Intron number 1 from transcript 926660 (locus 926660) deri ved from phytozome v7.0 (chr-ID scaffold_2; pos 15621052 t o 15621613)
tttgaagacgagtaagtcttttctttgatttcttattctctctactttgatttcaatttttgggtgttgccaaaattttacatttttcttttaagtcgtattcacgaacctggtttgtcttcatcgttgggtcactgggaaaatggaaagaaaattgaccaagttaggtaactggatttggagttttttcgattaacaatgatttaggaacttgggtctgttgatttgtcgactttgatgtaataaaaaatgagttttggatttagtacttgttagggccatcttttatggtatcttctgtgaaaggtgtcattgtttttaggaggaacatagtcatgtttagctatgttcacaggtttttggccaacaatagattcttcggatatatatttttgtatctctccttttagacaattttctgatcataatgattgatttttttgctatgatggaagtgtttcctctaagatttttaggtttcttgatgcatagtacaagaatctatacgatctctccaccttaatttagtgatttgattcttcgttttcaatcttgcttgcag

SEQ ID NO: 39603 - DNA, 406 bp, Arabidopsis lyrata
  Intron number 1 from transcript 937091 (locus 937091) deri ved from phytozome v7.0 (chr-ID scaffold_5; pos 11262971 t o 11263376)
atcacgaggtataacaataataattcagtttcgaaatctaattttagggtttatgagagatgcttgatttgaacaattggtgaatgatggttttatatgtagaaactagaaaggtttggttttggttttagggttttttggtggatgtagttttgtcggaatacagagctatagaaactttgaaattaatgtttctgaatcaattttaatatgaaactgctcttattacaagggaagaacaaaaacagtaatctattttatgatgattggaacaattagtggatgtaatttggtcggagtaagaaatttatgtttgattttggctttaggtttttagtggagaccttggaatttatgttcctgattcagtttttgatttgtgaaactgttgtttaaaaaggggaat

SEQ ID NO: 39604 - DNA, 656 bp, Arabidopsis lyrata
  Intron number 1 from transcript 476922 (locus 476922) deri ved from phytozome v7.0 (chr-ID scaffold_2; pos 17699803 t o 17700458 reverse strand)
ggggcattttcggatctctaagttcttaccaaaaggtatttatttcaccaaagatttggtctcttccacaatattctcttgctttattcgttttttaatttatctccttaaatcactttgtgtttctgaaatgtttggaatcattttaggacgaagcttgtttttggagtttagtttgagaccttacttaacactgttgcattactgtcctagttatttgttatacttagatttgggttttggtagattttcaactaattttttcagatattccctttgtttttatgactcaagatgcttgattttgaagatgaatcaagcaatgagtttcatcaaatttaaagttgtaagctttgtcttgtagctttctcagccgttggtttttgattgtgaaacggacatctggaaccaactaatgcacatttgttactataaagacaaaatcagtttctttaatcatttaggatactttgagttagatgattggtttattcaagattttctcttatcttgcatgttagttgattggttgagttttcttcatcttaaagttttttcttctttgactatgtttatgtaagtttctgcattttaaagaatccaatgtgtgtgtgtgtgtgtgtgtgttttctctctcattcagatcattgactgtt

SEQ ID NO: 39605 - DNA, 435 bp, Arabidopsis lyrata
  Intron number 1 from transcript 471917 (locus 471917) deri ved from phytozome v7.0 (chr-ID scaffold_1; pos 7177373 to 7177807)
gtgctaaaggtgacggtaaaacggataataccaatgtaaatgacattttctgctttctttaattaaatattctttctcaatttattcttctattgtatttcccaaagaatgtcgattgattcaattaaaaaacgtaggaagaaaccttttatcacaaagtaaattaacgggctatttacgtgtttttagtatattggaatattaaaaaccatttcaatttaattaattacatgttttctctatttagtataatgaaaaaataagtataataaaataataatttttattttttgaaataatttttatttattcgaaaggtgtatgcttttttgtgtgtgtgtgactaaaaagttttgaattttataaattacatagagtttttgtcttataaataatctaccttgtttggtaacgtatcatataaggcattcacaa

SEQ ID NO: 39606 - DNA, 655 bp, Arabidopsis lyrata
  Intron number 1 from transcript 945828 (locus 945828) deri ved from phytozome v7.0 (chr-ID scaffold_7; pos 8407924 to 8408578 reverse strand)
aagctcccaggaaagttcagcgatcgccgtataaagtgaggattttgatttctggggatgatgcattgttgattttgtgttgattttggtgttttgatcattgaatctggatcatatcttgtttttttttaagtggtttgtgtgcattgtgtgaaattgatttttttctttgatgggtttttgtgcaatgtctgcagattctggcggttggggagcttagattcttgatcttgttgacttttgatgtttgatttcgtttttacatggaataatttgtgatcttggtgatgttttgctctctgatggtctagaattggagtttggggttatgtgatatagatgaaaccagtattgaagaatgcttgttgtttaatgttcttagtgttgttgtagatgagcaaagcttaaatcttgttactggatttgggtatttgttagtcggcaatgttgcttcagctgataacagaggtttttgtagtcattactagagtgatctagatgatgaagaatgtttgttgtttactgttctttagatagttcttagtgtgtttgtaaatgtgcagagcttgatgttgttattggatttggatatttgtttatgggcaatgttactacagatgataacagaggcttctttttgttgtttaggtattgg

SEQ ID NO: 39607 - DNA, 696 bp, Arabidopsis lyrata
  Intron number 1 from transcript 328625 (locus 328625) deri ved from phytozome v7.0 (chr-ID scaffold_7; pos 4556101 to 4556796)
aactccacttttcttgcagttgtttcctctacaaagtgagtaatttacccaactgtactaaaaaactaatatttttgggtttagtcatgatataaactagatgaatcaacacaacaacaaacgtacctttgatatctcaaaatcgtaaatcattgaccatattcattatgctatttaactccacatcacatgataaacaaacaaacatcccagatagattcgattccctcaggtgcagccattcgagacacatttagaatctaatcatacaataataataataataataataataataaaaagttagaaactattattattagtcttaacacgaatttagctactaatcagaaaaaaaattacgtaataaactaaacggaacacgtcaatgatttgacgtgacgcaacggagaaataaacggagtttgttaaagttaaaagagactatcttctacagtcaaacaaagactgaaagacattaatgccccttctctctcattctcttttggtatcttttacttttaaagcagagaaggcataattaagggaccaaaaacgcagcgttttattccggagatcagtcggtcggaaagcggctacctttttagtttgcctagagaatttgttcgtttctatcttttactctcttccgacaaaacccacgagatagagaaaaaacgacaaagagaatcgtcc

SEQ ID NO: 39608 - DNA, 841 bp, Arabidopsis lyrata
  Intron number 1 from transcript 327750 (locus 327750) deri ved from phytozome v7.0 (chr-ID scaffold_6; pos 24984158 t o 24984998)
cgttggtcatatcttcgcccttcaacatcaggtattctagtatatatataaaaccaattgatgatctatatacattgaaagatttactggacatgcatgcgtgtattaattatatagacgttcagattataataaagtaactcatcccataacgttaggttaagtcagatatataaatataatgagattatatatatatccgcagctagcatctgttagctgcttaactttttagttaaattacagttccatttatcgcctcttggtttcctgtttattagttttgaaacttgcatagtagtactagtattttaaaattccagtaagttgctaataaattgaaaatagccaacgtgtgtcttcccaatgactcgtttgtcgaaacagagttaaagaaagtcaaatcgtcaatctttgtggttaccttccgacttgcttgtctttattatatcggttgaacaaaacagtttgaaaatgttcttctaaaacaaataaattagatattttaaaaactagctaatgttatattctctccgtttcgttttagttttcggttaaggtttttgcacacaaattaagaaaatcattaaattttttgttttaccctttattaatatattttataattttttcattggtcaaaacaaaacattaattttcaccaaacatttgcattgaaaacctaaaatgacaactattataaaacaaaattttaatcctaaaacgacaactaaactgaaacggagggagtatgaacttttcaatttattaaacgtccctcatgtgaacaggttatgaatctacaggcggagttagcttacgtccaaactcaactttcaac

SEQ ID NO: 39609 - DNA, 349 bp, Arabidopsis lyrata
  Intron number 2 from transcript 496255 (locus 496255) deri ved from phytozome v7.0 (chr-ID scaffold_8; pos 19848619 t o 19848967 reverse strand)
gcgaatcctgaccgtatccttcattttctgtttccattgtgttcgctttaagagtatctgtcaaggctttcttctcggaaaacgaaaaaaagatttccttttgttcaaagggttttacatattagttagtttcttgattctagctggatctattgttagttcttttgacactcttgcttttctacgatggatttagatcttcttcgtttttttttaaattttcttctgtcgttcataaattcttcaacttttagggtttatgaagaattgtcttgttgatttccttgtagatctgatgttttgattcgagaaaagtcataaattttgttattccttcattgttttatag

SEQ ID NO: 39610 - DNA, 387 bp, Arabidopsis lyrata
  Intron number 1 from transcript 473393 (locus 473393) deri ved from phytozome v7.0 (chr-ID scaffold_1; pos 14577378 t o 14577764 reverse strand)
tcgtcgaagccatcaaagaggctggtaacgtcaaggtataataaactattaagtaaaggttaattaattaattgatccgtttagaaaattgtgaggtcaatctgaaaaatcttaaaagtaaagaaaccacacgatggggataaaccgataaaataaaataaaacatgctcgagagtttatttttgttttactttttatatttgatttataagaaaagaaaagaaaaaacgtcaaaggtaaaagatacacatattacatgcatataaagaaacttaacctaataaatctttgttcctttttatacactagatgattatttatttcttgtaattaaaatgatatatgtaaaattaattatttcagcggtttttaccatctgaatttggt

SEQ ID NO: 39611 - DNA, 338 bp, Arabidopsis lyrata
  Intron number 3 from transcript 479655 (locus 479655) deri ved from phytozome v7.0 (chr-ID scaffold_3; pos 9462968 to 9463305)
tgttgctgcatcgaaattggagaccattagacaaggtaaggtttcattttcttccaaatgattgatggttctgttctcaattgatgtgttacaaagttttttgccagcttggccatttaatcaaagaaactgggacgaattatatatgttctttgtatgaactgattgaaatagccagaagtttttcaagcccacgggcaatgctgaacaagtgtatgatgttaacaagtacttgtttattggctgctctgtgttgcacttgaataacttcttcaataatgtgattttatttatgtatttcagttgatactgaaaaccagaacgaaccctctgagtcg

SEQ ID NO: 39612 - DNA, 507 bp, Arabidopsis lyrata
  Intron number 1 from transcript 918854 (locus 918854) deri ved from phytozome v7.0 (chr-ID scaffold_1; pos 458526 to 459032 reverse strand)
ctactaacaacatcactaccgaacagatccaaaaggttccttctttcttcaatttctctccttctcagtgcatatctctctatataataattgtctcatcgagcttttgtgctgagaaaaatcaatgggttcttacgatttgagtgcaagtaatggtggtaaagtgtttatctttgaatctttctcgttgatactccgataggaatctcacaacagttgtggttaaatgatacaacacttgggtctcttgttggtgatcaaaagagaagacacagtttaaggactaggagactagatgcttagtgggttttgttaaaagtttcggagtatatattaatttggatcaagaaacttagaatccgatttttatgtttggtcattgaggttagatgcttgcttgatgttcttgtatagttaagtggcttgatgtcttccattgtttgtggtaagatgataggctgcatcttcatttcctcatcattctctttaatatgtttcagtaccttg

SEQ ID NO: 39613 - DNA, 545 bp, Arabidopsis lyrata
  Intron number 2 from transcript 938858 (locus 938858) deri ved from phytozome v7.0 (chr-ID scaffold_5; pos 18974066 t o 18974610 reverse strand)
agccacctactattattaagaaaattgctggactggtaagagtatttgacatactttgtataaatggtcagagtatctctgcgtcatatcttttataatctacatgctcaaaatttgtttcctgtatgaaatcactaaatgaccatatttttctccattttaaagttgcatgcaataatagtgatcataaatggataaaattgaggtaggaagagttgtgactatccatattgaccttaacgtcttcttttttttttctaaattgtgaaactatcccatatatttctgctgtggttcaagataaacttccccaactatttagttcttgcccttaatctttctctaattccacttgtgaattgtgcttgcttggaaaaaagcgtaaaattaggaaatatgtatctttgtttgcttgcccttttctctcgtatcccttattagaacatcaaattgttatagatgcggtaaggcaagcattttataaatctttttaactctctttagttatctgaaaacctttgttgaaattgtctggcaggtagcag

SEQ ID NO: 39614 - DNA, 245 bp, Arabidopsis lyrata
  Intron number 2 from transcript 485774 (locus 485774) deri ved from phytozome v7.0 (chr-ID scaffold_5; pos 16742309 t o 16742553)
ctagccgtttgaggtctctgagcgtttctcaacattataacttagttttgtgtcaagattgttatctttgatcaatctttcgtttctttgctaattgttttggttcttattttattaaaattctctttttatattctgagaaaagaaagcatttggatgattaatcttgaagtgatttctcggctaacttgtttgttgaatttcgattttgatttgttttctctggttagtgaggaagatcgaca

SEQ ID NO: 39615 - DNA, 762 bp, Arabidopsis lyrata
  Intron number 1 from transcript 474290 (locus 474290) deri ved from phytozome v7.0 (chr-ID scaffold_1; pos 27298145 t o 27298906)
tttctctttttcggcgacccgtcgctacaggcaaagtaaagttacaatctttttttttttttttgggtcttcttcattttagctttacgaaattatcggcttaattcagcaagtatcgtattttccactattttgaagtttccaacctctgggtatgccaaagttagcttattgattttgtgaaagatgttagatttgatcaaatgtttcaagtgctgcggcttgttaggtattcagtagattttggtttgattgaagtcttttgagttaggaattgatttctgtggcaaagacacaaactttacgagttggttctgaaatttatcggcgctggagtaataaattttgagtcttgatgtttggatcattctccagtgataagttcactagcttagatggatgatcaaaatgatttaacataatggatgtgttctctgatttcacatcattttctgggaaattttccattgtggtattcatgttatagcagagatttggtctgagattagtatgtatttgttttttgttctgaacctgatgcgttttaatttgcttgatgcctctattttgtgcattttcttggtagatgaagtttagtatgtcattggtatgtgctgagaaactgaaatatggctggtggttttattgtatgagaatagcctttagtatctaaattaatttttggctttgtcctaatggtggaccatttatttctgttgtgcactaggtcgtcatttcgagaatcgtaccaagtgtaagata

SEQ ID NO: 39616 - DNA, 554 bp, Arabidopsis lyrata
  Intron number 2 from transcript 474290 (locus 474290) deri ved from phytozome v7.0 (chr-ID scaffold_1; pos 27299524 t o 27300077)
tgaagagtaagttatttacattattgcttcaagtgattgatttccttctatatgtagtgagttaagatcatttgcaactcctttttttccatctaaccaacctgcactaaacaacctttcagctaacagtgtgttaacatatgctttgcatttattttcgatatctttgaactttacccaattctacttttcgcaaatggatttttatatcctattttagaaaactttccaggtttgagtgatgaaacgaagcaactctgaatatgaaatattttactaacagatgctaagatgcagttagtttcgtgaaagagaggaagttgaaaattcttggtatgctgctttttttcccatgatttgtggagttttatgtttttgagatcaggaaatagatcgtcttcttcgttctaatatgaaagaaaaaggttgactccttggttttctgtttttgtcttgctccatttgatctctgtatctttgtatggcattgctagtgcctttccctgcttgttgttttgttaactgttagcacttttcctctcaatgaagctctt

SEQ ID NO: 39617 - DNA, 432 bp, Arabidopsis lyrata
  Intron number 5 from transcript 483116 (locus 483116) deri ved from phytozome v7.0 (chr-ID scaffold_4; pos 19810631 t o 19811062 reverse strand)
ttcgtactcctccacctcgtttcgccagacgcaaggtaacctctctctctttctcaactcaaatgattcttaatagttttagtcaaggttaattcattttgtgttaagatagaaaaggtttctcgatctggtcatgtgatgcaacttgttgttaagtatggttgaatctttgagatgtgggttttgataaatttaggattccttttgtaagcttttgagattgaatagtaggtttcttaacaagttgactttcgaggtggattaagcaaaccagtaccttcacttaatccttgacaatactgcttttaatgagactattctgttctatcttttttttgtttgaatgatttgctcttctgagtttttactgattggttttccacattatggtaatcaggaggatactcccaagcctgggcaaccaggacaggc

SEQ ID NO: 39618 - DNA, 679 bp, Arabidopsis lyrata
  Intron number 1 from transcript 483400 (locus 483400) deri ved from phytozome v7.0 (chr-ID scaffold_4; pos 21026505 t o 21027183 reverse strand)
cgatatctataagtacgatccttgggatcttccaagtaagtctttttaattatttgatcatcctttaattttatgaaaatcagcatcgtatattatgatcatttcataaaatatagctgtttttatttccttttctactgattatcaagtaactagggatgtccaatttgatcttgttcgaatcaaaacgataccaaaaaattatatctgaggaaaaacgatccaatttttagtatcgaaccaaaccataaaaatatagttaagaataatcgatctaaattgtaccgaacaaaccatagaaatcataatctgaaatgaaacactatacatacgtatgtatatttgaaagaaaaaaaaaactggttttataggatacaattatacttgcatatactaaaagatatgggaccatccatacgaagatcatgtcaaatatctttttttttttttttttttgtcaaatatctttatatacgcatatagtgtgtttttatcattgcatgaagatatagaacacgtactatgtaatgaaaggcaaattgttactattaggagttattgtgttctttttcttagttttcattttctacaaataatttcccacgaaattaatatgagcatttactgtggattatatatattaggagtgagcagcgtcggagaaaaggagtggtacttc

SEQ ID NO: 39619 - DNA, 483 bp, Arabidopsis lyrata
  Intron number 2 from transcript 477750 (locus 477750) deri ved from phytozome v7.0 (chr-ID scaffold_3; pos 1672139 to 1672621)
ttgaatctcgcaacgacgccgttttaggtttgttctctctttccttgttttaagtttcgaacccaagtaacggtttcttgtttatttagcaaataatgttgtcttcttcattgtgtcaatttgatgggctgttaatttctgtgaatgcgaggaaaataatctgtaaatttttccagattgtctcagagaaagtttcatctttgacaatcatcggacacaaataaaacttgaatcttgcatgttttatgacgaaagattcgatttttacgactgggttaccttattttgaatttcctcaaaagatttaactttttccgttttattgactacttttgctcattctatttgatatttgttataatctccagaaaggtacgggtttgtattacttataagaacaatggttattaaggataaattgatcttacaatgtgtcttctatcttcagattctatagacaaaggaggtgaattttagagtttg

SEQ ID NO: 39620 - DNA, 556 bp, Arabidopsis lyrata
  Intron number 1 from transcript 327335 (locus 327335) deri ved from phytozome v7.0 (chr-ID scaffold_6; pos 21776183 t o 21776738)
cagaaccaagtatcatcaccaagttgagaatttgggtaataattatcttctttgctctgttttctcctctgtttctattagtaatttttaagaagagtaataaaaaaaaaagataatctcgtcggaatcttgtttcgtagaccaatctgactctattgacaaaaaataaaaattggtgttttctgggattatcattttcatgcatgcttttatttcaagtggggtctctaatttataaattagatatcttctctgttttgtttctatgtttaatttgtctatggttatggatgtgtcctaaagctacaagtatctacacatatatgtcatgttgttaattgtcacttcttaaatcaaacattaagcttaatttagtaacaattttataagttaaacatgttggtcaaaattagagatttctattttctacttggctacttggttatagggacagcgaattcaataattaattttagtctagattacaaattaattaataaaaattcaatatttgtattaagacgttaagctcttgtgttgtgttatgtgtaggtga

SEQ ID NO: 39621 - DNA, 987 bp, Arabidopsis lyrata
  Intron number 1 from transcript 925319 (locus 925319) deri ved from phytozome v7.0 (chr-ID scaffold_2; pos 7514895 to 7515881 reverse strand)
gtatccggctgttatcagtggaccactctatgtaagaccctctttctcagatatctatttttcttggaaagtttcctatcttgtgacgagatattctatttcttcataaagcatccatgaccagtgcttctgtggttttggattacgttatgtcttgagaagtaaggaattcctccagaggtaatctaatatcatcactctcttttgtatttatcgtattgattttgtagcttagttttgttctcttaaattgcagcatatatctcttgtgcattctcaagtgtctttgaatattacaggaagtaaatatacggtatgcgtatagtatcaaagcactaaacatgtagttttaccaaggctcactagcccgaacagaactagaagttgaaaaatttagaagttgtatcagaaatacatgaaggtctgtagatgcatgaaaattctctgattttgttccatactactaaacagaaagatgtgtcacccagttaggtgattttagataatctcacctccttggttggttttcactgtcatttcagttggacggtaatctgtcttctcattgacagaagaacttgtttactacaaacaacaggtgacttctctcacttgcgtcaagagttatccatttcaaaacttctgaaggacaagcaatgcacgtgaaaaaccgctccactgctaatcaaaaattggtttcctacagttttgtatgtttttttgacaggctggtgaacttatagccaagcttgatcttgatgatccttctgctgaaagaaaggaagcttcgaaacataattgccggctatgaacataacatatataagataaacacaatttctttttctaatttgatcaaaatttctattagaaaatttgactttgaaacatatcttccaggttgtttaagagagacttaatcgccttgatatctataaactcctatttttagtggcaagagtacgttgcagttttggcgacacgact

SEQ ID NO: 39622 - DNA, 446 bp, Arabidopsis lyrata
  Intron number 1 from transcript 909539 (locus 909539) deri ved from phytozome v7.0 (chr-ID scaffold_2; pos 18488077 t o 18488522 reverse strand)
tgaggatcctaagaaatttggagataatccttcaggtttgctcttctttttctcggatttcttttgttttgaatttggtttgttagattgaatctggatctagtttgttctacttcttcaactgtgtaggagtatattaaacttgaattgcttctttgttgattctttagacctttttcgtcattaattttcatttgcttttcattgtctttgtactcccacggagaagattatgaaagatttagttgctatttttatgatttgaacactctccagtgtctttatgggtcaaataagaaaccatattatacctgttgagattagagcaatttctggaagctttagcttcttgtgcactcgttttcatcaaacttgcatcagattcttatagtttcatctctagtacgtgttttctgaccgaaggtttcttttctgcaggtaataca

SEQ ID NO: 39623 - DNA, 1023 bp, Arabidopsis lyrata
  Intron number 1 from transcript 355235 (locus 355235) deri ved from phytozome v7.0 (chr-ID scaffold_7; pos 12925712 t o 12926734 reverse strand)
tttatctagacactaccgagccaaagcacgccaaggttcgtatgtacgagtgtatataattaatacgtaataaggtaacaacaaagtaacgatatcaaattatatgctctacagggagcttatagatgagcataaccaaatcttgggtttgagtagtatccacaacggagatgattaatttacctattctcatctaattctaataaattttaatcaaaggtcaaaaactctttagtcaaaaaaataatatatagattgtaccaccgtttacatgattaaatcatagtaagagacgtaatttaaatttttaagaaatattttttaactttcaaaattaatcgaaccaaacctaactagttatcatgaatgaaccacaaaaatatacttctaatcattgttatctataaattttaaatactttttaagtgtacttttttagtgactggatttgatgtctagtgatttttactatcagttaatctaaatggtttggaaagttcaagcggactaatggtttttttaatttcagatttagaggattcatttttgaggcaatttttttttctttctgaaattagtatattggtgaaaaatatgagaaagacctgctgaaaaaatgaaaaaaaataataaggtggggaataataagtttttaaaaattgttggcactcttttaccaatcatgtgagcctttattacagatttgttaaaaaaaaggtttgtggttgtagttgtaccatgttacaagcttagtagaaacaaaagtattattctgtaaatcatataaaacataacaaaaaacatatttttcttgtataaaacacgtattttttacctattaaaatacagaagaaacgttataaaagtttggcgttttcgactgtattccttaaaagtgttcgccattgcaatcgatgaacagttttttttttttttttttttctttacaattgaataatttaacttttttacatttttttttttttttttaacatgttttaaactcagataaaaagtttcgct

SEQ ID NO: 39624 - DNA, 737 bp, Arabidopsis lyrata
  Intron number 2 from transcript 895151 (locus 895151) deri ved from phytozome v7.0 (chr-ID scaffold_6; pos 20115883 t o 20116619)
aagaactacacatttcactataaggtattgcattgataatatgtattttcttgatatttagaggattacaactctatgtaaatagatggtaattaagaaattggcaatactgtgactgatataatttttggattatttttattattttattaattagtaattattacgagataagtaatttttgtgtgtgtccactagattggagattagaatctaataagaatttaagtttaggatttagtttggtttgaacgtcatgtgataagttagacgtctacataatcaaataaaacagtaatgaataataaatatcacctaccttgtgaaacattagacttctatataacaaaataacatgttacataaagaaaagtaaagtttccagtaattgttaaaataaaaagataaaatgcaaatttatatttcaaattattgttattttctttattgcaatcttccctattgctatttggtaaacttctttctaataactaagctaccttcttttttaaaaactgatattggatacacatataatgacccaaaatttttaaaatatttaatatgaagtataagtaattgatacggtattttgattagcgagtgatatttcaaaaatgtacttttgattttcaatttacattttttatagtagattaatttaagaagagtacctttattaaaatataattttggtatgactaattaattaatttatattggattttgatgtgcag

SEQ ID NO: 39625 - DNA, 581 bp, Arabidopsis lyrata
  Intron number 1 from transcript 922500 (locus 922500) deri ved from phytozome v7.0 (chr-ID scaffold_1; pos 15854567 t o 15855147)
gcaagcaggtaaaaatcactactgattctgaatcttctctacacttataaaaaagtttcaatctttttcttgaaaagttcaaagttttcatttttatatgatttaatgattgtttcgactgagtctttgcctttttgctggtttaatgattgtttgggaactttttctatattttggttactataaaaagtagaggaagagaagaatctttgttaaaattagaaaagagaagtgaaaaagtgttgaaagatttctgacttatctgttggaaatgttaactttatcatgaaaagaaatgttcttcagtctgatactgacactgtgttgggaccagatgagctataaaactattgagtgtctttagccacaactcataaagtggcttgctatgaaagaattgaagttgcatcactttgttcgatagtggatcgtctttgctgattgtttgttcctgtcacaccttgtctttgctatatagattgatgatggtattgttataaactagctttcagatgttagagcaatgaatctatgttccttcttcaggtacctgatttttcagagagcttgatagtgaagaa

SEQ ID NO: 39626 - DNA, 838 bp, Arabidopsis lyrata
  Intron number 2 from transcript 482041 (locus 482041) deri ved from phytozome v7.0 (chr-ID scaffold_4; pos 14705688 t o 14706525 reverse strand)
agggtttttgttcttcttctttcttctgatcacgttttttttgctcgacttgtgaaatttctcttttcccacgttttgggtttcgaagttttgtaagttggcttctttctctgcgaaaattcgttgatttttgtgataaagtttgtatcttttagcaagtttatcacgagcttaaatccttcaattttcagcttttggtgttaaatttcagttcttttgttgtgtttggttaattgaagaccctagttgattttaagaagcaatcagctgttactttaagcatctggaaacttgaattttggtatttttcaaaatttagtctctctgtagaactttggttttgtccgatgaggttttcccatagttttgacaatttttgaactttctatttctggtttctacatgtttaattctttgagcaatagaaacatgtgagacagagagataacttatatctgcagtcaaaagatcttagaaaggatatgtttatgttatatatcttaaggaatttgttttggttagaagttagcgtctaaaaggctcctaggatttgggaaatattggttattaatggatatacataagcaaagggttttgcttagaagttgcattagccatgttctcttggataatctatttaggataacggctaagcaattgtcttttgttatgaatatagctgcttctgttgttttgcaatcttgtttctctctaactaaagaattgatgttgtgtgtaagaaaccgcatatgtttaatctgtctttgagttttcttttcgttggcattcttttccgtggcagaacaaacacaagaacgttgttggatttggagaaaca

SEQ ID NO: 39627 - DNA, 350 bp, Arabidopsis lyrata
  Intron number 1 from transcript 923182 (locus 923182) deri ved from phytozome v7.0 (chr-ID scaffold_1; pos 24627270 t o 24627619)
tccgttattcaacgggtatatttgagaagtatacggtactaaaaccacaaccattgatcttagcttgatcggttcttccctaggatttatacataaaagtaaattgttttgtttaataattttccattgcatgaactttcgagacaacaagtggacaggagtgtaatgtcatcaaaagtcaaatcaaacactgtgagaaacataatagacaacgttggcttctttcgcagctgctcaacgttgtctctcccgatggtcccaacactctcttcttctttttttgtcaacattcaaacgttatttaaaataaataaaaatgtttaaccttaatcatctttctagatctttaa

SEQ ID NO: 39628 - DNA, 763 bp, Arabidopsis lyrata
  Intron number 2 from transcript 923182 (locus 923182) deri ved from phytozome v7.0 (chr-ID scaffold_1; pos 24627667 t o 24628429)
attttgaaaggaaggcttttgttttgtttcggttagttttgtttatttagtattttaatcacaagataactctaatttcccattagagttgtgttaattgtgttgattatgatttggcgttccaattttgatattatttttatgttgtaaatcttaaactgttacgttattgttctatcttcctatgtgagaaaaaagtaaaatgttttaaaattttgacatggataataatataattgtaaatctataataattatattatcattttatttatatttttcaaaaagaaatatatttatcttaatatatttaatatgataatgtcaaatatagttataaatctaaaagagttatgttattattccatccttttatgagaaaaaagcagatattctcttaaacttttaaattaacgtggataataataaataaatgataatcttactaatatgataatgattcggttttaatcttaccaaaaaacaaataatgattctgttttaaaatatataaattttctttgtttagttgtagatattgtcatataaaaaattcttagatcctccactgccttaattttatgtaaataccttgcttgatatttaattttgatttgatatcataactaatccttgcttttttttttcggcactaaccattgaattttttatactgccatttaattcttgcataaaaaataataattaatagtagtgtttattatgaatgcaggtttgttttccataaaaactagattggattt

SEQ ID NO: 39629 - DNA, 697 bp, Arabidopsis lyrata
  Intron number 1 from transcript 902948 (locus 902948) deri ved from phytozome v7.0 (chr-ID scaffold_3; pos 258477 to 259173 reverse strand)
acatctttgaacaagcacctaattaccataccaaggtatatagtattcgcagccctcagtgttgcgtgtctagacatgatgagacataatacaattaaataatcatccaaataactacaccaaatcaaatctatatacaacaacaatttccttacacataaacgggcatacagctagggggttcagtttcgaagaggatctttaatgatactgtcaaggcaaagaaataatataatagacgactataaagacaagtcacttcttccactttcttttcacctttcattttctgtgatttattaggacgaggcgcacaagactacaaagaaaaaacaagctagagacgttttatatgttaatatgatgaatgcatattgatctttttatactaaatcgaaggtgattaagagagatttgatcaaatctgtatccaatcaaaatttgataattttttaccaatttaatacatttttctaacttaaactctataaatatacataattatttaattactatccaactcactatttaacaaaattgataaaataaaaatgaatgatttaacatcaaatatatatatatatatatatatatatatatatatatataaaaccttgacacatcaatatttagcttattttatacaaagtttatttattcagtcatttacttttaattgatttaaaagaaaatcttg

SEQ ID NO: 39630 - DNA, 503 bp, Arabidopsis lyrata
  Intron number 4 from transcript 471231 (locus 471231) deri ved from phytozome v7.0 (chr-ID scaffold_1; pos 4355158 to 4355660 reverse strand)
tctgcaaggtattatggttatatgttcgttctttcgagaacaatcatctccttctgttgtctgtcattgttccttgattgtcgtttaatttggtccagtcccaactgctgtttggattcgtagaagtagaacttttgaaaattaactatcaaacaaagtcagtgattgaaggatagctttccaccacattgtgttatatcgcttttgcagcatcatttggttctgtgtgccaatgcgtgtttgtttccttatcaatagctttgtacaaaatagagggttcagcttttgcatgggtcgactttcgtaccaccaaactgctccaaataatattaaatgatatgtgcataatatctctctttgatgcgttaggagtatgctagtgatggaaatcttgtgatgttttttttgtcttcttcttaaatatgtttacaactaagtgattcacaattatttgaaaagctttgttctctttctgcctaggtcaattgcgtttcccagtgtga

SEQ ID NO: 39631 - DNA, 571 bp, Arabidopsis lyrata
  Intron number 2 from transcript 939125 (locus 939125) deri ved from phytozome v7.0 (chr-ID scaffold_5; pos 20052060 t o 20052630 reverse strand)
attcttagccgcgattactcaaaaatccataaactgtaagtgctttcctcttccttctgtcaaattcctcacttgttgattctttgggaaagtgattcagtgctggcaatcgaactattgttgtagattattagggtttttcttaatttttctggggttttcgtaatcgataattcgtagatctggatgaaaccagttatatttgggtgaacataaaatatatattttttcttgattacacatgacttttgagattggttacaattatctctagtatagactttgtggtgacattgatcattccttggattctataatccggtttgttgcttagcttacttttgttcttataacgtttattgacaatgtgcgtagttctttgagttgttcaaacttataaaagagttttactgtgttgttgatcttatgccagaagtattcattcgtatggaaaatagatagaattctcatgtgttttcatcttatgtaacttggaagactcttgttaagctgttgtcttctcttaacttttccagagcagacagagctgtgttgtcttcctctggctttc

SEQ ID NO: 39632 - DNA, 525 bp, Arabidopsis lyrata
  Intron number 1 from transcript 491481 (locus 491481) deri ved from phytozome v7.0 (chr-ID scaffold_7; pos 3839852 to 3840376 reverse strand)
tcttattcagacattccagaaggtgatctcttgttcaatttttctcctttttggttgattgtttcaatattggtgttttatccttggatctctatgaaaaaacaaattggatcgagattcttcgctgtttattgattttacgataccttttcaatcgtttggaagttgttttgtttgtcctaattcgaattattttttgctgtccgaagaatctgtttggaagtaaatttgtatcaatcttgcttagtttgtatctcctgtgaatgatcgcgatttatgttggttcttctttctgtttaagaataattttgcggcttcttatgatctgagtttttggattattacatcaaacaatatgttttttagcagagtttatttggaatctttggttaaaatctgatttattgtaacttttttatgatcttctgctttggttgtttgctagtctgagatattagcctttttcttatgctcacatatagatatttttcttttgcaggtatttagtcgactgagaaagcaatc

SEQ ID NO: 39633 - DNA, 430 bp, Arabidopsis lyrata
  Intron number 1 from transcript 948034 (locus 948034) deri ved from phytozome v7.0 (chr-ID scaffold_7; pos 24167206 t o 24167635 reverse strand)
attctttgctagcttacttatcatttttgtcacaggtaccttgtatatctttcaattgttatgtctctttattttattcgatttttaatcaaattttgctattaccagtttatggacaattgaccaaagcacctctgcttgataaatatttctagtacaacgtagataaaataacatatttcaaatggcaatggttgaaaagaaaaaaaaaacaatagtatgatttttgataattaaaacaatagtatgatggtaatatgaatttgttttttcatagaaaatgattggttcttatattgatagtattttttttcatagaaaatgatttgtatcatagagttttttttttttttttaagtcttctcattgttagtatttacttgtataccttatttccatagagtgtgtaagtaagtactcttatttctat

SEQ ID NO: 39634 - DNA, 537 bp, Arabidopsis lyrata
  Intron number 1 from transcript 336421 (locus 336421) deri ved from phytozome v7.0 (chr-ID scaffold_1; pos 15502669 t o 15503205 reverse strand)
atcggtgcaagtataacgttttccctcctcttgttatcttgtttgcttgttcggccagaatctacgggaaacttatctaacatttcataatctctcaaattcattattaatgcccctaactttttcctctttaaaaataagaaggaaacagacagttgccctaaactgaaagctaaatgcttcacctgaaacctctgccacatctctctttctctctcacacatacattatttcaattattgttttttttataactcggatcttgaatcttgacgatctctggtttcttcagtcaaaggaggagactttttgggtttctagactttggtttgttaactgggtctctgtgtcttgtgtgtggtgatgtcttatagtaattcaaacccagaaaactattcagctgcaacgaactcgccggagattaaactttatcaagcatttatcttttctgttccaatttgcttcacatttattattctcttcttgttttacttgatttaccttcgtcgtagtagctcggatttgtcttctctcgga

SEQ ID NO: 39635 - DNA, 604 bp, Arabidopsis lyrata
  Intron number 2 from transcript 917033 (locus 917033) deri ved from phytozome v7.0 (chr-ID scaffold_8; pos 16037082 t o 16037685)
cgtatatatgattcagttacactatgaaaaaacgtatgtgtgctagatctatagatttgtatgtttcgcaagtgtaacgagtacgtatgtgcataaagtaaacgagacacaagagatttgttaacggggttcggttaacctacatccccgggaccaagtccagaaaccattcactagaaaaggccgcaacctacaattgctatatggtatccaccactcttttctagaattacaatgaaagaaaaactactactcctattgtcttttccgacgagtatagcttctcaacaaaaccatcaaaagatctctctatcttgttgatggggcaacgtcacacacacatgtgtgcctctctcgataaaccctagacgcgcaagtcttcatgttgccatctcttggtatttataatcaagggccaaaaaccctagacgactcaagccacgcttgaagtctctacaagacaattgggcttaacttgaacaatggcccacatggcctttttggctttcacgttagaaagacttaatcttgatctcatctgttgttccaacagcttcaatactgttccaacaatatctgcacttacacactactcagcgacgtg

SEQ ID NO: 39636 - DNA, 419 bp, Arabidopsis lyrata
  Intron number 1 from transcript 947438 (locus 947438) deri ved from phytozome v7.0 (chr-ID scaffold_7; pos 20707041 t o 20707459)
tttcagacaccaatcgttgcctccgaggagccttggtatgctcatcttcttgttttttggctatacatattattttcgttactataaattctaatagtgtttgtttttttaaacgattgtatgttttggatgaatgaaagcaaccacgatgcatgaagaagattcaggtgatgtttcaattgatcttttatctttaatttatcgattttctaattttacaaaaatgttctcaccaagtagaatatacttttgagttttgagttaaatctttcacagtctgttgtggattagcaacgtttcaagccatattaactattgtgttgtggcagttcgaaagattcatataaattggactattgctacaaaaaaaaaacagaatcacaggtttaattctatcaaaggagataaagcctcttatc

SEQ ID NO: 39637 - DNA, 361 bp, Arabidopsis lyrata
  Intron number 1 from transcript 940211 (locus 940211) deri ved from phytozome v7.0 (chr-ID scaffold_6; pos 2928168 to 2928528 reverse strand)
gccgttgctagtctcatcaggtggttcattaagtgaaatttttaaaaactatagattttttttttgttttataacagacttatataattctcttttgtctatgtttgattcttttcacatactacctcatttatttttaagagtagtgtacactgttgactgtccaccttaatgttcttattaattctttaatgttttgtcttctaacttatgagttgtcaattccatcacaacccgtgtttaccttttttcgaaacatgatatcattagaaaaactgtcaacgtgattaataagaagtggtacaattttgtttttaatacataattaacctttgcacgcacttgtgagtatatatgtagc

SEQ ID NO: 39638 - DNA, 844 bp, Arabidopsis lyrata
  Intron number 4 from transcript 950402 (locus 950402) deri ved from phytozome v7.0 (chr-ID scaffold_8; pos 17980024 t o 17980867 reverse strand)
aacaagtacgttaatttgttcttgcttattgaatcctagttaagaaggtaacttgtcatttatttgttgctttctttttgccctgatattgcagtttagctgtttggaaaaaacataaagctaaaaaagttgaagaagaaaaacggagctaagaatggtcgttttgattgttgtttatctacaagctactacttgtttatcttttttttgttatgttttataagaacacttgtattgtgtactcttgctgctattcagtttcataatttatgcctaaatcaaatgttgaacttatattatgttgaacttatattatactaaatgttgagaaaaaaaaaaatcaaatgttgaacttatattatgaaattacatttttaagttgaaaattcaattacttataatcgacttaataagaactttgacctaatttggctaattgggcggttatgatctatagttgtttggtaggtaaggacatgaattgttatgtcttctatcctatgtaggaaaagaatactttttgtatcttcccaagttctccattgatttctttttgccaagaattgttgcgcttctccctcgagtcaacaaatgtaaaccatgttgttttttctcttcttacattggtcgcacttgttcgttaatcacacgtgtttgtcactgttccgacattcgaaccgttgatcatctttgtcttccaggcccaactaacgacccattaacagaatatatctgaaaccgttcagtgattgagagttttcccttatctccggcgacattgcatcaccgtaacttatgacttgttgaagtgggagactgatttttagaaggctcttgaggaacc

SEQ ID NO: 39639 - DNA, 298 bp, Arabidopsis lyrata
  Intron number 1 from transcript 950402 (locus 950402) deri ved from phytozome v7.0 (chr-ID scaffold_8; pos 17981521 t o 17981818 reverse strand)
ctccacatccaccgatgtaatccttttctccttatgaccttcttccttactcagtctttaattaaccaattttgatttcttctcaattatttgactgaactttattcttgtttcggattttttttcttggtttcgttttatgcattttataattgaagaaaactggtatatattgtcttacaatctcgattatatgaatgataagtctgattataggttgtttgatatttgtatatatgtcttatttagaagaacacctgcttatatggatttatttttatttctaagagagctccag

SEQ ID NO: 39640 - DNA, 600 bp, Arabidopsis lyrata
  Intron number 1 from transcript 931111 (locus 931111) deri ved from phytozome v7.0 (chr-ID scaffold_3; pos 18382282 t o 18382881 reverse strand)
gaagtaagttcgtttcttctttagcccgtgtagttttcaagcttcattgtccccttctttgtatttaggttccattgggtataataactgagaatgtattatcctaagtagatgaaagtgtaataatttgcctatatggaccattaagctgattatgaaagtatgatcctaagtagagtagactgttatgtttaattgacctaaagtgttgatctttcgcaagatcaggaactgcttgaattgctattgttgcatgtctctatatgtgtttcaaattgattgttgtgttggtctatgatttcggattgctagagttttaactcttatacaaaactttaactttatcttgctctttgatataacctgaaagagcattttaactcatcatgttgatgatttcgatgtccttatgttttcttggtccacaaaatcatgtccttatgttctcttggtatatatatatatagacaagagctgctgatattcttagttgcttattaatttccctaagttttttatcttctaatatttttcttgcataagatttctgtaagtgctcttaaagagatagaaagtggaggtcgggcagccaaagaaaaa

SEQ ID NO: 39641 - DNA, 430 bp, Arabidopsis lyrata
  Intron number 1 from transcript 478781 (locus 478781) deri ved from phytozome v7.0 (chr-ID scaffold_3; pos 5651280 to 5651709 reverse strand)
aacggtatgatcactaaaatgccatatcaactcctcaatctcaatgatagaatattgttttcatttctttctaacctttgctttttctttctttcgttttggttgtgcttggaccaaatggattgatcattgtcatgagcagatccaaatggttagttttttctctgttatttctcctatccttttttgtaacttttagtcaactcttcatatccaatagacagatcattttcccctagaaactcgtgtttttattatttaaaaaaaaaacattaattacttacaccaatatgttgtcagcatatcaactgtacatttgattattctaatgtattggtcgaccttgtgttacgctgcacgatccttttacactacccatatagttaactaataaaaatacacatatattgaaattttttatacagggcct

SEQ ID NO: 39642 - DNA, 648 bp, Arabidopsis lyrata
  Intron number 3 from transcript 480460 (locus 480460) deri ved from phytozome v7.0 (chr-ID scaffold_3; pos 20592695 t o 20593342 reverse strand)
aacttcaagttccttcatcacaatcaactctcaaggtaactaactaaatccatatgtctttgtttctatctattgctgacattttaaataacaaaacaaatgcacaaacataaaggagaagtagaaaaaaacaaaagagaatgggcacagaataagctgcatgtgtgtgtgattgtaacatttttgtctttcttatgtgtcttcttcttcttgatctcattattctttttctctttctttcctatgattcaacggtagttacgcaatccttttttgttagtttttattttaaaatgaaaaatagaaactaaatctgttttttcagtttgattcagttttagctcagctttcattttctaacaaaacttttaaaattaaaattattgaagttaattatgttttcttcttcttgctctgtttattttgttctgtctaaattgatattgttatgtttgtaacaaaatatatctttatttgatcagttatatcaaaatgtgtcctttgtccttcttcttttttatttggatcttggctcatagatctaattacattcgttaaataacgaaatgaccacatgtagtatatttatatatgatctcttgttttatcaaaggtgagaaaggagaaacttggaggcagaatcgcatc

SEQ ID NO: 39643 - DNA, 584 bp, Arabidopsis lyrata
  Intron number 1 from transcript 492943 (locus 492943) deri ved from phytozome v7.0 (chr-ID scaffold_7; pos 10388308 t o 10388891)
cgtcggcgacggtggttttgcccgttggctctgaggtatttatatttctcagatctccttctcttccatttcatgtctctcgttctcttgtggttccgtgtttgatcagattggatctgattcttggttttgatttaaaaattcatttgctatgattggaatcgtgtgtttgggatctgtttgagtcgaatttgattgaaatttagggttacgtaggtagattcatttatgtggtaatgattgatttatcctcgaattggatatgtttccagcttttttcaagctttttcagatctgtgagttatatagtgggccaatatgttaggtgatgttgtgagctttgatcagatattgtgctttgttatcttatctgcattttaattattgctgctaggtgtttgggatgatgttgatgagactgtaatgtaagttgagtccattgttaccctaccgtgcttgtctggctttcggatgatttctctatcttttcttgtgtgttatctttggatttcgtatgaattttttctattgctgtttcgttgctattaggttctatcaggctttaatttaagtggattttcatc

SEQ ID NO: 39644 - DNA, 482 bp, Arabidopsis lyrata
  Intron number 2 from transcript 492943 (locus 492943) deri ved from phytozome v7.0 (chr-ID scaffold_7; pos 10389050 t o 10389531)
tttagaggaaggcgtgaggcaaatttctgagacaggtatggctttcgattgaagctgttttattctacacgattcttccttccttagatagtttgccaatggaactttagtgcttgctatgcatttggtacaacttgaattccttgtaattatcccaactggagtttctaatagaatccatgaagatggttttcaccttattttttgagtgacaaaatctgaaaatttgagaaatggtaaaactgctaaaaaaaattaggaaatttgacaaagaaaaatataagtaaacaattaacacggaagtcttgtatggccatcattcagaaaaaaacacgtgcagacaagttaagaggacgtcaaagaccccaaacttgaagagattttttgtacagatcttcttatctatcagaggatacttaaatgttcgacatttttgtttttttgcagggctgaagtctgcaaattcttccttcgcatagtcc

SEQ ID NO: 39645 - DNA, 482 bp, Arabidopsis lyrata
  Intron number 4 from transcript 472133 (locus 472133) deri ved from phytozome v7.0 (chr-ID scaffold_1; pos 8081014 to 8081495)
tgagattttctaaatatatatttgggttttcattttcgggtcacaaaaaataaaaaaagatttatttcatcatgcatatggtgtaattaaccaagtgtatatcatggctggctttattgcagtatatagttaggtcaaaagcatataataaacatcaggacaggtaaaaaatgcagaaagatgaagagtgtaagaatttaaaatagataaataaataaatagaaaaatgtaaaacaagaaagaatgggtatagggaagcttaattaaaatttctttgatgattacagatattgtcttggagatgtagatatcaaccaataagctaaatggagattgataggcatggtaatataagaaaatgtaaataaaaccaaagttttgttataaaattgatttttaatgtaaaatatataaaaaaaagtagcaagtatatgagacaaataataataaaaaatctctatgtttcaggtctcaaatgagta

SEQ ID NO: 39646 - DNA, 294 bp, Arabidopsis lyrata
  Intron number 1 from transcript 339371 (locus 339371) deri ved from phytozome v7.0 (chr-ID scaffold_2; pos 14907233 t o 14907526 reverse strand)
attgaccggtacaatcatcttatgtgtatattacacatttgctccaaactctcttctcacagacccatctctgtccattgtcgcggatcagttctgtcgactctacagattcttccgcggtttttcaatttttgaaagtctctctttttgactcttcacctttttttttacaccacaacggttaaaaaacttacgacttctataaatcccgtgaaaaaagtgggagagattaaggtgcgtttcatcgattgtgatgcagagacgaggtagatcgtcggaatttcatcgaccggg

SEQ ID NO: 39647 - DNA, 962 bp, Arabidopsis lyrata
  Intron number 1 from transcript 928231 (locus 928231) deri ved from phytozome v7.0 (chr-ID scaffold_3; pos 2420219 to 2421180 reverse strand)
gcaacctagacactgtaatttgcccaggtttgattctgttttcccggaaaattcgattgtttcctctgttcttactcagtttctgccacttggtgttctttaattcatgtttgcacttaaaacagagtattctttggaaaccaaaagggttattgaatcttagagaaatcagagctttttaagtttcttctgtgttctaggcaatttctgccatttggtgtgaaattacaaatgaaattgtgtttgttttctatagagtttagttattggaatggagattttggtgtagtcagtaatttctggtagatcaaaagtttttttttgggattgagatttatcaaatctttggtctatggagaagagaagtcagaggttctttaagttttgttactttcagctttgatgtcgttttctatggtctcttctccagttgtccgcaagttacggcttaggataagcataatctcgtgaaactagtcatcagattttgctattaaagccagtggctctttttgttctcttctcttgatttgatcttttctatggtcccttcttcttccatttcccatttacatcaaacagctatttcttcaccaatcaatgtgtgtgctctttcttttttataaaggcttttgttttgtattgtatgaacccgtgagttaaattggaaagacaggattggttaccaaataacatgtatgcacaatagtttgtccgtgttgtttcctgaactatgaactatatgtctaggatttgaattccaccacgatcaagcaaagtatttgacagtggttttgtggaatagtttgagtaaaggtcaattcttgtgggaaacttgattgcagatatttataaaagagaaagaatcaattctgaaagaactttcaaactcttacgaatttagttttgtctttgaaggcactactttgctgactctatttttctgttttgaattagatttg

SEQ ID NO: 39648 - DNA, 427 bp, Arabidopsis lyrata
  Intron number 2 from transcript 933732 (locus 933732) deri ved from phytozome v7.0 (chr-ID scaffold_4; pos 15020230 t o 15020656 reverse strand)
gttcttgttcacaaccgctacaagaggttggtggtaacagtttattttgctgtcaaataaattttctgctagtggtctctttcatttcgtcatacttgacttttgccaattttcatgcttgctttgcttgtcaaaatgctacacatttacaactatttctgcatttggttgattagcttatatgctcatccctgcatttgattattatttcggctgttttgtttttgcattcaactcatttagtgtttagaaagtttcaacctttttctgtatttgtaggcagttctggctctcttcttgcttaaatttgacttacagaggaatatttcaatcctcactatagtatttctagctttgtgttaatatttgatacgagtatcggctaattccaggccaaaggaaaacgaaaaattcagggaagaactag

SEQ ID NO: 39649 - DNA, 485 bp, Arabidopsis lyrata
  Intron number 4 from transcript 924569 (locus 924569) deri ved from phytozome v7.0 (chr-ID scaffold_2; pos 631843 to 632327 reverse strand)
tcctcaactttgccttgccaccgaggtgagactttgatttttttggtggaaggaaatttaagtcttacatgccttgtttgggttataaacaaaatgaaatggggatgtgaacatgaaacagcttatgatttggatgttttcttgatctttctttttcgtttagctgtgtgtttgtttctaggacgtttgttcgaatctgatataatgtgattccgtcaaagtcctcttgtagttatcttcttgtgctctgtatgctctatatttgaattccgttgctcgacttatttgaatcagaagattacattatctttgtgaactttacagatgagtggaatgttcttgatattttggcttgtgaaacctgcttgtatgagacgcttgtaataattcaatagatgattcttatgaattgacatttggtttgaagcaacttgcaattggtgttttcaggttttcctctgcttcggaaactctgtggcctctac

SEQ ID NO: 39650 - DNA, 888 bp, Arabidopsis lyrata
  Intron number 1 from transcript 492520 (locus 492520) deri ved from phytozome v7.0 (chr-ID scaffold_7; pos 8062906 to 8063793 reverse strand)
ctgttatcctcgcctcacaagtaagtttttttttctccattagaatttattttcatttacaagaattaaaaaaattaattagtaacacccgtgacacaaaactccacaaacgtctttgatgatttttttttttctgttgcaaatatttttgttgcatatcatacatacataataacgtgacatttgttggccaacttctgatgatatattggttgggccattcagtttatgtttatattcggtaaataaatttttataatataaactataaagtatcactacttaaaaattgtgagatttaaaaagctcgagggtctttgaaaaaataaaacaattatgtgttctacttttttttttttgacatctttggatcgacaaggcccgatccatagccaatccctactacgcggggtaacgcgatttagtggagtcgaactccggtggggaaggcggagtcaaccacttgagtaaaagcacatcccccaattctgtgttctacttaaaagctagatattttatatttatcagaatgcgttactctaaggaaggaggtggttacgcaaagacaaaaaataggcaaagttagtggggatcgatattggccggttacaagagagtgcgaccaatagttgttaggaagatctcatccgtccatttctcttccaaatctgagccacatgttactttcgggccttagcctaaagtaggtttttttttccttggcccaaagttaaacccaaatattagacccttgtcaaagtttcccttgtaaaggcttctcaagttcttgtccttgttttcctagtattggtaaagatacaaagtttgacttgtaagctaattatgaaaattcttggtcctaacgttattgataggaagagagtgact

SEQ ID NO: 39651 - DNA, 589 bp, Arabidopsis lyrata
  Intron number 1 from transcript 490093 (locus 490093) deri ved from phytozome v7.0 (chr-ID scaffold_6; pos 22383008 t o 22383596)
ttaagcttataagaatctctactcacattttctctgtgagtgttctttttacttctttgttattttccaaattttatacatctcctctaaaaataaattataggaactagcgaatcatttaatttatgtttgtgtaaattaaacttccaagttctgtttggtgaatcttcggttgttactttttgtttcctctgttctcacttaatttttggaatattattctggattttacataagattattcttcattttaagaactatttgaagatttgattgaaagtaatattctgttatagaatctgagtttgtttgattctggtgtggggcttatatctgacttttttttttgtaccaatatttttcaattttacatttttgattggcttgaaatttgagggaataccttgtaaataaatattacactttagcttgtcttagtcttcacactaagattttgtgcagaagaaatcattattataagactcgttgtttgattaattggttaatcagaaacctaatggatttctgttttattttgatgtggctgttctttaacttgatgtgagattgttttggatggtaggtaaaa

SEQ ID NO: 39652 - DNA, 614 bp, Arabidopsis lyrata
  Intron number 1 from transcript 897059 (locus 897059) deri ved from phytozome v7.0 (chr-ID scaffold_5; pos 9860137 to 9860750 reverse strand)
caggaagtcttctgattgttctgtctctacttcaggtaattgctctttagaggtttcttaatttccatcctttgattctgattttaagcttctgcaactacaattttgcaaatttgtaagctttctgattcctgtgagccatcgtttgctaataatgctgattagggtttttgactttttgtttaaagattgctttttttccttccatttcactagctttagacttctccgattttactcttagtagtaaattttgacctaaatgatgtgttatttcaatgtctctttccggttaatttgttacttcagagattgttctctagtggaagttgtggattaatctaattctgattcatattatttgattgacatctgaaatccaaaagtttgatttgttgatcattgatcgttattaaattacaatcgaagtatgttttgtactttattgttaaaactagtataaggatttaaactcagataagcaatcaatttgctggtccagttgcaaagtagtttataaacggctagtttcaagaaacaacattggatcttctaatgatttgtttcttcacaattaagctgtctcatcttgtgtctattttgaacaggattcc

SEQ ID NO: 39653 - DNA, 813 bp, Arabidopsis lyrata
  Intron number 2 from transcript 948645 (locus 948645) deri ved from phytozome v7.0 (chr-ID scaffold_8; pos 3127125 to 3127937 reverse strand)
ctccaggcggtagtatgtccctcgctcctctttacttatctcacattttcttatcaacttttttctgccgaaaattttctaaaatacatattttttatattgaattataaaagagtgtgtttaaataaggtttggtgtttttcctggattcaataaatatgagttttctccttacatatattacagttaattttaaagactagctggaaaataaaaactatgaataagcttttgctaagaaagtaaaatatcttaatgtcttttattagtttattttggagttacctttaacgactgatgagtgaagtgggtgtaggagcatcagcgagtggtcgcaaccactaaattaattctcctattagtctttaactatatatgtgtgtatgtatgtttaagtttctattttctacatgccatcgtaggtcagcttttaaagtgtccaattagcgcagtaatgtaaacatacgtaaacttaacaaagaacaatgttgaaacttgatcttggttagtgttcaattcaatatttacgcataccatttgtttgatatatgatatacatacatattaatgcatggccagggtttaataattactatagtttagagtttggtggacaaggtgggctcataatggtttaatactattatcatcattatctccattttcttatattaatttcttttaaaacttccacgtttcttttcgactattttcaaattttataattcgattatattacataattcgtttataatattttgcctgccttttctcttaataaatacataaatatgaattgtagggaggaaattg

SEQ ID NO: 39654 - DNA, 181 bp, Arabidopsis lyrata
  Intron number 4 from transcript 479043 (locus 479043) deri ved from phytozome v7.0 (chr-ID scaffold_3; pos 6674127 to 6674307 reverse strand)
attcggaagcagaaataccttgaagcacttgacaagtaagtttctttcgtttctatattaatgaggaaagttcctcagttgtgttgttgagttattattgacttgaagtgagaagagaagtggatttgagtattcatatattttcccatctgtttcttcttttgtttttctaggaaagatc

SEQ ID NO: 39655 - DNA, 665 bp, Arabidopsis lyrata
  Intron number 2 from transcript 474117 (locus 474117) deri ved from phytozome v7.0 (chr-ID scaffold_1; pos 25946941 t o 25947605)
gagatctcaaacttttcggtactaatcttgtttctttttctggaattttattttaagtcttggatttgaatggtctaagagttttttttggaggttttgcaaaatgttacataattattaccttttaatatgtttctttgttaccatattaaaagaaactcaaaagaaaacactcaaataacgtatgaaacctattctgaaaaaaaaaacccgatcattatatgaaaactatggccatgaatgttttggggtttttgagtggtttttagattattgattttggtttatagattttagattttgatttttggtttttggattttgcaaaagataaaaaaaaatagaaaaagaaataaatggaaaacaaaaaaaagtttgaatccagggcaaacattttaaaaactaacaaaaatgggtttttgggatttgtgaaaaaaattgtaaaactgtcaaaatctagattccctattttttagaaaaccaattttctcataatcttgaatggatgatttaatggtttctaaaaatcgaaaaccaaaaaccatgctaaaaactactacccattcaaggtctatatgaaaagaataggttttgcgaaatttaatagtgttttgattatgcatatagaatcaaaggcgatcacggcatcacgcgatacctagcgg

SEQ ID NO: 39656 - DNA, 534 bp, Arabidopsis lyrata
  Intron number 1 from transcript 491398 (locus 491398) deri ved from phytozome v7.0 (chr-ID scaffold_7; pos 3518125 to 3518658)
ttgctttcgctactctcgccaaatctgccgcttgggtatattattactttctcttcaatttgggggtttcttttgattttgtgtatgctcctcaattttgatgtttataggagaaatttgttagatgtttaacacgatatttgcatttgcttgtcttgtgagtgaattgattttgcttcccttagttactctcttcaaagttaaccaaaccttcgtttcttcacaactagattctaatttgcgattgtggggacatatttttgaatccttagtcttaaacctggtttttcattgatgcatgtttaatgttttggtgaacattctttctttacctgatatgaaactcgattgttttttcacctgataatggtattcatgttacagtttgtagcctctaaatgtcgtcttgagagaatcacattttatgcgctccaataatgaatgttgtctgggaaagaatgtcaatgtaacttttcttttgttcctctctctctttcatttaaatgtttcagcttaaaaaggagttcaccagcg

SEQ ID NO: 39657 - DNA, 487 bp, Arabidopsis lyrata
  Intron number 2 from transcript 487095 (locus 487095) deri ved from phytozome v7.0 (chr-ID scaffold_6; pos 906103 to 906589 reverse strand)
gctcagcataatctttaacgattctctctttcaaggtatatgtttcttctgattcgtttcttctgggttttggcgtctgatctttggatttggttttcttttttgatcttcgattttggatttttgggtgattggatttttcaataatttgattttcgaaaattacctgctcgtttcttcaatcccagcttctttattttatgtcgattactaagaatctctattagttgctcgtcagatttgcatgttgttgaaatattccatctttcttgcgttttctcttatgaagcatatcgtttagatctgttcaatttcttgcttggttttgaaattctcttaaggaaattagggttttctataacgatctattcaattttgtgttttctttgtcgattctctttgattttgggttcttgtgtttaaatccgttttctctttggtatatgttccctgatcgatttttacgtgttctcttttttaatttcag

SEQ ID NO: 39658 - DNA, 305 bp, Arabidopsis lyrata
  Intron number 1 from transcript 488928 (locus 488928) deri ved from phytozome v7.0 (chr-ID scaffold_6; pos 8561220 to 8561524)
taccggtaaaactttccgtgtaggcgacgagctcggtgagttttctatgtctttgttttataacagtagtcgatattatgggatcgttcatggatcatgcatgtagatgttgttctgtctttgtttctatatttgttgaacatattcgacgtaaaaaaaggattaatagagtttccaccgactgatgtatttagttcacatgtatataaatcacatatatatcatgcgaaatcaaacgttatctaatgatatttatacctttttcgatattcttcttacagaatttgatttcgctgctgggaggc

SEQ ID NO: 39659 - DNA, 705 bp, Arabidopsis lyrata
  Intron number 2 from transcript 490675 (locus 490675) deri ved from phytozome v7.0 (chr-ID scaffold_7; pos 388779 to 389483 reverse strand)
ctcctctttgtgatatttgcggggtaacaacaaaatttaacacttctctcttcttctttttttggcctttcttgataaaaatataatctttacttggaaaatttgtgagcttttagatatgttagtattgatgaaatctggtttcatgaatcgatgttttgggtgatctgagtcacttttgtttttctctctgagatttgtttgttggttggtgagaatgattattttccctttctttcaacgaatattgttccaagtttatttactttcctggcaaatttgaaggttcacacaatttttgacgaagaattttatggccacgaccaaaaatcacttttctcaaaaacagatcagagattgagcttaccaaacatcttgatgaattatttggtcacacacttatcaaacttaagatattaaccaatcaaatcgagtattcgttattacgattttaaaatactttcttctttgggaaggtaagttgtggagaaaagaatatttctttttgccgttcattaaataaaataacaataaaagcaatatcttttttgaaaaggtcgtgggggaaaagggggtcaaatctagcagataaatattttataaaaatagatggatacaaaacaagagttttcttgattatctattactaaatggtttatacatatgacaggagaggcgtgcattattattttgccaagaagacag

SEQ ID NO: 39660 - DNA, 628 bp, Arabidopsis lyrata
  Intron number 1 from transcript 489973 (locus 489973) deri ved from phytozome v7.0 (chr-ID scaffold_6; pos 21168689 t o 21169316 reverse strand)
gagatttacacactctgtttcttactgtaactcgggtatgtttttgtttttttcttttatgtctctatctgtatctcttagatctcttttttttttttctctaaatctttaaaaaataaaaattgcctctttttgcttctttgcttaatgctatctgattcttttgttttggtgttcttctttgactgctattttgggttctttttgattttctaggttcgttttaatacactcttttagtactaattggggttttattgattcatttcaatcttcttgtttgttgtgtgtttgtttgatgtttttaatatctctatcaaccttatatgagatctacattgtgtatgattcaaagatcattacttttgcatgcttagtttgtgttttgggagcttaatttgaacccttttgaagatttatgacattgaattcattggatctactaatcattgtttaagactctaatctgttactatcatgtagaagaagttgttttgtttagtaaattttctgagatttgtgttgaaggtttttggttattgtgttaaacaaatttggcattatgtttgagaaagtgtctttgatttaggaagactaaactgttttcttgaattgtaatgttttacag

SEQ ID NO: 39661 - DNA, 234 bp, Arabidopsis lyrata
  Intron number 4 from transcript 921775 (locus 921775) deri ved from phytozome v7.0 (chr-ID scaffold_1; pos 11990235 t o 11990468 reverse strand)
aggtatatctcaagtccttggaggtcacaacaaaggtactctttcaacttttatttttttcagagtttatctttgtgtacacaatttataacattaatcatggagagaacaactgatgctataaaaaaacaaggagggaattatttgacatttgatacaatcttcggctctatttcttttattttagagctcatgtttttgtctgtctatgtgtaataggccccagaactgcat

SEQ ID NO: 39662 - DNA, 749 bp, Arabidopsis lyrata
  Intron number 1 from transcript 920672 (locus 920672) deri ved from phytozome v7.0 (chr-ID scaffold_1; pos 7356950 to 7357698 reverse strand)
agcagctctctagtcgctctaacatcgacctcaaggtttttattatcttcttcttaattgattacctcttttaactgctcttgggaaaccctaattatcaagctcaaggcaaaagggaaatgaaaaatttgttaattgaatttagctgaggactttttgggttcgattcaaaagtttatgattgggatcatcttctttcgatgctacggatacgcgaattgagtgtgttcctttatagtggattttggactcaagtggtcttctctgtttcttctgtacttttcacctgagaaagttcttaatatcatagtatgacactagcttagacagttattacaagatctgttctttgttttatcaaatgcaagtaatgctgcaatacagttacaccacgaaaagctgttactttaggtttaaaacaggtgatcggtatccccttttattctgttctggttttaggagaacaaattttacttgatccttgcctacgatgctttttgtctcctatgtcgtaggatttctttgaaaatcgagaatggaacacaaattatcaaacctacagcaagtattgttgagtctgaactttgaggtggaaaattagcactgtcagcagcatttatttcacctattggagttttggaaattagcactgtctccagtattggttacctacaaaacaagattcttaatcatcttatatgtcatattttctaggataagtggcgtaatttaagtgttgcccctggtat

SEQ ID NO: 39663 - DNA, 559 bp, Arabidopsis lyrata
  Intron number 1 from transcript 945018 (locus 945018) deri ved from phytozome v7.0 (chr-ID scaffold_7; pos 5114631 to 5115189 reverse strand)
caatttgaaccaaaggtaattattgacctacttcgaatcttttgagctcaatgatcttgtatccatttaaggttgtcttgtggttggagaatttgattgttgcagggaatttcactttttagctgcaaggaattcttctcctgatctatataacaatgcttggagcctatttggaattgctgagaatcgtttgaatctgtagctctgatcagatagggtcatctactctgctaggaaaatagatctagatcatcttctgagttttcactgagtcttatataggagcataagaacagtttattgatgcttttatgaaaactcttggtttggtatggtagaatcttgaactggtgacatttaatgcaatgatctctctcagtataaataacttaatgtcaagataccgtttagtttacagtggagtttctatttgcttctgagctggtgtttacataatttcatcatcactcttcagaatggtgtgcttctgctaagtgctaacatagtattttacatgttccaagggtacaatccttgctgttgcaggtggaagtagtgc

SEQ ID NO: 39664 - DNA, 820 bp, Arabidopsis lyrata
  Intron number 1 from transcript 915765 (locus 915765) deri ved from phytozome v7.0 (chr-ID scaffold_8; pos 3321600 to 3322419 reverse strand)
agggtatgtctatgatagtcatatatatatatatatatatgatcaaaaaaacattacttacccatattcttctcttctttcaatgtaagcaggtcatctgttcctacttgaaagaagaatcatcacaccagttttgcaacctgtcctgtttggaagcagaaatctcatgttccagagggataagtaatctgccaatgtttcttgatagctgtccgaatctaaaatccatcgtcttggtgattgatagcagaaacctagaggttaaacataattaatatgcgtttaaaatgttttgtttatataaatctacatatattttcattaatctttgtattttgcaggatttttatactcactctacttcagtaactatcttgtccgcgcctcagtgtttgttgtcatccctagagtttgtagagataaaattcagcagattcggcgtaatgtctcttggaattggagtagcaaggtactttgttgagaactcagtagttctcaagaaacttgttgtgcattcgaggcgtctcatgtgtaagaaaagtttggtcgccttggagaatctccttgcattaccaaggcgatctagcatgtgtcaaatcgtatctgttgttgacggttaaaagacttttaggtaggtctatgatcagaccgaaactaggattcttatagattggacttgaaggattttgttttttgttgaaactatttgatgttatgagctttgggaatatttatttaagtaaaaggtgactaataatttggaagatacaaagattgtgattctgcctcatgtgatttagttctccagccgggtcttgtc

SEQ ID NO: 39665 - DNA, 954 bp, Arabidopsis lyrata
  Intron number 1 from transcript 316003 (locus 316003) deri ved from phytozome v7.0 (chr-ID scaffold_2; pos 14214013 t o 14214966 reverse strand)
ttttgctgttgctcttcttccccaagaacagtgaggtctgtttcacgctcacaccaaatagagttggccaggttttgtataattatccacttcgattccaaaaatcatctagtagcgattgagctcgatactgtctttgaccaacccattcgatgacaatcatgacataaacaccttagtttcagatatatgtttattggtacatcagaacttatatgtgttgaagacttatcatcccctgagctctcaagaacaggaaaggcaagcgctgatgtattcaccctcagagtggtaatgctagagattacctgtggacgcaaacccatcttgcgacaagtggtttctatctaccattactgtggaataaagttgagtacatgcttcttgttgttgtgattgtgagtcttggttaattgtgatacgtttgtaagcttgcaaacaagaatgaaatagtagaagaaaacacaactctggaggaataaattatttatttaattcaattgtgttgtcaggaaataaagaaggaatcagactctgctctattggcagagagacaagaaagcatcggtaaatctatgcaaacgttttaaattttccttctcacttatagaccttatggacaagaatcaataaagtaataaattctcttcatattcaaagaatggttcaatggcaaatggaattgattatttcaggaagtattgaccttgactcttctggagtgaaaaatataattaactcactatcagtgctggttcaaatgtatttaatagcactcaaaaggatttgatcattccttttagcactcttcattgatctattctatgtgttgacttcccctagagtctcttctttcttggcatgaacatttggtttgtattatcaagatcgatcaatcatgtttcagccaactgtactgttgttgttgctgttgttcttccacaagaacgtagt

SEQ ID NO: 39666 - DNA, 372 bp, Arabidopsis lyrata
  Intron number 5 from transcript 938187 (locus 938187) deri ved from phytozome v7.0 (chr-ID scaffold_5; pos 16367743 t o 16368114 reverse strand)
attggtactggcataatacatttgtagatctactcctttcttgttacacaaaacgttgtttaaagttatatattttgactcctgccagaacaaaactaaggaataatctgtaatctggtactgtatagagtttgaaacaatgatttggacaagatgattctatagaacctcgtagaatgttgagtaatttctcctagaacggttgtagcttcctctttattcctattgacagcaattttgagcttttctattgaagctaaaagttctggtttatgtctttcatttgcttcttccaaacaactgattcaattttttctcatcttgtttgtttcatgtgataggtggtttggaatacagctgaatcctcagttt

SEQ ID NO: 39667 - DNA, 649 bp, Arabidopsis lyrata
  Intron number 4 from transcript 483708 (locus 483708) deri ved from phytozome v7.0 (chr-ID scaffold_4; pos 22255553 t o 22256201)
tctctcttctctctttattgcttttcctctaaaaccagcttaatcttcaatctttgtggtttttaatctgtgtttgaacctcttgttcttcagaagggtattcttatctttatttttcaggagccttctcattaaaataaatatactatcatgtaatagatgctgattgtgatgattcttctatttatttattagcatatcattagcttttttatagcacttattgttcacaccgacgaattaaaggaaattggaaaatgacttgtaaattttttgtctggtagggttttgttctccagcaaaatatcgataagcttttctgtgatgattttcaagattctcgaaactcttttgatggcttcttcctttttgttttaaaatccgtgtccttatttataacaaatctaccaacttgttcatcactcattcaactactcccttcattactttagttccccacttttgatttttttcctattacagaactaaagtttccattatttgccagtgtgtctcactcatcaaggcattacatgatcgtttctgggtttgttttttttctttctgtaaatcgctaaacttttgttttttgtccttcttttgtgcaattcagtgaaacagagttcaaggattgtatttgtgtgtgatc

SEQ ID NO: 39668 - DNA, 459 bp, Arabidopsis lyrata
  Intron number 3 from transcript 313119 (locus 313119) deri ved from phytozome v7.0 (chr-ID scaffold_1; pos 9805970 to 9806428)
tatccgtcatacgggtacgtacgctgaatgatttaaagagaaaaaataatgcatggttttgttttatttaataccaaagtgtgtaaagaaatttataaattttgcttagacaatgaaatggtccaatgtgatagaaatggtaagagacagaagatgatatttaatgcttcaatttgcgcaagttggagtcagcctgtaaatatcatattcaaaatataaatacttatagactatagctagttgtcatataaaaggtatatctatatcatgaagattagccggaccaacattgcaatagaacaataatgaaatatgtcatgtatgtctcggtgaaatttgcatgcactaaatttgtctaggtaagataattaggtttttttgtattttggtggatatatagactaattggtttagcatcattaaattcttttgttttcaggtacacctacaattctgaat

SEQ ID NO: 39669 - DNA, 729 bp, Arabidopsis lyrata
  Intron number 2 from transcript 481917 (locus 481917) deri ved from phytozome v7.0 (chr-ID scaffold_4; pos 13945682 t o 13946410)
caccatctctaatcgaacagggtatttctcaacaggtcagttttttttatttatttttctgggtttctcatagtaaccaaaaccctctgtttctcatgtactctgttttgatatctctgttctgtctgttgcaatgagatttttttcttctgggtttttgattttgggaacaatgttaatttaaacagtgaattttatgtggtcgagattggttggattttcgtatttgaagaagaagaacaagtggaagttttaagggtttttcaatgttttttcttctttctaattttgctctgtttttgcttcatttttatgaattttggattgttttcccaagtaggactcggtaggtcctcttgcttaaacaaagacgtgaacgcttttcatgtttggtgatattagattagttgttaacttgtgaaattgagtcttctaattatttatgtaattgtaatttgacaaaaggtttgattttgaaatatagaaaagtctgtatttttaaggaaagaaatgagttggatgagaaaagtccaatttttttttttattagactgtttggttttctagttgacatctattggaagataaatggttttaagtttattaattaggttaaatttaggtcatacttaatgggatttagggtatcaatgtttgcgtgtacataaatcataaaattcataatctttgtttaaatgtttcagcatttgaagactgtgtcttgtgcca

SEQ ID NO: 39670 - DNA, 603 bp, Arabidopsis lyrata
  Intron number 1 from transcript 917191 (locus 917191) deri ved from phytozome v7.0 (chr-ID scaffold_8; pos 16857945 t o 16858547 reverse strand)
gaagaaagtctttgtttttgtcgtcactccagaacgttagcccgctgtttctccctccggcttatctttttctttaacttgtttcaatcctcttttaacatttgtttctctatatttttacagctcagttgctcacctacaaagatgctgtcaaggttgtcaatatcccaacagttatataatgtatagcgttagagcattttgactgggaagcatcatcttgtggtgctagttcgcctttcattaacggatacctcgggaaagctgatcaagtttttgatatggaaacttcagaaccaagaaatagctcatcaagtcattcgatatggaatcttcagacatagcttttatgcctatatagttagaaaaagccaagtttgagtcactctttattttttttattaatgagtttctctactctcgtttagaaatacatcagtagtaataagtattttccaatcccctaagaagctgtgggatgattgaccttgtaacataagttcttgcaagcaagcccctccttgattcacgagttcacccattctgatgtctttttgttttcttgcagccactattggtgttgaggtccatcctcttgatttc

SEQ ID NO: 39671 - DNA, 890 bp, Arabidopsis lyrata
  Intron number 1 from transcript 324222 (locus 324222) deri ved from phytozome v7.0 (chr-ID scaffold_5; pos 18265460 t o 18266349)
attttggcgtcgagcagctcgcgttacttacgcaggttctatttctcattactatatcaagtctctttaggttaccaattcttgttctttaatcttggtaaactactgtaccgatttgttttggctcggttgagattaacttagaaaccctattgttgataaacatatgaaaatatatagataagagttgttattgacttgatttcatgtgtaactgagcttaaagattgcttgcattgcacgtactgcaactttctttccagatttagacggcaatggactgatatgtttgtgttgcacaccgagaactttccttgaaatggaaactttttgatggttttttttttttttccaatataaaccctctttatttaatagaaaatatctttgaaaatagtaactttgaataataacagtgattttattagtatcccccaaaattgagaaatgtcttatgactcttataatcattctgcgattttgcatgattttagtaatcagatatttgtgaggatcgccatttacgtttagcattcccgcgcgcaattcctcaaatgcaatgaccaaatttggaagaattttatcatttccataggcttttaactagaatttcgtcgcttaaattttttggccatttcgtttcgtatttttttccacaatcttgggctttcacacaatgatatcaaggatgaacaaaaatgttcctcttctgttatagtcttatcttactttcctcatttgggtttatataaaatgaaaacccttggtgaaacgactcctttatagtgaacatgatattcatccaatgaaatggatagtgtctttaaattcaatattgttttaaagccatttgtgtttttctttttccctcacagaaacatttgacaagt

SEQ ID NO: 39672 - DNA, 1043 bp, Arabidopsis lyrata
  Intron number 1 from transcript 479971 (locus 479971) deri ved from phytozome v7.0 (chr-ID scaffold_3; pos 11953428 t o 11954470 reverse strand)
actccactgcgaaacctcgtcttcttcgtctcaccgttagtcattttccgatctccctctctctctctcaccgatttcttcgtctgattgaagtttcaaattggggtttcgctacgattcttgattgtattcgttcttcttttggtgcgaatttgatgaaattagtttagtttcttaggtatctctgggtttcatgattgtgcatcagtatatttggggcatttcagtgaatcggttagtgcttgatcaatgtattgatttatgtagctcttccttagacattgatactatttctggagtttttcttaggtgcttgttaaatttccactttgttctcaccttcttgctgctacatctttcaaggatttgagttcttcttctccgttaacaggtttctgtgattgttagcttatggtctcgattcttggggtattcttttatggtagagagattctggaacattaggttgtgttgcttgagttgtaattaggtcatttgaatattgagcaatagtattgatttgtgtctaggctctctatggctgtttgaaacttcttgaagtataacacatctatttacttgtttgcttagattccatgattgcctaatagctctttccaacaatcaaagatgttttgatgattaagccagaactgtgggctactacagcttcagtgttctttacaaagtttgaacagttcagaagagacaatgtgttttgtgactctctatgttgttagtgtggtacttgcatgttaacattgcaatataacttgctctgttggtccattggttacacatgttaatgccgttctatatttttttctggattagcagctctagtctattgcttaccttctatgaaattatgagatgcttttttgacttgtgacatctttgctgcgagacaacactttcgaattcatttgccattagagatcatggtatattgtttctgagttttggctatatatcgagattctattgacatatgtcgactttagcactaaaaccatgttcaatataacaggaaacaaataaag

SEQ ID NO: 39673 - DNA, 331 bp, Arabidopsis lyrata
  Intron number 1 from transcript 333087 (locus 333087) deri ved from phytozome v7.0 (chr-ID scaffold_9; pos 1810624 to 1810954)
gtcttagggcttcgctttcgcattggagagaagaggtattaacaatatatctcagattcgagttttgtattgtttcttctctaggtttttctttggaatttgattgtgttgataatctcaagtttttatttggaaattaatgagtcggagtttatgattcacttcagattcaatcaagccttattgttgttgttttgtgtggaattgattgtgataactgaaacacttctgagatatgagctcttaagaggattgtgataacatgaagacttagtcagagagtttatgattttcaggggaagaagggaatttggataaagctgcctcttgg

SEQ ID NO: 39674 - DNA, 960 bp, Arabidopsis lyrata
  Intron number 1 from transcript 908052 (locus 908052) deri ved from phytozome v7.0 (chr-ID scaffold_2; pos 10305187 t o 10306146 reverse strand)
cgtcacaaccaaccctcgtcaccgtcatcaccaacgtaaccgccgaccatcattatcaccattaacgcatcgccaattctcttaccggatctctcgggatctgtctctctctccgtcaaaactatttctctctccgccgatctattgatattgtggctatgctgaactttccagtgcgagtagctttgtcggtggaggtttttgttacagcacggcgccggtgatggaggtgactagggatgtcaatcgggccgtatgtccgcgagcctggtccgtttagtgacatagcggggcgggtacgggcctatgtagtgaagcccaaaaattagcgggcctagcggacttggtccgtttagattacggattaaacaagagggaaaaggggattttcatacccgtattatctgcaccgtggattttcatacctggacaatttcgtaggatattttacaacctaaacttcaataaaatttgaatctcatacatatacttgatacaacgtgcaaaaatcggagtcaatctaatgggtgttagtcattcctcggtttctattggaatttgcagtttgactaaccttttgatcgtgttgaacaagtgaagagttgtgtctcttcctctctaaattaatacgatacatacaagaagaatgtatgttaacatcagacgatagaactacaacgtgacaagaaggcacacgttttgttcgacaagaaattccagaaaaagcctttgagaggcaaaaaaaaaagctcccacctctctcttcaaaaccttaaccgcctctatagttctgagggagaggagcctttccagcagccggttttcttctccggtttgcgtttgctcttctccctccccctcgtttttttctgttcttcatcgtcggccttgtttgtggttgcaacgagagtttagtggtgagtaggatcttttctccgacagcagcggtgtggtatctct

SEQ ID NO: 39675 - DNA, 659 bp, Arabidopsis lyrata
  Intron number 1 from transcript 487284 (locus 487284) deri ved from phytozome v7.0 (chr-ID scaffold_6; pos 1733228 to 1733886 reverse strand)
aacccgttcgtgaacctctcgagactttgattaaggtaattttgtttatctttatttcttgctttgtcttcgtaggtttttaaataaattattaattttaaactagacattaaagaaaaaaaaaagcctagacaagtagatcatgtccgaatgtttaggaatattgaagaaagtcctaattagtacataattttcgttttttttgttatataaataaattaagtatatcttctgaaccaaaacattcatagattttcgattttatttagcgtaaatctgcatatgcagtttacaaagatgggagtttacgtatttacactaaaagaattggcacatggccagatgggcgcctatagtcacatactagaatactagaagtcaacgaagaatatattgaaaagtgtttgagttttgacttttaacattaatatatgaaagtttaacagaactaaataacgaataaaatcacatgggtccacatgatttcttccggaccaatcaatactctcacatgtattccctaatgtacatcacttttagaagtatgatttatgaacatgatagttaatgtgtacgaaaatgtgcacagattacaattatcacaagcatttaaaactaatgataaagtaactaactaatttgtaggttttacgcaaaac

SEQ ID NO: 39676 - DNA, 419 bp, Arabidopsis lyrata
  Intron number 2 from transcript 477911 (locus 477911) deri ved from phytozome v7.0 (chr-ID scaffold_3; pos 2429069 to 2429487 reverse strand)
ctttcgctgtctttggcggattcccgtggtctcaggtacaatgcctccatctccacccaaccaactaagatttgtagctgaattatttgcctttgcgtttagatggtatataacaatgtggttttcatttatcaacgaagatgcaaatgagaggagaaaatttttcttttttttttgtttttggacgtttacaaattatcttatttttaaaaaaaaaaaatcatttgcaaatataaacgttaaaatttggaattacaaaattgtttaatgaaactttttacatgcaaacgcaagaagcattcgaatactatcgccttaactacggttatataagctttcatagacaaaactcatgttatgcttgctcttgaatgttgttttcaggttccgttatatataacagcgcaaacgttgggggc

SEQ ID NO: 39677 - DNA, 921 bp, Arabidopsis lyrata
  Intron number 1 from transcript 476540 (locus 476540) deri ved from phytozome v7.0 (chr-ID scaffold_2; pos 16099777 t o 16100697 reverse strand)
tcgattttgcccagatcacaaactcttcgtaagtttccaagatcattaacttttatatagttatgcttctttttttttttgtcacgcatatagttatgcttcttatgattggaatttaatgatatcaagagcctgatacgcacatcagaattctttccatatactacatgatgatgctacgaatcttttcatatttttatggtaaaataaccttatcttttcatgaaacataagacaaagacgtaaaaataaactcgaaatcagatctgacacgtgatacacattgagataactttgttgtcaaaatacaaacctctagagtcaatcatgttatgatctccgattcagatctgatacactgacatgagatatacattgagataactttcttgtcaatatacgaacttcagagtcaatcatgttatgaccttaagaattatgatttcgtgctctagagaacttgccaatcagaaataactgcaacctactttttattaattcattaattgaatgccctttatttccttttttcattcgacctaattttatttatttataaaactagtatactcatataatattcaaaataaaacttgttgattaatgtgtagagccagaggatagatgaatgtaatcttctttcatttatcggctaacgttagcaaatcaaagtgtcctttacggtataacaaagactaaatcctcctaaacaatcaatctaacagactaacacacgctaatattaacatacgcattgctgtcaaatacgtgtggagctatacagatataagatattagaaccatattattaactatgtatttattttgtttttttcgttttcggtttaccttttaaatattaacaaaattgataaatttatttcaggaagtcttctttgtgcgacggagcacttggaacta

SEQ ID NO: 39678 - DNA, 755 bp, Arabidopsis lyrata
  Intron number 1 from transcript 473272 (locus 473272) deri ved from phytozome v7.0 (chr-ID scaffold_1; pos 13670719 t o 13671473)
gcgggattgtcaacggcgtctgccgtgagtttctcttctccctcaccttttctttaaacgatcgtgtgtgaaatatatgtgaggataaggcacttcattgagatgagagctttcgctgtttgtttgaatcctggacacgtttcttattgatggatttagctattaggggttgtttgaggtttcatttctggggattttggcagcttcctctgtttctttacacgaatatgttggaaggtgaagggattatacatttagaacagtaatgaagtgtcttcttgacgatatatgaacactttcttgctggaagtgggagattatcccttgttgtccaaggcattggttgtttttgtggtctgcatttcatagacaagggaggtgaatgttgagtgacgagaactttttttatgtgattagagaatgtttttaaattgatggaaatcctcattcctcaccaatactctagtgataacccataaccatcaaaatatgcatgggtctgtgttattgaaatgatactgaatacattagtagagggtgaggaggtaaacactaattttgggttctttctggtgtttcctaggggatagttttgtggagtttcatctaacttgtgtgtatctcatatattgggacttcattcatattctacaatattttgctggctgcttgctattcatagtcttatgtgctttctgaaatttcgaattttgtttgcaggttgaagcaattttggataaagatagtttcacatt

SEQ ID NO: 39679 - DNA, 413 bp, Arabidopsis lyrata
  Intron number 2 from transcript 892274 (locus 892274) deri ved from phytozome v7.0 (chr-ID scaffold_6; pos 1079041 to 1079453)
atatctattacatcgaccaaaatcgccctgccgctgtaagaaaaacattaatctttacttagatgtcatcaaggctttgttacaaacaccagtttctctgcctttatatgtgaaagaataaactttggtttgtacaaactttggttagggtctggttaaatccaattggttcagccaaatcggtttacactaaatttaaattagtcttattaaataataatttcaaaaacaactttcatttagattttttatttttagacagtactaaacacttttgtttgtttgttcttcggaaaaaatgtaaactcataacaacaaatgtatacttttattttgatttattatttgattcttattttcattaaatcttgaatgcagggcttgaaagcaatagtagagaaagtcgtggataa

SEQ ID NO: 39680 - DNA, 539 bp, Arabidopsis lyrata
  Intron number 3 from transcript 483800 (locus 483800) deri ved from phytozome v7.0 (chr-ID scaffold_4; pos 22538733 t o 22539271 reverse strand)
cgggttcagatacaagctctggaactacaagttagtttcttatgctttcttttacaagttttttccttttgttcctaaatcttgttgctcttgaactcttacataattctacattttgtatactagagtttgactaggtccattgagaccgtgaagagaattaaaaaggtacattgtccttattagctcttttgaaatcttttcaaacttagctgagcacagttaaaaacaattttcaggtcggtaatcgtgaaaatgtagctaaatacaaaaaatgggaagcagagttgacgaaaaggtaagttttcttacacaatgtcatgtctctccctgacttgctctaacttcttctctgaggattaattatcacaccagattcgaagacggttgcttggatttctttgctctacttgttcctgatgcattcgtctacatcagcttcctgattggggtaaaactcaaagataatgtttctttggctctagtgttttggctcttgcctattgactccctctttacgttggaaacagataacgacc

SEQ ID NO: 39681 - DNA, 514 bp, Arabidopsis lyrata
  Intron number 1 from transcript 339978 (locus 339978) deri ved from phytozome v7.0 (chr-ID scaffold_2; pos 18061295 t o 18061808 reverse strand)
atttcattgaacatgtgagctactttcttctttttacttcttcaaccaaatcatattacgacacgtgtctatttgtcttaagaagaacatatacgaatacgaaaaagcgaaaagaagaaaaagttatttaaatgatggaaatctagtaagtgcgaatatagtttagaaatagtaagatttgaacttttaaagattctaatatctgttgaagataatgtacttatattgtcaacttgtaattcaaaagaaaaattttcttttgtttttgaagaattttacaaatttcgattttttaattattagatgggttcgatcatcaacataatcatttttaaataaatttatttggtagatctttgttgaatactatgaaacggtaaaaaaagagtaaactttataaattcgtaccaataaaagttgttttgtttttctttataatattgaagtaaatattcttacttggtgaaaaaaagctaaacaatgtgaaacgaaacaggctttgacaagagataat

SEQ ID NO: 39682 - DNA, 428 bp, Arabidopsis lyrata
  Intron number 2 from transcript 479855 (locus 479855) deri ved from phytozome v7.0 (chr-ID scaffold_3; pos 10744357 t o 10744784)
caacttctgggtctcaaactcctgtcctacgccaggtgcacactctttatctttatattgatccagtgatctgttttttttctcttcaaatgctaaagttttgacttctttgtttttttaaacacaaatcaagaacgtgtgacctaatattagaagattcgttttgatttgtttgattattcaagggattcattttgatcaagttccaataaaatccttgtggttctctctgttgacctctatagaccttttaaataacaaaaatatctagtctttttttttcttcaacgtgaatattattagtctaggttttggcctaagattaatcgctgttactattaaaaaaaccgtaggttttgagtaaaaaagtgaaagatttgctaatggatgcagagcattgagctgatcactaaacgagggacaataga

SEQ ID NO: 39683 - DNA, 383 bp, Arabidopsis lyrata
  Intron number 1 from transcript 359596 (locus 359596) deri ved from phytozome v7.0 (chr-ID scaffold_453; pos 1042 to 1424)
tcttcattgcaagagatcgtttcacggctccagaggtatgttaaaaacagagtctttaaaaaaaacagagtctttaaaaaaaacagagtctttaaaagaaacagagtcttgctctgtaatttctcaaatttgattattgggttttttggttaatcttaatgggtttttatttgattttcagaatcttctttgttatcacgatcaacgagtgaatcttcttcacaagagaaacttagtacttcatcgtctgaaggtaaattagaaactctgtaattggatcatttttgtttagttttaatgttaattatgaagaaaatgctaatgacaattttttttttttttttgtagattcgtatttgttttcaaggatttcaagtgattca

SEQ ID NO: 39684 - DNA, 729 bp, Arabidopsis lyrata
  Intron number 1 from transcript 932077 (locus 932077) deri ved from phytozome v7.0 (chr-ID scaffold_4; pos 324821 to 325549 reverse strand)
ataatcaacaaaattcacaaaagaaaggtatggatcattgattatgtgcctatcctatattatatgaattgtttgctgcaaattcagatctgattttgtttttctttatagatatatattttgtgtctacattttttttgtgattacaatattctccattttttcttaaagaatgtcttttttttcttcttcttataattgactttcaaattaaatagtgttccgaagagatgttcttatttatataatcctcttcttttttggttgtcgacaccagtgtgaaatttggatatagaactattcataaatcatctatataatatggatctaaaatttttatattggaaaagtagaagatataacgttaaaaaaaaagtacatgtagatacctaagagcccatctcagtgattgatttgaagaagaagcatgtttcatgttcatactagcttaacatttatgtgaaagctattcgtatttcggaagatctttcgaaattgaccataaacatgatgtatgttcatgttatacagattattgattaatatgttagatgatatacaagcataacggtattttaaatattcccgcgaaaactaatatatttatgaaggccgcctatattttctttttttggatttatttgaagaaattaaaaactccctttggtgaaaatgtttgattgatgatgaacagcttgtacccaagaagatcttgccaagcgccttgac

SEQ ID NO: 39685 - DNA, 959 bp, Arabidopsis lyrata
  Intron number 2 from transcript 490819 (locus 490819) deri ved from phytozome v7.0 (chr-ID scaffold_7; pos 986253 to 987211 reverse strand)
gcattcctctacttaccctttggttcctgggtacgcaattttttttttttttaaataacattattttcgtaaaattttcagttatgttaaaaaaattattatcactgtgtcggttagattatagtcccagtaaattttgttttttatttgatgttaagacgactagttttcattcacattacaattataaacaatgtaaattttgatccgaaaaaaccgaaattttgcttatggtgatttaaatacacaaggattattatattggtttattataggtgaaatgaacttaacatgtatgtttcaggaaatattaaaaatattggatttggttggtaaaatgcttaattataagagatcaaaatataattgagtggaagtaaatgtggcaagttcttgtttgtccactgtttatagtggagcacttacttttagttcttttctttcggctaaattaaatatatttgaataaaaacattttaggcagataaattaattattactctgaaataagttttgcaaaaaaatgagcactcacctccattgttaccatcatcacttaaagttgactattactagcttctaccctctcttttcctgttgtgacaaatgatttctcatatagtgatgacattttttttcttttgttaaattcatttagtaactttattataagtaaatccacacacacacatatcaaaattgaacgttatgaacaatgaagatatttaagtgcaacacaaactaaatacatgggtcactctttttatattgttttaatttcaactgtctaaaagcttttaaatatttttgatataaataaagacacgataaacattaattataaattttattttgttattattgctagttacatttccagattaatgtaagaaatatataaacatggggttgtttttagtacagtcacgagatagttggagaagtgagtgagataggga

SEQ ID NO: 39686 - DNA, 327 bp, Arabidopsis lyrata
  Intron number 1 from transcript 477808 (locus 477808) deri ved from phytozome v7.0 (chr-ID scaffold_3; pos 1918992 to 1919318)
cagccgccgggcgcttctcaggtgcccaattcaaggtgttatatatttataattagatatatctgttgatttcgtgatttttcacattttagattagtttgacgaaatcaatgctgcaattcccaacatttttactgaatcatatatttttggagaatgaggttgaaaagtggaaaactttaactgtttattacttcatcttcttatgacaacaatcagattcagttttgtggctgattttgatgattgcattgtttcttccgtacttatatatccattttgttgttggtgtatgttgcttttgttttagccaaccgcttcaaaccg

SEQ ID NO: 39687 - DNA, 543 bp, Arabidopsis lyrata
  Intron number 3 from transcript 912263 (locus 912263) deri ved from phytozome v7.0 (chr-ID scaffold_1; pos 10633502 t o 10634044)
gaggctcagagcatcttcgacgcgttgtctaagacgtaaggttcttctctttttattcgttgcggatcaaaaatagctaatctcacagcttagagtgatcatgagtctattttagctatacggtagagagatgggaacgagatcttaatcacatgtttagtttacgtattagctatttgtaaataactgcttggtttggaggaattagtttgagcttctaatgtgttattgccaaagataaattgttggaatctggacatgatttagtgttgtattggctctaggtttccagtgatgctagctttgcaacaatatatatgcaaagtttctattttttgttgttgtagactaatgttgcgtgctctagtgtcaagaatctttagtgttctctgtgatacaattaagaagctgtctagatacatagttttaaatcctaaaattttctttgtttctaatgtcagttcagaggaaacagcagaatttacttttttctctttcaaatgaatcacatgtgaattattttccttgtaggcttcctgtgca

SEQ ID NO: 39688 - DNA, 389 bp, Arabidopsis lyrata
  Intron number 2 from transcript 492710 (locus 492710) deri ved from phytozome v7.0 (chr-ID scaffold_7; pos 9168976 to 9169364)
cttgaatcacttcttcaaaggtactttactataatcatctttaaaaaaaacaaacaaatctctactaatactggtattggacatttacctattgaatttgtttatttgtacagtatatatatatatatatatatatatatatgtttttaatcctcattagttaaacaaaattattcagacatctgttaggttgataatatctattacatacgtttcttgggtgacaagaaaccaagaaactcatctcgccatactctgttttcttcacagaacttaggccctcctctgtttttgattttgtttgttatgacttatgagctcttctttcacttgtacttatcatgttatatacagcaaagaagacgcacgtaactcgctgatctacagct

SEQ ID NO: 39689 - DNA, 699 bp, Arabidopsis lyrata
  Intron number 2 from transcript 931043 (locus 931043) deri ved from phytozome v7.0 (chr-ID scaffold_3; pos 17628312 t o 17629010 reverse strand)
gaatataagcaattcccattatttgactgtgagtctttatttctgtggtccaaaaatgttttttttgttgtgtgaaatctctctccttccaagttggatatgcttcatttgacttgggttcttcttagattttctgaattttgattaaagttttgatctttactattaagaattcaggctaagtggagtttgattgttttaacttttgaggtgtaattgtgctcatgatgaaataatcaatggaaaaggattcacaactagattggggcttggtttatttgacttgggttcttcttagattcctaaattttgattaaagttttgatctttaccatcaaaagtttgactaagtggagtttgactgttttaacttttaaggtgtagttatgctcatgatgaattaatcaatggattaggattcacaactagttgtggcttggtttacttgaattgggttcttcttagattcctaaatttttgttaaagttttgatctttaccatcaacagtctgactaagtggaatttgactgttttaacttttattgaatcagttttgtgcttatatggataatttttcatctttattatgagtctgaaggttattgtgaaatgctatgaacttttgacctaaacaatctctcccattctttgcttctggtgcagtctgttggttatacagcggtgcctttcattataat

SEQ ID NO: 39690 - DNA, 617 bp, Arabidopsis lyrata
  Intron number 4 from transcript 470124 (locus 470124) deri ved from phytozome v7.0 (chr-ID scaffold_1; pos 285552 to 286168 reverse strand)
agtttcatagtttttgtcgacggatctatctctttctttctttaggtgagtttcgattactcttttcggcttaatagtttttctacgcttcatgttattgttcttatgactatcttgtgttggatttgatgtctttgaactcttttctttgtgaatttcgatattggttactcagatctcagattttaagatctgggttttgctttttatatagaagaatttttttttttttttttggtgaaccctgaaattggagatagctcttgcctcataggtcttggatctattggttttaaaactttttagatcttgggactacaattttattttgttggttgacttttatatgagtttcgatttgatgttgtttgtgtttctttatatttagaggtttcattacctttgttgttagatctgttgagaaaagaaagatccatacttgaagatccaaaagacaagagaaatggctttgaaaacatttgatctttgtattggatatgtagtatggatccagaatataatcaatgtaataatgttttttgttttatggtatgtgacaattgatgtgttatctttttcttcttctctctttttgttttcagttgaaacttatctga

SEQ ID NO: 39691 - DNA, 550 bp, Arabidopsis lyrata
  Intron number 2 from transcript 476557 (locus 476557) deri ved from phytozome v7.0 (chr-ID scaffold_2; pos 16169824 t o 16170373)
tgttctaactggccggcgaaaaagccttactttaggtaaaataataattactatatatatttatattttgataatttaaacactctcttctgatctctatggttcgtgtctagtagtcgttgacttgttatatggtcacatatgtaattcttatattcatgtcttttacttttctctttgtatgtttctccttctctgtttttgttatggctcttcatctgccaatgtagtgattcttccattaaccaggtcttgttagtgtctcagagatcttaagttatggttgttactttttctttctcagttgtgttgatctaccgaatctttttggttagatttaatttcccttatgaccggttttttcttggtagattttgacttttattaaccttaggctcatggagtttgcaaccaaatgtgataaattcaagtttgactagcaggttcttgtaggttttattaatcgtttctatcaatgcgtaatcgggtgcttcatgtttgagagttttgatttgatgctcatgcttgttttatgtgcttgttgcaggta

SEQ ID NO: 39692 - DNA, 540 bp, Arabidopsis lyrata
  Intron number 1 from transcript 470597 (locus 470597) deri ved from phytozome v7.0 (chr-ID scaffold_1; pos 2110719 to 2111258)
aagctttacacgtcttgtacttacgtcaacaaaaggttggttctcaatttcgaatttcattgtttatataacttttgattcgcatattttctcttcctttatttgtggttgtttcgcattaggaaataataggtgcttcaataaatgctaatatgtttttgtaattctgtgaaatccagttttttgagactggttttgtttcgtggtgagaaattgaaagtactttgcattgttggtaatgtgataatgggcgaagaatatatgagttaggattgtctgcatgattatatattcctgaagttcttattgtgatggtctagctgttatggtaataaacatggaccaggtgtcagatgatatgttctttgttatgtgactatgtcatttgtgtttttatatctctgattggaaagagcttaatttttgcgttctgaagtgcaactagcatgtgatgattatataatcatctctattctaactttgtgtggttttatcgttcatgcagagctcagtcaaaagcaataacgtgtccaaaaccaa

SEQ ID NO: 39693 - DNA, 822 bp, Arabidopsis lyrata
  Intron number 1 from transcript 934243 (locus 934243) deri ved from phytozome v7.0 (chr-ID scaffold_4; pos 17159922 t o 17160743 reverse strand)
tttccactttcaacctccaaagcattggattaacggtactttgatctctctccctctctttcaaaatttagttggattgttaatttctttatagtgtttaatgattttggttttgatgtttagtttttgttttcctttttgttccgaaatgaaagttgattccattacgacggtatttgcatagatacgagatctccaaattcttcaaatccttttttgttgttaaagttgtgtgatacaacaataaagctagaattccaatgaaagaaacattagaaatcggttttttaaggaagaaacaagacaactaccctgatctagacaaaaacaaacaaacttctccgttccttaatatataatctcacgtatgataattacgtcatgaaaatgtaggggagaaactaatttttgcatggggtatttatatttattcatatctatgtataatcttttttgtatatagaatattaattaaagtgatatctttagacattcacattttcaccaatacaaaacacagcatatataacgtgagaacacagctctgtttttttttttctgtataaaaactatgcatttatttttatatgtgcttgtggccatatctttcaatggaaagatcacatgaaattaatttcatcttcaacttgttctaccaaagactttcaatttcatgtgatttttttgtattctcgaatcctcttgtcttatcttatttccctcgaaatcataatctaattttgatgacctcaaactaaactaacctggtttttcttttcttttgtttccatgtggcatactcaacaatccttatagatccaa

SEQ ID NO: 39694 - DNA, 621 bp, Arabidopsis lyrata
  Intron number 1 from transcript 919754 (locus 919754) deri ved from phytozome v7.0 (chr-ID scaffold_1; pos 3779012 to 3779632 reverse strand)
aaaccgctttcaacgccggccaccactgtaatttcttgtctacccttctcttctcatggtttcttcatcctcttgcacgattgcgatgaatttcgctcacatgagaatggttttaaacctgctcaacgaaattgtgacagcaaagtttgtatttttatcccggattagaaaaaaaaaaactcaaatttgttgttttgaccctttacttcgtttcttgtgacactgtaacctgtttatctttcctagtttcatcaaattgggtttgattctttgttgaaagatgattttacttcagagggtatacgtataaatccagaaaggaagggactttatacatcacagagttacaaatttattgataaagatagtttgtatgccattttgcttgattatcggaaataaacgccttttcaggaagaccagttctacagatcctatatcaatggccgtttcaaaagtcttgttttacacaagcacttatgtttctttgagtatctcgtgctgctgccttctttgacaaaaaatattagtctccgtagtttttctatatgcaaaagtgttgatttttttcttacactaatatcaggctcacaagggacagatcaaggtacaagtggtctt

SEQ ID NO: 39695 - DNA, 849 bp, Arabidopsis lyrata
  Intron number 3 from transcript 359038 (locus 359038) deri ved from phytozome v7.0 (chr-ID scaffold_9; pos 924486 to 925334)
gcattctttggaatccatatcatatcgtgtacgtactttctcctctctatgaatactaaatgagtaatcccgttctgtgcgattttttttttgttttatgcatttgtaaatttttcgtttaattatttttacgttttgaccaaacaacaaaaagtattatttttacgaaagaaaatttctaataataatttttttattgtttatccgagttgtttatcattgatatcttgacataggggtcaacttgaaccatctagtgttaaagttctattgatttatctgaattttgtataatttttttgacgtaaagttaaacttattcgcttttattttcttgttatttgtgttaatattgaattattctcgttaaaatagccatttttctgttttaaagacttttcaaaataggtacggtgtagaatatatatattacaactaaaactttgagagatttatgaatcatagaagataagagatgaataagttttatggttagtgaaaaatctaacatgcatataaaagtatttgaaacactaaaaaaaaaaaaggatgaacggaacttcgtctattttgttatttttgataaacatatctatgtatatatttatgacgatgtgagtgtcaatcatggattgatttcattagactattgtatatacgattataaaatcaacaacaatatataatccaaacaataaaagacaatgaattccacactctatatatagattattaatagtgttgatttatatttataaagacaagctttttaatagtgttgatttatatttataaagacaagctttgtttataggttttacgtggataatatcccaataagagtgttca

SEQ ID NO: 39696 - DNA, 387 bp, Arabidopsis lyrata
  Intron number 1 from transcript 923226 (locus 923226) deri ved from phytozome v7.0 (chr-ID scaffold_1; pos 24879334 t o 24879720)
tgctgccaaaaaaaaaaacaaaattgccatcactacactatgtaaaaaaaaagaagaaaaaaaacattattggatcttatcttcttttctttttttctattcaacctatttttgttatttaacattcagccgcagtctacaaacttactttttgtattgggaaaattggatatataagatatctactaaattttttgtctaaatatattttattttggtagattagtcaaataggtttttaaaaaaatcaaaacccaactttaccctcattttctctcaaattaattcaaaattgatttaaaaaataaaacttcctaatttatttacaaaaattaaatagaaatctaaaaagtcaaaaccggttataattacgggctcgtgtctccg

SEQ ID NO: 39697 - DNA, 954 bp, Arabidopsis lyrata
  Intron number 3 from transcript 920736 (locus 920736) deri ved from phytozome v7.0 (chr-ID scaffold_1; pos 7601896 to 7602849 reverse strand)
cgtggatatccccggaggcaccagcccctcgagaggtatgaaaaaaaattatcaaagctaagttttcgattttgaatacaaattgctttactttattttaggattatatgatctttgttataatttttacaacagtgaacagatcttgctttgtatattgcttaatctgcttgcattataaataaagtgacgttagtgtgaaaggcattaagaaaatatagtaatagttaattatgtccatgatgatgtgtttagatctaattgaataattccatactcttaacttttattattcattaaaacatattatctttggaccgtggtgctttcggttagatatgaagtgaatattataagaataaacattacttgcttagagaacatttcaattccgtgtggcacgatattgattggtccaaaaccatatacctaactctctaataggttgcttctgttatatatttttagttggcaatagccaagtactttccagcattaacatttaaaaacgaaacataaatcaaataaaatccattattcttaagaaaaaatgaatccaagtggtttaggtcagtttttaactatatattttatgtataaggagcgaaagatttctcatctctatgggattaaatcccgagatattaatattagagtcactatttaattttcctatgtttcaagctatgtcccatacttacgacatgtggtgtcttctgaaaccaacatctcatgtatatccgtacgtctgcattgatgtatatcaactaaataacctacacatgtcatcttatacaaaaccttaaacactgaataaagaaagccgttttgtacgatacgaaaaatactataacatgtttcctagcgaaaacagttattgcttaatgtattttatattagtacgatgaaaaatattccatgttttaaatttcaggaaaggagatacttccatac

SEQ ID NO: 39698 - DNA, 587 bp, Arabidopsis lyrata
  Intron number 5 from transcript 494762 (locus 494762) deri ved from phytozome v7.0 (chr-ID scaffold_8; pos 5974135 to 5974721 reverse strand)
ctcaggttttacattactcccttttgacataatttaagttttagctattttaattactagaagttactatttatgtaccgaaattttattgcgacaaataattatttcataattccgttttttttggataaacggttttatttcatgaattttctttttagtatattattaattaaagtacaacgagatgatattttactagtttgtatgtttgataaatggatttaatttttctcaagtttggttttggaaaaaaaaaaactttgttaaattaaagagataggcatattcgttacgtcaaatgaatggaaagtgaaaactgtactctagaaggaaaagtagtataaatcggtaaaggacacaatgtgagtgtaccactgtaccttataaagttagtggaaggaagaaaattgatatccaaatttgcaataataaattcttacttctagaaaaagtaaatgaatacaaagatgtgatttgtaacatataaaaaaaacaaaaaagatagatgatattaaatctgttttgtggtaaaatttggtttttatgaaggttgacgcggtgtattcagctttgaactcgatagg

SEQ ID NO: 39699 - DNA, 762 bp, Arabidopsis lyrata
  Intron number 1 from transcript 939389 (locus 939389) deri ved from phytozome v7.0 (chr-ID scaffold_5; pos 20991948 t o 20992709 reverse strand)
gtctcgctgctatcgctgccacttgcaggtattctttcatcaagaagaagattcccttttgcttttggaagaatcataactggtttgaattaataataaactgtttgatatgtgatttgtaaattcaatcttactacgtgagtaatttgatctgggcatagatgttttgctgccttgttcctgctgatattactctgttcttttttttttttttttttgggtcaagattttagcgtatctaaaagataaatgttttaatcacgttactgaaaattcttattatagccactcttttatctcttacttgacggtggtatatatctatttattcctggattattcgctctcagtgaatctcctgaggtgggaaatctagtcaatttggctttgtgtgtgttcccttttcttttacttttccttttgtggtttctttttttaccttgttgggaaacttagatctgttttcggattccccttctttcctctctttggctctgttttagcatctctcactatgcttccatgtgattttttttagttatttgttattgttctatgcttatatagtttcccaaagtgatctatctacattgtatcaaatacaactttaatcacaattatgcacatgattttatttatttattaaggtctcttttgtagcaatgtttatgttctgcaacttgtataatgtgggtcactcgatgctaattatgtgattcttatgcaggaatctgaaagaacttgatttacgagagagtgagg

SEQ ID NO: 39700 - DNA, 857 bp, Arabidopsis lyrata
  Intron number 1 from transcript 470222 (locus 470222) deri ved from phytozome v7.0 (chr-ID scaffold_1; pos 699360 to 700216)
cctctttgtgggaatccatcggacgggtcagattatttctcactctctctctctcttttatccattaaatagaaacacctatttcaattatttttttgtgtgtgcccgatctaactactaaatacttttcactattttctctgtgaaaatgacgtaaataataatgtttttttttttgttaaaaacgtaagtaataatgttattaattatatacatatacagctcacatttattaaaatagccgtatgtatttaattatctatagtagtgcgatatgtgaaatacttttagtggaccgaaatattctcttttctcgaagtgttactaatattcgtttttttttgttgaaataatttatttgattatatacaattgtgatatatagacagttttcgtgttctgatttgtccggtacttcatgcaaataaaacatacgcacgaatctctaattagcctaccgctatttaaagtaacttttcttaaataaaactattttatttaaagtaacttactttaaatattattcttttcttggttttgtttttccgcctctccaatttatgacaaagatctgattctaacaattttttaaaaaataattgaattagttaatgatatatttataggttactaggataatatgtaaaaaaaatattagtactactatacaatcattccattaattaaaaaaaaggtgaggaaatgaaatctgaacttatcgtacgcttttcgctaaaaccgaggcatcaagttgcatacgatgctcgcaacttgcaacattagtcaaagcgcattttatcatcaattaatgcaaccacgactaaattacgctctcggggatgcgtaggttgtatcaa

SEQ ID NO: 39701 - DNA, 497 bp, Arabidopsis lyrata
  Intron number 4 from transcript 474995 (locus 474995) deri ved from phytozome v7.0 (chr-ID scaffold_2; pos 798921 to 799417)
agcaggttgctcttcctgaaccacgtgatcaaaaggtgaacattttcaggtttttaacttctgtttttcgcgtggcctgtaaccgtgtaaatgccgatgagagttagtttgatgcttcaatcttgacatttctgtttcttctctgtctccctctgataagccttgtgttaagctagtgtagcagcattttaattaccccatgtaacttgtggtggattttagccgcgttaacagctcaacaaatgttgttgaggcggttagttagagagctaactggttcaaagtaagtttaggcagaatgagttgtgggttattctggttaggtctcagattttggtttgggcagtggtcgagagttagagacttctcgcgttcatgctgtagttctttggtgacttgaataaagctacttaatatgtgtgtcttaagtctgatccatcagattatatgtgacactggttttctattctgattaagccaggggggtgaggaagact

SEQ ID NO: 39702 - DNA, 539 bp, Arabidopsis lyrata
  Intron number 2 from transcript 490066 (locus 490066) deri ved from phytozome v7.0 (chr-ID scaffold_6; pos 22226646 t o 22227184 reverse strand)
agctctctggaatcatccagctggacctaagacaagtgagtttttaacatccatgaatacatgaatgtttcttcacttttgacttttcgcactgtgagacttgatcatcgaatttttgatacttgagcaatcaatatttgtataatgattttcatcttttgttgctcgatttgctttgattcaacctaaatttccaattcttggttgactccgtaacagatcctacttagtttgtttggttttgtcttagaacaagtctctgaggatgtattgatatgttgcaacgaaatttgactatgtaagaattttgattgaagaaaagcttacctgaatggttatcgtttatacatagattctgattcaatttgggttcggtttagattggtttggttaaaatgctctgtttttctccaatggactcttaagtttaatcaaacaagtgcatatggtagcttaatcaaacttgctacaaaaacatgaattgtagtcattttgtaatgtcagttcatttttgggcgccaacgttcaagtggggtata

SEQ ID NO: 39703 - DNA, 320 bp, Arabidopsis lyrata
  Intron number 2 from transcript 474229 (locus 474229) deri ved from phytozome v7.0 (chr-ID scaffold_1; pos 26907986 t o 26908305 reverse strand)
ttgaaacaggtttgagtcttttctttctagttttagaagttaaattttgaaattatttcctaatctggaaactttttctggtaactttttgagaatatgcttacgattttgataggactataatgatttaaagcaacttgcttgttttggtctctgtaaattggattctattgattagcaattaattacagatattattatctgcaactagtactaattaatcactaaatttggtgaagaaagagtattgaaaagtgaagtctttttgaatatatatgaatcttttgttctgttttttttttcttggaaatttgcagctt

SEQ ID NO: 39704 - DNA, 860 bp, Arabidopsis lyrata
  Intron number 3 from transcript 950467 (locus 950467) deri ved from phytozome v7.0 (chr-ID scaffold_8; pos 18314327 t o 18315186 reverse strand)
acctcggctggaccttgcacttccagtatccccaaggctaccatcaagtagtaaactcagttgatacttctcctcttcgctagcgttttgctttgttattcgcaaactcagttggaaaaagaaaaagatgtttatttttgtcacattttgaattaatttataactttgttcgtataagctttttgacaaacaacgttgtttcaatctccgttttgatagctctctgctaaactagattttggtttaacttagttccaatttctttgtcctttggctcaagtagtgcaagtccaccattgcatggtttgcaacgtattacctacaaatatccacttagctacttgtggggtttcaatcagataaaccaaaccagtcactctggattgtgattcttagatgatcttacaaggaaggaggataaagaatcttagacatggcccatgaggatctataagagagattggtggtccatttgtgacaaaaatcattattaatttttcctgtttccatttattccaaggatttgaacccaaaaaaaaaattgggaaataaaataattaaaaaggtgtattatatctaaagatttatcttatcagcttacaagatcctgagcagatccgtacgactgtcactggacacatatgtttctttattcagtttctcaaagaatcagtcctccatagcaaaacacacaacttctttcttatattaaacacacacaaaatctttattcttgtctccaaaaaaattatgatcttttttgaggttctttagcttttattatacgattccaaatcatataaggaatcacacctcttcatgtagcggctttgaacggacacatagagacggtgcagttg

SEQ ID NO: 39705 - DNA, 492 bp, Arabidopsis lyrata
  Intron number 1 from transcript 918079 (locus 918079) deri ved from phytozome v7.0 (chr-ID scaffold_8; pos 20801510 t o 20802001 reverse strand)
gtctcctcgtacccggtcgttgtcttcaggttttttagtcgtggaaatctctcaactggtttttttttcttttcgtgattatgcatttgttgtcttctgatgtttaattaaccaatccggtggatcgtcgtaggcttgttttgtagagtttcttcagttgaataaagtcataggaacgcaagataaactgtagaaaatacttttctggcaagattatcatcgagtcaaggggatttatcgataatagactaatattgatgtagagtcgagtgttgcatccaatttcaactttggcagcctatctcagggaagctggggattgaaaatgtgccttcttgaatcttgaatcttgattctcatatagttcactctctttccactttttgagttggtcgtgatgtcacttttgaagtgttcagtcttagttttgacttttgaacaattttcctctccccagcaagacttactgtggttattccaagagggtaaagc

SEQ ID NO: 39706 - DNA, 211 bp, Arabidopsis lyrata
  Intron number 1 from transcript 916001 (locus 916001) deri ved from phytozome v7.0 (chr-ID scaffold_8; pos 5490620 to 5490830)
gtcgccacaatcgccggttaccattcgaccaactggttcgttgttttctatttccatttgaatctctttatcttcataacaaacatcaaactatttacatttctagctttttttaaatatccattgaacttaaagttttttttttgatgtgtgtgaattttctataagtatttaatggatgtagtgatgatcttctttgttgttagggata

SEQ ID NO: 39707 - DNA, 883 bp, Arabidopsis lyrata
  Intron number 1 from transcript 929762 (locus 929762) deri ved from phytozome v7.0 (chr-ID scaffold_3; pos 8060346 to 8061228 reverse strand)
acggcattagaaagctcgacggaagacactaccaggtattcaatttcttactgaaccgatgatatgagtccgtagagtttgtttggatcaggatttctccaggccgattcaatgctattagaattagggtttaggctggccttttgtgaccatatcgaaatagcttcgtgttttgaatattgctgatcgattcttatggttaaagacttgacttggggaaattttgcagtcattgcatataaatgcttgctacgactattggactgatacttatttcgcccagattacttacacttagtttaactttcagttggattcttgaagcaaactcatcatattgttactagtcacaaaaggttgcttctgagtgattttgtctacccgattttataaactcctgatgaggataacagaacagctaggattctagaatagttcctatctaagtcaattgttcaaagagcttgattgtgctttggatcagtgtggagttttattattagttgatgctttaactgtagagagataagcaatcgtagctttcgcttatatatactcgcacagatttcttcaaactgtatttgttctttgaaattttggctattgtaggaatagaatttgggctacgaagaagtaaaaccagagacattttgtttcgatctgcaatagatgtaggattgagggtatcaatcaatacaagctttaaacatcaatctcctatgtctctttggtagaatttgcagacaatgaaaattgaacatgcacctttattagcttctcgctcactaatctgtagaatcacgggtttgcttagtagttagtatcattttctgccttggagctttgacataatcatatcgggcgaatactgcaggggcaattg

SEQ ID NO: 39708 - DNA, 893 bp, Arabidopsis lyrata
  Intron number 3 from transcript 491705 (locus 491705) deri ved from phytozome v7.0 (chr-ID scaffold_7; pos 4738788 to 4739680 reverse strand)
gttggagtgaccaagacttctgtcgcaacaagaaggtttctaaattttctttacttctttattttggctattaaatattaatcctcattgaaattttggtaaatgaattggacccacagtttaaatttattggctggattggaataactaattattttctgacatcttatttaatgtagctagctcatattattattattattatacatataagaaaggaagccagttatataaattttgaattttgaaatactacataaggaattattttgtggtatctttttaattgtcttcatcaaatgtattgtcatactatctcgaatcatttaattgggcgacatagaaaattcgtatggggtcagattaattgaatatattcatttccatgactcgtaaatacaatgtacaactcttgattcgattacagttgccttttcgatatttaaagggcatatattttgattttttatttattgaataattagatacagatgaatagatgatttaatagtgtcttttgtgattatcacttagattagacggtgacatgttttttttttgtttggatatgtaattatgattgtcattaatggacttaggcacttagctaacttatgcaacaaattattcggggacaatattaacgtgtatagctgtatgtcatcgaatggaacagtcaacaaaacgaaattgaagactattcctttacttcttttttttacttttttttttccacgactattcctttacttcttgttgtttcttgttgtgggctattgttagtaatttcattacactctttttttttttgtttgttgctatttagtagtaataaaaatgtttatttattcaaactcacgtgcatagaaattgtatgtggatgcagttgtggc

SEQ ID NO: 39709 - DNA, 282 bp, Arabidopsis lyrata
  Intron number 1 from transcript 943312 (locus 943312) deri ved from phytozome v7.0 (chr-ID scaffold_6; pos 22905823 t o 22906104)
tcaatacattgccacaaacatccccaaaacagttggttcgttcgtctctttcttcttcggttttcctttagtgatcaaagtttgcatttttatcccctttgattgtaaccgattcgaaaagtcaaaaaatttaacagttttttctgctcagttatgtttgtttttgaaatgggcattcactaaattgttttaatcctcatcattgtgcttgagtatttgctctgctttgttaaagttttgacttttcaaatgtaattgtgtttgcagatcatatactgttac

SEQ ID NO: 39710 - DNA, 430 bp, Arabidopsis lyrata
  Intron number 1 from transcript 484493 (locus 484493) deri ved from phytozome v7.0 (chr-ID scaffold_5; pos 3404093 to 3404522)
ttttgaggaaacgaagaagaaaaggtctgtctcttctctctctctctctctctctctctctctctctctctctctctctctctcgagtttctatgtttatcttcctctataatccctaaatctagtgtcgattgcttagattcttctccacaatctctggatttttgaatctaccgagtttttggtttctctcagtcgaggagtcgtgttttgaaatttccgatgatgaatttgggtttttctttgaaatttgatggaagtttgtgtgttcagtcgttgattagggtttgagattcaagaactttcgaaattcttttgaattagcttcgatttggttgtttttacctgtgaattgatcgaaagacgaggatattgtatcaatcgatcaattgtagtttaatcttcttccttttgggttttgtttttgttt

SEQ ID NO: 39711 - DNA, 753 bp, Arabidopsis lyrata
  Intron number 3 from transcript 935990 (locus 935990) deri ved from phytozome v7.0 (chr-ID scaffold_5; pos 892808 to 893560)
tttggtgcacgtttcggatttggtaagaacgagaggtaatgttccttcttaacctcgggtctttttgagtgttgcgtctcatatatgaaaatattgtgggatcttattgtttatagcatcctcttgttttgtctatgtgcctgatgtcaacaatctctgtttggattttttaactcacgggatcttattcaaagggtcggtttctattaaactctttttgtaagtggttcccagtttctatcatttgcttcatgagacagaattgaagtgactagagcacacctaacttgatcaatgttattgagatgtatatatataagatataggtcaatagatgtgatgtgtgccctgattctgattagtatttcttgtgttagtctagtccaggatcactgtaattagcctaggtagtttgtactggattgtaccgttgttgcagcaatgatcattgaatccattagctgatactggtagctgacaggttaaacagtttgagcagagttagttggtgattctgaatttgtatattgataggaagtttgcgcagaatgagactctggatttttcttgggttttggtcgcgaatcaaagtgttttatgtgtatttctttggtggactgaataaatgaactttactggtttggatctcaacaaattcttttctggaattaagtttgttaaaacaatttagctattacttgcctttaagcttgtgcgatggaccgattctttttcaggaagagactgttccag

SEQ ID NO: 39712 - DNA, 504 bp, Arabidopsis lyrata
  Intron number 1 from transcript 481564 (locus 481564) deri ved from phytozome v7.0 (chr-ID scaffold_4; pos 10379038 t o 10379541 reverse strand)
ggttccttatgtaagtatttttcctacagtggctccatcttcaagcttttatgcatggtttctctgatgttatactgtgctggttggtcttcttgtcaaattggtatagttggtgctttgatttttttttgcgacagaaggttttgatctttagatagtttagccagagtctggtattaggcattaagctgatgttagtatctttcaatgtttaatgtgctcttaaatttttgtaatcatgaactgggcaggggagttttttttctccagtaagtaattatagttcacatgagtagtcttattcttattttctatgggattgatttctttttttttttttaaatttttgttattgcaagaaccaagaatcatttgaaagttgcgactggtagtagaaattaagtgaggtgcttttactaattgtttcaattagattttgttgtgaagtgatttttttttttgttcgcagaaattgaaggtcacctttgtcggtctggagctcgt

SEQ ID NO: 39713 - DNA, 420 bp, Arabidopsis lyrata
  Intron number 1 from transcript 909166 (locus 909166) deri ved from phytozome v7.0 (chr-ID scaffold_2; pos 16692128 t o 16692547 reverse strand)
tcaaaatcaccaagcttctcagtttgctgcaacaggttagtcactctaatcttccaaacaattacgaaaaatagtctaaattttgtatcaaaattgaaaagagtggtctatattttcttttaattaacaaaatagtctaattttaaaccataaattccaaaccttaaagcctatataacaactatctaaaaactaaacattaagtccaaatttttaaaccctaacccattaaacctaaacttttgatcacaaaatggtacatttctttgatactttagttatgaatttcaaggttttctcctaattatgcaataatttactcctttggtttttgtttcaacattattttggttaaatccggtttacttccccggtttatggacaggtagaagaaagatttgacctgtactgcaatcaatt

SEQ ID NO: 39714 - DNA, 419 bp, Arabidopsis lyrata
  Intron number 1 from transcript 496069 (locus 496069) deri ved from phytozome v7.0 (chr-ID scaffold_8; pos 19119968 t o 19120386)
tcgagatctgtcaacgggtcagtttcttctcgtttcttacctatcagaatttaacatgaaagttcttgtttttgtgtgtatttaacactaaagatgaaaactttgcgtcgtgaatcgctgtgattgtgtgacactctgtattcttaatccaaaaatatttcatgatatgttgtgttatcgagtctatgtgtgatggctaaacttatttctctgttttgattcttcaggtgtttcattttgttgaattttatattagaaacatggataattctattattatttcttcacaagtcaataaacagatcaaagtttgtcattttttttctagtttgaatcttctaagtgaaaattgtgtgttgtggtactgaagatcctattgattgagtgttcgatgcattttcgcttcaggttgcaaggaa

SEQ ID NO: 39715 - DNA, 861 bp, Arabidopsis lyrata
  Intron number 2 from transcript 481149 (locus 481149) deri ved from phytozome v7.0 (chr-ID scaffold_4; pos 1322396 to 1323256)
ggtatgtgttttgatctcttttatctagttttcttgtttgatattgagactaggatttggcatttaggttaatcggttcggaatttttggaattttggtgtttatgttatgcaaaattctcaccgaattagatggaatgaaagttcggttcggtttggttcagttcgtaagggacaaattttggtaggtaaaaaattgatgccgaattagaatcgaaaaccaaattcggttcgactttttcatcagaaataactttggctaaatttggtatatctgggttcattttggtaaaatttaggatacagttacagtaattacggttaaatttaggatcaaagttcggtatttttggtttcgtagttccgaaaccaaatggaaccagttaccgaatttcatcattcctcttgccaataggttttcaaccaaattagctaaattttggttcggcttggttggcttattcggttctgaactggtacattttggatttgcctggttattgtttttgatgatttcggttcgatttaccgtaagaagaaacagaacaatgatgtttggttaaatttggtatattaatagttactcctctcatggttctacatagcttgtttggtgctttcggtttaatttgggtaaaatttcggttattcgggttcagtttatgatagtatattagtaattttacttaaatttagaataaaattttggtaatatcggttaggtggttccgaaccaaaccggttgagctggctaattcggtttggaactggtacatagtggatatgtatttgatatcttgctttcagataaaagttcttgtttgatgttgatactgtatttgcagatttgctaaagtttcag

SEQ ID NO: 39716 - DNA, 516 bp, Arabidopsis lyrata
  Intron number 1 from transcript 912096 (locus 912096) deri ved from phytozome v7.0 (chr-ID scaffold_1; pos 9842638 to 9843153 reverse strand)
tttttttgtaagtaataggatgaatccaaacatcatagttttataatttggtatggcattacacaaaattttgtaaatactatatgccaaatttatacttggtataatataatcattaacaaagtctataaacttccttaatgtttaggcctataaaacacaattgcataaagaattataaaagaagaagaaaaaaaattgttgaatggttgttctccaagcataatctttctccgttgtcaaatctttattgatcttgaagatttggtcttgaagaatacacgtttatcattttcagttttatgtgatcatttcgtaaaatatatttatctatatgttaaaacataattttgtaaactaaaaattgtttgaatttttaattcttttgattattccactcggccgattagtatataggtattgattgatatttctttatcatattaaaaataaaaaaacttaagacagttaatatgttgtatgatcttatcgaattgaatatttttcagggaaacc

SEQ ID NO: 39717 - DNA, 974 bp, Arabidopsis lyrata
  Intron number 1 from transcript 473486 (locus 473486) deri ved from phytozome v7.0 (chr-ID scaffold_1; pos 15273798 t o 15274771)
gtatcttggtgagtttactatagcgattagatcagttcttccacaaacacttcactgaaaactcgtctcaaaaaaaaaaaaattatgttccaaataacggttaaagtacttatgtttagatgttctgattagtttgaatgatctaaatggtagtactatttagatagacttcttgtcagaacttcttttggttgttttctaattctctctatatatattaactgttttggaaggcattgttggtcgtacacttcgttgagtgttcgtttattgtttagtgtagttaccttctttttttttttcacataaataagtctcaagactctcaacgaatattaaacgccattagttttgattattacatcaattggttttttccttttttattaatacaattgtttttaatcgttcgaaatgcagcaaaaacatttcattgttaagtagaattcagtgggtaaactagaataaatttagaaaagttggagaatatgagaaacacctttaacaaaaaagttggtgaatatattgattctgtaaaaaatttgaaaaacattgtaagatatgacccaaaatcagggccggcccctattttattacctaaaataattaaaattaatataaaataatataataatagaaaatattaaatatataattatattaaagggctcctatttttgttttgtatttggccccattttctcaggaccggccctgcccaaaataaaggaattgaatggtcatacgattaatttctattaagatgatatatatatatatatatatatatatatatatatatatattcaagtctaaattaaagtttaatatcgtagtacgttgtgtatataagttaaagcttataaccgtttatcaaacctactttcttgttttatatttttgatatctaactatgaaatggttttttatcgtgtaataatgaaccgtcaatgacatgatatatgcagttaggc

SEQ ID NO: 39718 - DNA, 460 bp, Arabidopsis lyrata
  Intron number 3 from transcript 481492 (locus 481492) deri ved from phytozome v7.0 (chr-ID scaffold_4; pos 6329884 to 6330343 reverse strand)
aaactttaggagaggaatattgtgacattatacaggtttttattgctttactctatcttcttttgagtgtgcttacaccaaaccattttaccttctgaggctatttttatagatgttttagttgtttttgatcctgaggagaacgtcgtttaagtccgctaatagacgaagattttcatatcaatagatagatggtgttgttttttttcttgtatctacaatgttcccttggaagttcttggtggaacaactggtctaatagccgcatttttccttatgcgactatgttctcgatgttctagttgttttttatccctaggtgaagaagccatttatatccgatattagataaagatgttttaatcgatacataacaaatgctcccgttgaagttctcagtggaaagattgttttttttttgttctgatgaagaacgatctaatataggttgcaggaccgt

SEQ ID NO: 39719 - DNA, 530 bp, Arabidopsis lyrata
  Intron number 1 from transcript 901152 (locus 901152) deri ved from phytozome v7.0 (chr-ID scaffold_4; pos 15805683 t o 15806212 reverse strand)
aaatctctggctttgcccaaatttcaggtattattactccattatttggtttaatctctctttcttcgaaaatgaaatgttggttgttgaaccggaattcgagtttctgtgtgaactggtggatttcaagaaccgggttaagcatcaggtttctccatgtgaaaagattggatttttctttacttccaaattttagttaaaccagacagaaccggtaaagttggcggttttggttgaaaggggggatttcaattgtaggattatcaagtgaaccggttttcaatagtaaaaagattggatttttttggttttaagttagaccaaaccaggattaaatagccattgaagagatcggttttgattcaacctgagaaactctttggttgaattttaatgaaccggtttccctcaaaccaagctaggattcgactaaaccagagaaactcttttattatcgaattaatttcgctaaaccataaaaccgaaccgaggttgactgattttaattccggtttaaatattctttagga

SEQ ID NO: 39720 - DNA, 512 bp, Arabidopsis lyrata
  Intron number 2 from transcript 488205 (locus 488205) deri ved from phytozome v7.0 (chr-ID scaffold_6; pos 5582802 to 5583313)
atattgtgatccaggaatcgttgttggctaattaggtgagtttttttttcatcagaattcatgatgatctcaattctgttttctgattctaacctcgatctgacaaaatctgatgtcggataaatatttgccggcttgtcagaagttgacaatcgagatctgatcagtaaggtcatgtttctcgtttgtttctacgtaaattgtgaacatttgcgtttctcgtttctttgatctcagtttttgcgtgacacgttgcttgtttcgctgcatttttgcatgtttaaaaaaaaaaaaaaaactttgatcaaagggtttggggtttcattaatgatctgaatcttttagggtttagttttgtcttcctgattttgcatttgacatgggatctgtagatcactagtttcacaatttgttcaaattatactgatttcatcctgagcttaattttgctggaggtgatcatcatgagattaaaagttttgtggtgaataaattttgcaggtagttctgtt

SEQ ID NO: 39721 - DNA, 484 bp, Arabidopsis lyrata
  Intron number 5 from transcript 494964 (locus 494964) deri ved from phytozome v7.0 (chr-ID scaffold_8; pos 12444692 t o 12445175)
taaaaaggattctgttaaacaaggtaaggaatgttattacgttttcttgttggtttttagatgcacttgaccttatgtaagtatgttaaacaaggtgatgtgtttgctcattttcttgatgagtttacttaagaaaggtttattttgcatagatgttttttggtttggttgctcttatctttcatagagaatcaaatttcgctttttgaaactaaggtacaagttgagaccaagttttatcttgatttcaataaaaacctaaacctccttttttcgcaacactccttaaaagaagttttcgtaagtggaatgaagatagcgaatcaatgtgctagttccccatcctagttgtatcgttcatcataatcccttttcattaatcataacatatactcatgactcttgttcgtactcattctttgatggcttcctcgttcttttgtttctaggatcatcctttttgaacggaactgttgtttcagct

SEQ ID NO: 39722 - DNA, 673 bp, Arabidopsis lyrata
  Intron number 2 from transcript 484340 (locus 484340) deri ved from phytozome v7.0 (chr-ID scaffold_5; pos 2441550 to 2442222)
gaattggggcaagaagactgaaaactccagaccaagtaagtttatagatccctttgtcttttagtacactatgactaagtcaacgcctgttaatcagatatttttcgtagattttagactaatcaagatcaaattttcatgttaaagactaatcttttttattagctcaaaaaaaaaaaaaaattgtgatcttagatctttaaatcataaaattgatttatctaaagataatctcagatctttaaaaacaaagtttctaattcaaaaattgtcatttatcttcttttgaaaattcatatatagttttcatttttatgaaatatttacattcttagcaaaaaaaaaaaaaaaaaaaaattcatatattcaagaaacagaggtcaaatttctttgtaaaaagagctcccaaaaaaaacaacttaaaattgacattaattcttctgaaaatacataaatttaagaaaccaagatcaaatttctctgtaaaaagagctcaaaaaaaaaaaaaccaactcaaaagttgacattaattcttataaaaatacataaatataggaaaccaagatcaaatttcttgtaaaaactgacgtataagttaaaaattgtataccaaattcataaattcgagttttattcaggtaagatccaagaactaaacgtgtacgagctaaac

SEQ ID NO: 39723 - DNA, 410 bp, Arabidopsis lyrata
  Intron number 4 from transcript 483249 (locus 483249) deri ved from phytozome v7.0 (chr-ID scaffold_4; pos 20399484 t o 20399893 reverse strand)
gtctctgcaccgaagtgaggtatgtgttgttctttgtttgatctgataagaaggcaatttcatccctggtttcttgtcgccttcaaactttttctctccgtttaatcagtgaattggttagcatttcttaaataatggcaatatctccttgggttagttgttacaaatatgctacaactttgatgatagtagtacctgaacaagactggtatcttttgtatgttggaatatgatagaaaaagggagatattttggcttcacatgcccagtgtgtctgcattttatcttcacgagtaaccaatatagtcttataactgtgctgtttctttttttttttgtatgttaaactgataaagcctcatcatgtttgcttaggaattgttcgaatccaaaaataaaaggagcagtgg

SEQ ID NO: 39724 - DNA, 437 bp, Arabidopsis lyrata
  Intron number 1 from transcript 336188 (locus 336188) deri ved from phytozome v7.0 (chr-ID scaffold_1; pos 13905424 t o 13905860 reverse strand)
tcagcgttgctccattagaatctgagatcaaagaggttagttttctatgtttaattcgtatctcaatctattaatcactgaacaattatcgttttcttgtttgtttatggttaattactgaagattataaccttgaatcaaaaacagtattgatgatttttgtaattagctttgtttttttttattcatcatagatttgtttagaggcatttattttccggatctcgtttgtttacttgatttagcaaaatacctaatcatagatcatatgagatctcttcgtctttttttttttgatttgttaatgttgaattattgattagttttgttgtttttgcttgatcttgtaacgctgatcatagtttctagctctgttcatcgatatttttgttcttcttctctaaaaataaatttatttgtgttttttaatacaggat

SEQ ID NO: 39725 - DNA, 439 bp, Arabidopsis lyrata
  Intron number 1 from transcript 945926 (locus 945926) deri ved from phytozome v7.0 (chr-ID scaffold_7; pos 8792485 to 8792923 reverse strand)
ctctattgttagttgtgttactgatccatctggtaaagtattgacctttgtgacttttcttcttctctgcttttttttacctcattgttttgattgatcatctctttggtttaacaatttgcgattaaaggttttttttttaaagttgattactttagattcagaagataaaacccttttgcattaatgttgatttgatgattttgacaccgtctgtttccctgagaaaccgccggaaaataatgccggtagaaaaaaaacatatttcttctttacttactttttagctcaaaaaggaaagttgtaaactttatgaaagattttttttctttctttgatagatcttttgatgggtttttgtttctgacttctgagctgttttcttcttactggtcttattgcagttcaagcccttcaagttttgtatacttcactaaat

SEQ ID NO: 39726 - DNA, 486 bp, Arabidopsis lyrata
  Intron number 1 from transcript 328285 (locus 328285) deri ved from phytozome v7.0 (chr-ID scaffold_7; pos 2736523 to 2737008)
ttatcactccttctatcctctctgaccgtttgagggtaaaccactttctttgatttctgaaagttgcaaacttttctctcatagaatatgcattggtgacatattagcttagaatgtgtgttagtacttcttgataggtaacatcgaaaggtctttacttgatagctttggattaagacatatttgcttcttttcgattatcgagtgattgtgtcgcgtatgattcgaatagtttgtaatgaagattgtggtgaaaagagtgtttttaatgatgcttgagtagtgtaagtaaattcccctgatcaattttagcatttcatgtgcaaagatattttattttattgataccttgatgtcttgtttctatgagaaagaactctttagtctttggtggtgccttaacgttttttgatgtaaaactctgaatacacatggcttctagatttctactcgttttgacatgagcttgtgtgttggtacagatca

SEQ ID NO: 39727 - DNA, 675 bp, Arabidopsis lyrata
  Intron number 2 from transcript 488686 (locus 488686) deri ved from phytozome v7.0 (chr-ID scaffold_6; pos 7545519 to 7546193 reverse strand)
ttctttttaagggttaatcctaaatcgttcatctggtaaaatgtttttgacatctcgttttttgattctgtggtggttgttatgttttgatgtttcatatctttttctaatgattatctggaaagatcttgtttttttgatgatgatcgaacatatttttttttgtctcaaactgtcgcttggttacactgattctgttgaatctgtattgttggtttttaattgatatattttgagtagtgaatcgtttttcttcatagattcttttgatgtattggtcatcatcatcatcgaagagccttcaatggcgtttcctcgacagtaacgatgattttgatattcttgaaccaaagttggtgtgaatttggttgcagatgcttgtgattttgattgtttatctgtttgattggaaagtgcttctgtataaggatgactattaagtgattttgatggaaagacaatgctctaagtgcaagccgatgtttcttgtattctgtttgattgtatttttacttgctatcacaatggattggtgtcttctcttttggattgtgaaggaaatgccaatgaaattggtcccgttcacctttttatcaactaactaaatacttactctgtgctacctctctttatactgcaggttagttaaagaggtttaccgaaagcaaaatactt

SEQ ID NO: 39728 - DNA, 1024 bp, Arabidopsis lyrata
  Intron number 1 from transcript 329850 (locus 329850) deri ved from phytozome v7.0 (chr-ID scaffold_7; pos 11973235 t o 11974258 reverse strand)
tctctcgacgttccgatcaactggattcacgctttgtaagtgtggtctcctcatcttctttttcttttctttttcatcgccaaaacggtaccgtttaattgttagaaaaatctctagtctttttttttttcttctttgaatcaaggaaaaaacattattttctaaaatagttttctaacctcatttggattatacaaatttttcataatatatttttaaaaaatttagaggaaaaatagatgagaacatggaagagcagtaatgcgggaaagagcatgaaaataatatttaaaattttcaaaaagtgattatttggctctaatatatatattattattaaaattgaaaatgtccagaacaagacagtcttaattagtcgcagacgtgttttccacgacctgttttggattgcttgtctttttttcttctattgttgattaaaatttctcagccataaataaaaatcataataggatttttctttcaaacatagaagcttacttttaaaatgatttatttctttgtttgtcggaattacttcatattcatatcaccttttcattttcattttcattttcatattcaaacttacatgagttaggtggaaatttgatgtttctcttttctttagtggaaggtgagtatttaagagattagatgtgtaaatgtatatattagtgggattgcttgttgattttattttaaactttaaagagataagaaaatataacattgttaaaaagagtaaattggctgtcagataccttattatagtaactaaaagtctcagaccttttaaaactttttttttgttgatttcccttttttggaactgaaaaaaatatagaatattcaggaactataaatcaaagttatgcataatgttttttttttcttgctgcagttgtttagaagaaactatttattaatataatctttatttttatttggtaaatttgattaatataattcactaattgggtatctagggaagaagaggacggagctaaagtagtgagagtag

SEQ ID NO: 39729 - DNA, 413 bp, Arabidopsis lyrata
  Intron number 1 from transcript 923356 (locus 923356) deri ved from phytozome v7.0 (chr-ID scaffold_1; pos 25641009 t o 25641421)
aataatgtaaggtcattaagtatttcaatgtcatcctatatatgaattaatcactatcgaataagtaaccaattaaaacatgattaatgagacggaggagctaaacgggtttggagaattgtacgtacaaaagtatccgaagttgaaaataagtagtccacttgaagcaatggtttgtggcccccaaattttatgttgcaaaatgaggcccccaaaaatattttatgttgtaaagagaagccccattttcttgaaattttaagatttgatatcagtttttaaaatttatctataaaagccaacaagttttttcttttttgatggggccccatattgttcagggccggccctggctagggaaagaactaagaagagcagctgaaggcgaaagaaggaaccattttcattccctt

SEQ ID NO: 39730 - DNA, 495 bp, Arabidopsis lyrata
  Intron number 2 from transcript 904610 (locus 904610) deri ved from phytozome v7.0 (chr-ID scaffold_3; pos 7028591 to 7029085 reverse strand)
tacactggtgtaaaaaccataacaatcaaggttttatgacacaaaatatccttcttatccccctctcttttggtcgtcagtgatttgccggaatattaagaatttctatagaagctgataagctatctttccttttctttttcagcttgatctccgagttaaaaccataccctcatcaaggatcagttcttgtgggtgagaattcttggtgatctttgaacaatttcaaccaggatttgtatactatattagtctgaaagcagcttgattgctgatttgcaggacctaaactattttgagagtggtcctcaggaatttgcaagaacttttaggtgttgaagatcctgatgttggagtaaaataaccactcatttttttcacatttcattatgtaaacaagtgaacctcaatttcatacctttgcttcaagtcgttttttggtttctttttctctctgaagcctgctgctgcctttgcgataagggaacaacttta

SEQ ID NO: 39731 - DNA, 766 bp, Arabidopsis lyrata
  Intron number 1 from transcript 920317 (locus 920317) deri ved from phytozome v7.0 (chr-ID scaffold_1; pos 6006536 to 6007301 reverse strand)
ctcttcaggctattatctccgttattctcttcaaggtttcagtccctctctctatctctctcccttcattgtggcagatctgtgaatttataggattttggttgtggattatgctaatgttgtcctccttgtgcctcttgttaatctactgttttggttagtgaacatagatcgatgacaatgagttaggggttttctgattttaaatcaccttctgttgtcttgaagctgttgaatcaacaaggttacagatttaggatgcaataagaataataatttagattctggagattgtctgatgaattaaaacttggatctcctgtttcttgctgttttatatagagaatttgttaaactcttatgttccaaggagatagatatttagaatgtttcacttgagattctcaaacataaggcgtttactttacaaaagcttatacgtctagcgttgtgatttccttgtctaacagctgaatagtgcttagaggaatgcaacctttatccttcatcattcacatgtgcaagtttttttttctcttgcattggagacctttagccttggactttctcactatccttgtgtttcagagtcatgagcttatgatgtttctctgtattggaagaaatttattgaggtttatagttctcatgttgtgttacactctggatttgtttttggttgagcttcatatattagcatcatggagcattcgtttcttgtttacctgaaattttgttttttgttttctttagataacaggaagtg

SEQ ID NO: 39732 - DNA, 422 bp, Arabidopsis lyrata
  Intron number 2 from transcript 491144 (locus 491144) deri ved from phytozome v7.0 (chr-ID scaffold_7; pos 2505484 to 2505905)
gatccttacaaggtaaacccttctttgctttctctctaaccttttcgtcttttgtttttctccgtcgaaactggattgaaacgttgttatttagccatggaattgcacctaaagtttcggattttcaaactgttccattagtggcgatactgacattgatgtaaagttttgaccttttttaaaataatatgcaaattatgattctttttccattgctctatattgatttctcgaagatcgtcttctttttttactcacggattttgctggaggtttatgtcgtcgatttgacttacgatgaatcattgagtttctctgatgatggttttgatttcatctccaattgaatgggattgtttttaatcatgtgtattggtgatgatgcagtatcgtccagctagttcttacaactctccattctt

SEQ ID NO: 39733 - DNA, 632 bp, Arabidopsis lyrata
  Intron number 1 from transcript 494988 (locus 494988) deri ved from phytozome v7.0 (chr-ID scaffold_8; pos 12914689 t o 12915320 reverse strand)
gttggctctgtcctgagcctactcttcaaagtaatcactccaatcaattctctcttttttttcgttttcttgttttcttatagttattgttttaaaacatttgataaggtaattgttaatgttcaaaatttgaatagaagtgagacactctctttgattggtttactgattttaactgatttaaaaattcatgttttgaagatttttactagttttaaaatcaacaatgaatttttaaaatggtgtaaagaaaagttgattttttttttgctaaataagataagttgatttttaagatacaaaaatgatcttgaatgtaaattttgtagatatttttcctaattctaatatttcttatatatatacaattccttttaatttagaaaaaaatacacatgtaaattttctttctttttacgagtttttaatggatttgattaaaaccaaaatatcgtgatatgtttggtcatatatatagacgactgatttataaaattcactggtaatatttaccaattcattaatcaaattatcataaaacagtgcagtaaattttgaagtgaaaatattaatgtttctgactctagctaattttatgtccattaggcaaaagagagctaacgacctgctgc

SEQ ID NO: 39734 - DNA, 415 bp, Arabidopsis lyrata
  Intron number 1 from transcript 321055 (locus 321055) deri ved from phytozome v7.0 (chr-ID scaffold_4; pos 15757054 t o 15757468)
cctggtacggattcatctgcttgatttttgtttgtttgtgatgaggaagtgttagatttgcgtttttcttctgttaatctatcgtaaaagaaattgagaatttcgtagaattaacagttgagaaaagattgcaatttcatggctgaaagagaaaatgaacatttttgtgtaaagtgaagactttttggtttaatggaggtttgacttttggtttactaaatcggatgcttattttgtcttagatccccacatcacgatttgagatctttcattgactttttgctgttgaacataagttaagagttctataagatgatttagcagttgaaaatctacaagtagtacggtggttcatttatgttggtttaattctcttctgatatgtgatcatttatgttgcaggtgctgctcaact

SEQ ID NO: 39735 - DNA, 848 bp, Arabidopsis lyrata
  Intron number 2 from transcript 903335 (locus 903335) deri ved from phytozome v7.0 (chr-ID scaffold_3; pos 1805297 to 1806144 reverse strand)
attggttatcaggtcggccaccaactctccgagaggtttgttgttgttagtttacacttgatcatcgtcttctttcgatctggttcatacttcgtgagacttttctcggtaggtgtttcggatgttagtattagttgtagatctgaagatgatggcgaatttatattgttagcaatgattctctgatattggatttatcgtttctcgtgtgtaattggctgagaatgtgtgcgaatgtgatagataggaagataaatcgcgctgatttgagtttttctcattcgtcggggttttggtgttgaggaactgtgaaaatttggggattttgagatcaatttggtactgaaatgaagatatttgcgatttctgttgttctgtgacctagtaattgttagaaatcaagaaacttggaacttcgactgttcttgttagtttcttggatatgaggttttttattaatcaatggctggctctgaggattgccattactcaagaattttaaatctgaggtcaactgtcatgaattcggattgcatgttttactgaattagaaaattggaatggtggactcggttctagtagctaatatttctttttagttgtgcaatgttttggtgaggaaattcccttgttgccagacatatatgtcagaagattttgattctcttagtccctgtttacctataatatgtgtaagaagaatgattttagtctgttgaagcatgttttgttgcttctaaaggtgtttgcctacataaaaactgttttacagtgttgtatcatggcagatattgagcatcttacttgactatgcataacgcctgcctttttatgtccctaggtacact

SEQ ID NO: 39736 - DNA, 379 bp, Arabidopsis lyrata
  Intron number 1 from transcript 937866 (locus 937866) deri ved from phytozome v7.0 (chr-ID scaffold_5; pos 15038604 t o 15038982)
ggacacaggtaagattacacaaagatgaatctagcttgtctcggcttgaaagcattttgtgacattaagtccttactcacggatgaagatttgattctctagagtgtcaacttcttcttatggtaattcatttacagcattttttctaatcatagtttcaatcttagaaagaaaacaaattatataattcaaatacataaagctgaccaatatcattgtgttggtcaagcttataaaatatacagctttgagttttatttctttcagacagtagtcaacaattcattatggtattacaaagtttttcattagtttccttctcgtgacaaaaaattttttggcagttgtgaccgtgatttcttcgagcattgttcaacct

SEQ ID NO: 39737 - DNA, 822 bp, Arabidopsis lyrata
  Intron number 1 from transcript 924840 (locus 924840) deri ved from phytozome v7.0 (chr-ID scaffold_2; pos 2230029 to 2230850)
ctcttgcgcgtttgattcatacgttgggaaaaaattatacttatgttgtcgactagggatatatcatttaatcaggaagggcatcaccagctacagtagttgcattctcaccaccctctccctgtcaacatacatgggattgagcagccccctatctcagagggtttaccccatggccagtttgcgatgaaagaaacttcagaatgcagcccacatagacgtcgtacaacttattattaaggataattatgtttaatttgagagattgagctaagcaattgatatttgataataaataaataaaatttatattgagcttttaatagaaaaaactctgtttatttttttttgtctctaattacgtaaatttgaaaagaaaataaatataaaaatggggaaaaatatcttattataaaatttaatataaaataggcatgcatataattttatattattttaagtttggaacctcgtcctatttatacattatcaagatcataatcattaaagttaaattcggacagcttggcccaaagttgaccaagagaggaaaaaaatagagtatagttttcaaaagaacgagaatatgagaaccaaataatgcctactaaaaggatatatataagaagaattaattcaaataatagctgaatctttgttgatgaccacaacaaggttactcaaaagaagatgttctctctccctaatcatcaatcaaaattcatctactttctctctctctttttctcatcaaaaccctaaatgcacaaccaacgtatctccttagctattgctacacatcaggaaactacacggcaaaca

SEQ ID NO: 39738 - DNA, 686 bp, Arabidopsis lyrata
  Intron number 1 from transcript 487805 (locus 487805) deri ved from phytozome v7.0 (chr-ID scaffold_6; pos 3876995 to 3877680 reverse strand)
cttcactgacttcgaaacttaagccaattcatctcgtgagttttcttctactgctttcttctttcaagttcatctcttgattggtctcgattagggtttgaaacttttgggggaaaattagaaaccctaatcgcctgagttagtatcttcaaaagggcacacacacagagagacatgtttgtgtttctcctaggagaagatggatttgaaaaaaaatgccaaatttgagatttttgacctgctcacttggatcaaaatcataaactttaatatttagatcataagaggtatactatattattgtaatctaagcatctagagaaattatatatctctaggcatatgtgttgtctttcagctctgaaactggagataaaagttttttgtttgcatagttgggtgtaatttgatagtgtgatatgagctcaggatctgatgatgttagtgttcatgatgtattagcaacttagtagtgagtgttcttatggggagattttacttgtgtcaatttcaatctatttcccttttcacttgattcatgtgttccaattgtttcattttttttagctttgattttctatcaaaaaatgttcaagggtttgatcttcttttggactgtcttattgacgttgttcgttttttgtgtaccaggaagtcattgacatatctggagggtaagtacagga

SEQ ID NO: 39739 - DNA, 311 bp, Arabidopsis lyrata
  Intron number 1 from transcript 944024 (locus 944024) deri ved from phytozome v7.0 (chr-ID scaffold_7; pos 931320 to 931630)
tttcagacacccatcgttgcctccgaggagccttggtatgctcatcttcttcttttttagctatacatattattttcgttactataaattctaatagtgtttgtttttttaaacgattgtatgttttggatgaatgaaagcaaccacgatgcatgaagaagattcaggtgatgtttcaattgatcttttatatttaatttatcgattttctaattttacaaaaatgttctcaccgagtagaatatacttttgagttttgagttaaatctttcacagtctgttgtggattagcaacggttcaagccatatta

SEQ ID NO: 39740 - DNA, 427 bp, Arabidopsis lyrata
  Intron number 3 from transcript 497207 (locus 497207) deri ved from phytozome v7.0 (chr-ID scaffold_48; pos 44551 to 44977 reverse strand)
caggctcactgagtcagaacgagaacgaatagccggtgagtgttcttcgaggcctatatagtctttaatgatacactcaaatgatttgttcttcaactactctttcgttttcgtaaaaaaaaaaaaaaaagtttacacttagtgtgtatttttctaaataatccataacctttatcatctcaagccaaatttttatgttagtttcaaatgtcatacataaacggaaccaagtgtatcatagttgcaaaactattttatgaaaatgtgaaaatcatttttttttttttttaaaatttaaatgatgtagattcgttttgatttttctctttacatgtaaacgtgaacaaaacaattgactcattcaagcctaaaacccttcctgctattgttagatattgagggagttgtgtctgtgtttccgaacaag

SEQ ID NO: 39741 - DNA, 574 bp, Arabidopsis lyrata
  Intron number 2 from transcript 487666 (locus 487666) deri ved from phytozome v7.0 (chr-ID scaffold_6; pos 3273906 to 3274479)
gcattttccctcgtatcagccgtcaatttcaagtgggtatgtcttagatcttcatggctattcacggcttctgttcaattcttcgtttctcagtttttgacagttgatttccagaaacctaggaagaaaagcataattgaagaaattagtggttagaattttctgattccgtgaaatttgagtattaggaagtatagaaagaatataaaaaaaaaaccttactattcatcagttatacatatctatttgaatagttatacatatctatttataaacctttgagtaagatcttcaattctcatgtgaaaactgtgttttgaaagcatgccatggatcaattgttggattaaaaagattgttgtttaatgttagaagaacagtaatgttagatttggtacattgattgagattagtgttcctgagatttgggtttaaaaaatctttggtaaagtgagttggattggattttacttgaatgcttgttgtttccaatctttggctaatgatgttctttgaccttctcgggtctgttactcgcatgtttttcaggtctgagtaatcttgtgaagaatcg

SEQ ID NO: 39742 - DNA, 577 bp, Arabidopsis lyrata
  Intron number 7 from transcript 491041 (locus 491041) deri ved from phytozome v7.0 (chr-ID scaffold_7; pos 2081723 to 2082299)
tggtgtcccaattgtcctcgttggaaccaaacttggtaactagttcctctcacttttgcttttgctttcatgcatttacttacatatacgtctgattcccattgcctactaataatatagagagaatctgcacctacactacacagccattttctttttcactttattaagctgctctgatgtatatatatatatcatgacattagtggacataacttcacattttcttgcttgtggttcaaatttgtacatgttcaacatgtattcattaggtgaaactgacgctagttttcagagaatttcattggtcaacaggtttcttcttctatcttgcacttcttgtgataagcaaaccttcttctgatgactttttaaaacttttagtgacctggatcacacgcctttaagcatcctccaatgaaattactaatgtataacaagtgtatacttttattaaaggcattttgcaacatcttcagtgaaatgtttggttgtcactcaccatcgtttgctgcatctgaatctatgatcctggcttttttgattttctaacattggttcatgtcagatcttcggg

SEQ ID NO: 39743 - DNA, 798 bp, Arabidopsis lyrata
  Intron number 1 from transcript 481448 (locus 481448) deri ved from phytozome v7.0 (chr-ID scaffold_4; pos 5380103 to 5380900 reverse strand)
tcagctagctcacgtcccgattcctcctgaaccaggtcccttcttctccttcgatttctttctctatccctcaattttctttgtgtttgtttcaccatgcttcgctactagtaattatcttccttcaattccattgcgatcgcttagcttcgctgtttcgaatttttaccgtaatcgatctgctaaaatccctcagattctcccaaataattttgtagtttttcgcttttgatcaattaattgaaaattaactgattcaatgttaacgttacttcgtttctgatcgaaatgtgggtttagtcatctgttttcgctcaattcttgtggtggtataggtgcaaagttaaggagtttcttcgttattacttcgttattgctctatgcatacgagtgattctttcgttgagtttatgatttgatctttaatgtcttgtggaaatttggaattgcgaaattaagcggaataatgataaatgtatttgttggattagatcattatagtatctatgtttgcaattatacatgctagttagttcaacatcttttgatctaaaatgtgcttaagcgatttttcgtttgattcctgttttgatctaatgtcttatggactaaggaatagcatgattaagtataatgatgaatgtatgagagttggattagatcattgtagtatttttgttcagcaatttgtttgtatttggtgtatgcaagtagtggatattgtcataaatctcgtgtctcatgtctaagtttcactctgtagggggaaggtcactgacacaagaagctaacgagcca

SEQ ID NO: 39744 - DNA, 966 bp, Arabidopsis lyrata
  Intron number 1 from transcript 890983 (locus 890983) deri ved from phytozome v7.0 (chr-ID scaffold_7; pos 14596673 t o 14597638)
ccaccgctcgtatcagagtatcactttccttcttcactttctaagagttttttcccctgcaatttccaattcaatgaagattttgctttgtaagttattaatctcaaatttttgttgtgtatcgatgcttgatcctctaatttggcatcaaacagaagatttatcgagaaatgaatgatacagattgttagtcttgaatcgtttgtgataaactgaattatcttgatggatttttgttgattttagtcgtagtagaatctgatgttgaatctttgagtgattaatcgtattatcagcatcactagttaaagattctatcttgatttagacttgaaagtcatgaaaattgattaataagattctaacctttggttctgttttgctctgtttattagatgaatggacaagaagaagtgaaaaggaatcaatgtcttattgcttgatgatgtgataatccgatgcaggttttggtaatgagaagatcagaatgatctgaattcaattatatgatgttctttaagtgtttgaatatgtctctcaggttgatcggttcactggttattcttgtgtctattggtgtcatagtgttaagacttaagagtatatctagtgaagtttaagattactgaaactgtgaagttcatgttagctttagaaggttttaattggtaaagcaaagatttttgcttttcttgattggtgtaatgtctttgttgaatggaattggtagtaaatgcacggttcacttagaaatgtgatttagggagacatctattatcattaactagtaaaaacaggaaagtaaaaacttatggcatcaatacgatgatcacaagttcaagttattacttgttttggctatgttcattagcaacttcactactctgttcttttccctcttctttcttacatgtttagctttgtattctgcttctataatgcagaccgaagtgaaccggagcgact

SEQ ID NO: 39745 - DNA, 401 bp, Arabidopsis lyrata
  Intron number 1 from transcript 482215 (locus 482215) deri ved from phytozome v7.0 (chr-ID scaffold_4; pos 15502939 t o 15503339)
cagctttgactccgtctggatttcttgggtcacaggtctttttgtctcttcaactttctctccctttcgaaaaaaacaattttttttactgcaaagatcgaaatattattaaattctcaaactttgacttatttatgtttacaaaaatgtggaatgtgtgattagtttcgcttgaaagtacataaagttttaatctttttgagccaagacatggattttcttttatagcttcaacagttgttgttccggtctgttacagcatcaagatttttgtcttaaaaattcatcctttaagaaactaattgcttttttttttttttatctatgcatttgtttgaagcatggttgttgtattatatactacaggggattaccaaattggtgaagaagattctgcacct

SEQ ID NO: 39746 - DNA, 811 bp, Arabidopsis lyrata
  Intron number 1 from transcript 925089 (locus 925089) deri ved from phytozome v7.0 (chr-ID scaffold_2; pos 3632589 to 3633399 reverse strand)
ctctctgctcaaagtgtaacggttagtacattcgttcactcgacgtcattcttttaatacgtttttcggtgtagctttgaattagctgaagcttgaactttattttgatggcctaaactggtggttctatgagcaacatgccacactttgaaccttatacatgattcttcagtttttaaatttgacaattaagtcgtagatttggattttgctctataatggtattggttggtttgttctgttttcatctatctaatgatacttacattgtggactgctggattcagccaaagctacttacttgatttgaatctagaatgaaattaggattagcttctgattgtaaactatgtttgttagtggtattgcagtgttctctctcttttgatctaatctttagctcgttcttgaattctataatggttttaggattgaaaaagttgtgtgtatggagataattgcctctaaaatgtcttattctctaaattgccgcttattatttttacagaaatttagaaattgccgctgtttttttagaaaatttgtttagagaatatatcccattaatttcggttggttttaccacaactattaatacccataacctcttatgttaaccctaatttttatttagcgatccccactccacaagttctttactactcttcacgtctcaccaccgtaactcttcttttctacaggtaattttattacttttttgatcataaaactggctttgttgatgaattttcttgttaatttcgaactttgtaactgagtttctttatctatttaatgaactcatgtagac

SEQ ID NO: 39747 - DNA, 455 bp, Arabidopsis lyrata
  Intron number 1 from transcript 486656 (locus 486656) deri ved from phytozome v7.0 (chr-ID scaffold_5; pos 20413373 t o 20413827)
ttgatcctccattgttatcaacactcagaaataaggtaacgcatctcgagactcattgtttaacaatctctgttttgtttcttccaaattattctcgtgaatatccataaactctccgttttttaatgaactatcatatgcttttgtttgttttgttttgttttttcaaaatttcaatatttttgtctctttttcttctattgaatttgtttttttttttcctgctataatatacgaaaactgattccatgtaatgttagttcataggaatttatcataacgagcaagaaaaaaaaatcaatagaagaagaaattagagttatgcttatttgaattagaaaaaatgttagacaaaactttcttttgcttttaacgaagcgaaaagatgttaataagatgagcacatcgtacgtggcgcacgtggaagcacttctgtacgacggacccagtccaac

SEQ ID NO: 39748 - DNA, 479 bp, Arabidopsis lyrata
  Intron number 2 from transcript 486656 (locus 486656) deri ved from phytozome v7.0 (chr-ID scaffold_5; pos 20413772 t o 20414250)
agcacatcgtacgtggcgcacgtggaagcacttctgtacgacggacccagtccaactattaagattcgaaccccacacacatagctaaagggttgttagctggctcgtaggtgaatttaatacgttatttccttaatagctggctaattgcctaaaatcgatccataacacattcctactatgccaacatttgaccctagtcaaaagaattaaaacgtttcttacctttttagcctatcaaacggttcattattatgttctgcatatgtaaaaatagtatgaaatatagtataagattttttactacttttgttgatgaaaaaacaaaaaattagtaagaagagttaagactgattgacattgttttatttttcttctttagttttcttttaagatgctctgtttgtttgtgtttaacaattaggattatatttgtcttatcttgtttgctatagttggagacgttttgttcataaaga

SEQ ID NO: 39749 - DNA, 496 bp, Arabidopsis lyrata
  Intron number 3 from transcript 894826 (locus 894826) deri ved from phytozome v7.0 (chr-ID scaffold_6; pos 14316956 t o 14317451 reverse strand)
atcaggcttctacctgattgcaatcatcacactaggtagctactttaatcaatttatggtttgatttgaactgattttcagatttcaattcaaggtgagattctgcgttttcttattgcaggttgtttacatgtgaaataaccttgaaattttgtatggatgatgattttgcaatgggatagaattcgtcaagggagcgatatttgataaggttctctatgaatttggctcatctttgtttttggagtaacattaacatgtgtcttaggtacattgtgtcttcttagtacttaattcagttttgtcagtgcacttgaacaaatctcttgatttcagtacttgtttagatagtgtggtgaggactttttcctcaatatattattcccataaaagttctacttcgatctgatttatattaactaactgatatggtttcatacttgagttggacatgttactaggtttttctggaagcgtgtggaatatcttctggaaa

SEQ ID NO: 39750 - DNA, 407 bp, Arabidopsis lyrata
  Intron number 5 from transcript 483365 (locus 483365) deri ved from phytozome v7.0 (chr-ID scaffold_4; pos 20885591 t o 20885997)
ttcaacactgcaccgtattcacgtctatttctgaggtgctctttttaaacgctatccttggtctcattcttttatttcttttttttttccggacaatcatattcgcatttttaatttctagaacaatcacaagctatttgacttatcaacactactggttgttgtgtccgacttatcatcactagtgaccgttatataatcaaattcaaagtgacagtaatgtatgctctaatttgatttagcagtttggttctctatgccttttcttcaaaataattttccatatataagactcttcagaataggtgtttgttttcttgcatcactgaatatttctcatctaattacttcagtaatttgaacgttgtacaggggtctcacgcagccatccctgatttacctctcgg

SEQ ID NO: 39751 - DNA, 374 bp, Arabidopsis lyrata
  Intron number 1 from transcript 933032 (locus 933032) deri ved from phytozome v7.0 (chr-ID scaffold_4; pos 10570112 t o 10570485)
tttcagacaccaatcgttgcctccgaggagccttggtatgctcatcttcttgttttttggctatacatattattttcgttactataaattctaatagtgtttgtttttttttaaacgattgtatgttttggatgaatgaaagcaaccacgatgcattaagaagattcaagtgatgtttcaattgatcttttatctttaatttatcgattttctaattttacaaaaatgttctcaccgagtagaatatacttttgagttttgagttaaatctttcacagtctgttgtggattagcaacgtttcaagccatattaactattgtgttgtggcagttcgaaagattcatataaattggactattgctacaaaaaaaac

SEQ ID NO: 39752 - DNA, 377 bp, Arabidopsis lyrata
  Intron number 6 from transcript 331225 (locus 331225) deri ved from phytozome v7.0 (chr-ID scaffold_8; pos 11265023 t o 11265399 reverse strand)
ttttacaacaacactctgaagctattgcgactgtatgctaatgctctctgcatatcgatatgtagttcagaattaaaaattctatctactgtgtgaggaatgttttcttggaaatctgtaaatatgtgggaatacaattatacaaataattatttatttatgcaaatatgtaatatgtgctctcagctggtcaaaagattcatgttcaggttatcctagttctcttaatttgattagtataacaaacaaaaggcactcaacgtcctttagttttctgcttctgtcttcttccttgtttatatctactcggggactttcctcactttcttctcatcctattgactaaatgaccatttcgtagggcaatctacttgttt

SEQ ID NO: 39753 - DNA, 530 bp, Arabidopsis lyrata
  Intron number 1 from transcript 935536 (locus 935536) deri ved from phytozome v7.0 (chr-ID scaffold_4; pos 22269968 t o 22270497 reverse strand)
aagcagcgaagaaaaacatcactcttgctgacaaggttagttacttgactcttcgatttttctttgttttggtctcaaaaaatttccatctttctacttttttcgttttaaaggagggatttataaaaagatttgatttttgttttggtttcaaaaaaacttccatcggtgctcgtttattgatggtgaaatgatctgttatctttaggtgaacaagcatgtgggtctcctactacataaccacacacaggtacacaatttcgtttttttttaatcgattttacattgttatgacttaagatcctgaattggttttttcatctaaacatttgtgtattgggcttcttgttttcatttcattatgggcttattagtattttatttgatatatttaagaaacagaggaaaacatggcaaaatagttagtgtcgattgctccaaaatttctggatttttgaatgtgccaatcctttctagagcgtttgcttcatgttttgaaatctaactgatgatggctctcttgtagcttc

SEQ ID NO: 39754 - DNA, 746 bp, Arabidopsis lyrata
  Intron number 1 from transcript 476066 (locus 476066) deri ved from phytozome v7.0 (chr-ID scaffold_2; pos 13728791 t o 13729536)
ctaatcgcctctcatttccttcttcttcttccaaggtccgattttcttataattcttactctacgattcaaactttctcttcaccgcaatttgggatctgggtttcatgaaattcgccacccaatctcccgatttcgtttaatttgtgaggagaaattagattactagcttcgatcttgcgtttctatgtctgtgtggtttaggaagaatctgaaatgcgtcttttagtggaacaatttcacatgtttcttctagctctagatttgattgttcatcgccgagctcttgaaagtttatcattctagtttctgttttttacttaggcacttggaagtgaaggattttagttcacttctgttggtaacaaaacttgaccagtctctagtttttaggaacaccagcgactccatctccatgaccatcctttgtttttgtaattttgttgtgtttttgagctacaaagagagtagatattttcttatagaggtggtgccttggattactgagactagaccggtcttctgttagatatatgcagctgtttgtggtgctgtgacctgatgttttgcaacttttgttacttaaccatttcattaagtttagatgagcttggtgttacagtttctttacctatagatgtactacagtaactgaattgtcaaatgctactagtctgatattaccgtctctttttgcgggtgatggatgtgtaaatttgcaggttgatttcacggtattcgtaagca

SEQ ID NO: 39755 - DNA, 592 bp, Arabidopsis lyrata
  Intron number 2 from transcript 478973 (locus 478973) deri ved from phytozome v7.0 (chr-ID scaffold_3; pos 6430016 to 6430607)
tcgctcctccggtcgcttcttgctcgagagcaaaggttaatacttttaccgaattgaattgaatttgatcggattttaatctctagagggtaattctgtttaactgtatcccaaaattcactgatttacctaattgatttgggggattgtgcgatcatcaatctgggtttgagggctttgttgatttaagggttttagtgagtcatcgttgattttgcttatgtgtgcttgattattagggttctcacgtgcattatgtttgttttttatttgtgggtttctctttgttgttggattggttttgaaggagactgttctgacgtttcatgttcctgatcacttgaaactgtaactgactgttggtgttctgtatctgtttaagttgttatagacttgtttttgttatgtaatgtgatatcaagtctatgaatgttatgcctttggtttctttgtgataacaattcgttttcttcttctccgtttgcgttttcaattttatacatagttagtttcaatgggatattatgttttatcttactctggattgcgggtgggatcatgatcttgtaggctgaaactccagaagtgattg

SEQ ID NO: 39756 - DNA, 275 bp, Arabidopsis lyrata
  Intron number 4 from transcript 486396 (locus 486396) deri ved from phytozome v7.0 (chr-ID scaffold_5; pos 19278889 t o 19279163)
agaaagtgcttaaagtacctggaatagaacagaaggtgaagcatgctgtttgcttttctctatttttgtttcttttgaaacgtttctgatgccttgattaagatactgttttttagtctgtcatgattgattcaatcaatcttctagcaagttttgtgaaggttgacacactccttgacggcttatattatggaatttataggagattttccatatatgcttttcactttgtttgcctctcatttctgcacttttgtttcttgttcaggttctag

SEQ ID NO: 39757 - DNA, 253 bp, Arabidopsis lyrata
  Intron number 6 from transcript 483334 (locus 483334) deri ved from phytozome v7.0 (chr-ID scaffold_4; pos 20702782 t o 20703034 reverse strand)
gaaatttctcctgcggcattgaggtgagctagcgacagtttctacatcaaattaatctgtccaagttgtcttctataatctttttcctaagtctagttagcattattgtcttttggttttggatcgttggttagatgttcctagacatttgcaacaccaatgattctatatttcaattcatctatgagttttgatctttttcattcttgtcttagttttgaatttgtttccttttcaccttttctatctcagg

SEQ ID NO: 39758 - DNA, 141 bp, Arabidopsis lyrata
  Intron number 1 from transcript 333418 (locus 333418) deri ved from phytozome v7.0 (chr-ID scaffold_872; pos 3609 to 3749)
acaactattagtactccaggtatcatcaattggtttcttcttatatcgccactttgtaattctgatgaacaaggttttgtttttttattattattaatgtatatctattttacgttaataattttgatcaataaataggtt

SEQ ID NO: 39759 - DNA, 778 bp, Arabidopsis lyrata
  Intron number 1 from transcript 949962 (locus 949962) deri ved from phytozome v7.0 (chr-ID scaffold_8; pos 15907014 t o 15907791 reverse strand)
ctcacttctccaggtttttcttctcctctttggttgtagagttggtgatcgtaatcccgattctaatcttgtgatcttacttgaatttgatggattctgtgaaattaatctgatttagtcgtgaattgacttcaatttttaaagaaatctagcgagaggttatcctcaatcgaaaattcagttacttaagttgaatctcccaattttaatgagaaagctagtccaaagtcattagatcattctcaatttcactttggtaatggcaattagggttcatagttgtagatgcttaatttattgagatttgagttagaagttctgttgtttttttttgtatatggtaggtggtttctcggaatcgaaagatggcaaagatctgccagtacttctaatggtctcttcaatacttcactattggtctcttcaatactccatgttccgttatctaacacgctttcacctcttgctacaacaattattttcattgcattatcttcatcgaatttttcatcctgaagaagatgattattgtaacttgttcggtggagcatctgatactcttgagtaagaacccgattgtaacatggtgatggtactaatccactctttctgataaattatttatgagaaatttctatagattatgcatcatctcgttatgataaatacttaggttttgtgtatcttttgttaggtgtttgtgaagtcctccaagtccaaataccaatcatgattgtgagaagagctgtgaagaactcaactgttgttcctagaggtg

SEQ ID NO: 39760 - DNA, 210 bp, Arabidopsis lyrata
  Intron number 1 from transcript 479852 (locus 479852) deri ved from phytozome v7.0 (chr-ID scaffold_3; pos 10706217 t o 10706426)
ttcacccaaattaactcctcatttcaacaatagaggtgattacacaaatacccattttctaaatcgtcctgattttcattcataaacccaaaagattctcattttgcaattttcttttcaaagttagtgtttaatcgatattgacgattctggaaaattttgatttttttaataggttttgtacctttgacgcggaggtggttatcttct

SEQ ID NO: 39761 - DNA, 660 bp, Arabidopsis lyrata
  Intron number 1 from transcript 891235 (locus 891235) deri ved from phytozome v7.0 (chr-ID scaffold_7; pos 19324660 t o 19325319 reverse strand)
acgtcgccttattagccgcctcttccgtgtcgcaggtatatgtatattctacatgtgagcttttaccattcgttgacttttcatttatgttggtcttatcttagtgttatagtgaccacaataattaaaatataagtatgtatgcaataacgatgatatgaaaaaaaggatgagatagcttgtagcggccgcaattgaatagaatgagttgcttgcaaggtcaaaattataatctattacgagaataaggatttatgaaaacatttacatagtaatgagaaaagtttgtccacttcatgtatatgcttcatatatgtgttattttttaatcgtaatggagttttttgaaatagtcaacttttcatttctttttggtgttatttaagtgttaattatattgagaattgaccagtgagtctttgtgtgcgtcaatatatcgtaccatcaagatttctcaaaactttttttatttttatattttttcattttttggttctatatattgtgagcctatagatttcttaaaacattgtacgtaacgtacatatttagtaatgaagaaaagttttgtccaatctatttttttcttttgttctctttcaactgagactcgactcttttctataattaattacaggaactgaaaaaacggttgtggaa

SEQ ID NO: 39762 - DNA, 614 bp, Arabidopsis lyrata
  Intron number 1 from transcript 322756 (locus 322756) deri ved from phytozome v7.0 (chr-ID scaffold_5; pos 2679623 to 2680236 reverse strand)
attgatcttccgctcattgaagcttacaaggtatgctagtgtccaatttattgtgtatggtaataaatctaatttatgcttactattatggtttcaagttataaattatatttaaaaaactcgtatctttgtaaatttagatattaacaaatatcagtttgatttagatgtaaaaaaacaaatactattaaataacgttttaaatagctgccaaaataatgtttaaataacaatcactacaatttttgtaatttttcctttttattgttcttttcatgaaattactagctaattgatttagtccagaaaaaaaaaattgtgtggttttgattagtgtttgcatatataaatcccagagtggtaatcaggtaatctaatggttcggagacccgttatgaaaataaaaagtaaaattagaaaagattttgatcataacatacacaaacaaaataatatacaaagatgtatttaaaaagaaagagaaaaagatgtggatttcctttgactatagctttcaaccctaaaaatcactcatttcggatgaaaacaaaaatcttcgttttctttttttttttcatttttgcagaaggtagtagctaagttgggaaacaaaa

SEQ ID NO: 39763 - DNA, 594 bp, Arabidopsis lyrata
  Intron number 1 from transcript 482574 (locus 482574) deri ved from phytozome v7.0 (chr-ID scaffold_4; pos 17070006 t o 17070599)
ctgtcgttgttagatctcctgtgagttttgggtgcttttgattgttcgattttgagattttgccagtgagattggttttcgaaattcgaggatgttttgggatttcgattgctacattttcgctacttgttgctgcttagtctcatttaaatgcttcacagcgtcagattttcttggattcatgccaatttttgtcgttaatttagcttcgcgatggtacattttcctcataatttgtctgacactgcgtttcaataacacccaattgacgcaaatcgtgaaatcaggcatcaatttctccagttattatgccaaattggctctgattgtgcaattttcttccctggggtgttgattcttcacatagtgttgagcattagctaattgatatcaaagtattggtgtaggaagcttaacattgtttgttatgtataatgtttcaagtagatcccaatgttgtgaaactttctgatgaataatatttgataattgtgtgttgatgctttaaaatcttttggatgatatctctttgaccaacttctttcaagttaataacaacttgtttatctgcagtcacggaagagaaagtcgaca

SEQ ID NO: 39764 - DNA, 310 bp, Arabidopsis lyrata
  Intron number 1 from transcript 930502 (locus 930502) deri ved from phytozome v7.0 (chr-ID scaffold_3; pos 11587363 t o 11587672)
ggaggcaagaggacgctgaagctggacgccgtaaggtagatcatcatcatcatacccttttgtttgattatctcgttactttgaatttgccccctaaaatttgtcggtactgagtcagattgatcctctcttttctgggtttttattggaattgagattgatcttctaacgcatgcaatcagagatttagatttatccacaaataaaaaaatttgtttttgtttagattaatgcataaaattgtgtgttcttattgtttgatttctggatttcagcttgagcagtttcgtaaacaaaaagcagcagaacg

SEQ ID NO: 39765 - DNA, 1039 bp, Arabidopsis lyrata
  Intron number 1 from transcript 897162 (locus 897162) deri ved from phytozome v7.0 (chr-ID scaffold_5; pos 10660755 t o 10661793)
ttaagcctcagatcgtgatctggtctttccactcgggtacatctttatcgtgatctagattcgtttctagtaacaacaatgtctctgatatctcccttgaccttggaatctccgtctcaataactacaaaaagctacttcttttccaaaaattgagaactcccggcggatttcaccggaactttttgcgaaaatagtcagtctgattttttcagtgattcctctagtctcagagaagagcaccattggccaaggaaatggtagttgatgacgaattggttacgttattaattaaccaatttgtgttcttcaataaaaccaaaccaattttaaactaaactaaacggtttaatgcgaaccaaaagaatcagttttgagaatttggttttgtgaaattggtttggtttaattgaagaaacactcttcaaagttcaaacggtcagaaaaaatcgaaacgagtgatataactcgcgtaaggcgtaagccttggagaccaagagtcttttaaattcacaaaagttaccagtttggatttcgaattatgaccgttggggctctcagacgctctaccaaattctaacatctccatctccggtgaagtaattgagaagctgtagaaaagcgtcgagcttccgttgtcgtcgatctcagcgaagaggaaagaaacgaagccgttagagaaagatctagtgcaataggaggcgatgttgaagaaggaagattttttgaaggagaaaagacgagatcctgaggaagaagaaggagaaagcattgatcgtgttcgccagagagacttccatcaacggtaacaatactcgttataccttcaggattcttttctggttaagtccccatcgttaaggtaatcgagatttgattaattttcttaaagagatttttggaatttgtataatgagaattgagtttttgtcttgttcacaatctaatggatctattgttttttggaggtttgagttatgatctatctcatttctaattacagctgaagaaagaggtactccaactacacgacaagtaga

SEQ ID NO: 39766 - DNA, 360 bp, Arabidopsis lyrata
  Intron number 1 from transcript 473846 (locus 473846) deri ved from phytozome v7.0 (chr-ID scaffold_1; pos 23151218 t o 23151577 reverse strand)
acgaccgtgactctctcatctccgctccttctctggtactcccacattgttcataaatctgagagttcactaatttgactagtgatatttatgaatacgcgtgtatttgactaagtcaaatcatgcaaaattgatttgaatttcactgttcatcaatcaatgacgaagaatacagattttgtgttttcaattgcactggatttagagttacatgcaatagaactatatagatttgattagtgaagaagctactctggatcttgcttgcaatgtgtttttgaatttggagtaactttttttgtttggcgttatttgagatgaacaggagcgagatcagagggtaagttcaagctgcaaaga

SEQ ID NO: 39767 - DNA, 569 bp, Arabidopsis lyrata
  Intron number 1 from transcript 950287 (locus 950287) deri ved from phytozome v7.0 (chr-ID scaffold_8; pos 17435246 t o 17435814)
ctgttagcttaagtgccttgcactggctctctcaggtctaacacactaatcatttttctatattataatgttttttgtaactgtataatgttatttaattatttaaggtaattactactcttttttttggttatatataagaaggaattagaatccatatatacattattcaccatttaaaataatcaacgacgtcaatttaacattatagatatgattgttttagcattctactaatgttagaagctcaacattttatcttgattaattattgtaagttttttttttttattaaggtaattattatactttttagtggtcggaaagataattcgtgtactggatatacgttacgactataaatttgttacgtcaattctcccaatgaagatcaatgtgcatcacccaaattaatcaacaaaagcaatttgacaatataatttattttgttctatcagtctcaaaacaagaacatatataacaccatatatcaaaaaccgtttctaaaatatgtgcattgaaaaatatatgtagataccggagaaagtattggagaaaggatcaagaac

SEQ ID NO: 39768 - DNA, 681 bp, Arabidopsis lyrata
  Intron number 1 from transcript 889567 (locus 889567) deri ved from phytozome v7.0 (chr-ID scaffold_7; pos 6940803 to 6941483 reverse strand)
ccgtacgcccaggatctgatctcaccaattttcaggtgtaacttcttaaaatccttgttttaattattgcgatatacagtattacagaacgaaagaccattgtatatgttttcaacttttttcaaaacacacattgataattttgagtgaagaaaaacagatcaagttttttttagtataaatgatattaattattttagtgttttctttagagtctatattgtgcatgaataacaaaaagataggatcgatatggatccaacagtttagaaatttatatttatgttatattttccgtacaaatcacgtcattgtccataaattcataatatgcattttgttttctttaagaacatacacagtaggataaacttgagtatatatgttagaatatttttaatgttataataaaaaaaaaaagagaagagtgagagagataaagagatagagataatagaaaagagagtgagacatatggcacttacacccgattataagtctacacccatcttctttctctttcatcactattcgattatttttgttttttttaatcataacacccgaacaaaagttacgcctcagtgtatggcctaagagttaacaaaaaaaagagatttattaattattatttttgaacgtaaagctgccacctcagctgatcctaccaagatcacgact

SEQ ID NO: 39769 - DNA, 383 bp, Arabidopsis lyrata
  Intron number 5 from transcript 486540 (locus 486540) deri ved from phytozome v7.0 (chr-ID scaffold_5; pos 19996167 t o 19996549 reverse strand)
agtctccttacctcttctgctctctctcctgcaaggtctggtttttcttcttcttattaaaagggacatctttttctcgttaattacgtttacgtttcaaattctatcacatacccaatattcatcatctgggttaatcttcttttttggaaaattcattttcgatgcacgattacacgtaattttctcagataaaaaaggaactttttttttgtctcattaattttcaaattctttcaaaattcacaattcaatttctttctgtttttgttgttttttgttgccttttaattaaacacgcgtgtacgatcatatttacacgtaattgtcgctgaaaacacaaacacatggtttgtttgtttttgtagattagtgacgtcata

SEQ ID NO: 39770 - DNA, 973 bp, Arabidopsis lyrata
  Intron number 1 from transcript 945073 (locus 945073) deri ved from phytozome v7.0 (chr-ID scaffold_7; pos 5287141 to 5288113)
catcatcccgggcttctagccaattccaagtcgaggtaaacaccaaaaacatgaaccatatattttggacaatatatgttgctttgtggttgataacttgatgaagtgtaaaatgtttacaggcagagcttcttttgacagtgcatcaccggaacttagcttcctttgttggatactgcgatgatgatcgcagtatggctctcatctacgagtacatggccaacggcaatttgcaggcttatctttcaagtaatcttcatttctcttgagctctctattgccaattatcgctgcctttgagctcacggatgttttgtttacggatatgcaggtgagaatgcagaggatcttagctgggaaaagagactccatatagccatagactctgcacaaggttggtcccgttttggacatccttgatttctcagggcttaaagcaagaaaccaaacctggttttattccctcttggcaggtttggagtatttgcacgatggatgcagaccagcaatagtacatagagacgttaaaacagcaaacattctattaaacgataacttggaagccaagattgctgatttcggcctttctaaggtcttccctgaggacgatctcagccacgtcgtgactaccgtcatgggaactcccggctacgttgatcctgagtaagttcctttaaacaatcaatacagatcacatcttcttgctggtagcttcaccaaccagcgatttaatgagactagggttagggttggccaattcagttcggacccttattttcagtttatcaagaatagtaacccatttgggactcattggatacataataaactaaacaaatgcaacgtatggtgacagatactacagaacatttgtgctaaacgagaagagcgacgtgtacagttttggggtcgtccttcttgaactcatcactggccagcgagccatcatcaaaacagaagaaggagacaatat

SEQ ID NO: 39771 - DNA, 361 bp, Arabidopsis lyrata
  Intron number 3 from transcript 484088 (locus 484088) deri ved from phytozome v7.0 (chr-ID scaffold_5; pos 403103 to 403463 reverse strand)
gctcacatatcgtgaaggccttcttgactctcaaggtatttctaagcaaatgcttttagtagttattcctattgaatatacactggaaggttggaacttagaactgaaaaattaaagcttttagtggtttaatgttatatgaaactacggcttcttttctttcagtcaaatttagtttattgtagtgaaacttgttgaaaaggttggaactttagtggctttgattcgttgtgacagttcacttgatattattacttttcttcttcatcatccttaagtttttctattaggaggtgacattttcttttctggatttctttctttaggttgaaaatattggtaaagatcctgctgcagaaat

SEQ ID NO: 39772 - DNA, 761 bp, Arabidopsis lyrata
  Intron number 1 from transcript 892908 (locus 892908) deri ved from phytozome v7.0 (chr-ID scaffold_6; pos 3949708 to 3950468)
tctggagtctaccaactcctcctgataattctccggtgagtaatatctatatgtaatcaacaattcctatatgttaatatgtattaatacaaattaaactatatttatgaaaagtttatgatcacgtctaccagcaattgtacgtacgtagtaatattagttttttgttttgttaataaaaactattagtcaactcattaactttattatacttgaattgtctcattttccttttgacgtgaaatttaattcacaatcctatatcatattaaaatgatgatcaaattgtttaatagtattagttattatttggaaagcatattctgatatctgattgtaagtttggagtttctctgaattttaatcgtagactttaaatttccgtatttacaattttacatacttgtggaattttgaataatcctttgctaaatgatcatgttcttcttcgtgattactcggatggatacgaatacaatattaatatatagtagttggttcatatatgtaaaaagaatatggtaaatggtttcttgcgctcattcatataaaatcaatcatttaaaaaatcaaatacacgtttcgactccgtggactaacttatgaaacttgatcaggaaactaagtctaaacgacacgaatgtttattttgttacggaattattgtcacatctttcttttcaatatgaaatttctaatgaaaatatgtatatataataatttgtggtgaagatatcacaagaagaagaggaagagacaga

SEQ ID NO: 39773 - DNA, 859 bp, Arabidopsis lyrata
  Intron number 2 from transcript 478787 (locus 478787) deri ved from phytozome v7.0 (chr-ID scaffold_3; pos 5697706 to 5698564 reverse strand)
acctgaatcgaaagttttaaacattattagactgaaaattgatttatttgaatctcaaagaaatactctttttgtttatacagttgtctctttgtttctctcagattaaaggctttgctcaggttctgaaacgatcttaatttcgttctttttcttatgattgttagtttcgtagttggattttggattttattctgattttgtgtcactattggtagaaaacgttatagccgatgttctagattctttggtcgataagtaacaatgaatggatttcgttgaatatggataaaaagatccaaatttttcaatgcaattttggttagagattcggcttggatagtaaatcgggaccaatttgagatttaaaatcaggctaattgatctggtgttgcaattgggttggggacaaaatttgtgatttaatctgaaaacttgtgactttttgcttctgaaacttgtaatctttaaatgctaaatgttcgaatgcatcttatagctatttggaacaaatcaatatagctttgagagttgtatggtttgatgaaattatgttttatggaactctttgagagttgtatagttttataaaattatgtttcttggtgtatttcttaaaaaccatgtgaaaccatcatagctctcaatgatatgtattgggaagtaaatattttgttatctagatgttacttctctctaatgcagagttttcttgattcttataatttagcatatagtgaaattagatgtcggtttgcatagtttctttggagcagaagataaagttgctttcctttatgtctttgtaacatctttatgaccaaagttttgatatgaaaatgtgcaggattaaacaaaa

SEQ ID NO: 39774 - DNA, 961 bp, Arabidopsis lyrata
  Intron number 2 from transcript 477545 (locus 477545) deri ved from phytozome v7.0 (chr-ID scaffold_3; pos 831627 to 832587)
atttctccagtttcgtcagacagctcaatacttatgtgagtgagcttcgatcgattctgatttattcgatttgaaggaatcttactttattttactctcttgtcttttgtggttgaattatgttgctgattcgtgtaagaacgagtgaataggatttattgggtttaagtgtaagcgatggattgatgttcctatatatatagttgttgatgctggtggttgaactatgcacgtctagtaggttttgttattgttgatttagtggcaataactgtttcgtcgttaaagattggatctatgtctttgtgggttctgacaaactcgtatcttgttcttgttttgtagcttgttctttagttgttttttgtacacgtataccctgtggactgcaggcatatatgttttttttttcctagggttctaagctgcatctttgtctgtgaggctggaatgtaatatttctcattccattttccaaatgaatattcttaggtcaagcaaaactaagacgtgtatactcttgcatagctttttcctcccctgttgttctttacttaccaaaaggttccacgaactttgcaggcatgtgctcatatgtgtctgacgattggttgattcagcagtcacaaaacaaaatttctatcagttgtcccatgttagctttccattcgtttatatttgtcgtccaggtacatgccgatacactaagagctattagtttccttggaccatggtagtttggtgctgcagttagacacagtgaagagattttatcgtatcataccatctctaaaatagtttttatttaagtatttaatggtcttcatgtttataccactcttctatgttggtttcctatctcaacggaatccaagtaacttcttgtggttgatgactgttccattctctatgcatcaatttttcagggtttcagaaaagttgatccagaccgctgggagtt

SEQ ID NO: 39775 - DNA, 838 bp, Arabidopsis lyrata
  Intron number 2 from transcript 491275 (locus 491275) deri ved from phytozome v7.0 (chr-ID scaffold_7; pos 3004611 to 3005448)
ctgattccaaactggtaacaaatatcttcctttcgctttttgtttcctccacagctctcgtttgatatattccctgttcgatatttaggaggagattcgtcgaatttgacctttaacttgattcgttattttagatattttcaaacaaaatatcttctggtttactttgtttgttcatatcgatttggaaactaattatgttagatctgtttctatgactataaacgcagactcatttaatttcaaggagaggttttttttatttggtaattttaatcatctccaatatgtgaaaactgatgtcgcaaatttgtcttcttcaaccaaatttgaccatccaatttcttttttgctaaatgagattgtttgggtttcttttttcctttcccttattagcagaagatttcgattgttcaacaagtcttggacgccgaggcaatctcatgcctgatcatcttgagatctataactaatccttgatctgtatcaatccaatggccaaatcgaaaaaaatcctagctttaaactagtttttgagtaattagagttcgtgattcgtggtacataccacccttcttaatgatattgtttattgttcaaaatgcctttggcttaattattgcatctcagaatattgtaatgtgttgtgccaatagaggatttgctgtctccctacattgtgtggtaaaaagtaaaaatggtttcttaattgtagctgaatactagattgttcattgcggtgtgatggttgtttttcttgacaagtcctactctttatattcttcttgaattcttcctacctagtgtgattcacatcattagtgtttctttctgcagg

SEQ ID NO: 39776 - DNA, 426 bp, Arabidopsis lyrata
  Intron number 3 from transcript 489958 (locus 489958) deri ved from phytozome v7.0 (chr-ID scaffold_6; pos 20872102 t o 20872527 reverse strand)
aagtaaaagaggtgacttatttagtattctaatcagcattgactacgtataactaatgaatcttacatgagtgccattatcttatatttttagtattgtattatccctcttgctgaattttttagttggttatgttggtcttgatatgattacatcttatgtattctttctaaaccaattaatgcaagaatagaaaacataagttgcaattgttttttctgcataatatttgattgaccttgtagtatcttttcttaatttaaggaagtgttctaactaccaatgagaagatattgtttttctatataaccactaagtttacgttgaatctttctaatagaagcttcctttgggcattaacttctttttgtatgattttgacaacatatagatcattatactaagtgcatcagcaaataatctatt

SEQ ID NO: 39777 - DNA, 469 bp, Arabidopsis lyrata
  Intron number 2 from transcript 921949 (locus 921949) deri ved from phytozome v7.0 (chr-ID scaffold_1; pos 12822968 t o 12823436 reverse strand)
acagacaactcatatacattttgcatacacaggaggttttttgtcttgttctctcttgtcaatcttcttattgtcttgacccaaggtgtctgattcttgttaggtttcacatttattatgttaattaaaaatgtcatccacttagttcattgtaggcccagttcatatgccttttgacttaccctgatactaaatttcccctcgtgaaggctagtttagaatctggaatgattgagttagttatatcttctgcaaaactttagaatagatttaacttaaattgaactgtcagtaatagttgtttggtttctcttagcaaaacttttttattgttttaaaaccgtgagttatggaaggtgagaaagtggtcactcagtgcttggtttttacttttgttatcttgtaaagtgagtgagtttaatgggggttttcaggtctggagtggcatcttcgtataccaattacgcaa

SEQ ID NO: 39778 - DNA, 332 bp, Arabidopsis lyrata
  Intron number 3 from transcript 891509 (locus 891509) deri ved from phytozome v7.0 (chr-ID scaffold_7; pos 21445991 t o 21446322)
tatcagtttccttaataagagctaatcttgttttggtaagaatgtaattggttcttagattattcaatacgtgaatgggattgtctttttgtctggcattttgattttttatattctatggaatttgtagtgatctttctttctgtcaatgaacttatatggttttggacaacgaagctgtttaggatatctgtttctgcaccctcaagctagccactctaacttataagtcaactgtttcatctagtttcgcttagaagaatgaaggaggatgaaggttttttttgcagtcattagcaaccatatcctgttctttacgagaagcctggtaa

SEQ ID NO: 39779 - DNA, 481 bp, Arabidopsis lyrata
  Intron number 1 from transcript 887977 (locus 887977) deri ved from phytozome v7.0 (chr-ID scaffold_781; pos 2342 to 2822 reverse strand)
ctcttacacaggagattaagaagaagcttactcgggtttgctctttttttcttctaatttttttacacagagatctcgattttccgattgttgttgttgctcggttttgatttctcccggaaaacacgatttgatttcagtgtcccctacgcgatttctctatttcgagacacatgcatttacagaatttcacgaattttgatttgatggttgcgattgcggaatttcgaaattcgtgttttgtttcattttgaatcttcggtttccgatttaagatcaatttcatccaatctgattatgttgatcatcaatgttcatgcaattctttatttccttcaaaatgctatgtacctgtttgcggttttttcacgcccagatatctggatttggtcattttcgaatttgagagtataaaattgattttagacttgtgatcatttgtctaggctgttgtctctccagcacaaacacgcaacttgtt

SEQ ID NO: 39780 - DNA, 333 bp, Arabidopsis lyrata
  Intron number 4 from transcript 471800 (locus 471800) deri ved from phytozome v7.0 (chr-ID scaffold_1; pos 6762501 to 6762833 reverse strand)
ttagaacgacgaaatcagccttgatttattaacttgtatttgttcttgcacatatgttttgaatttttctgctccggagttttggtggcctgtggtctgtgtagaatagtatcaagatcattcctgttatcatttaagaaagatgttgaacaaagaaactacttaaatcttcttgagtatctagattcattggggaaattcttgttcttaggatgattgcagtgtttctggttattcggcatttgtgtatctgagaatctaatctcactttttacgttatttattttgatatttgtagttatttggcattccagtatctgaacttttgcaact

SEQ ID NO: 39781 - DNA, 902 bp, Arabidopsis lyrata
  Intron number 1 from transcript 905601 (locus 905601) deri ved from phytozome v7.0 (chr-ID scaffold_3; pos 12028920 t o 12029821)
taatcgataaaggaagctcccgtttgtttctagtataaatctagtccttttccctcggttttcatgattaaatattgtagtttgatgttgtcaattagggttcttcgattgttttcaaattaggtgtatgttctgtaaattagggttcttagttctaagcatcgattattgttatttgaatcaatttggacgtttgtgtttgtttttttggcatgattgaagactaattgagtcattgcatgtttgattagtcttcatagtttcggataaacaaattagggttaatagaataaatcatcctaatgttattaagcttgaaggtttggttacttcgcgggtttcgtgtagtctctagataatgatggaatattaaagattgctgatttcgggttggctacgttttatgacccaaagcaaaagcaaacaatgactagtcgtgttgtcacactctggtaccgtccacttgagctttttcttggagctaccgattatgtctgttattagtgtttatatctgttatatttctttatgcttgtagtctctggaatttgtattgtcttcatggggtgatatcataatctagattgaaagttgtatgtagtcctttatattaatggctgcactcttggtggaaactcttaatgctatgtttagtcatgtgcttagttcatttgtggaaactgataatgctatgtttggacatgttcttagataattgtgcaagctgatatactatgtttgggacggggtgcttagatcatttgtggaaatgttcagtttctgtctttttcatctttctaaaatcagttaagtttgtatcaaatataatgattggattttaggttatgagaagagtttgacatggaactaatgaatgtaatgggatgatgcaggaaggggca

SEQ ID NO: 39782 - DNA, 590 bp, Arabidopsis lyrata
  Intron number 1 from transcript 487907 (locus 487907) deri ved from phytozome v7.0 (chr-ID scaffold_6; pos 4269000 to 4269589)
gatctgttatcatctctactcgtctgcgtcgttgagtaattattcttttcttcttccatttttttggttttagagttattgctctttgttccatacttgaggctgctgcgcgaaattagctgtaaattcctgaaacaagctctgcttataggcatgatagggtttctaaatcatcctcgtttctgtttggtttcgttttcgtgtgttatatctgagcagaaatcgtaattttgccgccggtacgatttttggagtataacttttgttgatttggtcgctttagggttttgctatcattcgtgttttttgctgttgcaatttgtttgaatcatatattttgacaattctttcaggtttggggacttttatatggtgttgttatagctctgatgagctactctttctatttctaaatgattctcaggttgcaaattttaggaatatgttaaatttcgtaggaaaatgagttggaaatactcactgatttatatgtgatgtatgaaaattgaaaattttgtgtacagattgataatcaacttctctattttctggcaggagcttggtcaactgggaactctctgaaagcatag

SEQ ID NO: 39783 - DNA, 187 bp, Arabidopsis lyrata
  Intron number 2 from transcript 481382 (locus 481382) deri ved from phytozome v7.0 (chr-ID scaffold_4; pos 4035196 to 4035382)
cctccaacaggtttgtgtttcctctcttgagaaagctatctctcttatcttctacattctctgtttcttgattccatgaaaatgctcaaaagttcaaaactttgcttaatccttttacagattttcaactgatttcacaatgggttttgtctataatctgaattttctctgtagcttctagaacttg

SEQ ID NO: 39784 - DNA, 466 bp, Arabidopsis lyrata
  Intron number 4 from transcript 488774 (locus 488774) deri ved from phytozome v7.0 (chr-ID scaffold_6; pos 7903148 to 7903613 reverse strand)
gaaccagctctggcacgtttatccccaaaggaaaggttcgatttttcctttgtttgcttccctaattccaagttgaaaactggatctctctctcagacatgttcaattttggaatagatcgtgtttcttagcttttgcaaatgacagatttgatagttcaaactttaatgtgtgaccagcttatgctccttaagcaatctgtgacatttatcctttgaataattggatcatgggctttggaagattgtcctcatgatattgttagattgttacttagctaacaaattaatcccggacttacttaagtttttgtgtctaaatggtaatcaattatgaaattttctggattcagatctgtaaatgttgtgtcattgttatgattaccttgatctgttgctctatcacctgaagttttctctggtgaattacaggatcccattgtttctggtatagaagacaagatctc

SEQ ID NO: 39785 - DNA, 840 bp, Arabidopsis lyrata
  Intron number 1 from transcript 920957 (locus 920957) deri ved from phytozome v7.0 (chr-ID scaffold_1; pos 8529222 to 8530061 reverse strand)
tagacaagtaaggcgtcaaggagaagagatttggggtaagtttgagtggtataatcttgtgttcagtgtctctctgttaacgtctgataatcaacttttttcatttctctttggttattaatggtctttatatatgattattaactaatggatttcatatcaaatttgttttcttttcaaatcatatatggatcatgacttctaaccaaaatacttccaactaaaacatgttatatctatcgtaccaattatttaaaccgaaaattacttaccggttaactaatcggatcaaatgtaataccgaaccgggttgacacatccagtgcagaacactagtgtcacgcagatgattgtgtctagagcgtaaactgtattgctagagtgtgctttgattgtgtcgaataaaacagagttcgaacttcgaagtttacatgaattactaattacaatttttcacttcaaaatcctgaaacaacgggcctatatacacttcgatgagattttgattgttcctccgcaaatcttgagccataatcgaattctaattcagagaattaatacaacagtcaattcacaatcttgtttatgttaattaagagaaacttgtggtttagatagtaaattctgtgaaaaatagtttcacagttggtatgtatgctttgttgttcttcaatgcttcggacatctccttaagggaattaaaccatgatcatcttcaagataataccaaaaccaattcgataaaatctctttttttaatatcaaaaatatcaatacaaactaattataataaaatcaacaaaagattggtttaaaacaaaaacaaaggttgatttgaga

SEQ ID NO: 39786 - DNA, 345 bp, Arabidopsis lyrata
  Intron number 7 from transcript 471843 (locus 471843) deri ved from phytozome v7.0 (chr-ID scaffold_1; pos 6892762 to 6893106 reverse strand)
gaatatctgatcaaaaaacaaatgtgagtttcgcggcctttttctccagagaagatattatcatgttgttgttttccctacttattgactttacactgccatcacgtatatgtataatgaaatcttatcagtaagtatccttcattgcagccatgtgtatatattcttgtttctttgacgcaaaaatttggactctttgttttgattgtgtatatcctttttcttgagagtttcccattaatagctttggcaagccttctaactgtgagcttctatgtgtcttacgaatgcgcaagaaccaaaacgtttggtatattatttgaattatatgtgcagttactacac

SEQ ID NO: 39787 - DNA, 427 bp, Arabidopsis lyrata
  Intron number 2 from transcript 943828 (locus 943828) deri ved from phytozome v7.0 (chr-ID scaffold_7; pos 188681 to 189107 reverse strand)
gattatacggtgacgttttgcccttcttcccctaggtaataattatactgtcctcaaatttctcacttactatagtattattcttattaatttccacaatttaggggttccttgaaaacttttttttttttagtataatgaatgattttgggtatgtttttttttttcgccgttgggaaagccaaagtttgtgtttatcttcttttcataaaccatcattttgaaagcaaaaagattctctttgtgttgtcaattacgattaatttaatcgagaaagtttgtagcaaatgtttcaaaatgacaaaaaatgctaaagttgtttgaaaacgcaagttgaaagatttgacattgcaatcattttgattagtgtttgaataattttgtgtatacagtcaaaaatcgactagctattcccctccagtgacag

SEQ ID NO: 39788 - DNA, 765 bp, Arabidopsis lyrata
  Intron number 4 from transcript 479509 (locus 479509) deri ved from phytozome v7.0 (chr-ID scaffold_3; pos 8654648 to 8655412)
acagtcatacttctcaggtaggctccttacactacagcaaatctttatttatcttgagctgtaaacctttttcagattttttgcttgagaatatgagagtatgaacctttttgccccagtatgtgaaaagaactactgtccaaccccgtttttgtttagtcatatagtggccaaaggacaaagtcgtgacgttgaacccgctattgtctagttatacatcttacatggttccatctatctactatccttctgtcatggcattagtttgtttcgttttcgtgacagtttagtccatggtgttaaccattttcgtctggaggctcagttagatactcttccctgtgtatggagtagttattgtttatagttgagccagtcactggaattgtgtgccatgaataattattgtatagtcttactcaatcaaaatgtttggtatttggtactaggtcatacctaattattctcgatttatgctactggaatttcgacacttgtatgttttaaggtcagaatgcattcaccgttgaatcaattgtaatctgctagcactaactagtcacttgtattggagatggttatgctcacaccttgaagtatggggcctcgcgggtacactgaactttgatagactctagtccattttgtagaaaaaaaacaactaaaaattagaattgcagggtagagaataatagaaactaaggcttcattgatgtgatttgaatctgcttcccactaacgttctgtatgattaatttttgcagg

SEQ ID NO: 39789 - DNA, 263 bp, Arabidopsis lyrata
  Intron number 4 from transcript 495825 (locus 495825) deri ved from phytozome v7.0 (chr-ID scaffold_8; pos 18025713 t o 18025975 reverse strand)
aatcactacatttgctaaattgcctcgtacgtgcgggtgaggatctttctcaatcacaagaacaacgtgaaaagtttcctcctttaaattaggttttcttttcattaattccgtaaatttgtttcaccaaacgtgtgggacttcttgtttctaaagagtgttgctttaccattggtaagtgacaaagattcaagctttatacaattgtttctaaattacttcattttgatgttccttgattgaaaattttcaggttttgctca

SEQ ID NO: 39790 - DNA, 341 bp, Arabidopsis lyrata
  Intron number 1 from transcript 321881 (locus 321881) deri ved from phytozome v7.0 (chr-ID scaffold_4; pos 20536915 t o 20537255 reverse strand)
gtgttacctacgatcagttggaagaggttcttctcttcttcctttttcttatttttaagattccattctcttcattttccacgttcaattgagctcatcagatttgatcgttgccttaatcagtgttttaggttattctgatttggttttgtcattgtgattcaatctacaaggttttgatctaggatctttagcttatcatataacctaagtcgtggttttgagtttctgtttacatattgtattttcttacaatttggatacatcgtgagctagctcaatgacgtgatgttaaatttactacagttctggagtgagctctcgccgaaagctaggcagga

SEQ ID NO: 39791 - DNA, 405 bp, Arabidopsis lyrata
  Intron number 1 from transcript 473254 (locus 473254) deri ved from phytozome v7.0 (chr-ID scaffold_1; pos 13469840 t o 13470244)
ctttcgatcccgcctgagaaaaatcctaattacaggtacaattcttgtcttttactaatttgattctctggtgattgcactgcgagtctgagattttcgagtgttgagattttattttgggttttttttctttcgtgattctatgatgcattggtaaatttttaatgggaagatacttaattgatgtttttgtatatgaacgaacattgaactaatttcgatttccataagattgggattgagatttgggatcacttactaatcctatgaagcttttaagatttgtgtgtggagcttgattagatccatcttatagctgagtttgcttgtagactagttttcattgcaagagattttgtacttttggcagggggaatacttcactgctcattgattattgccaaa

SEQ ID NO: 39792 - DNA, 171 bp, Arabidopsis lyrata
  Intron number 1 from transcript 495163 (locus 495163) deri ved from phytozome v7.0 (chr-ID scaffold_8; pos 14268011 t o 14268181)
gtcttaaccatcacatatctaattaccaaaacaaggtctctctctctctcttcaaagttttgatttttctctgtttctattttggttttctagattatccatagtgaaatgattgaatgattggtgggtttcttagcttgttgaagcagaaagaagtttgcagaattcaaa

SEQ ID NO: 39793 - DNA, 831 bp, Arabidopsis lyrata
  Intron number 2 from transcript 470930 (locus 470930) deri ved from phytozome v7.0 (chr-ID scaffold_1; pos 3267446 to 3268276 reverse strand)
atcagaaacaagagcattcttcttcatttacagaggtactcctgtagtttttatttaaaattgtgcatggttttttcctttcttctaacacaacttgtctaatcatttatcctaaatattcaaaacctatgttcttaatttactaactggatcttacatattttaataatttgttaggggttattatttgaaattaattgttattcataatgcatgagcatcattttcatgtctcaacagactcaacaccatatttgttctggtcttttcatattttaaatttacttacattcctcattttaatattatgattaatgcttatattatacttcaccttgggggagtgcatctaaaatattcctcattggctcattctattttctaatattgaaaacagagtatttttatgaggttcgtgcggacatttgcaatttagtaggagagtgattgtgttgtccccaagaccagttcaattctaagagcatttgttagtttaaggttctttggtcaaactgttgaaacaaattcttgagataaattataaacaattgagagaggagactcttttcttgaatagaattttatcatgattaatggtttctgcagatagatctaaaatgtagtaatcagaaaaatctattctcaaatttatgaagtatataatattgcttcttaattcttcctttttttttcttaatttttttttactattgggtgatcatatgtcaaactcagactaattccgacgttataggtattggtactcgaagtgttcttatggttttctaacaaattaaaaaaatatgtcttacaggtaaatttggtgtaaaa

SEQ ID NO: 39794 - DNA, 541 bp, Arabidopsis lyrata
  Intron number 2 from transcript 926666 (locus 926666) deri ved from phytozome v7.0 (chr-ID scaffold_2; pos 15654242 t o 15654782)
ctgcgtaagtacaaattatatatgagtatcaatttttaggacaaaaaaatatatgttggttaattatataaaaagctttgttggtataatcgatgcctcgtgtcctaatggatttgttacatttatgaaaacgcaccgatcgagaatgttgtgttttctttataattttgggggccatggaccttaatcttttactttcctttaatttttcacacatatcaacaaaaatatttttaagtaaattcttttcttcagtgaaatctgcagcattactttcttcttctttgtttccgaaaaaaccgaattgtttatttttataaatttaaaaaaaaaaaccccaaaaataaatgattattgtcacaaaactaaattctttcttcagaaaatctgcaacacttttttctttcatttttgttcagttttttttttttgtttttttggataaagtattttttaaagtaaaataagaacaattttttgactaaataatataaatgatttaaattgtcacaccaatattcaggttcgtgaagcgagcagg

SEQ ID NO: 39795 - DNA, 583 bp, Arabidopsis lyrata
  Intron number 3 from transcript 494886 (locus 494886) deri ved from phytozome v7.0 (chr-ID scaffold_8; pos 11523944 t o 11524526)
gaccgagcaacttgccaagtatatatttactttccaatataatcgataaactgaaaaataattcattcttttcgttttagtaaaaagttatgtggatctacacttttcgccaaccggtactagaaactattaactttttcaaaatttgttcgtaatatagtctatgggaaattatccatcaaaagctaacacctaattgtaaatacattaatttatttgtaagtaaaaaaaaaaaaaatcttacacgaaccatactatatactatacaatactggtacatatattttacgaacaaattattattaaataagattttggctgataggtttgatggtattaaggacaagtacaaaaaattgtagtttctaaattctaacaatgctttgataaaatgatagatcaacttttaaacaaaaaaaagtgatagatgaacaatagtttttctaaaaaaaattataataagaagaagaagtaagaattgagtttgaattgttttttttatataattaattattttaatggttagagctaatttagtttggaattgtatgtatgaacgatgaagagaaagcgaaattgcggc

SEQ ID NO: 39796 - DNA, 462 bp, Arabidopsis lyrata
  Intron number 3 from transcript 472083 (locus 472083) deri ved from phytozome v7.0 (chr-ID scaffold_1; pos 7817308 to 7817769)
tgttctcacaagccggcgtcaaagtcttactttaggtaatcataatccaataaaattaactaataaataaatgcttaatgttctagatcgtgtctcttagtcgttgacttgtacatggccatattttgttacaaacgttctttataagtatgtctttttcaatcttctttcttctttagctctgtttcttcatgaactgtaaaggtcttgtctgattcttctgtgaggactaaaaaggtttgtgctttctttgctgaatcttatctgactttgctctggtttgtgaaatgtctgttagtttttgttaaaatggatttgggttttatgtggcttctcttggtagcttttgacttctcttaatcttagactctcgaagtttccagaatctgcaatgttgaggggtttattggtaaagagaattttgagaagatcatcaaactttgttgatgttatttgcaggta

SEQ ID NO: 39797 - DNA, 491 bp, Arabidopsis lyrata
  Intron number 1 from transcript 939625 (locus 939625) deri ved from phytozome v7.0 (chr-ID scaffold_6; pos 658479 to 658969 reverse strand)
agtattacaatttgatcattgcgtgagtttttcttcctctcgttttttcatttttttctcttcaccatgatttatctcacactttaacatttctcttgttcaaaaaatgcactcatctcaaaatctacaaaattaaccgagatggaattgaggtactctttattttttttccttccatcatttacaaatgctattagtttttttttgtaataaacatttttataactgacactactattagtttttttttgtaataatgacttaaaatttatttatatttgtgtgcctgacaacacatagtaaaatcaaagtaaacaaatcaaatttgaagttatattgttataaactcttctaatagtataaaggtatgaatagagatcattatgatggattgattaatccagagtccagaccggtctgattaatgtatggtaggttttgtggtcttcactcctggttttgaggagtttagatttagattggcagcattg

SEQ ID NO: 39798 - DNA, 880 bp, Arabidopsis lyrata
  Intron number 3 from transcript 893976 (locus 893976) deri ved from phytozome v7.0 (chr-ID scaffold_6; pos 8656178 to 8657057)
attacgagaaggtaatctctaatctaactatatatatttgtattttattatgaattatttatatgattttctttttgtttttttgaaactaacattaattaatttactttctaaaatatactgggtctcttttgaatctcgagaaaaacagagttctctaaaacgagatcggtcgagattgcataggtatgtctatcgtgatgaaactgttaaatagatattgggcttttaagcaattctatcgctttaaaaaaattttgtaatcgtgagagaaaactttagggtttgattgtttcaattttgatttagaatacggaattttcgttttctttttctttttttaaatagtaaggtaaattctaaatatattacggatatttttatcaagaaaatttctaatttttaaaaattaaaatttaagaaataattatgacggtttgccctagatattaaggtataaatatagagcttcggccacaccattaaaactcatattcgttaacctaaatatatagttttgataatatatatattttgtattgttttggttctaatgaatcgaatttactatggaatgattatgattgttttcttcatgttgagatgacactgatttcatgatttaattttttatagattctgatttcttcaaattgaaatattaattatttttacgtttgtttgcaggttggatgtgtggaaagaacacatcgatgttgaaaacgttggaatgcaagctaacacagccaagatattggtcatgcaaagatctcttatgattttgtgactaagaatttaagtgtgacttgggcttatgagctaacaacctctgatcctaaggagagttcaagcctttcttacatcatcgacctcgcaaacc

SEQ ID NO: 39799 - DNA, 522 bp, Arabidopsis lyrata
  Intron number 3 from transcript 492472 (locus 492472) deri ved from phytozome v7.0 (chr-ID scaffold_7; pos 7851026 to 7851547 reverse strand)
ccggccaaaacggaaaccgcctctcttttcaccaggttccgtttcgttgctgatttggtttaggaaacgtgtgcttgaagaatttcatttcatcgttttcgtattggtttggatttctacgaagtagacgagtccttaattgtttgttattcagggtttggattaaattttgataacaggttgtttattgatgatgtttgattccagggttccggttaccatgtgactgatttttctttgtgtagacataatcctgaataaagtattgatgatgccatgtgaaaggaagagtaatttaatagtagtgttattctaagtgctatcatttttttatattgacaaggttgatctgtctggaattgggatgttcttggggagggctaatcagaatttttatcatttttttaacaatagcctgccattgcagaaatcagaatctgtggtcaattttagtctcttaaaactctatttttctgtgcacctgcaggtggatcttcgagacaggcctgcgcttgagaagat

SEQ ID NO: 39800 - DNA, 496 bp, Arabidopsis lyrata
  Intron number 1 from transcript 352148 (locus 352148) deri ved from phytozome v7.0 (chr-ID scaffold_6; pos 20542606 t o 20543101 reverse strand)
gaactacaaaaaggtttcagatctctcaaaatcaatattcctttcagattacttctcacccttattccccgatttctgagagcaaaaaccaatgatttctcaatttctcaatcaattgaacggtgtatttctcaatttctccctatctctactgagcctccgtcgtttgatttgaatcaaaggtaagcttttcaactatttttgattatgaaccaaaaaccatcactctaatcttctcccacctcatctcaatcaaagtatactccgttggagaattttgggctattatatgaaagctttttttcctttgatccaaagagcttacctttttatgtgattctaatctaagatattgccttttgcaaactttttagttcaatattcaatcgtgatcaatctgcatgtcacttattcatcaaaaaccatcattctaatcttcttccacttcatctcaattaaagtatcttatttctttttgtgtgtttgatttgcagat

SEQ ID NO: 39801 - DNA, 458 bp, Arabidopsis lyrata
  Intron number 3 from transcript 325618 (locus 325618) deri ved from phytozome v7.0 (chr-ID scaffold_6; pos 4312678 to 4313135 reverse strand)
tagattggtagatttacattgagaaacatgtttattaaaaagtatggacgtttttttctatgcattcacggtttgcaggtgaaaagtccagagatggggcttccatttcaaagtaggggagtaggtataactgtgattgcttttgattaatcaatctcgtcatatataatttaatttctagtgtaggccttcataagcaaagagttttacggttgttaatacagttttcatgtgtttgttacaatgctagagtagaattccgtttctcttgtgtttgtcatgtttggagtacaataaacttctgtcatctgcacatagcaacaagctgaagtctcctactttgtcggtagaaattgtgggttttgagaatggtgtccatgcatatggcttgaaaagttgaaatcaatgtccgttctcttgtgatatagaagattatcttccatgtaatttctgcaggt

SEQ ID NO: 39802 - DNA, 552 bp, Arabidopsis lyrata
  Intron number 1 from transcript 896918 (locus 896918) deri ved from phytozome v7.0 (chr-ID scaffold_5; pos 5848813 to 5849364 reverse strand)
gagaaaaccattgtcgtgagaagaggtatgattgtgataccataagacaaacttggattatcatatatggaaaagaaaagtgagaaaacagtttttacatgacctctttatggtaatgtttggttcatatgtagctgaaacttgatggcgaggtttctgttattagtttcttgaggtttaatggtgggatatagatttaaacgaacttttagaagaaagcttttacaacatgttcgagaagatttcttttaaagtttcagatctgaccagtaaagtggagacatgaacatccaaacatactcgaaataaatcaaaatttggtaggagtattctggagacatggaactaagctttcgtagaaaagcatcaaatctcgagttcaaaaggtcaaacgaacgatattgttttgggtagttaattcataggcttttggagatatgtttagttaatattagtaagtttaattttttgctctattttttaaccacataataacgaatgttttacatataagaagatcgagagggtgaggaagaaagtgaggaaagtaaa

SEQ ID NO: 39803 - DNA, 726 bp, Arabidopsis lyrata
  Intron number 2 from transcript 943255 (locus 943255) deri ved from phytozome v7.0 (chr-ID scaffold_6; pos 22549300 t o 22550025)
ctattcccggcgccattaaccgaaccgtaaacctaatattctcttttttctccttttttttttttgaggattgaatttttattataacttgggaagatcttctaccgaagcctaaaccaatctctaaaaaaaaaaaaaactaggcattcttgccatttaaaacgtttacaatagcgaaatgggaaaagactgattttataatcattttacgcatatttaaaacacacaaaataataaagaaatgtggagttaggtcgagaaaatgtaatcaaattctaacaagtactcgtctaaccagggcatctaaccaagcttataatttgtataattcgtatggggctgcatgtttgagacagacgaatgaccatatgtttttagtctataaaaagttcgaacagaccaaaaaataagacataatagctaaatcgtgagttagagtctagtaatattatcatgttttgtttaacagtgaaaataaaaatttgcatgttgtgaaagtaccatatcttttgattttaaagattatatatatatcacaaaaatgacatgcattttaagtatatattaagataacaaatattgttttttagacacatgcaagatttgagttgactgaatgataacacaacgacatcactacactaaataactactttacaaaatcatagctaaatgacatatactttttaaacaatatttttcaggaggagagagctggattaagat

SEQ ID NO: 39804 - DNA, 977 bp, Arabidopsis lyrata
  Intron number 2 from transcript 934547 (locus 934547) deri ved from phytozome v7.0 (chr-ID scaffold_4; pos 18556424 t o 18557400 reverse strand)
cctccggtgtcgccggattcgtcgccgcttactgggtacgtttatctgaaattttcaaattcagagtttctttagttgttagaggttagtttatttagttagggaaactaagcttggatttaaattctcaggctattatttgatatttggttattattactagaaataaaataagaagattgaagaataagatggtttttatatattgatgtctgttgaaaatattggaattaaattaatgtacggtagtcggtagatgacatagtctcggaaaaagttccaagtaataattcgatgtagactggtctttaattgccaagttttgttttgctttttcgatatgattacgtatttaaggcccatagtttatatagataagtaataagttcgatgattgattggtccactaacaaaaggtaaataatttccaagtagtagaaaaattaaatcaaatcgatttaggatttgacaacacgatcttgaggtatttgtataagaaacttagataattaattagagaagagtaatcaatcatctttgaataagcatctagagaataaaataacgcgggagaaacgcttcaatattgatctcactcaactgaaaatatcaatttttgcctaatagtaaattcacaaaataattgaggttggttcagtttttacattttatatcttataaatataaactaattaatttgtttttcttgtattctgcgttttgtcgcacataagcaaaatggtaaaagtcaagtcaattccactgacgacgacataatattccacataataaaaatataaaatcttgcagaagaaaatgaaactaaaaatggttagttaaaaagcaaacactagctagttgaaattaagagtcgtaccatgttgatatcgatttgattattacttagattaaatacgatttgtggacatgatcttattataggtaggaccaaggcctaaggctgacagagaaagatt

SEQ ID NO: 39805 - DNA, 506 bp, Arabidopsis lyrata
  Intron number 2 from transcript 488386 (locus 488386) deri ved from phytozome v7.0 (chr-ID scaffold_6; pos 6279198 to 6279703 reverse strand)
ttgggtgagttggaaacttatttctaggtttctattgctgagaatcatgtagtcttggggttctttagttattgagacagtttggattgtaagaattattgtatagctttgctcatagtagagagacttgatcaaaaaaggaaggaagcagatatatttgacttatatgattgcaatgttaggttgtatacatattttaagcatgattatataaatccagcatagttagatgatcagtggaggcaaaaacaacagaaatattagtaagctctatgttaagttagaatattggggatgaaatctattattttgagcattttttctggtctgtactgaagaatcttgattgttcattgacatttgacaaggattaattgtgcgaacataagggttctcctgatccacctcggaggatattctctacctgttatggaaatgctaatatatgtctatggtttttgtgaataccaggcagcagtgtttctctgaagcatcggaacgtcgtc

SEQ ID NO: 39806 - DNA, 364 bp, Arabidopsis lyrata
  Intron number 2 from transcript 950376 (locus 950376) deri ved from phytozome v7.0 (chr-ID scaffold_8; pos 17854928 t o 17855291)
aagaagttgcaatcaagctcgtgagttcctgctacgagctttgttttttgtgttgttagcgttatgtgaagattttattgcagattgagacaatgtagtttgtttactttaaaaattaatgatggaataacttctgaagttagatttgagcttaaaaacatttattgagttacttgaactagatcaacattgatgataatttggtacaaaagtccagtcttcacttgttcattaaagcttctgtcatatttatggacaatgtatatcgatttagtatggttcttttcttttccaggttgatttgttattgctacaagacttttggtggaatactgagagtagtttctttattttttgcaggaaa

SEQ ID NO: 39807 - DNA, 835 bp, Arabidopsis lyrata
  Intron number 1 from transcript 492686 (locus 492686) deri ved from phytozome v7.0 (chr-ID scaffold_7; pos 9028622 to 9029456)
gagcaatttaggattctcagacagaaaggcactgagtaagtgttttcttggctcagttttggtttggttttgggagttttgagtgttctgtttcaggatagtgttcttgcatgtgttgaatttcgatttttgattaggtatttagcttgataaaatttgagagtttgatgattataaatgtataacagagaatgctttctgggttttattgaagtttacttggtgattggtgttccagtgatttgcatgcgagagtcttgtcttagattcttctcattatgcacaatattttgctatatagtgatttgatacattgagcatgaattgctactaatcctctcatgaaaattgagttttgtggaataaatgttgttacctgatccttagattagcaattaggagacacattttctgaaagattagagtgtttaacagatttttcaaagtttttcacttttttcttctgatattaaaactctgatgctgttgtatctggttgtctctcagttgctatgaaccttagttttaggattgttctcaggaaggattgctctgtgtgacatgaaaatactcgttagtcttgtctcttaacgtggtctttcttggttttgtaacaataacaacgagaagccaaagaaatgcaatctttttctgtccgtgaggatcccaccaaagtttaagtagagtcttctctgaggttaaaggatcaatgaatattatacagtgtgaagtagagctaaggcaaggtcccaagttctgtaaatctattattattctaatggtctacatacgtgatgcagatatccaggaacaggagaatacaacaaactattcg

SEQ ID NO: 39808 - DNA, 551 bp, Arabidopsis lyrata
  Intron number 3 from transcript 481281 (locus 481281) deri ved from phytozome v7.0 (chr-ID scaffold_4; pos 2665098 to 2665648 reverse strand)
aagctcttcaagaactcgttcctaacggcaataaggtaatttttttatttaattcattttcagtttagtttccaaatggatcattaagaaaataaatgtcactttccatcattttgttcatcatccactctggatttgtgcgatccataattccatctaattttgtattgattatttacaatttaaactccattgtctctttatagttctagtcttctatacctaagattgaatcagtaaaaacaaaataaataatgaaaataagtgtcatcaggaactttcttggagctgtcaactagaactttcaggagttaacaagtaaatttatattttttgttttactcaaataattggtggttgtgtagtctatatatataggagtagctagtagtatatatcaatcaaatgattaaacactgattagctaattaattaggctacaataataaagttaactaatgcagtaattaatgagttaggatctcagttctgacagatttttttttttgtattttatttaaataataatggaccagacagacaaggcatcg

SEQ ID NO: 39809 - DNA, 883 bp, Arabidopsis lyrata
  Intron number 1 from transcript 318465 (locus 318465) deri ved from phytozome v7.0 (chr-ID scaffold_3; pos 7254398 to 7255280)
cgtaaactttgttcttgatattactctgtttgaaaagtggaatctttttgttctttgtgttcaaaaatgggtttcaagtttacggtttcatcttttggttctctttgttttaaaggttgcatctgtttttcctctgaatcttttacgttctctttctttgttgtttaatgggtttcaagggttgaatctttaggttctctgtgtttgaaaagttaaaatcttgttagctttgttaaatggtagaatcttttggttttctttgttaaatgaaaggttatatctgttaaaatctctgaatctttatgttctccatgtctgaaacgttgaatctgttgtttctctctgtgttttgtgggtctcaagggctgaatctttgagttcactgtgttttaaaagttaaatcttgttagctttgtatggtagaatcttctagttgtctttgttctacgtgtatgaaacgttgagtctgttctttctctgattttttatgggcctcaactgttaaatctttaggttctctgtgctttaagagtttaatcttgctagctttgtttagaaggtagaatcatttggttgtatgtgtttaatgaaaggttgaatctttccactgctttccatattaaggaagtgtcttcttttgttcactcttttcttctctgtccctcaagaacataaagtttgttgcttctctgtctctatggccagatctttctctttgcttttatcgatttcttgatggtaggtttgatgactagaggtgaaagattgaaacttttgctttcaagtgcttgagacataaagtttttttaactatttgttaacactcttcattgttttgttcaaaccagagagcgttttcttacagcttcataagtagactctc

SEQ ID NO: 39810 - DNA, 598 bp, Arabidopsis lyrata
  Intron number 2 from transcript 472998 (locus 472998) deri ved from phytozome v7.0 (chr-ID scaffold_1; pos 12277220 t o 12277817)
tcgccggcgaagagcatactctcaagttcagccaggtatctctctttctcctagatttccgattatctatctttgtttgatttgcctgtgcttgttgtgattttagtaattagatcgctagggttttaaattggttgatagatctgtaaatctggatattcccaagtctgtacttctcctgttgggacaaggctggcaaattcgttgcgacttgttatgtgattcgtttgatctccattgatctcggatgttctgactcgtgtatgtctgcgtcattgtgtttaaagtatagccgattcaacaaagaaattgtggtttcatttgattaattttgttgattagattgaagagaattgtttcccctcaccgtaactgatggattttcttgttctttcttgtctatgaatgagcttgtttcggcatgttcttgtttcagtcatttagtttcttgatctttatatacaaaagctggttgtgtcaatgttatgtattgtttgctttggtatctgtgatcttgtttttttatttgtatggtttctttgatcttgttctaaacacaagtacaaaacgcttttttttttttcattgtgtgctacag

SEQ ID NO: 39811 - DNA, 415 bp, Arabidopsis lyrata
  Intron number 1 from transcript 354340 (locus 354340) deri ved from phytozome v7.0 (chr-ID scaffold_7; pos 7658059 to 7658473 reverse strand)
atgtgatttctctaacgacttgttttttccctctctgtactaaacgatcgtgatttcttctcttaatgcgatgcgtaataggtcaatttctctggatttcttctacttttcgtagcgatggtaaattctactgtgtttgctctgaatctcttaatgctttgcataatttggtcatttttctttgtttcttctaatccatggtgatgcacgagtctaaatttatcttgcgtttgatttttttccttctcttcgaagagatggtgaattgtgttttgattgctctgtttctcttaatgctttgcataatttgttgatatttcctggttttgcttctaatcgatggttatttctagtacctttcgttttctctttgggtgtttgatttttttcctcttctttaggctgtttgcttctt

SEQ ID NO: 39812 - DNA, 390 bp, Arabidopsis lyrata
  Intron number 1 from transcript 897921 (locus 897921) deri ved from phytozome v7.0 (chr-ID scaffold_5; pos 15078059 t o 15078448)
gttcgttcgtaacttttgattttgtctttctttttatttgcagcgtttagcaatttcttaggatctctagttatcaattttgcatttatgggtttttaagatctgatttgtattttagagaatgttaggatgaagaaattagggttctatgattgaagatattaggtcgaaaaaagtgatctattttcttacacttggttagattcccttagaaacccttgtcgtgttagagctgagattttgtttgtaagtaatataagctgtttttatgtttggttttttttttttttttttttggacaaacgtcttatgtttgatacgttgaagaaattggaatttaatgttattactgcagtcaagtttcaacagaggtgtatcgaggaaagagaa

SEQ ID NO: 39813 - DNA, 1009 bp, Arabidopsis lyrata
  Intron number 1 from transcript 907442 (locus 907442) deri ved from phytozome v7.0 (chr-ID scaffold_2; pos 3231487 to 3232495)
gagatttggttcgtgatggtaaggagaaacgaaaagggcagttttaagttggtgtttttggaggaggattccggtcatatatggccaagtgagaactaataattagtgaatcgaggtagagcttgtgtcggaaaagctacaggaactgacagtgtttcaatcgaagttgagcttgaggagttattcacgttacttcatgcgcaagaatgaacagaaacagtctgattatgtcccaagtctaagaacccagaattaatagtttgcatctagaggtttgtgaggcgatttcccatgaacaaataaagatcttgctgcaagtacatcagtgttaattgagtcaattctggcccaaagaaaaatatgcttttggagagaatatctttatgatcttttatcataaattatactatctctgttcttaaaagaatgatgttttgagttttacacacaaattaagaaaaaataactttatattctttaattattattttcgtagtttaataatattagtttcacttctctcatttctctattggtcacaaacaaaaataataataatattcttacagaacatcaaacttggtggaacaagtaaaaaatccaaaacatcaaataaataggaatagagggagtattatttttgattactttttgatgtttgattataaagaaaaagaaaatatttttaatactttggcattttcagtttttttttttaatgggccttttatatctaatttgcgggttatatatttttttttgaaacaaacatgagctttttttgtgtgtgtatttttcataagaaaataaaagtattaatgagtcgtcgcaccgctgcttacccctaagcttcatccgcaattcacagtggaagtttcctcatgagtctctcaaaaaagtgaagagagtctctcgacgtgtagctatgaacacttttatgacatatgtttgttgtgaactaaaatgttttgcagattgcgttttctagagacgatatcattcctttaac

SEQ ID NO: 39814 - DNA, 481 bp, Arabidopsis lyrata
  Intron number 2 from transcript 354063 (locus 354063) deri ved from phytozome v7.0 (chr-ID scaffold_7; pos 6239404 to 6239884 reverse strand)
ggtgacgggaaactagctgctcgtgctcgtagcctgtaagcctcttcgaaactctgttttcttctccataatcattgccttgaagctgttaattttggtctcaagtttccaactatccattgtgaattgctctgtttttgtcctatgaggttgccactgtcatattactgtaatggtttacaagttcaagtttccacatttggtctagcacttaggagacacttatgcaaattgaatgagagaatagtttctcttgtaaactggtttatcatttacttacgttaatgtgtactaaggcacggaatgcttaaatttggtatctttagaacatatattatgccattttgatcggagaacaagctacattttgacttttgtttattgatgttttttttttggatctccttactttctgcttttctttaattctgatgatatttcctgttttctttttaggataagcacgaggaaaggaaaaccg

SEQ ID NO: 39815 - DNA, 746 bp, Arabidopsis lyrata
  Intron number 3 from transcript 482467 (locus 482467) deri ved from phytozome v7.0 (chr-ID scaffold_4; pos 16628740 t o 16629485)
ggaaattgggtgtggttcttttatctggtggacaggtactttaattattgatgcagttttttcttttattggggtattgtgttgctttggaaacagaacactgatctggctctgagtccttttcttggattagttctgtgtagctgctaaagatgtgttgagaaaatgtttgatgattctcggattatggttggaattggggtgtgattgctgaaatgatgttggaataatgcgtgatacctaactcaaataatgcatttatagatgtctgttacttaagtaattgctaagtctgaaaagttcttattttgataagtgtggtcataaaggcttaatatgaataatcatgactactgtaaaaatctaactcgtcggtgctttcttctagatagtgaccaccttattatgagaaagaatggttatcacgtgacctgaaagatgctttataggatcttgtaatcttcttttcccttttcactttgtcttcatttacttcagcatttaataccttgagaatattttttgtggatatgtgtgggagtctgggagtgaattatcacctgcaactgtatgatagagttagtcaattaaacaatattaagatgggaataactactttcaaatcagatattgatccatactgtagtgtttgttagtatattctctgaaaataaaactcatgagattatctggttacaaaaataattgcagggaacgagacttggaagttcagatccaaaagggtg

SEQ ID NO: 39816 - DNA, 556 bp, Arabidopsis lyrata
  Intron number 1 from transcript 928234 (locus 928234) deri ved from phytozome v7.0 (chr-ID scaffold_3; pos 2434067 to 2434622)
ttcgttctttgactccttgtttctacatcaaaagggtatttcatatttatctattcgatcccttcatggtcaataattatatctacttcggatcatttcacaatcctaattaatttaatgatcggtgtataattaacaagagattggtgtgttttttgtaatgatcggtgctttccttgttcaagtaatttcgcaggggttgattcgagatttattataatttatttttacagacaattgaaccttctcaaattgcaggaaccaaaaatcttagatacttattggatcatgcatgatcatctttctaatattggatattctaacttactatttttggaagaagagaaaatgttttgccatacatatttaatcctatattctcactgtcggtcttccttgaatggaaatgttatcaatagacaatatatatttctctttgttaacttctttaagcaaattattcgcatgcactaatctgttcaataaacatggtcttgtttttgatgattgatcggtattagggagatcaagcttcgatcatcggaggagtgatcga

SEQ ID NO: 39817 - DNA, 418 bp, Arabidopsis lyrata
  Intron number 2 from transcript 916833 (locus 916833) deri ved from phytozome v7.0 (chr-ID scaffold_8; pos 14927098 t o 14927515 reverse strand)
cgctacgagccgtcgtacaagttctcttcttcgagcagttacagctccggcaatgctccctggctttattttgagaaataaagagaagagtcaaaacgacgtcgttttaactctcgggtcatgagtaatcaaacgggtaatcctaatcgcggtagaataaacgcggatttgtggttaaacccggtttaatggtcggttcgattggaggtgtatttatcaagataaatccgaaagtatgtgatgtttaattgagaaaattgttagttgttggtggttttttaagagcgaaaaagtatagggggattccttgagtttgcgaatagttaagggctgaaaaatcagccaacccattccattataattatttttagcgttttatatatgtgtttacatgtatatttttttggaacacagctgc

SEQ ID NO: 39818 - DNA, 823 bp, Arabidopsis lyrata
  Intron number 1 from transcript 478296 (locus 478296) deri ved from phytozome v7.0 (chr-ID scaffold_3; pos 3851916 to 3852738 reverse strand)
gccgaagaatttgatgtaagttctgtcccctctctgaaaatctctttgtctacatgtgtttccttgtctgagatcaaatttctcgttactcacgatgaatcgctagatctgcgtttgactctgtctcaattctgctttcatataatcgtatgctactctttcacgcgtgtctcgtaatcagctgtgttgctttgagtctgatgttctgattttgatgcatgatgttccggttttagatttgagattgcgagcttttttgtttatgttcgagcattttggtcaatacgtgtatgattgttgtaacgctgcttaacaatgatcaaattctctgaaatttagtatgcgttaggacatagcacaattggatcggtaaagttttgttttttctttagagtttcatttcatgccttttgagttattgttgaaaactttggtcactgaacatgaacttcatctcttctcattttgatcaagcttgccatggaatgtccatttttggttgtctcagaatatggttttacatttccagattgtataagtctagatactataagtctataactcgcgattaaacatgtattggtttcatgattttcgtgcttatcagactcttggctgtataagaatataacttttttttcggcattatattttcttattggttagaggtgaattgccaataacattgagaagctagttaagataccttgtgttctgtcctctcaatcttcttgttacttcttgcatctagatttcattctaagttactaaaccaaaacaatgaacagggaaaaatcgaaagcaaagggctaaacccgggact

SEQ ID NO: 39819 - DNA, 653 bp, Arabidopsis lyrata
  Intron number 1 from transcript 478718 (locus 478718) deri ved from phytozome v7.0 (chr-ID scaffold_3; pos 5401155 to 5401807 reverse strand)
cgagctgttctcggactaaccagccaaactctgaagtgagttttttattttttctcatttttgtgtctcttgggttaggactgtggaagaaaaagaacccttctttgtttcgtttctggggttttctatttgtctcgtgtcgatggaaattgaaaggtgtttcttgttctgtgattgtaggatttatcagtggtatatgcaatttttgtttgtatctcgctcgaagattggttagggttagagatttaagggctgaggtgttgatatattgtttgctgagattgaagcaaaagaattagagattgctctcagtgaaatgttgaaaatggtcaattagggtttaatgtcaattagttgtaattcaccaaacctttcactgtgtttcgtttatgcaggaagtgcgttatgtcatgtgtatcgtctgttgaattaggtttatcgtattctttacctgtccatactgtgcataaggaaatgaaatcaaactggatttagtttttactaatctcgatactgtatatctatgaacgagtttaggcttgttatgtgttgttttgtctcttgtttccattaattgatcactgaatgatagtgaaacattttctgtctctgtaaaagggttcctactgtgggagggaacactcttgatctgc

SEQ ID NO: 39820 - DNA, 510 bp, Arabidopsis lyrata
  Intron number 1 from transcript 485260 (locus 485260) deri ved from phytozome v7.0 (chr-ID scaffold_5; pos 14137264 t o 14137773 reverse strand)
ttcatcgaactgctcgcgctgcctcctggagttagatcttcttcttcttcttcgctttctcagtttctaaattagttctttgtggtgaattatggtttttggatgtatagatctgtttgttgaattataaaacctagaattagaaccgaaatttcgagtggaattttctgagagaattctcgaaatttcaagaggaagataaaccattgagattaacattttcgtgatcggtaatttaagagtttggaagaagtacacaaggagatgatgatgaatatgatttagttataatgtacattgtacaaagcactgtaaacatatgttggtttgcttgcccaatatgttttagagatgaaacctttttaatttgattgtggaagcaggacactgggatgagtttagctgctatttattgcattttttattttatttttcttgaccattgccaaagatgttaagacttgtttacctgcagcgcacaagaaacttgttggtggtagctttaaaaaa

SEQ ID NO: 39821 - DNA, 423 bp, Arabidopsis lyrata
  Intron number 2 from transcript 477841 (locus 477841) deri ved from phytozome v7.0 (chr-ID scaffold_3; pos 2088136 to 2088558)
cccagtagggctggtgatgtgagttatcatcttaatctcaaacgaattttatcttaaggttctattctagttagttggattagcttttccgtggagattagtggatcttagaaataagagatttttaattttactaggagttcttaaattttgttgtttgagttgagaaattttgagctttgagtgtcttggtcgtgtgtctttttctttgctagagagttttcataaacttgctactgatatctacattcactactgttgatcaaattggcaatcaacatatgtcctgcatctccttttcatgttttttgaagatgttttgggggataccatttagtgtgtgtttattccctgcgagatgtagtaatactgtttttttgcatctcaggtgattgtgtcatcttacagtgaaattactgaaaa

SEQ ID NO: 39822 - DNA, 753 bp, Arabidopsis lyrata
  Intron number 1 from transcript 483923 (locus 483923) deri ved from phytozome v7.0 (chr-ID scaffold_4; pos 23065427 t o 23066179)
ccggtaataacattttacacatttattaacaatatcatgcagcactaacttaatttaagctataacaatgtatttatgagaggcagagtgaactaatcgtggttcttgtcgtaatcttcatgaaacatggattcttagtcagttttttttttttaataataaattttagtaaggttagaatatatagaagttaaattgcaagcctaattaatatttgttaccattttatttcaggtctttggtttttttttttttttttttgttctcacagtcacagtcacggtgggttgtgaaatgtacgtatatataaaatgctgccaagtgcatgctttaaagggtagggttatgttatagacttatagtatacggacaaatgtttaaaatgaaatataaacagatgcgtatttatgtatttttgtccgttgcatttcatttcaagaatcagatcaaaaccatatgagttgtttgatttgatttctaaccgctcttttactacaaggttaattaatgcagtagttgagaatttttttgtagttgtgatatatgcataagatataccaatacaatgatcaaaatgctaagaatctcgtgagcagtcacacatcagacctgagtttaaattaataaataccttaaaactatataaacagatattcttcttacgtctgattctatatctaaaatatgacgtgtattattatattgttttctggaaaaggattaaaaaggtgtggaaagagctgtaggttgaga

SEQ ID NO: 39823 - DNA, 163 bp, Arabidopsis lyrata
  Intron number 1 from transcript 475213 (locus 475213) deri ved from phytozome v7.0 (chr-ID scaffold_2; pos 2662861 to 2663023)
gaggtaacctggctaacattatcacttacaaggaaacatatttatactaatttcacttctttttttgttgataaattcacattttttcttataaatctttttggccgatgtgggcacattttgatttttctttgctgataaatataataaatataggtcctgg

SEQ ID NO: 39824 - DNA, 470 bp, Arabidopsis lyrata
  Intron number 1 from transcript 483936 (locus 483936) deri ved from phytozome v7.0 (chr-ID scaffold_4; pos 23108700 t o 23109169)
gggtgtctcttgcccttttctccaaaggtataaacaaaagttatccaacatgcacgtaattcccatttttcgttcatatatgataatttaaatatacacgtaatcgtctataatgttgcacgaaatcttcttcatttaattcgctcgctttttattattttgtactactcttgctttcgtgaagaatgtatcattttgttataggaaaaatctttgacccacatgacttgtggcgtaattcgtctgtggatgtgtgtcagtttgtcaccatccgattcaaattaaatatgcctaatacatgttagttgacaaaaaagaatcgttagaaataatattagaaataacaaccacaaattactaggagaaatatgtgttgtatattagtatatatataaactaaaatatgaaaatgcattttcgcatttgactttgtaggttgggtgccaagaaggcaaagatcgagaccgatt

SEQ ID NO: 39825 - DNA, 682 bp, Arabidopsis lyrata
  Intron number 2 from transcript 322721 (locus 322721) deri ved from phytozome v7.0 (chr-ID scaffold_5; pos 2449899 to 2450580)
ggaaccaatccgacattgttgtttctaatagacaggtaagcttttttaattatgggttaattcttgatatatattttttaatcaataatgtgtttgaatttacaatttgaaagttatttgataaataaatcgacacatatgtttttggaaaaacataaacataatacttttttacttttaaaagaaaagataaaatatttgcaaaagttctgactgcgaaacttcgttttcttttgaatctattcaattgttttggacgcagtttgtgcgtttgcgtttacatgaaaaaaaaaatcatgtttttgatatagaaacaaatttcagttttgattttttttttttttgttaaagaatttcagttttgaattattagctactatgcattgatttttttctctgtttacatttgtgtttgaattgcgtttaattacatttactctatattttttccaaaccagcctttaacgttgttgattgttaacgtgaagactaaacgcataagcttctgttaattactttatgcgtttgtgtttgtaacttacaaaaatacttcacaaatagattaaatttttttttttatcgtgcaaacaaaaaaaaaatttgtgggagtttataatttaagtttctaatagcatttgctttttcaggattgctcacaagaaaagacagagacgctggtaga

SEQ ID NO: 39826 - DNA, 581 bp, Arabidopsis lyrata
  Intron number 3 from transcript 489264 (locus 489264) deri ved from phytozome v7.0 (chr-ID scaffold_6; pos 10349553 t o 10350133 reverse strand)
actactcttctaggtatctcatagtcttctcttcttcttctttttttctttttttatttcctttagagacaagcatcttttttatcagttcttcaagggaaacgtaatcccaatgctattactaaaacttgatttgtttgtttacgtttatgtttatattactaaaataactttttgaaaaatcaatccacatacgtattttaatcaaaatcatttagaagttataaaagtatacatcaaatgaactgttaccgtcactttttggccgctgcgttggaatttgcaaaaatattttatgaaaatctgaaaatgtttaatatttctataagaaaaaaaaaatgagattgtaatttaagggtctagtagctttgtttagttactataaacaattaattctcattatatgcaaaacttaaatactactataaagtttacaagacagtttcacatcctagaagattatccactagtaatccagaaagaaagatatagtaatatacttaattaaagtggagctaaataagtactattgggtgaatatcaacaagctctaactgtgtaatgaaacaggagcacattca

SEQ ID NO: 39827 - DNA, 476 bp, Arabidopsis lyrata
  Intron number 2 from transcript 482373 (locus 482373) deri ved from phytozome v7.0 (chr-ID scaffold_4; pos 16262969 t o 16263444 reverse strand)
gtgatcgtggtactgtctttgttactgtttttggtttcgcttagaagttgtagttgctggatcgatgtagtttcccttctcaagatatggtttttggtgattttatttgctgtttagggattttatgtctcaaatgggtttctggtgttaggtaaagtttcttcttttggtattatacaagacgaagttaatgatgctttgttcctactttatagagaaatttttggtgggtggggatgagtctgatggtgtattgagatttagccaatctttgtttaagtattgctccaaagtttgtgactttactttaatcacaattcacatccttcacttttgatatgactcgtgtttggttgtctgtgtatttcttctggatacttgcaacaagtgctggatgttttttcctatcttttcccagtaatcttccgaagagaaagtcttttattgatctataagtttactgaatatctcaggac

SEQ ID NO: 39828 - DNA, 798 bp, Arabidopsis lyrata
  Intron number 2 from transcript 489185 (locus 489185) deri ved from phytozome v7.0 (chr-ID scaffold_6; pos 9930409 to 9931206)
ggaaagctctcagagttctgctccgaacaggacaggtgaactttcttcctcttcttcttctttctcaaattagggtttcagagatctatacatacatgtgtatgtatccatctaattaatgaggaaatgagctagatatataactcgtgcttgtgaacagacagttttcatcattagtttctgaagtagcaggtgtcatgactcatgagtctggtttagattttaatttggcccagaagttaagaatctttgatccaatatttttgtttcttgcagtatttaatttgtatatatgtgctcatgcatgtatcttatcatatttaatacgtatgggtcaaaattatatattttttacaacggcctaacaaagatttttctgcaaagctttgacatttcttgatcaatatttttataatcagatcccaatatgtgtagatgtcatatttacgacatatacatacctatatatatatatatgtataagtctatatgtcgttaatgattcaatttagtacaattataaaggtatgcaaattagaagtgttaatctaagtcatgaagcatgaagaaatatttatttacatatatccataataggagaagaagggtgggctataatagtttgagctcagcttacataaaacaaagggtaaaacaccttttaattatgttttctccaaaccacttttatggccaaaatattatatttgttatttgagtctagtgctcctccaattactattgaagtcttgacgtgtaacattaaagatgctaatttgatcacattttatatttagg

SEQ ID NO: 39829 - DNA, 429 bp, Arabidopsis lyrata
  Intron number 1 from transcript 925154 (locus 925154) deri ved from phytozome v7.0 (chr-ID scaffold_2; pos 4059498 to 4059926)
cctcggtcagtatttctcccaataatatatgattttgcattatccacctgatgatccttataattgaaatatcatttatttatattttcagcttgctgctaggattgctgtctcaaatcttcacaagaacactaagaaatcattttctgagacgtacgtgagagtcatgctcaggtttttgtggtttgatttgagtgtatcattgatttgtgtttatattttcatggtttcagacatgtctggactcaagtcttctctaatagacgagcatgtatctagaatagttatggaggtaatgtaattatatatatatatatatatatatatatatatatgtttcttggtgtgaatacaatgtatcgctgaatcgcggtgttttcctttggtttcaatctcagaaatctactcgtctggacagggaaatcgtat

SEQ ID NO: 39830 - DNA, 776 bp, Arabidopsis lyrata
  Intron number 1 from transcript 951147 (locus 951147) deri ved from phytozome v7.0 (chr-ID scaffold_8; pos 20965128 t o 20965903 reverse strand)
gtttcttgtcttctaccgttgtctcttccaatccggtaatttgactcactcattaccgccttttttgttatgtagttgtaaggtctactttggattccgaattttgtatttttttgggttttaccaagtgattggcttttatatgcttcttcaatttttgttccaaattaaaaactcattggtcgtccagacaacacgctcaatcagatcttgctcactcgattgtagttccagatcgtttggtttgggtagaatttaatcagataattcttgtctgaattgttattgtaattcttgccaataggctcaaagtttctgcttgtactttggattttaccatttccatgtatatatatatgcttgaagctttgagatttgtgattgaattgtgtaatgataagtacaagagttcacttactaatctggcctaatactatactgcttcaattcatgacaatcaatcttgttaattactgctttgaatcgttgtgttattgtcaaaagttggactcagaaatgcatagttcttatgtgcgatcatattggacattgactactcttgttttacaatttcttttcttacaaaatccttcacttctagttttcctgtgaatgtagttacttggcaggatctcaaattccagagtgtttctttccttgaagttatttcatctatttttgtagtaatagcttcgttctttaaagcttaatcatacatttagtaactttcttttgtctaagatttcagggaagcttgcgggtctacatttgtgagc

SEQ ID NO: 39831 - DNA, 1007 bp, Arabidopsis lyrata
  Intron number 2 from transcript 477694 (locus 477694) deri ved from phytozome v7.0 (chr-ID scaffold_3; pos 1473795 to 1474801 reverse strand)
ttctcgcttccatctcctcttcctagttggccacaaggtatataaaaactttcttttactggaaattgcaaattatctataattatgaaattgaagttgcaagattctgtttaaggaactctcatttaggcaaatttttcgtattattgtagtaagtgtgtcaagaattgcaaaaaaattgttcatgtagcatgtaaacttaggaagaacaatttgaaacattggataaatgaaggagaagaatcaagattagaactagaattttttcagctaggtttggtctaatcaattaattgagtttggttagttataatatcgatattttatctttcatgcgtacataagataaggttaattatcatcgatccttcctttgttaatgacttaatcttatctaattttgtggcttgattttatataaaatttgaaagaactgaggaagatgctttggaatattctgcatgggttccgttgtcttgttctttcttctttggttgactctgattcaagatttttgtcttagaacagtatacacaagttcatttcaagcctagtactttctctcacatgaaactttttttaaaaatgtcaatttttgctataattagatttgattggtttcgtgaatttttcttggctcaacaatgtaagcaataataatgttgtctgtctgatcatagaaaaaatggctcttatcattaaatgttatgaagggtagatggatatggtatcatgttatttaatatgcttctatgggacaaaataagttttgtttgttgaaaataaatctcggtattggtaatgaatttgaagctgatatatattcgtacttttgggtatttgttaaagaatacattaagctaagcaccttctcgttctactgttttaaaccatcaatttttctatctacaagtgttgttagttctttgatactgaaagtgatgtatcatctgttattgtcaatctctttgcaggtaaaggttttgccacgggaagaataaatttag

SEQ ID NO: 39832 - DNA, 627 bp, Arabidopsis lyrata
  Intron number 2 from transcript 479954 (locus 479954) deri ved from phytozome v7.0 (chr-ID scaffold_3; pos 11761690 t o 11762316 reverse strand)
gaagaaagtcgagaagcatatttctaaattagacggtaacgccaaatcttctttaattctttaggcttttcttttagggaaatacaattacatacaagtcatgaaatcccttcaataattgcgtctagtttatttttttctttgtcgtcaatatttataattatttaaaccaaaatgggtccgtattttctgtacatgtagaattccaaaaagtgaagctgaattgttgaaaccatacaataaaagctgaaccaaacaaaaccaagaaaaaatcaaatcaaaactccgagaaaaaataaaaaaataatgtagcttatttattgatatttcatatggttaaaattagggaagaaaaagattagctaactctttaattatcaataaaaagaaaaatctagctaactcttaatcacaatcatttgttaaatgaaaaaaacaaaaattaagaaatagttttgtaagaaatcattgcaaactacaatagaacagaaattcaaagatagcagagttctgacattaaagaacttttggtttttatatatttaatatattttctaaacaggaaatgtttatgaaactgttgaaagactaaatatggatttctttataataataaacaggagtgac

SEQ ID NO: 39833 - DNA, 681 bp, Arabidopsis lyrata
  Intron number 1 from transcript 918872 (locus 918872) deri ved from phytozome v7.0 (chr-ID scaffold_1; pos 549869 to 550549 reverse strand)
gagtcgcaaaaaaaatcttttatttctatacatgttattcatttattaataataaaagaaaacaaatcctttaaattagatattaactaaaataaacgcaccataattacttattaagtaacaaccaataaatttcaccaaaaaataggtaacaaccaataaattctaaacgcagtaattaaagaatgagatattaaaaaaaatatatcaaataagatataagtatcttaaaataattgaacatctaaataatttaattgttagtgtcgattttaatgccttcattaatgtggatttttttttttacagagaaatatttcctaaagattatcacattaatgactcagaaaattaaggaagatatgaatttatgattctcgaaatcgtattggtaatatctttaagtaatatttttcaaatttaaataattaatgccaatggcattcatccgtaaataaggtccaactccaggatttatttgctaaaagtcattcaaaaatgtatatatagatatcttatttagaattaaggaattttcttgtgttgcccaaacaaaaggaattttgttttttaaaacttgcctatatataaaaagtgcaaacccttttttgcatttattatcgctctctattgtttttaattttagggtttactcgatcagaatagactatcccgcagatt

SEQ ID NO: 39834 - DNA, 276 bp, Arabidopsis lyrata
  Intron number 1 from transcript 940644 (locus 940644) deri ved from phytozome v7.0 (chr-ID scaffold_6; pos 4707530 to 4707805 reverse strand)
ttttagccgctactggtatgatgttttttacaaataaagttttcttctatcttattattacgtaactatttttgataattttaagaccaatagtgaatattttacttttttcaaaatatagaatcgagaatagcctatatataaaatatgtgtgggtatcatattttatatatacatgttttaagaatttttttaaaaagtgtgtagagctaccaaaatgctaaacatatccttttgttatgtgacgttttttgttgtatgtgtaggaccaccgaa

SEQ ID NO: 39835 - DNA, 563 bp, Arabidopsis lyrata
  Intron number 2 from transcript 929506 (locus 929506) deri ved from phytozome v7.0 (chr-ID scaffold_3; pos 7103976 to 7104538 reverse strand)
gttctacgtacgttggagtttctatcgaagcaaaggtttgtcctttggattccctgttttttccttagtgaaattgaactacttgtgttagatactccaagcatctcagggtttaggggctaactttgattccatctatctttatgtgtatgggttttgttttgtgttcacaaatgaagaaaatttatactttctgatttcatgtaattttagttttggtgctgctgtgtttaagctgttactttctgatttctgatttcagggtttagctgctgtgtttaagctgttactttctgatttcatgtaattttagttttggtcaccttgctagttgctactcacttggaaatttgcttccttttccttatgcaactcgtggagaaaatatgtactctaaaaccccaatcattatgaccatgtatctttatcaaacaaaggctgtgattatcacaatattgccaagactttgcattaaaaagttaacaaaggttctctgattagtcaattgttcttgttattttcaaacagagaccaggaacagtccaaaggtacatcaaacgagg

SEQ ID NO: 39836 - DNA, 553 bp, Arabidopsis lyrata
  Intron number 1 from transcript 315074 (locus 315074) deri ved from phytozome v7.0 (chr-ID scaffold_2; pos 892831 to 893383)
gcaacattttgttcaccatccgcaaaaaggtataatcaatccctcgtcgattcgattcttcttcttcttcttttttttcttggttcatcccggttcgagctccaaaactagttgttcgaaaactttgttgaccgtccagaaaagaaaagttttcaggttcataaatatgctctattccccggctctaagaaactatgggactaattaagtctcataacttattgttttttttaaaaagttcttgaacaatggatcattttgaaaatcaacaacaacaaaaaaaaagagaataatttcgaattcataattttaagaaaaaaaaaaagaagttacagtagttgaagtttctctagctcaaagtagaaataaattacaaataatatagtaagcaagcaaccatacttaactaataaaattcaaatttccgccgtggaattggacgtttttagtttaatgatgatcattatatatgtaaacaagttggaaaaaaataagaatcaattcgtatgtttaaatagttgtgtttattgttataaaaatatttgcagaaatt

SEQ ID NO: 39837 - DNA, 426 bp, Arabidopsis lyrata
  Intron number 2 from transcript 948288 (locus 948288) deri ved from phytozome v7.0 (chr-ID scaffold_8; pos 869533 to 869958)
actatagtggagtatcttatcagtgaagggtggtaaaaaacaacaactcttgctaatttttatgccttgacgatgtaatttccggtcttctatcgattgaatatgaataaagagagattattgtggctttgttttggtgagaagggtattaatgctcttaacgatgagaacaatgctcctctacattgggcatgcttgaatggccatgtcgaggtaactatcactgttgtccttgcttcaagatgttttgtttctccggtttatctaagtggaaagctacttacaggtggtgaagagattgatcttggctggagccatcaaagtcttttgaatcgatttgtctcttgaatctttcttcccagtctattagaggaactaagcttaactattagaagcttgaaaatttataggtgtgagcggactcca

SEQ ID NO: 39838 - DNA, 618 bp, Arabidopsis lyrata
  Intron number 3 from transcript 491300 (locus 491300) deri ved from phytozome v7.0 (chr-ID scaffold_7; pos 3121471 to 3122088)
ttgcatttttgtggatcttgaaggctttcctcgaggtaattactatgaagtccactgaattgtataattgtaaagaattgttattagctgttgttaaaagaattgaacttggaacaatgtccgtgttattcgattatcacagcatgttttagattatcgtttagttctttcggaagctaacaaggagtggtttgttttgttgccctttggttgctatatcgtcgtttttggattcactgactttggcaggattctgtatctaccataaatttgaatagagagggtagcatcaagcttacaactttgttgatgagttgcattgaatccagtttcagggattttctttaagtcatacattctgttatgttcttctcatccatagtaaatgaatggatcttacttaattcattagttgacttgccctgaagtttttgaatacttgagctaatgttcatattcttcaatgtttagccaactttatgtcattgaaaggggcaatgctctgtgttacttactgaacagcgtggtagcatttttttcggtttggtttggcttttaatgtcatttccatggtggaacgcaggtagcttgcacacttggaactattgtatttacgag

SEQ ID NO: 39839 - DNA, 1013 bp, Arabidopsis lyrata
  Intron number 1 from transcript 489007 (locus 489007) deri ved from phytozome v7.0 (chr-ID scaffold_6; pos 8900204 to 8901216)
tcctttcaagagcgttaagcttggttgtggcgaaggtatgatgataacaataatcaaaaagttgaagtctctatatcttcatgttcttgaagttttttttctctctatgaaaactcttacttttgtgtatatgaacaagagtttttttttttttggacatatataatgagcaagagtttttttttttttttggacatatataatgaacaagagttttagatctaaaaattataaactccaaagatttttgattaaatctacagtctctatagctcttatggatgtaattgtgttcttacctcggattctatgtcttgagagactgattccttttcgaagactgatcctttttttttttttttggggtcaaagactgatccgatttcgactccaattttaaacgccaatttctgcgacgatgcttcatttatttattgtgccatcaccatttataatccagattcaaatctgatagtgtttgattgtatacaacaacaacaacgtacaaaaaatttcagctttttcataaaatattgcaaattctaaacgtatttgctactttttaggtcgtgtttggcgtacgtttacattttaaaaggagatttagctttaattcaatactaaaaaaggttattggatcaataattccaagaattctccacatgcttttataatatcgaatagttcaatttttgatgttattttatactaaagataaagattccctgaaaaagtattgaagttttaatagaataagtgaataaaactaccctttaaactctcttagccatgacttacaaatatcaaatctaattacaaaagattattagtttataactgaaaatgtaatgatagtaattataatgtgaactgtgtttagaattatggtctattagtctaattcaattccatgagggaagaataaacatcccaaaagcttgagtcttaagtaatattgtatcttctttgggtgttcaggtggttgtggcgcttgtgttgttcttctatcaaag

SEQ ID NO: 39840 - DNA, 535 bp, Arabidopsis lyrata
  Intron number 1 from transcript 497105 (locus 497105) deri ved from phytozome v7.0 (chr-ID scaffold_9; pos 1230478 to 1231012 reverse strand)
acgactcgtacggtggtggcgccgccgctttaaaggttttaatctttcttttctaaatattcctctaagctgctgtgttattgcgatttgattctctttgtttatcgataccgtctcgattttatgtgtattttgcatctagtcaatgatttcttctctgattatctctgcggatgtttattagtgtgtcaaattttcgttgattttggagaaacttgggagattttgaaaaatccaatgaaacagaaaccacatgaacagaccgatgttttcgtcaattcgattgaattttagaggccactagattacatgatgcattgatttagattgatttttttcataagtatcattgattaagattattatgtgtagttagtgttctcatctgtgtatttgttttctgattcaaaggtaacattatctgtttttgtagtgttgttgttgtttttttttttttaatctgtgatgcattcttgtatgtgtattgtgtactcttttgatgattaatacgtggttatctgaatatgttctcagc

SEQ ID NO: 39841 - DNA, 472 bp, Arabidopsis lyrata
  Intron number 2 from transcript 483262 (locus 483262) deri ved from phytozome v7.0 (chr-ID scaffold_4; pos 20449052 t o 20449523 reverse strand)
tagcttaccagcacaacggactcttcatcttggtaagactatactttaattagtgcccaaatgatcatataatgctcgatcttatatttgagttacttagtatgttctgttaattaagatatatttataaaaagatattgttatcagaagaaacaatagtttgccagttttagacttggcgtgttataaaattaatagggaacatggataaatagcgttattttaaatttcagaaaaaaaaaattatttggcatttcaaatggccaataatgtgttcttaattctaatttagttatttttgtcgtcagcaacttaacattaccggtgacactaatacaaaggattaaactataattagctccgatgtttttagtgaaacgataataaattgttgtttacgctgatatattatagttttcataatagacaaaatgtaaaatttggtttttatgtttactagggcttcttccaa

SEQ ID NO: 39842 - DNA, 503 bp, Arabidopsis lyrata
  Intron number 1 from transcript 921022 (locus 921022) deri ved from phytozome v7.0 (chr-ID scaffold_1; pos 8790730 to 8791232 reverse strand)
gctatcatagtctacctgattttcaagcatctccggtaaatgaatattatttcttttgatcttttcacgtttcttctctaattccataatccggttcgcgaagaactttctgttttttttttctttgactgaatgctaaaattcgaatctgatcgccaatttcaagttatggatctcggaaattttccgatcatgtttctagcttgcagatcctaattcgtgattgttgtttgtgtgcatgagctagtaaaggccaatgtagtgatccctcaaactatataggattagtttcagggtgttttaaaaactttgattttgtgatcggagaatgatcagaagctagatgtgctaatctcagatcgattctggctgtggctgcttattagaaatttaatagaattgcacttgttaagtagactcttctctgttaaaagttactgagaatttgcttcgtcacttattcgtatgatttagggacgttgattttgagataattgttgtgg

SEQ ID NO: 39843 - DNA, 650 bp, Arabidopsis lyrata
  Intron number 4 from transcript 494259 (locus 494259) deri ved from phytozome v7.0 (chr-ID scaffold_8; pos 335638 to 336287)
attgcaggcattggtgttgaaatcgtctttcctatgtaagttgcttcttccttacctcagctaactaccacacagttgctccagcatattattaagcataaatgtaaatactaaatagtagtattagataggagtggctggggtcagagttaagggtctttgaccttgttttggagccttttggctttgagaacccaaaacagtttcttttatcgtgatagtccaatactgtcatcgtgttcttcgttttttgagaagtaaagagagtttcgattctatatctgatcatatatgcatttgctttcttcacgaaaaatggaaataatttgctactccaagtatgatgctataggaactatcacataaatgctggaagtcttagcattataggtcaccaagctatgtgcttatttactacagaaacgcgcaccaacctttaaccttgatcactctagattctagccgttatgagaacatactagtccttatgaacttcccagtaacattggctgattctacaatgaagtaatatgtatctgatgtgttttgatcttaaacagatacatgttgctttagaatatgtatctgatgtgatgagtgttttgttttaaacagatactctcccaacatcaaggagataaaagtggtaa

SEQ ID NO: 39844 - DNA, 319 bp, Arabidopsis lyrata
  Intron number 2 from transcript 357068 (locus 357068) deri ved from phytozome v7.0 (chr-ID scaffold_8; pos 11873842 t o 11874160 reverse strand)
tgtcggaattgcagatcggtgtcaaggtaaatctttgtgtgttccgatcagcaaattaacgatctagtgtactgtttctagctataacattgatttcttcattgttgttttttggaatttgaatttggatctggttttgattgtgttgtgttctgtttttggtttggcactagaataagtaagaggctctttgagactttgaccatttggtttagttggagttttctggatttgaaaagagttaggaagaaacttaagcttcttgattggattcaaagattaagagtttctttttttttttgcagtttaagccaaaaac

SEQ ID NO: 39845 - DNA, 677 bp, Arabidopsis lyrata
  Intron number 2 from transcript 476210 (locus 476210) deri ved from phytozome v7.0 (chr-ID scaffold_2; pos 14619670 t o 14620346)
ttgttatcacattggctaatcaggtttggttcataccctttttgattcttaagtgatctcaaatcgaatgttgattatgaatgttatagagttatagtcacatggaggaggtacaatgtgagggactgatcattaccatgtgatggttttggtggccatccatgtgggaaagatctcaatttgatctttgctttgtgtctttctttgctaaaaaacaaaactttccgaaacatcctaagcataatcttgtcatgttctgaaattacaaattctggtattagtctggtgttgcaaaagatagatctcttgaagggccaattttgtaaaactgacgagtattctctatgcatgcataatcttgttgaagggtcggtaatctctcaaaactaatgagcattaaagatagatgtctaggctcttgttgaagggtcatttcccaaagctagctagcaaatgatgcatgtaattacataatcttgttgaagggtcacgggtgggaagttaatgttatctaatagaaaattgaaaatggatataattgacttggcctagatgattgtgtctctatggttgtactttgtgaagccctctttatcattatttgtactatgtaaccttatgtttgtgtatttgttccttcagaaactgaagacgcgtgtgattaataataactgtaa

SEQ ID NO: 39846 - DNA, 483 bp, Arabidopsis lyrata
  Intron number 1 from transcript 950858 (locus 950858) deri ved from phytozome v7.0 (chr-ID scaffold_8; pos 19859699 t o 19860181 reverse strand)
tgggagaagcttcagctcgccggagtttctcaaaggttcatactttcttcctctcttgcggctttgttgtttgtttgataataaagccctagaaaatgctcaaattgggtattttctgattctatcagctgagaaactggtctcaatttgttcttccttgtttgttatgagttttacttttctcaatttgaattgtgtatttcatagaatcaaaaggttcgtaactgtaacacttcataaatttggctacctttttgcttatgttcggtcttgtgttcgagttattgcatatataaatttttttttaatttttcatatatgtttgagtttcactcataacattattaattagagtaatgtggcagcccatgagttagagaaggtggaatctagtctttgggatgtgtatccatcacaatttgtttttggattcggatgaaatgacattctatgtatggacaattttggtcttcctttttgcag

SEQ ID NO: 39847 - DNA, 745 bp, Arabidopsis lyrata
  Intron number 2 from transcript 944714 (locus 944714) deri ved from phytozome v7.0 (chr-ID scaffold_7; pos 3824725 to 3825469)
aagcacgagtatctccccaaggatcttcaggtattattcttcattctcgattaaatcgatgttgttagaagctatataggatatggataggttaacccaggcaattgagctcaaataatgttagattctttttttttttttaattctacaagccctgcaatgaattttagattcagtttgtctttctggaataaaattgaagaaattaaagttcttgaagatttcaacttgaaattgaaactagttcatgagaagatattaccttactttggtgttcttgtgatagtggagcttagatgtatatgaactagtttatgcatagtctatgcttgtctcttgcgttactgtgtttactctgctcttgcttgagcttattggaaattttggattgatgaaagcttgtttccttgttacataacgcaaagttgtgtttgcatgtttactattgtattattactctatggtttagactttagacaattgcaactgttagggaaacttttcgattttttttttttactttcttatttgatgttgttattaaacaagaatgtaactgttaggattggcggctttattatgctataaattttttactataaggctgtgctagttttcaaaatttggttaagctatcaaaaattgcaactgttaggcaatcttttgggtttttgtaactttcttatttgatgttgttatttcatatacaggcggtgcagaccccattccgtggctatcttcagga

SEQ ID NO: 39848 - DNA, 587 bp, Arabidopsis lyrata
  Intron number 1 from transcript 948730 (locus 948730) deri ved from phytozome v7.0 (chr-ID scaffold_8; pos 3717242 to 3717828 reverse strand)
ctccggcgattgacttttcttctgccgaaggcaaggtacgtacggatcaatcaggtttttgatttccatggattccgatgataaaattaggttttggtttcacgtaaattttgctgtggttctgattatttacgatctccaatctcgatttcgtttttgtcttcaatactcatgagatcttacaatttgttcagaactcgaattaatcgttttttgtaagattttgtatctgaattactaagatatcttcttacgccgagaccagagcattttatatggttctctcttgagtgtcactcgaaccagcgacctagatactagatttggatgttgttactatagttggtgtatattttggctcttttgagagattataaaaacatagtcgtcattacttgtttaccttctcaagtcagtgatagtgatcactgagatctgaatatatatatatttccaaataatttctatgaaattcgacaagtttttatctgcatttaactgttttctagaagtagtaggtttggtgattttatttaatggacttgtcaataaaagtatgttgtgatcattgtggcagctaatcttca

SEQ ID NO: 39849 - DNA, 734 bp, Arabidopsis lyrata
  Intron number 2 from transcript 480470 (locus 480470) deri ved from phytozome v7.0 (chr-ID scaffold_3; pos 20702793 t o 20703526)
tgtgcgagcgtctctgcgctgagtttccttctgaggtatcaccctcttctttcactctctctgattttatctctctttattcaaattctgtaaatcgaagctcttggaatggtaaattagagagttttgggtttgtaatttgtctgggtatctttgaattcgtcgaaagtgcatctctttttggaatttgatagcttcactgtgtttcttctaaacgattttggtttcttaccttttagccctttgttttcgagatctatgtgttgttttctgggtcaattaggagatgaattcgttgttttattctctcttttgttgaatttgttttctctagtagctgtgctcattagtcattactgattggaaaatttgcaatttgagggtttagatttccgaagttaatgactttgtccatatatgatctcaagtttaagtttttattatccttggaacttagctatgagtcaactgttagaggaaagtctctgggattatctcaagctttgttaaaattttggttaatacagcttcagtaatagttgagaaagtattcattcattcagcctttggtctggattaatttcaacattcgtagtggttgtctagtttctagcttcagttagtagaaagcatgtcaataaaagactagactttgaggcctttctgtttgatcactttctgacttttcctattatataggttaatttgcagctattagccaccagctacctgca

SEQ ID NO: 39850 - DNA, 769 bp, Arabidopsis lyrata
  Intron number 1 from transcript 910140 (locus 910140) deri ved from phytozome v7.0 (chr-ID scaffold_1; pos 1565392 to 1566160 reverse strand)
aagatactcgaagagatcaaatcttctgatgtaagcttctcttcgtttccagctttgatttgattttctaggtttctgtatattttgtccaaccaaaatcttctggagaattttatcgcttccggtagtaattactgcgaatcctctctgttcaatcgcaaatatatcttctgattggtttgggtttcatgatgtttcttattaattttcctcccgaatatgcttatttgtatgagagttctcttcaatttatcggtctggattgagtttctgcagctttgaggtatatgaaggagtaggagttgcaatatatactatatagagtgattcggattcaattgagtttttgtaggtcatggatctaacgagcttcgctttttcttcacagcttatcgagaatctggttcaactactcacgcggctcagtcagttagatgtagaagataattctgatttgccttcttttgtggacagcctaactgtatcctcacatactttcatggttctcttccttttccttcagtttttgctgatttccaatatctgtttcactatgtttacaattgaaatgtgcgtgagattgtgggtttcaggatattgaagtgagcactttagagatgaagttatatctgcttattttcatgtttcacttggattttagatgatttatacagtctttaagtgctcttttatggcatgtttccaagtattccttgacagctgtatagacactctgggaagacttcacttgtcttgacgtttcccagtg

SEQ ID NO: 39851 - DNA, 274 bp, Arabidopsis lyrata
  Intron number 1 from transcript 898995 (locus 898995) deri ved from phytozome v7.0 (chr-ID scaffold_5; pos 19801101 t o 19801374)
tcacctccaacaaggtacaacaaatttgacccttattttattatcttccgtaattggtacgggcatggatcttgctctcattaaacaattagaaaacagaataacaaggcaagaaacttgtcgaaaacacgtccggctagattgttgctgtccactaaatggttctttgtcttctgaagatttatatggtcaaaaagttgttattaatcattgattttgatataatggacggtgtttagctctcaagaatctcggaatatcctgatcagcgtag

SEQ ID NO: 39852 - DNA, 997 bp, Arabidopsis lyrata
  Intron number 3 from transcript 495716 (locus 495716) deri ved from phytozome v7.0 (chr-ID scaffold_8; pos 17401376 t o 17402372 reverse strand)
ttttgcttcagagatacggatctttctctgctgcttctgtttcattttatacagattacccaaaagaaaaggttctgtttttcctaggtttagtaattttgactttgcttccaaggttttgcttcggatttagaaagtctatttttagaaatctgagaagtttcctttggaatttgttgttattagtactatttcccgccgtataagttaacttggaacgatgttcttttggacaagactagaagcaaaattttgttttgtatggttcaaattaaatagcttctgttgtaaggcgaaagggtttgattttcttgttttcttggttaattgaagttatctgcatatctttaatgtttcattcctggttcatgaaagaaatcttataaggatgtttaaagcagcatctgtttcagtcctcgtaatttgcaaagcagacagtcattaactcattagatgcaattgattcaagaagtgtcacttgttaggaatcttaaggcattggatttcgtaagctgtgtgtgatttgagtctttgctctgctttcttgagcctatggattgggtccaaatctcagtctcttccaaggctggctttaacaccgtttatatgcaaagagttgcacatgtctttgttaataaatcgtacgcttgcctgtttattctcgttttgtccttttcgatgttatggctcattaaacgcttctcttgaactaatatttgaggcattgtgtatatctagttaaaacttgtcatcagctttcaactgcgtttagcttgagttagtaacaaaatgatatacgttttggcatcttgaatcacccgtatttttcttgttgaggaagaagttccaaattgtatattgatattgaatagaatgaaaactcttttctatgtttaatttgttatcctattttcattttttctttcagttccctactcggctactctaataagtattgtgattccaaatgcagaaaactacacatacagaatctccc

SEQ ID NO: 39853 - DNA, 291 bp, Arabidopsis lyrata
  Intron number 1 from transcript 945400 (locus 945400) deri ved from phytozome v7.0 (chr-ID scaffold_7; pos 6555156 to 6555446 reverse strand)
ggctctatcttcggatgtgctcttcttctcattttctctgatagtgaactgagatttattattttccttcatttaatttgattttcaatacatgtttcctggatttgagattgagatatcattaggagactaacccttgggattgaacattcctcaagtttgtttgtttttgttttgctgtagaatcgagttaagattagttttcttcaaagagtgttaatgtggtaagattggctgctgaaacttttgatttcaggttcaggattgttcaagaagaaagggtttaaaggt

SEQ ID NO: 39854 - DNA, 308 bp, Arabidopsis lyrata
  Intron number 2 from transcript 341262 (locus 341262) deri ved from phytozome v7.0 (chr-ID scaffold_3; pos 4557649 to 4557956 reverse strand)
ggtaagttttttttaagttaggtgaatctgagaaatgatatgtatccacccctaattaccgattgcatatttttgacttgacctcttggctctttcccctctcccaagtctatattcttcgtgttacttctaaatagttggttatggcatgtttaataatggcctccttgaatttcagtcaagcaaaaaaagttccaaaacgatcacagaatcagtctattttctgaaaatgattatcaattttccgtttccctaacgttttcatcgctgcagtgttgacataagtgaggaaaaattctcggcctatt

SEQ ID NO: 39855 - DNA, 982 bp, Arabidopsis lyrata
  Intron number 1 from transcript 493917 (locus 493917) deri ved from phytozome v7.0 (chr-ID scaffold_7; pos 22068777 t o 22069758 reverse strand)
ccaacaggtaaagaaaatcttttttttttttctaatggattcattgttgtgaagatattgtatggcttgttggtagtttacattagtacgttatatggggtcacttaggttggtttagtttctttagttgtagtttagagctgaaggaaggtgctaaggactcattgtgtttcttatgctttgagatttgcttgagaattttgttgtttgagcaataagacttggtagattaattatgtatggcttggatcatttgggttgttttttctcctttagttgtagtgtggtactgtggtttagctctttgttcactgaaacagaggagagatttctgaagaaaggtgctaagggatctttgtgtttcttcacttgtgtctgtacaaaaccgcaagttcaacagtctgattgtatccatgtcattatgtatggttatttaggttgtcttgttgtttagttttagtggagtttagcctactttgttatactgaaatggaggagaggtcgctgaagaaggtgataagggctctttgtgcttcttcatccgtctctgtagaaaaccgtaaattcaacggtctgattgtaactgtgtcattttgtagggcgtttaggttctcttgctcctttagttgtagtgtagtttagctctatactgaaatggaggaaagacctctagaggaaggtgctaaggactttctgtgcttcttcagatctctatatatagaaaaccgcaagttcaactatctgattatatctgtgtcatcatgtaaggatatttaggttgttttttcccctttagttgtagtgtagtttagcctactttgttcaattgaaatggatgagagacctctaaggtgctaaggattctttgtgtttcattaaatgtctctggctggatactatctgattgttaaaagttttgatctctcaaggtattgtaacaagaggtttcttcacatatgcaggtggataagcgatagccgag

SEQ ID NO: 39856 - DNA, 360 bp, Arabidopsis lyrata
  Intron number 1 from transcript 934580 (locus 934580) deri ved from phytozome v7.0 (chr-ID scaffold_4; pos 18649821 t o 18650180)
ttctgtctctatcgcaaaccggtaaattgtcccatttcaaaattctcgatttaaatttttggttttgaaattttttttgattcgtataatctctgtttcggtgttgatgatctctgtatgtgataatgacgaaaaagcttgaaactttattggtgggctcatcgaaaacagctgaatttttatgattttaaaattggtttcagactacgatgttcttatccgaatattcttgaccaataatggaatctattaaaatataaaatatataaatgttgaatctttataatgaaatatcatgtgcaggctttaaagttgtatactttattgattttttctatttgttgcagttgaatattgtgg

SEQ ID NO: 39857 - DNA, 627 bp, Arabidopsis lyrata
  Intron number 2 from transcript 490671 (locus 490671) deri ved from phytozome v7.0 (chr-ID scaffold_7; pos 366823 to 367449)
cggccaaggaagctccatcgaactcgctgctcttggtacgcttttcaatcatacttatatttccggtttagtagccaattttgaaccggactggtccccaatcatactgtttttggttcctttgtttagtctctttcgaataatattacacagatttgttggaaccatgtgaaccagaaagagtttaaaaaacgggtaaacaaattatgcaagtgtccagctatatcatcttattatttttaatcatttttccaagccaatcattagatttgtgtcggttcaccaacttcaaaattttgtatttgtgtaacgtttttcacgagtcttgtagacagaaaaaaatatcggtaacactaaataaaaagaacaaaatacatatgtcaaagttaattgtgttggtctgaagaaaagccaaataaatggtttagtctcgtcggtcaaagttaaagaccgttttcaaatttattattatgcatttgatttatacaaattgaactagtcaactcaaaggctaactaacataattcagtaattaaagttatttgtttgattttgggtgagaatacggtaataattgtgtacgatggctgagaaaattaccggtttaataggacccggaacagtact

SEQ ID NO: 39858 - DNA, 424 bp, Arabidopsis lyrata
  Intron number 2 from transcript 487412 (locus 487412) deri ved from phytozome v7.0 (chr-ID scaffold_6; pos 2252107 to 2252530)
aagctaagctcggatctcaatccagcttcggtattttccttctttctctcttcttctttgttacacacagattccatgaaagaatcatcggcttgagcttttctcagcgtaatctaatttttgcgtctagattatctttccgtttctatctcgaattgcttttcatggatctgtgattagtctttatgatctttgaaaaactgaaatttcagctaatatttcaaatcaggttttgtgtttttcaaatccgtaatcggatgatctctttcagctgattgttagctgcgatttcgattgatttttgatgttgatcttctttgtgatagactaccaatctttctcaatctaattattattctctgtttgtttttcaggtatcccagcagcttcagcgtctgacagtttttggatttgttttttcttt

SEQ ID NO: 39859 - DNA, 235 bp, Arabidopsis lyrata
  Intron number 4 from transcript 496506 (locus 496506) deri ved from phytozome v7.0 (chr-ID scaffold_8; pos 20887483 t o 20887717 reverse strand)
tttcaggggcttgcattgaactagaacacggcctggtttgtttcctttccttctatattattctttatgcatatagttgtacttggaatctggagggacatgtaatcaaaaactttaacaaggcagaatctttgtttcttcttgtgcacttttgttcagtttggttgaggtaatttcttattaaaacagaaattttgcaggtgaattgtggggcggaccttgctattttgtttgt

SEQ ID NO: 39860 - DNA, 816 bp, Arabidopsis lyrata
  Intron number 1 from transcript 488800 (locus 488800) deri ved from phytozome v7.0 (chr-ID scaffold_6; pos 8066675 to 8067490)
atctcttcaatcttctcaacaacatcaacaacaaggtcttgtgttctctctctgtctctctctttcaatcgctctgcttatgtttcatttcagaagagatagatttatgctgtgaatgattgatgggtaagttgatgatccattagactttggaagttattaaggtatctcatgatgcgttagagatttgtgaagatcccaatctgggtttgaaaacttgtttttgctcggattcaagtgaaagttttagatatcttagttttcgagaattggcaccagtgctaaagaaagtctcaaactttttcctctacagtcccgagatcttgcttctagttccgattggtaacaatgtgtgtgtaattgcatcattgatggagaaaaaccgcataatgccataatttctttcatttttgatcactaaacttgcataattgctaagttgttgaacttcaattgtgattagtgaaaacatgattctagtgatcaccaatttagaactagtttacgcaagtgcagggtgctaatagcagaagatgattggccatttagagattctctgaaaactctttctctttcattttgttaccaaatagtgtaatttcttggagccctttacgctcttactcattgcaaaatccatggtcttaagagttctaacccatacaactttgagtgttcgctatgtttttcttactctctgatcttgtagatgaaccctttatgttcttagtcgttgcggagtccatagtcttaaaagttctaacttacagaactttgagtgttcattaaccttgttcttactatctgatcttgtag

SEQ ID NO: 39861 - DNA, 813 bp, Arabidopsis lyrata
  Intron number 3 from transcript 492028 (locus 492028) deri ved from phytozome v7.0 (chr-ID scaffold_7; pos 6136623 to 6137435)
aggtttttgtaagcgattttactcctcaatactcttccctttttgggtgctttgctcgctcactgattttttattcgtcggagaatctattttgagctgttccctcggatttgtgtaattccttatcctccttctgattgcgattcttttgttgatttatggttgttgggatagcgattaattgaaaagttaagtgttgttttcatttttaatttgcttcatgttcaagtcaagtatctcttcttctctatttgctgtttcgggttagaggaagagacttactttaatgtctaatcaagtcccatggcatcaacattttcattactctttcaggaagctcatttttgttgcatttgattttttgaggtagagtctgtgattccatggatttctcaactgataattgtttgactaagataaaaatggatcgtgttttcatttctgaagcagaatcttatttgtgatatccttattgatcatgtattgtattgccaccgactggaatctcctaccattttttgtttgttctcttttcaatgttactatgatttcagatctttttgtttttccttctctggttgattgtgtttgaggtaatgctcaaaacgtgattctttgggcccaatatcttgtattttttaattctagtttctggaatctttgctgggtattaagcaattgttgattttaaaattgtatacctatggtttttagtgagttgacaccgggcttcttgtctttttttgatgaaatatgcacaattcattctgatcgttgatgatgatgtattcttgtatccggtcaatgtaggtt

SEQ ID NO: 39862 - DNA, 795 bp, Arabidopsis lyrata
  Intron number 1 from transcript 933697 (locus 933697) deri ved from phytozome v7.0 (chr-ID scaffold_4; pos 14889733 t o 14890527)
cgatcattgtctacaagggaatcgtcaaagatttcgtgagtttgatctctccccctatcttattctcgatccgatttctccggagttagatatctgttttgtgccctaatttttcatgtgtcgtatggatttggatcgtttgatacatttgaaattggggtttaatttagatggtgactttgttgtagatacatttgaattagatcagttcttattgctgaaacgactggattcggaactgcatttcacctccatactagttcttattgatggttcgatttcagattgattataactcaatgttttgagaccaaccaatgaaagcctcagaattggagttagggcaggagaaattgagtttttttttgttatcctcaagtcttgatgtgttttagcttggaaaaattggttctttgcctgtcaaaaatggttttatctgcttctgtaactattgttctgagtttgagtatgaatgaggtaatttggttatgataagttgtctatggtttactttcaacattcttaatctctcagcagttcattgctacaatccttgaggattcttcctccatagtagtttatagtctgtgttgtgttcttgaatatagattcgtgttagggccatgtttatgtgattgatgctctatggcattccttgttagtgtttgtctatgccgattgagatggaaaagaatttatgtgttacttcccagttcccacacaattgtgtagttattgtgattaataatactaagttcaaatctaacgtactctaaactcgatttatgacagcat

SEQ ID NO: 39863 - DNA, 669 bp, Arabidopsis lyrata
  Intron number 1 from transcript 476551 (locus 476551) deri ved from phytozome v7.0 (chr-ID scaffold_2; pos 16141061 t o 16141729)
tctgtctctcgattagacccagcaagattctacttgtaagttgtatttttctctcgttccctctcactcactcctagttataatctcatgcttcaattgatgcttaaatagttagattagagtttagctttgatcattcgttgtggaatttagagagggggaaacaaaattatgtaaaacctaagacttaacactgcgagtcatcatgtattcatgtttataggtgtcttttgaaggtcggacttttaattagccctcaactatcagaaaactataaaagtttcagattttaaaagtgacatcttttagtcaccaacgaacactatccaaggacgaagaaattgatgatctttagctgttaaaactaattcagataggaaaaaatgcacttcacgtcttctttgttcctagcttcacatttgtagtccatctctgaaaccgtcagactccatattggtattatgctatttagctctggtttgcttgttaggacagttgagaatccaatggcttggactagttcctaattatattctgtccatcctcattgcacatttgtatcatttgataatcacaatagaagacattactattcttttttctttagaggacttactctgctctgtttatatcaataggaaagagactcaatagttgagaacgcattac

SEQ ID NO: 39864 - DNA, 521 bp, Arabidopsis lyrata
  Intron number 1 from transcript 905056 (locus 905056) deri ved from phytozome v7.0 (chr-ID scaffold_3; pos 8958056 to 8958576)
tgaaatcttccgggtaagtgttatttcaatttgtgtaataatctgctgatatttagattcatgaagatttttgatgtatttgaaataaattttggtagaatggatgagatgagaagaaagaagagcaacattgcattggatgatatgtgaagcaaagttatgggctttttttttctttcttttttcccggctctagattttaatggaaccgtgtttttaggagcttgctattgccaacacttttgtgattaaactaaagttaactttgttgacttggattggtaactaataccaaattctattgatatcccttgaaaatgtatgaaatcagagttactttgacataaagcggacgaaatgtgtgaatgattgcatttctatataatgtatgtctcagaaatctacaagctaagataaaatagttgagagagttgagaaacacatccactagcattttttttttttttttttttgtaaatgttaagaaaccactagcaatttctgagtgtgaaagtatctca

SEQ ID NO: 39865 - DNA, 548 bp, Arabidopsis lyrata
  Intron number 1 from transcript 471431 (locus 471431) deri ved from phytozome v7.0 (chr-ID scaffold_1; pos 5299401 to 5299948 reverse strand)
gtcctgatctctccaagaagctcgacttcaatctggtaattacgtacttggttcttttttgtctagtcttgcttgtgaggtgaaattattgctctgtgattgtattcgtgtttgaattggtttgttctgtatgtttggctctcttgaagatgagaattggtttcttgattaaattcttgttaaaacgatctttcaaacataaattttactgggtttgaattgttttaatggttgatctctggaaaagttttgattttggtgtagtgaaattgtaattctatttgctttcatgtttaacttgatgaggctcggtgtaagttggctttggttaataagctaacttttgaaacagagaattttattctcttttccaaattcgtatgaaaaacaaggatcacaataaaacttgaaaacgttagcctataacctatatagactttcttttacaatcttatctttgggatcgaatttgtaaggagataatatgtaagatttgatgttgattgattgcagggtgatctaagaaacaaaggggacattgagaaact

SEQ ID NO: 39866 - DNA, 521 bp, Arabidopsis lyrata
  Intron number 2 from transcript 477968 (locus 477968) deri ved from phytozome v7.0 (chr-ID scaffold_3; pos 2746754 to 2747274)
ctaagaggttgaggtaaaaactcttagctttctctcgtgctctaaattctggaaaaggagattcttagcaatgcgtaaggaagctataacataagtcaaacttgtttgttttcaatcctaatttagaattaacttgattactgcattatacttgtagttgaaactgtagctaatgtctcggtaaaaattggtgtttatgtttttttttggggtttggttggttcacttgaaggctatctatttagtagattaaaagagtaaattttggggaatctgtttgtttttttgacattactcacatctagatagtattggcgccagatatcaattgtgctgtaagagcttttacaagagaaaacacagcgagaatgaccaaacaaaacaagtggtggttattagtactaattgattcaatgtgatttacgggccaatatcatctttcggaaaagatgattagacttttcaaagtgttggaattttatgcagggagaaagaactggcctctgtgaagatcaatcctg

SEQ ID NO: 39867 - DNA, 298 bp, Arabidopsis lyrata
  Intron number 3 from transcript 913518 (locus 913518) deri ved from phytozome v7.0 (chr-ID scaffold_1; pos 21522126 t o 21522423)
tggcgacacgactacctaaaaatctcaggaacgtatactattcataatgcggttttctttacagtgatatttttttaacttcaggactttaatgcttttctaaataaaactctatatcagctgaatcaaagtatagggaatttgagaatatctccagaaactctctaaccactgatttccctgccaaactcttaaaaggcattcttgatcaggtgattgactattatttcttcgattagaagtaccatcctgttttttactctctgaacttttttctgctacttcttgcaacaggcac

SEQ ID NO: 39868 - DNA, 541 bp, Arabidopsis lyrata
  Intron number 2 from transcript 490301 (locus 490301) deri ved from phytozome v7.0 (chr-ID scaffold_6; pos 23609973 t o 23610513)
aaacctgtatgttcagttctcggtttcttatattgttttttttactttctgtttggtgtttgtttaatagaaatggaacttttttggtaacttttgtttttgatttgtggtaagtagttgaaagagtcagtcttgggatttacttatggattttgagatttttagcaatcttgatgatttgctttatgtgctttttttttttttggctcagatttgttgaatcaaattgattttggtttgtttagtagaactataagtttgaaatttttatactacatagctcttgttgctctatgagcaacttctcacaagttcatgtagctgtctggctgatcttgccttctaagttggttaaatgagtaatcttaagggtcttacttaaatcgttttcttcatatgatcattaattggccttgcaaattgattcagatgtaagtgttttctcttacaactaatggagtcaattcttgtgcaaatggtttattttcgtctgttcttacttcttttgtgtgttgtctggtaggttttccacgggcagcct

SEQ ID NO: 39869 - DNA, 577 bp, Arabidopsis lyrata
  Intron number 1 from transcript 326063 (locus 326063) deri ved from phytozome v7.0 (chr-ID scaffold_6; pos 6597677 to 6598253)
cttccatcttctactcaagaagaatcccaagccaggtgataataacagctttagtttgttaattattctttctcttttcttaactaaacctatttaattaggtacccctatatatatatgattagtattatatcactagttttccaaacatatctcttggatttgacagctggttggttttttcacgtggcacgtgtattgatcttgattcgacccttgcataatggtccactaaggcatgaacccatttgatattattctaacataaatacatgtcttaatcatgttaataatcttccaatatagactattctcaaattttgaacaatacagagaatagtttcaaaatgcatctcaatataaaatttgtagatataaactgaaaaggtcgtaggaatcgaggctttatacgttattaaatttctaggttcaataaaccttacaaatttaaaaaggcttcaatttgtataaatagttttagattattttaacaataattttttttatattaacaataatattgatgttggtttgtgaaaaaattgtcaaacagccggtatattggggaacatcatca

SEQ ID NO: 39870 - DNA, 388 bp, Arabidopsis lyrata
  Intron number 1 from transcript 337067 (locus 337067) deri ved from phytozome v7.0 (chr-ID scaffold_1; pos 25418965 t o 25419352 reverse strand)
ttcacggcaactgaatcctaccaaaggagccagtaagaaggccgtagacaaacggaagcctaacaaacgtcgcgaggtctcaccttttgttccatcaccaaccttcttcaagattccttaattattcccattcgaattttggactgttttcttttcgattgattttatttgattctgagtttttggtttgaagctcaataatcataccggatcggaaccgggagacgaaggcttggtgatcaataatcatacccccgcaggttttgcatcttcactcttttatgattcttttattcatgaatcattttttttttatctatttcctcatatgcatgttttaattcttggatcaggtcctaagtttccttgggctaagcttatttctcag

SEQ ID NO: 39871 - DNA, 746 bp, Arabidopsis lyrata
  Intron number 2 from transcript 483511 (locus 483511) deri ved from phytozome v7.0 (chr-ID scaffold_4; pos 21445597 t o 21446342 reverse strand)
ggagattcagatcctcttctccgtgtgttaccgtatcgtttgattctccctctcattgtttgctaattcccgttgagtttttgtgctaaattgtttgatcagaatttgtttgatcaatttcgcaaagtgcttgaattcttaggactgtgttagaatgatccatcttttgtttcatcaaagattgtatttttttcccattaatagatttatacctgaaacttatcctaggtgttatttactctgtatcgctttcgtcttcaatgtactagttaggtgagattccagttttaatggccattgctgacttattcatgagttcattgtatatcaaaaacttctcatgattgtatctgtgtctttgagcccttagtgtgtatttataagactacattgtatcttaccatgtacataatgtcttctcatgatgaagattttgttgtaggaggtgattctgtctcaaagttggctctctagttcactttaactgcgtttaggttttcttggtcatgaaagcatgtttctctacttcttgaaacatcatctttgatttgtagaagatattggtttctttaagtttcgtgaatttgctttatgataggtgtaagcgtgagagtttgtgtttgtgtctttcttcccaaaaatctatttgcagttatacttttcactaatgatgtacttctagtgactctgttttttatatgctgtgtatagtgcttacctgaacacacgagaaatcaagagaacac

SEQ ID NO: 39872 - DNA, 479 bp, Arabidopsis lyrata
  Intron number 1 from transcript 482644 (locus 482644) deri ved from phytozome v7.0 (chr-ID scaffold_4; pos 17416585 t o 17417063 reverse strand)
gctacgctaactttctctcgcgtcaagacggtatactcttcttccatctcttcgatttcgtttggattttaggttattgtgagccgtttcgttgattatcttcgtttttgtatcatgtttcgcttattgcacatttggaatgctgataatcggtgaagaatctgtgtttatttgtccgattttcccgggaaaatgttactttcttctccaatccttatttattcatgcacttctacggatttctctttgatttgttgtgaaacggagacggatcttgttgtaaactgatcacgcctttgatttctgatattttcactgagatttacgtttgattagagcattttgtttaaagaacatgatgttgaacttcaaagatgttagtgacagtatctttaggcttgattaagatcttgtttgatagtatcttttccttcaattgtgcagctaaccttgccattgagaaaaagaatcacagtctg

SEQ ID NO: 39873 - DNA, 302 bp, Arabidopsis lyrata
  Intron number 1 from transcript 900113 (locus 900113) deri ved from phytozome v7.0 (chr-ID scaffold_4; pos 5673114 to 5673415)
tctcgtgagtccccttttgtctaagcatcgtctcatatctcccttgagaaaacataattttatttttatttaattttaaatcgaaaactgtggatattactgctataccccaaccgaaacatcaatattactgctaaaacctggatctattcgaaccagacccgatccatctcgacccacccatagaaccataaccaaaaaatcgattcttcttcttttgcgttttaactttgtttttgaaatcaaaaactcatccccaattcaaagagaaaaccctaaacgttggagattctcttgctccg

SEQ ID NO: 39874 - DNA, 436 bp, Arabidopsis lyrata
  Intron number 1 from transcript 937085 (locus 937085) deri ved from phytozome v7.0 (chr-ID scaffold_5; pos 11241762 t o 11242197)
taatcgattccgctggaaccattgattatcacgaggtatactaatcaaagagaagaacacaaaataaataatctaattttatgtttgtgaaagaagattgatggttgatttgcacaattagtgaatgatacgatgctttcagatgtagaaagttttgattttgaatttagggtttttggtggatgtaatttggtggagttaggagcagcagagactctgaatcaattttgattgtgaaactgctcttttgaatggggaagaacaaaaataataatctatttttagggttggaacaattagtgcatgatggtttcagatgcagaaatgcttgatttcgaatttatggtttttttttggtgggagtaaggagcagtagagtggagactttggaatttatgtttatgattttgtgaaaatgttcttttaaaaggggaat

SEQ ID NO: 39875 - DNA, 373 bp, Arabidopsis lyrata
  Intron number 1 from transcript 890387 (locus 890387) deri ved from phytozome v7.0 (chr-ID scaffold_7; pos 11031855 t o 11032227 reverse strand)
aagctgttaatcgtctcctttctcaaggttcgttctttaagcttccatagctttttatgtcttgtttgatttctgggttttagctttgaagcaaaaaaaaatcaaaacttcaaagagtttttttttttaccttgtgaagaaattttgctaatcatgttaaagctgttagaacttcttgtgtaagagaatgtgtcagaactttgtttgttttccttaagtttcttgaaatagtaatgttttttggatttggttgaatcttcttcattagctggctacctgtttctggaaataaacataaaaatcagttttttctccctttctttgttgccgtctcttataatgttgtttctttaaaacttttcagatacttttc

SEQ ID NO: 39876 - DNA, 639 bp, Arabidopsis lyrata
  Intron number 3 from transcript 491931 (locus 491931) deri ved from phytozome v7.0 (chr-ID scaffold_7; pos 5783370 to 5784008 reverse strand)
gcaggcagtaatattctccataagattaaggtactctttttcttcttctttaagtgttagatcttcttgatctgatctcgtttgagttcatttttctctagtttggacctggaatcagtttctctgttgttagctatttctattattagcaaaaagtttgaaacttttttgagaattaaaaattaaaaagttttaagtgagtgagttaagaagatatataaatgcagtttcaaggttgatcatttagctctatcaagaaaaaaaggttgatcctttaaaaattaatgatttttggctgttccatcaaaagtttcacgagctctttctttgcttttcctacacacgggtatgaaggaatctgacgaaattctacattcccgtacgcttttactgaaaaaaactcaaacttttgaggtggggttgtctgaagaatctgtgcatagatctctgttgtgcttatggtttgttcatgggtgtggtgataaagaatttagatttagatgactcctggaagactttaactgacttggtgtgaagaatcaatccagtatttcttgtttctttgtgcttttagtattaattgtactgttttgctgtgaattagttgaaggctgggttctgtggatccgctcctgacat

SEQ ID NO: 39877 - DNA, 560 bp, Arabidopsis lyrata
  Intron number 2 from transcript 476008 (locus 476008) deri ved from phytozome v7.0 (chr-ID scaffold_2; pos 13389509 t o 13390068)
ctaagctccgtagcatattacccaacaccaccaaagtaagtcaaaaaaatttatacataaattttcatacataaataaaagcattcatcatcgtacaccgtttaagatttttgtaaatagaaaatattaaaacaatgtagatttgaagtggacaaacatagtagctgcgacatgaaagttcatgtcacattttgtctcttttttctttctttttttacatttaggttttataaaaggagaagtaagttattcaaaggttttacgttttgatcaatgatcttctggatatttgttaaagtcccgagagagaatcagtcagagactgtattataaataaaaagtaaggaatatggaacgtctatgtcgtcgcttggttaattgatgtaataaagagaaacaaacggcgctgcttaaaaagcataaaaagtcttattgccggaccaaatcataacttcttcgaccacataattttctcctcgaaactatacaaatatgttttttttgtttttttcttttttaattcagacggataaagcgtcgttactagctgaagtgatcca

SEQ ID NO: 39878 - DNA, 821 bp, Arabidopsis lyrata
  Intron number 3 from transcript 330043 (locus 330043) deri ved from phytozome v7.0 (chr-ID scaffold_7; pos 13747550 t o 13748370 reverse strand)
tggccttcactgagtacgtcactggtgggactctcgtctaaggtttttgttttgctagtttaaggaaaaatttggagagaatgatattgatatgtaacgcatagtttgatactttgattaaatactatgagttttacaagctgtgtcaacaatcaacatgaatcaaaaattatttattggttacctacctgaaaaagtacttcaacagtttttcttatatgataatgtgaatgaagaagaagaaaaaataatttttagcctctatccacaaagcttgagcgtttttgcaatcttttgaaataaagccagagccaagaataattaattatgcgctcccttgttattatcgaccaatagagtcatcatgtgtcagccataatgaaagttaagtaacttccaagacgaaacgaaattgaattcgactcctctctaccaaaaacaaatcacctcatctcaattcaagcccatgggttagcagtctgatcaaagcctaatcaaagcgtcgatgattcccaagaacaaaaagaaaaaagaaaaaaagaattaatgaacaaacaaaaaaacacttaaaaagaggaaagatctggccaccacaaggctacgctcgatgaattattgaatacaatcggaaatatttgtgaaagtaaaataaaaattaaaaatcaagaggattagtggcttaattgaaatctttctgtgtgcccaaaaaaaaaaaaatatattgaaatatttcttatacgacgtcgttttgagagtagcatcttttcgttaaaatttatgtgggagactgaaacaagacagagaaaagagaatctccgagg

SEQ ID NO: 39879 - DNA, 357 bp, Arabidopsis lyrata
  Intron number 1 from transcript 472912 (locus 472912) deri ved from phytozome v7.0 (chr-ID scaffold_1; pos 11904701 t o 11905057 reverse strand)
ccaaggtacatatatgctcattaatcatatatgtttcaatcataaattctttctcaaagattcttgtcggttagttgttggaatcaaatggacgaaaagggggttttgtttagcatgttgtctcgttatttttatgtttggattgcttttgtttataaatgtttttcctttgaatccagtttttgccttttgatccctttccctgttacttgtaagcaaatcttgtgttgagagagttattgggaatcttagtttttctcttcttgttctttgatggtaactcttgtcatttaatggtgttgttctctattctttgctaaaagttttttgtttgccaaaatgcagttacatagagat

SEQ ID NO: 39880 - DNA, 506 bp, Arabidopsis lyrata
  Intron number 3 from transcript 490840 (locus 490840) deri ved from phytozome v7.0 (chr-ID scaffold_7; pos 1111195 to 1111700 reverse strand)
tcgccggcgctgccctcgctcataccctcggcaaggtaagatcttttcttcttaattcaaatttttttatttttacataaaattttgctttcgtcgttattcaatttcagttctatttctggtaatcatctggaaaattgcctttttccgtttattaatcatagaaattgttaatatttattgaattttgggttagaattgtttattgattttgtttatcatctaccttaatcaaattcttgcaacacaagctattgggtttcttaatggactatcatcgcaaaggtgtgatttgtaaggataaagttgcgaactttcgcctcaatcttttgtattcgacgtctttaaacttctcgtgattcttaattcacgggtaaattggtttttgcttcttgcggttttttggtttctcattgccgtcacggaatcaaatttagtgactttaacttttgtgtgtgtttgtggttgtaggaagggagaagagttcacgttatcgaaagagactt

SEQ ID NO: 39881 - DNA, 380 bp, Arabidopsis lyrata
  Intron number 2 from transcript 473442 (locus 473442) deri ved from phytozome v7.0 (chr-ID scaffold_1; pos 14899416 t o 14899795 reverse strand)
tcaagtggactttcgtccgacaggttccatctttgctcattctcaacaaattggtttagtgaagaaacaaattctattgaaaatcttagtttacttgaggttggttttgttatactcttgtagttaaaattgctaatagcttatattagtgtttgaatcttattgctgaatgtttcagtagagtgtcttagattagttttgctgctggagttggagaaagttgtaacctttatgattgaattgttgatgaggatgaatagtttagtttcagcttcatgtgagttttgattttttcatagcttaggatgttttggtatggcttcggaatgttttatgctgaattgttctgtggtgatcattgtaggaggcagagagtgaat

SEQ ID NO: 39882 - DNA, 450 bp, Arabidopsis lyrata
  Intron number 1 from transcript 312099 (locus 312099) deri ved from phytozome v7.0 (chr-ID scaffold_1; pos 4135471 to 4135920 reverse strand)
tttctcccactcgcaaggtccgtttctctctctaactctctcttctctctctctctctctctctctctctctatatatatatatatctaatattaaattgtacatgtgttttctgcgtatatatacaatacagacatcgttgtccaaaaaaaaaaaaatacaatacagacattatctacacaattactgtaagatgtacgcattattctaaaaaaaattaatattttgattaattggttaggcagttgtccctctatgaccatctaattagctctcttttaagtacgttgtctaatttaaaaacaaatgattcacgtagggttttaacactttagttatatattgaatataaccacattcatgtaagaaataaaatgaaagtaattaacttggtttttttttggggctctaacagttaccagtgcctcaacttatagatcaagcgacatc

SEQ ID NO: 39883 - DNA, 669 bp, Arabidopsis lyrata
  Intron number 2 from transcript 930916 (locus 930916) deri ved from phytozome v7.0 (chr-ID scaffold_3; pos 14573791 t o 14574459)
ccaatcaggatcagctagtgaaaattgccaaggtatattacttgtacatcaagatatgtgaacacgttccagaacaacccccaggtatctttactttcttaccttttttttttttaatcaaaaatcataataattttgatttttaaaaaataagatttattatgatgattttcactaaatttttatataaaataataataatttacacaaaaatttaaaacaaatttaacacttaaactttaagaaaataattaataatttttaactaaaactatgttaatttcactattattttttaaaaattagtttaagtgttaaatattaaaaacgtcaaaaactaaccgcgcctaagcatcatgtccttagttggtccgtaatgtcacgacccgttttcttgggacggttcgtgacatcgcgttgcttctgtggggccattccactggggcatgtgaacgtgcttcagtgaggggcgtgcaggactcaggttagagagtccctttggagttagacagaacacaaggcagggcgaaaccagtcggagatggtcgatagttggaaggctgggtcggggcaatactgagattgtcgaccgccgcacggtcttctgagaaaagcctgtgacatgtggtatcagagccaagaacgttgtgtgttgtctgcgcttagcgc

SEQ ID NO: 39884 - DNA, 684 bp, Arabidopsis lyrata
  Intron number 2 from transcript 478504 (locus 478504) deri ved from phytozome v7.0 (chr-ID scaffold_3; pos 4653700 to 4654383)
atctttctgatccgtcgcatagtccagtctctgaggtaaaatgctttcttatgattggttgagaagagaatgtgctgtgattccaacttcttgctggctgccatgtgctttatttctgaccgatcaaaagagagagagaaaaacaataatatatagtattatggattgattcgggaagttataaagatctcatctttaactgataaaattgataatctttgtgcgattctaaggtctgaatttagtcaaagtttggcaacctctattgagtattttaatcatcaagggagattattattcgtaaagcttctgattgatgttaaggagtgggattagagaagaatagaaaactgttttgatcttcggaatcttttgtcatgtgctctataacgcacatttatgtttatatgaaagggcgtttctttataagttggtgcctattatcgttgcataattgggcaattctactagtttttttttctcatcatatggaggtagttgcttgtttttttagaggttgatttattgtgaataatgtaggcctagattctcttataatggagacctaaggaagctatatataaaagctaaatcttgcaatagacaatgcgaagaattcgtgctttctttacttctgtgttagggttattgggaagctgagaaacttgttgatttttgtagagg

SEQ ID NO: 39885 - DNA, 861 bp, Arabidopsis lyrata
  Intron number 1 from transcript 951622 (locus 951622) deri ved from phytozome v7.0 (chr-ID scaffold_8; pos 22831602 t o 22832462 reverse strand)
acattcatttcatccgttaaggtaatggattgctgcttctctgaatcttaagacttgttattgtttcatgaacaaaataaggtaaagaagaagaacggctgagttaagaaataaccatgagtcttatatatatgctaccaaagtgaaggtgtgtgctttatatatatcactattaatttttgtgaacttggtttagataaagagccattgatgattgaaaaagactgtccacattgtttgattcaccactcatatgaattctttaattagtctgaggctcgttgctttttgtttttcccatctttgattaatatctctctttaaggcttgtggtaatatctcgagacattgatgtatgcttctatatatgatttagatataggtcctgaggcttacttaattttgagttatttgcagagctgaacaagaagggattgacattctcttaaatttaaaatcaaaacatcaaatttacaaattttggtttgattttgtaacgtgtgaagaaaaacagaaccgagatgggatgaagattttcagttcccagtagatgagcctcccataaacgataagcttcacgttgaagtcattagttcttcttcaagataacttcatcccaaggtagaaacaaaaacagatctcctttgaaatcccttttaaagattgcatcaaaaccatgtctttgagaaatcaagaaccaacattttatctgatatgatcagcttgatctaaagcaattatcgatttcatgagacgtggcaatcttcctactgagacctttgttcttggatccaatcaatgtaagactttgtttgcttttttctgtttttacttggagacctttgttcttggaatctgcag

SEQ ID NO: 39886 - DNA, 252 bp, Arabidopsis lyrata
  Intron number 1 from transcript 924765 (locus 924765) deri ved from phytozome v7.0 (chr-ID scaffold_2; pos 1799103 to 1799354)
ccattggcctttcgtgcttctactaacatcaacaggttcacatcatacattaattttttttcgaaatttaaagaaattatcatatggaaattttgaatcttcttggtttaattcatctataggttcttgtttctcatctttcatgttcattcactatatatctttgacttggccaatttttaaatttgtcattatgtaattcatttatttattgaggtatgacttttttgatgtttgaaaaatagcaaagct

SEQ ID NO: 39887 - DNA, 504 bp, Arabidopsis lyrata
  Intron number 2 from transcript 921939 (locus 921939) deri ved from phytozome v7.0 (chr-ID scaffold_1; pos 12776559 t o 12777062)
gccaagtcaggcaattgaagaatgtaagaaaccctctaaattcccatttcgatctttctcttttttttatttcgtgtgccaaatgtattgtttgcttgtggttctgaaggattatgattctctttgagctttaagtgttgctcatatgaatttggaaagttgtcttcttttttggttttgaaagtggttagaacttagaacttggtgaattagttgtgtaggtgttttttttgttcagggtattatgaaaatgttcttgtttgctctgcttatcagtcagtctgcgattatttagttgaatccacttgtttgatgtcttttataaacatcagtgcttattatattatatcacccttcttgaaggaatcagtcgatattctctacaatttcttgtgttttaccttacatgtagcacataatttatccctcatgattcttgttatttcgttgatcgcttattttgatgcagattgctcaagaaattgggtcagaagcaaagtctca

SEQ ID NO: 39888 - DNA, 667 bp, Arabidopsis lyrata
  Intron number 1 from transcript 930544 (locus 930544) deri ved from phytozome v7.0 (chr-ID scaffold_3; pos 11863946 t o 11864612 reverse strand)
agctcactcgtcgtaaccctctcgatttccctatcgttagtatctctctacttcgattccttctagaaattgcataagattcgtcgaaatttcacattgttactgttcttgaaatgttttgtagagtgtcaatttgatatagaaacttgaaattcagtcacaagtatcatgaacagattcttgttctgtgcctgtagtatcatacttataagtttgatttaggaattgatttggtagcagatgagattgtgagtctatcttattcgttgttcatcacttgctaaacttattaggtacagagagttctttagttagagaactttgagtaatcgaactccttttcgcctagtttacgtatgaatcaattagaaagaagctgtatttagtgacaacgtatagcgagttttgtgcgttcctctgcatctttttccgaggttctttgtttgttgttaattggaatgtagtcggtcaaatttctcttcgtgttgtcatgaattgattcacattttttcccaatttccccaagttttcattacgtttcttggtacacctttaacttatgtttagtcgtacaccgatgctgtgtattttctctctggttttgtgttatcatttgcttggtcatcgtaatttttctgtctttaatgttttggggtttgtggtagga

SEQ ID NO: 39889 - DNA, 816 bp, Arabidopsis lyrata
  Intron number 2 from transcript 905989 (locus 905989) deri ved from phytozome v7.0 (chr-ID scaffold_3; pos 15231291 t o 15232106 reverse strand)
ttttttgattgggtctgatattcaagaacttattggtaaggccattgctattaagaacttgattaatgggattttgcctcattgggctattaggaactaaacactcaaattctcaatcttttaatgtgttagttgacccattagctttgttaaattcttccaaaatctcatctttagacatgaaccttttacgtgtctctttgtgtcaattatttatatgtttgttttggaaaaacttttgtctttttgtttgctgttctaattgcagtttggctaatctaatctatggattgtttgagttttgtgttgagtttgttgctcttgcctcattcctttcacaaaatgggatatctcatttaactactccacgacatccgtttcctagttgtttccttctttgtaggacctataacttgttgtatacctctatatatattctctgtaaatctctttggttaagtaatgaaaaacattctttataaatttgttcattagctatgttactttcatctttaaacatgagtttttgtcactatgtgcatgtctcctttggttattgattcatatgtgtgttgtggccacagttccgtctatttgtttgtagttttttttttttatctaggttcttcaatatccagaagccaaaagagaaaagcttctttttagagcaaaagcttcctatatttcatctctttgtcttttaacctccttactatattttgtgttttcagtgttctcataatctctgtggtctgtggatttagttcttgttgttgttcagaagctcaagttgttgagacacggactgaggctaag

SEQ ID NO: 39890 - DNA, 921 bp, Arabidopsis lyrata
  Intron number 1 from transcript 947103 (locus 947103) deri ved from phytozome v7.0 (chr-ID scaffold_7; pos 15198574 t o 15199494)
cggactcttccagcggtggttttcaatttttcgaggcaaccgagaagctgggtatctacgattctggaattgtaaaaatggatcggaccatgttgatggtcgatggcaaggtgatcagagccttagattcggcagactcaatatacccagcttattagttgcctcggaaaatcgaaaaccattgctggaagagtctggttttctgacaacgatctctttcctccgacacactagatccgccagttttcttccttgggattttgttccatcctggatcacaaacaagaagacaaaaaccttcgatgaagatcaaacagaagcggaaaaggtagatatgagaatcgccttcaagggggagagaggcacgaggatcgatatgagaatcgccttcaagggagagagaggcacgaggatcgatgcaatgattgggcttttacccttttgtgtttttttttctagatataattattgttttttgatttgtaattaattctacgaagatactcattctaacaaaaaaaagttttgtttaagacatagatgttttaagaaattagtttttttttttatcatatttagttaaaaattagtctaatctttctacaaagatatatcttcttaaactgcaaacttctgaagtcatattcaaaatagactgcaaaaaaaaaagagatttctttgcatagtttatgaaatgtcacatatctattgctaaagaaatttcatttttttttgcagtcttaattttatgaaattataaactgatattgtttctttgtttatttcaatttccaataggtcgtattcacaggcaactcaagaccagagtttatgcacatggtcaagttggtgccactgcttctgtctacacggattcaatcttagaatagctaactgcagaagttcttgagttagctggaa

SEQ ID NO: 39891 - DNA, 427 bp, Arabidopsis lyrata
  Intron number 1 from transcript 919097 (locus 919097) deri ved from phytozome v7.0 (chr-ID scaffold_1; pos 1349401 to 1349827)
ctgacgaggctctctgtttgtcacttctcaattaggtataaagcttgctcctttatgttcttttgcttcggttgcagcattcttaatgcttcttaatactacgtagcatttatcactcaagcaggtggtggcttttgacagtttcggttgtgcatccgtgtagaatttccaggaaacgtaagttagaaaattattgattgtgatacgtttggtggctgctcaatgcggtgttgttagcatgctataggtggttgtttagcttccttacttttgatgtttagttggatatctagattgttatgaagaaaacttgtgaaattgattggactttggaattgagttgagggtattcattgcttcaaattacattggactgcatttaattctgtctcccacatgtttgtagatatcttcccgcggagattgg

SEQ ID NO: 39892 - DNA, 803 bp, Arabidopsis lyrata
  Intron number 2 from transcript 323036 (locus 323036) deri ved from phytozome v7.0 (chr-ID scaffold_5; pos 6693117 to 6693919)
ttgagctcttctccgagctcagccttcatcttcgggttaacttaattgggtaattagttactcttcttgcttgagattgatagatttagacatttttaagttgttttcatggattaggacaagttgtttttgatttgtcggatgaaaaataatggagaatcttgagtagttgttaatggatctgttgtgatttttggtgaatttgatgaacttgtaaagtgtaaagaaccgatattggagctgaattgcctcaaaaaccgacccaaataggaatcgagatgctcgatatatatatcgcctttggtccctagcattggattggtataagtgagatccattggattgatttctgtattatttggaagataaaatttgaggaattttgaagctgttctcatggattaggacaagtttttttttttttttttgttttatcggttagtgtctgcacaccttgaggctgtagatagttagaaataaaggagaatcatgagaaattgagaatgaatttgtaaatggaccttagttcttagaacagacataggtgagatccattgaattgatttcagcaacatttggtaaatacattcgaagaattttgatgtcctaatagattaggacaagttttcgttttctcgattagtttttccacatcttgaggctgtagatcgttaacaataagagataatcatatgagtatttgaggatgaatttgtgaatggattttagttgctagatcagacataagtgagatccattttgtatgaatcttgatttgtttatgtgactgttatgattcaggt

SEQ ID NO: 39893 - DNA, 451 bp, Arabidopsis lyrata
  Intron number 2 from transcript 475007 (locus 475007) deri ved from phytozome v7.0 (chr-ID scaffold_2; pos 855421 to 855871 reverse strand)
aggaaccagaatctgtttacgagattagcatcgaggtgaataaattgcttcaacttgaatcatcgattcaataacactctttgataacttgggtttgtgattttttgttaaaaggaagcacctttgatattatagggttctaaggatgggaaaagattttactttaaggtgtcttggatgggaaggaatttgatatgtttacattgtctgaagtaacgatttgtcttttgttgtatctagatgtttggtttaagattgcttaggttttgcttttctcactagaatcaattagatcatgatggaccatgttatcagtttgatccttgctttgtcttcttctgttgattggtctctcacattttgttttctatagtctttgattgatttcttgtgttggcctctgaggctttagctgaataatcgtgatatctcttcttcttcctgtaacagg

SEQ ID NO: 39894 - DNA, 725 bp, Arabidopsis lyrata
  Intron number 2 from transcript 488102 (locus 488102) deri ved from phytozome v7.0 (chr-ID scaffold_6; pos 5124196 to 5124920)
gtttcagttctgttcttctttctaccgatcgcttgcgatctttcgtattgggtaagctttgtggattagatttgttgaaaatcttcacttttaattgattcttttgatttagcttatgctcaatctaaaatattttagtgggtgattgagattttaagtcatttagttttggtttcgtggaagttttgagatttcgattgtggttgactgttcattgacttctccttcttcttcttctcgcttttattgtcaaaagttttaatttttaattaatatgggttttaaggttagttggtatattgaatcgtctcttcttaaagttgtttatctgatttggttggtaagaaaattttgtgtgtagaagaatgtttgatgaagaagatgtttagctcaactatactgaatgaatctgatgcttgttagatttggatttcttcttctgggtaaaattagtttcagaaaattttattagatccgtttgtgacggtttttaatctttgagtcttcttttggtaaatcttctgactttgtttccttattttttggtcaatttttttttaaatttttttattattatcaattcaatagttttccttaattgcagattttgattgaccaatattttatgcttcttctatattgcagtcatacgttattggttgatttcaatagccaagtaacgtttttctcttttggttgattgtttcagatcttttttcatctcc

SEQ ID NO: 39895 - DNA, 569 bp, Arabidopsis lyrata
  Intron number 1 from transcript 495608 (locus 495608) deri ved from phytozome v7.0 (chr-ID scaffold_8; pos 16967573 t o 16968141)
cattttaaacccttagaaatccagtgtcaatctcggtgattaaaagtttttccttttttttctttttactgttagatttgatcaattttgaggtctttagtctgttccttaaggttttgatcactttggttttatcaccaatgctgttcgattctcttgaagtttctgttttttgtacagagatctgcttcttctcttctacttgatcggattttagattttgcattcttagcttgacttcgtttgcttactggttttttgagcttcggaagttcaagactttagtttccgactctgaatgtttggtctgtggagtttaatctttgtttagaatgattaatggtttttggattcccaaaaagattgcaactttgattgagaatatctacggagtatctatcttctggtgtttgttattattttgttcttagttcaatttccttattattttgatgcataagtaagatctaattttcagcgatgtccattaatcactcttagtttagttatcgtctctaattggaatttgtttttgatctttctacaggaaacctactgattttgcgaca

SEQ ID NO: 39896 - DNA, 364 bp, Arabidopsis lyrata
  Intron number 4 from transcript 912544 (locus 912544) deri ved from phytozome v7.0 (chr-ID scaffold_1; pos 11939721 t o 11940084 reverse strand)
cagacctatcaccattgtttcaacaccaggatcaggtcctctggagttttttactttttatattgaagttttgtcttcctcttctgcactaataatgacataaattggtttaatctgaaacttggagttgggttttgcacacttaaattatctggacgttgttttttgaaatcctttttcgggtttgttctcttttgctacttctctcatatcaaacaagacagttatgctctgatcggtggattttttcttcctagcattagcgagtcatttcattagagtaacaccattctttgtttactgtttatcgaaactcggaagaaaacagtcaacactttcctttaattcacaggtggtaaaaagt

SEQ ID NO: 39897 - DNA, 581 bp, Arabidopsis lyrata
  Intron number 2 from transcript 898962 (locus 898962) deri ved from phytozome v7.0 (chr-ID scaffold_5; pos 19638170 t o 19638750 reverse strand)
aataaacaggtgatcttatagtttatatgtacaaatttgatttttttttttttgtatttatggtttcactattttcaccactaatcaatttttataatcaaaaagtttggtttcaacttttgagaaggtaatcatcgatggtttggtatgtttctttttgttgtaaaaagatgaggtacctcccgattttgttgaggtacatgttcttattattttcaaatatgtcttttttcagaagaaacactcaacttttgataacacagttgccacaaagtcagaaagatgacttatttcagggatgaatcttcagaggaggctaatttttgtcgttaatacaatttaagtattcctctatttagattagggataacaaacttggctgttaaattcaggaattactcttcgttgccaatctctctccccaaactaaaatattacatatatggaagtagtaacttaaagtttttggtatcgaggtcattctaaggcattgagattcggactttggtatgtataggattcgttttccatgcactaagatttaattattttttaatttattggtttttaggtttctttcc

SEQ ID NO: 39898 - DNA, 1033 bp, Arabidopsis lyrata
  Intron number 1 from transcript 895384 (locus 895384) deri ved from phytozome v7.0 (chr-ID scaffold_6; pos 21599450 t o 21600482)
ttgggttgggtgggtttgcttgggttgggttcaattagttgtaattgggttagaattggtttagattaggtttaatccggtttagtattttttgttagtttggtaagcaaacagtaaaccgaataaaaccaatgtttgtgtataaattagacgaaagcttttattctagggagaaataggattcaactatgaatttttggggaaatgagttgagaaatacattttcgggaacatctaacacatggtcatagattggattctatctgatatgatgtaatacttctcgtggagaatagaccattttcccatttgatgatctagaaagaaattataaaattggtgggccgatttcaatgtttagcgattaggaagtttaaaacgtaaaaaaaaatacaaaaaagtgcctccacgtcttaaaaaatggtgtgttttacactttgattgtattttcttctagtatttatttcaccttaatatataagcataatttataaaaaaaaaattgaaaatgtaaccataattttataattgagttttaatatcttttaaaaggaataatagtgtataaattatgttttataaaatatatcacgttaatgactaattttgagaaaccatcaaagtgttggtaacataacataaccatcaatctcaattcacaagggagataaattatgaagcatcagaataacctcattctatttcacaactcttgtacaagcatgtcaatgtgttggtatttttaatgttgattatgggactgttcgtttagcagtcacagaatgcctcatttattgatgggttatggtaacttcataaacgaggagttaatatttcgccgcccaagagattttcgaaagatcaattccctcctttattgatggggttagacttgctcaaagaaagattgtttttttcattgttgaagagaaaaaatgtagccattgttaactttgaaaacaaaatcaaggttatataacttgcttcttgtatatcagagcacacggctcatcatcactgcgagcagattctt

SEQ ID NO: 39899 - DNA, 274 bp, Arabidopsis lyrata
  Intron number 3 from transcript 321676 (locus 321676) deri ved from phytozome v7.0 (chr-ID scaffold_4; pos 19381149 t o 19381422)
ctgtgagtccctagatattttggttgcatatcgacaagaaaactagaactaggattaggtttccaagtaattatcaagcagataatttgcataatacactaaaatagtgttttcgagatggaagtggaagtgtgagcgcataaacgcaaataggcaaagtgatattctagatatgtgttgtccttctatctagatttatttggatatatacatataagtacttttgattaactctaataaactagctaattttgagttgtccagtataagaaag

SEQ ID NO: 39900 - DNA, 932 bp, Arabidopsis lyrata
  Intron number 1 from transcript 484107 (locus 484107) deri ved from phytozome v7.0 (chr-ID scaffold_5; pos 503861 to 504792 reverse strand)
gaggttcttataaccagtcccaagtagctcttcaggtacatatatatgtgtgtgtaaaatatatatatatatatatatatatatatatgtgtgtgtgtgtgtgtgtgtttatgtagatatgaccctgttttttttttttcaaatatcacaatttattccttatctgtaattaagctaatttcaagttctttttgatggtgtggttagaaaatatgtgatagagctcaagcgagaagacgaaaatgatataagaaaaatcatattttagtttattgtagtagaaaaaaaaccgagaagcgttatcttgacggcgaatacatcgtttgagtaaattactaattagctattaatgtagtaagtacccaataacaatagtaataaaattgcactaagtatcgcctgataaaaagttgtttcgagttgtattaattacttgtataatatctgaatatacttataataatgagtgagtggatgataatatctgaggcatatttcattgttaattaaggagccgtgaaggtgaagttgcatacataatctttagttcgttacgtaacttacgtggaactagttatctgaattaaggctgtccatcagtgttgcaattctacgttatcattttaattttggttgcttctataatctacaagtaaatgcttttgattaaggaagacattgattggagaatttattattattattagtagtattattttgttttagtttgtagtgaaatggataagtttgtcgcttctagagatttctaaaaacgaccaaaattttttgcaattttgttttgtttctttaccatttgttttctatataatgctctcttataatcatacataattttttaataagattgattttttttttgttcttaattaaattactctactaattatcgactataatttttttgcattcag

SEQ ID NO: 39901 - DNA, 929 bp, Arabidopsis lyrata
  Intron number 1 from transcript 945666 (locus 945666) deri ved from phytozome v7.0 (chr-ID scaffold_7; pos 7645347 to 7646275)
ttgtacttgatcaggtcagatgcttttttttttgatgatggacaatgatagcagtttagtttagtttcttcttcgacttcagcctaaccattcaatggatgaacatgaaagttcataggaagttttgagagagtaactggttttaactccaatccctatatgccatggcctcatggtgacttggattttctgtaatcatgttgaattagaaaaatgagctcttttactccaaagggaggcgcttgatcagactaagaactccagtgatcagttggcttagaactatggctgggcagttccttttgctaagaaccataacatcttcttattctggtgtgaatccaactgcctagtctctctgtcaaactgtataatagatgtagggtgaatacttatgatgtactgaaaaattcctttcgttcctctcgtcatgataatttggctcgattgtagtgatttgttgaaggatcactacctgagttgtaaatgtaatatgggtgaagtactagtgtgtataatgtccttctcgcttacattaaaagtttcaaaagagcatttgaattttgtgtttttctctgatgtttgaccactaatcaaagagtagcatgcatacatgactgttagcaaatgcagttgctgcgggatggctactgttacattctcgtaaattttgaatatatatctcaattttattcgtcaatagtgacacagttgccttgagtgaattggcgcatgattagcgtcacctactctcactatctatatctgtagatgtggatatcgattatattggacttagatagtttttgcttgcttattgatgtgtggtttttgtatctcatcaaattatctgttgtactaatcagacttaaatgatgcaattgcgctctgtaggtttttggtgacaagtcttttgaaaagtttgggaa

SEQ ID NO: 39902 - DNA, 632 bp, Arabidopsis lyrata
  Intron number 1 from transcript 355810 (locus 355810) deri ved from phytozome v7.0 (chr-ID scaffold_7; pos 21367006 t o 21367637)
aaagtttcatcaccgaggaagctcttactctgaaggtttgcctttttcctaatttcagtgcgatttctctaattcgggacacggaaatgccattagattaactaattttgatatctttcgattttaaatctctactttttccgaattaaaattgggagatatccacaggtggagattgcccctaattttgaccttgggagatatccacaggtggagattgcccctaattttgaccttgggagatatccacaggtggagattggacatggtctcttggttttaatcggagaagaaagaagaagaagaagcatgattggcctctttagcaggtagcaatgaaattatgaaagcccagcccaaacaaataaagataatttccttattgttttcttctataaataaacgtagctctcgcttagggttattttatgttatatcttgttgcttgctcccaacggactcttcccggaaatttacattaacccctgttttcatcttctccacgatggcaaaagctaaatttaagggtttgtttttggtggctctgagctttcgtatctaatgttttataccaacttttttggctcaagaagtttttgctactcttcttttaggtaagcgaaagccggaat

SEQ ID NO: 39903 - DNA, 326 bp, Arabidopsis lyrata
  Intron number 1 from transcript 938429 (locus 938429) deri ved from phytozome v7.0 (chr-ID scaffold_5; pos 17279930 t o 17280255)
ccctagagaagaaaggtgttctcgctaagatccgggtaaccgcgagttctgtgccatacattattgcgtcgattcaaatttcgcagagaaaaagaaaaacattcatttcttctttaggcttccagatctacttatgcatttgaattcccagtttttgtcctacttagaaattgagtctgtggaaaaagttgtcattttgatttctcagctgaattggattctttaacatttggtttggagattgaagagttggtttttcttttcctgctgatactttagttgtttctgtaggctgagctccgtgcgagtgtgtttgaggcaatcga

SEQ ID NO: 39904 - DNA, 208 bp, Arabidopsis lyrata
  Intron number 1 from transcript 486557 (locus 486557) deri ved from phytozome v7.0 (chr-ID scaffold_5; pos 20053792 t o 20053999)
tactcctaaggttcgtatctcaacttcctcctttgttcttaattgaaaaggtaagaactttgatttcttttgtagtctcttttcgtcttccataatcatattcctcattttagatagcaaaatactgtggtttttaatgtttcgacctgatttggttctgcaaatgtttgtttgtgggcaggctattagggaacaattggtgcaattg

SEQ ID NO: 39905 - DNA, 637 bp, Arabidopsis lyrata
  Intron number 2 from transcript 493070 (locus 493070) deri ved from phytozome v7.0 (chr-ID scaffold_7; pos 11093247 t o 11093883)
gtgagaacttcaaaaatatatgaatttactcattgagttatttcttttgatttgacttctgaattgtgaaagtttgttttcttttggatttaaatttccaaagctttgtttttctttttcttttgatcaattatatgttcattgcatgtgatgtgagcatgatctcttctctgagaaactatggattttagatcttctccttcttctgctaatggaaaaaaaaatcaattttatcgaaagtgcaacttttgatttgatcacaattcacaattcttttctctctgggtatttctctctcaatttccctaaattctagggatttgcctttctccttcattagttgtcattagcctatgttttagtatttgttaaaggtcattagtttgtgttgttaagttaattaatcactgcatgcacgagttaaacaacatttaactattaatatatacactcttaaatgattcaaagctttgttagatttcatggcatggtggtccactctttttaaataacaaaatcaagttcctcatgaattattcttatttcatcaataatacacacacgacacaccttttgaatatttacttttctatcttttattctgtttaattttttgtttattctattcatttttccc

SEQ ID NO: 39906 - DNA, 634 bp, Arabidopsis lyrata
  Intron number 2 from transcript 944040 (locus 944040) deri ved from phytozome v7.0 (chr-ID scaffold_7; pos 978842 to 979475 reverse strand)
tctacttatcctcttgtcccagggtaagacatgtatcctattaaatattttcttaaccagaagttgtctcttagtggtaaaggacctccagctgggggtaccgtcacctgagtttgattcctggccactgcggaattcacatagcggctgcaggtttccaggaccacgtcagttccgcttggacactacgctagtcgggccacttcggtgggaccggacacctaagttataaaaaaaaaaaaaaagtgaaaattgcgaaaattatactcaagtccggtctgatactacttgaaaaaaaaaaaaagaaaaacctatatactaaacccaaaaatgcatgggtaagctttttagcaaaaaaaaaaaaaaaaagaagatccacgataagcttcgtctggctcatgttttttttttaacaaaaaaatcatgttattaattatcaaggctcaaaccggagtgggcttgggcctgagtaatgtttatctctactctgtcctaatccgtcacatttaattcatgtttattcttattttagttgaagttaaatctaactatgtccggtttgattattttgattaatcccaagggaattattttctcctctaatgctgatattaaatccgaatgtttttcaggc

SEQ ID NO: 39907 - DNA, 1047 bp, Arabidopsis lyrata
  Intron number 1 from transcript 896232 (locus 896232) deri ved from phytozome v7.0 (chr-ID scaffold_5; pos 1222943 to 1223989)
atactttaacccaaagagtaaaaatcaagctacttgtatgtttacagctagagaaagatgctcatgattcatgtttccgacaaattaataagtgcttttaccttttttcttattctcctaatctaaatgtcacatttgcgttcttttttttctttaaccaaatttgagtttcctttctcggaaatttatttggaaattttgaattatacaaacgctataatcttaatgtttagaactaaaaagttgcaaattctacactaaaagagtaagtaaagaatcaatagtcacatgatataaggatatacaacgaagaacatgacaaataggagtgatacattatatttatagaatatccctagtgaggaaaaatgatttccagctacacgaactatacaccaacacatcaccacacatgcagactattttaatgtctcgctaactacacgaactattggtattacatacgaacatccccgtactatcaccataatcatttccagataatataaatgtcttgttaactacacgaagtatttccatcaatttttttaaaaaaaaataattagaaaatgaaaaaataactaaagttaattagaaaatgaaaaaataactaaagttaattagaaaaaatagcctcacacttttagttagagccatatacttagattcaatagttgagaaggctaccaacggttactagtatgtgaaacctttattttccttagaaaaatgccaaagattaattcaaaatcttagctgtgattatgtaagcagattttgtctatataatgcgagacagaaaattcccatttgagtgataaaaacaatttgttgattgagtgcattaatttaaattgctggcaaaaagttcaatgtgattacacaatatagttgaacccaataaggtgaagaagcctatgactagtagtattagcccattccttaggaggatatgaaatgattataatcagtaatcacccaaaaaaaaaaaaaaaaagttacataatatcacttgtcgattttaggttttcagaccaaaagtctcag

SEQ ID NO: 39908 - DNA, 518 bp, Arabidopsis lyrata
  Intron number 2 from transcript 497335 (locus 497335) deri ved from phytozome v7.0 (chr-ID scaffold_230; pos 5036 to 5553)
tgaagaaggtaagccgtaagctgatgcctttagctctgaaaaataatgtattttgtttcttttcagcgttttgctttcccagatgccttcattatcttactttttctaatatatttttgttttaccttttcttatatattatatattcccataccttgaagctcatcaagatgaccaccagcttaattatgacctgtgacctttatagttgcatctctctttatttgagctactttaacaatttaattacaattatagccttgagccactttgacaatccttttctctgtcttggtactactgctgactaaagcttgagataaagttgacttttcatacccactgtcgcctctaattttgatcacttgattgttagtggtatctctataactcttggcatatggatcttgtgagtatttcatttgatcctgctttggttcttcttcttttggcatccacactatcttcttcattatattgcagagtacggagaaactgcttgacttgtctgataccaa

SEQ ID NO: 39909 - DNA, 723 bp, Arabidopsis lyrata
  Intron number 1 from transcript 915596 (locus 915596) deri ved from phytozome v7.0 (chr-ID scaffold_8; pos 2214474 to 2215196)
ttatgtctatatgatattatttgaattatctttcatatgactatatgagcttagtcgattagtatcttgggaaggaatgattaatttcttggatagaagattgtgatcaaatacaacattttgttaggaattttttttctataattgttgtaattctcaccatctctctatctttcactctttcttgtacgtttgtgttcacttgttctagagagaaaacaagaacacatttactttaattgtctacattgtattaacttggatcacaaagatgattcttacaagatacaacacacacatacttatactactttacttctactttctacatacacatatatacttgcacttggaccttactcctagttctagactctcttacacaagcaaggttgccaccctacacattgacattggaacactaattccttgatttactctctcttttcaactcacaaaacacaaacctatttggtttgatgactttcctttcttcctttgactcttctcttcacgatgtctcttctctgacatcgtcttcttcttccgatgcttcttcctctgttcttcatcttcttcttctcatgggttcttcttctcttttgcaagttcaatcaaggatacaattccaacaataattcttggttctttcaaaactgccattgtcttaccgaacttgcgactaaagtatgaattttgttgatgtttgtggcaggtgtttct

SEQ ID NO: 39910 - DNA, 384 bp, Arabidopsis lyrata
  Intron number 1 from transcript 496596 (locus 496596) deri ved from phytozome v7.0 (chr-ID scaffold_8; pos 21269713 t o 21270096 reverse strand)
ttgaagatccaatccatcatcatcaatcgtctccggtaaatgatttctatcatcttcgagctcgattttttggagaaccttattcgtagatattgattttgggtttaagagtatagtttttttttttttttccatgggtttaatcaaatttcctgatttggttatgttttctgatttggatgaattcggattgaagaagaaaccatcattaaagcatatatatcaactttacaaagttcaattgctagaatttgggattttgattgttaaaataaagaagaaacctttttgtttccttcttttgaatgattcaatgactgactaagattttgtgactggtcttttcaaggatcttgaacttcaacaacataagcaataagcttt

SEQ ID NO: 39911 - DNA, 368 bp, Arabidopsis lyrata
  Intron number 2 from transcript 470432 (locus 470432) deri ved from phytozome v7.0 (chr-ID scaffold_1; pos 1487075 to 1487442)
aagttgctggcttttctcaaatttcaggtaaccctttcttcttcttcttcaatcaaaccggaaattcaattcctcgggttcgtcgattttaaccttaaccagactaaccatcaaaccgccacttgagatgacaatcagcatttctctggtttaatcgaaccggtaatttgatttttggttttggtttagctgaaccccaaaagttcatgtatttttcaccagagttttccggtttggtttgaaatgaattggttcattcaacacccttggccagatgtgaagtaggatgtttcaatttaggtttttttatctttaaaccggtttggtttctctaatatcgaatttccggtttatataattatgcaggg

SEQ ID NO: 39912 - DNA, 841 bp, Arabidopsis lyrata
  Intron number 1 from transcript 906988 (locus 906988) deri ved from phytozome v7.0 (chr-ID scaffold_2; pos 404530 to 405370 reverse strand)
tcttcagaaggatcctccaacttcctgcagtgctggttagactctagctcttcttacgtgtctgatctatttttgagctttgtttgttacatcttataatctcatttttaagcaaacaaaaaaattaaatcttttttagtcttcttaatcatataacgtagttatctagagatcttgaagtggtaattacagctacgtaataatcatagttgagatgataccaattgaaagttgagatttttcttagaacagaacaaacttattggtgtactgatcctagattggaaattgcagctttccaatgatcatagtcaagaagatagctattcaaaattgggatttatatacccatcctggatactagtgatcagaattaataagataacagttaaaagttgagatttttattagaacgaagttgagattggtcgttgcagttatcttgtgatcatagtctagaaaatagaaattggaagttgtggaaaaatgattgctccttcttgttcccaagtttttttgagtagagagctgtttagtctttgttacttatctattgcattcgggtgttatacctttttcttttggttattaaaatgtcaaagtgtataatgagtcgatattgttggtctcaatagagtcagaggattgttgtaggagattctcaaagtgctcatgcattcttctgctagagaactctcaggacattgctatggcacattctttatgttttgttttgtgtatttcagttaatgccatagaatatgtgtgaataaaagactaaactttctattttttcttctatgatcaattgtgaaatcttgaaggcccagttgctgaagac

SEQ ID NO: 39913 - DNA, 438 bp, Arabidopsis lyrata
  Intron number 3 from transcript 475950 (locus 475950) deri ved from phytozome v7.0 (chr-ID scaffold_2; pos 12985728 t o 12986165)
tgaaacttctgcgaagccttccttctcgatacaaggtacaaagctttctgatactttttgttttctttgtttctgtggttctgtattcctgcgtattttgagcattgtcaatatgatctactgagctcatatctgcctttcgcattattgagactagtttgaacataattggacatttggcattcatcaagtattgcactaattaaacattcaacgacacattctccttgtgatatgtgaggcatataaccattttcttgtttcattctttaatcaactgttcttgatacttgctaagagaaatatagatctagcctgttgtactaaatgtcattatgactgccttaaaagtacacacgacagaatttgttatgtgcctcaatcttctgaaacaactctatatttttcagattgatatacgggtggcgcctggttctc

SEQ ID NO: 39914 - DNA, 569 bp, Arabidopsis lyrata
  Intron number 1 from transcript 356151 (locus 356151) deri ved from phytozome v7.0 (chr-ID scaffold_7; pos 24050698 t o 24051266 reverse strand)
taaacaatttcgaggagacaatctcaaagacggaggttttcattttctctcttctttcttatcttctccttctgatagatttgttcttaggtttccaactttgaattgagtcacaaagttctgtattttcctttgattagcttagacgaactacctgataggccttagtgacccatttgtctgcaatcataagttaggacgatgaattaggaaaatcgatgtagcaaagattatttctttgcggggtttaattccgattacaatacgtcgatgttgttcattatctaagtttgtatatcaaatctctgtgggcttttagtttctctaatgtcttaacctggacttagtttaagacacactaatttcagcaaagtgaaactcttttgttcgtgataagttgttgtctatgtaatggacgaatatataagtttgattgctacaatcacgaaatttatgcttaggagaacaaatttcgccaaacaagctgataaaattggaaaactgtgttttctttaatgctttgtatatttgatctaacatactatttttcttcgcctttttctttagtg

SEQ ID NO: 39915 - DNA, 495 bp, Arabidopsis lyrata
  Intron number 2 from transcript 337542 (locus 337542) deri ved from phytozome v7.0 (chr-ID scaffold_1; pos 28803250 t o 28803744 reverse strand)
gagcctcagtaacgcaacttcccagacctgagaaggtatgtttatgtttttatgttgtattgttttcgctgtattgatttgttgtgtgtttgacttggttgtttgggttcctaatgttgtatcccttagggtatatcttccctaattctatacagatagttgaatatgaaatattatttgttgtgtgtttaacttgtttgtttgggttccctatgttgaatctcttagggtatagcttccctttttctattcaaatagtacaacatgtatttattatatggtgtgtgtttaatttggctgtttgggttccttaggttgtatcccttagggtatagcatcccttattcttgtgttgatttgttgggattgcctcacttatatatgcataattactattagtgttcacttgcgagagagctcctttctttacaactgagagagctgttgtttgtttcaccaggagccccgcaagaaggttgtggaggaagaagctgg

SEQ ID NO: 39916 - DNA, 292 bp, Arabidopsis lyrata
  Intron number 1 from transcript 470094 (locus 470094) deri ved from phytozome v7.0 (chr-ID scaffold_1; pos 171465 to 171756)
tcgtctccgtgctcgtacgagaatattcgtaaaggtcgaattgcctcctcttttgtaagtcttatgaatctgtgtgtttgtaaggctgattatcactttgggtagaaattttagggcttcttcttagacttttggttttgtctgaaaatcttattacaaaagtaccaatctttgctccactaagatgagattttgttgtgaattgattaatcaatcaggtttctttgttcgatccattcttgttttctttgctttgacttatggaaaccaaatttggtgttaaaggtttttc

SEQ ID NO: 39917 - DNA, 374 bp, Arabidopsis lyrata
  Intron number 1 from transcript 911906 (locus 911906) deri ved from phytozome v7.0 (chr-ID scaffold_1; pos 8856809 to 8857182)
tcctcgtgaacagagacaactgggatcatttgcaagtcttaacttattcaaatcttttggatttaatttatacgtcaatactaatatgcatccttgattaatttgatcaaaagggaaggagaggctgcggatgtggagggttctacattgcaatgtagcgatgagatgtggggcggttcatggttaggttataaacaaggccgatttgcttttcttttggacagcgataatttaaaacacagcactaccgtgattcctagtttcttcaaggtataattagtgtgtttctaatacattaatgtcattataaaagtttatttctctgttaaaattattaagatctcacgagatttgctttggttatgcagtccaca

SEQ ID NO: 39918 - DNA, 561 bp, Arabidopsis lyrata
  Intron number 2 from transcript 478852 (locus 478852) deri ved from phytozome v7.0 (chr-ID scaffold_3; pos 5990755 to 5991315 reverse strand)
gagctacagattcatcagatagtgagtttttactcttttttttcttttttgctttcttcgaaaatcttcctaaaagtctcgatcttttttcaggtttttaatccatcatttgtgtagttttatcgatgattctgggtttatctttcatctaaaacctttgatttcttcataatcatccacaaaactcaaaacttttgtgtcataatgttcttttcttcaaaataggttttgtttcgaccaaatgagtttttttttttctttcccaaatctcaaacctttttccttttttcacacactttatgttttgtttttctttctgttcctttcttgtgtgtttcttctcttttctgagttttttttttttttttgttcagcctcaatcacttctctaattagaccggaaaatctttaagttgtttagttcataaaacccctaatgattctcaaatcttggatctatttcatggaaccgacaaaaaaaatcaagatgattatgatggtttggaatagtttcctcatggtgtctgtttcttaatatgtgcagcttcagcgttaaacacc

SEQ ID NO: 39919 - DNA, 387 bp, Arabidopsis lyrata
  Intron number 1 from transcript 485463 (locus 485463) deri ved from phytozome v7.0 (chr-ID scaffold_5; pos 15519356 t o 15519742 reverse strand)
tcgctgcgtcggtatccctcgtactctccgtcaaggtattcgtctttttgagtcgtcgaaagctccaattctccctttgattgatgatattcatggctgcttcttctatattagggttccatgaatccacctcgtagctctctattattgtaattgaatcttaacttatcgcgaaattagccatgaaatcaattttggtttcttattgcgattagttctctggattctaattcagaagtaatctcagaatttaaacctatagacacgaaaactgaagagaaatgtgtgttttgatttctttttttgtaactcaattgctcttctcttggctgcttcaatggtttatgcatatgctaaagatgtttcataactttgtagttcctgatt

SEQ ID NO: 39920 - DNA, 334 bp, Arabidopsis lyrata
  Intron number 1 from transcript 476558 (locus 476558) deri ved from phytozome v7.0 (chr-ID scaffold_2; pos 16201111 t o 16201444 reverse strand)
tggaaggtataccattctttccctaatgattacttttaacatttttgtgttgaattgccactttgatcttttccctgtgtggactaattcttagttcattttttttaagatcaagaaagtcaatatcttctgatagtaaagtgcttagcttttcttgtttctgcatttacttgctgagccatgttgcatgttgcaatgagagacatcaaacgttcacaatctctcataatattataattattgattagagtgatctatgttattttcatatacaatgttaacaagattctcgtttgcaggttataaaagcctcagaagattaagaaagttggag

SEQ ID NO: 39921 - DNA, 348 bp, Arabidopsis lyrata
  Intron number 1 from transcript 313961 (locus 313961) deri ved from phytozome v7.0 (chr-ID scaffold_1; pos 16533354 t o 16533701)
tttcttctctccctcttgttgtccttctctcgtaagtaaatgtgaattttcattggtaattcataaattggtgaaaacggttccaagattttgcataatttaaccaattatgcaaattgtggaattgtaatttatatttagccgtttgtgatcgattttgtcgtttctaagttaaattcaaatgattttttgcatcatctatgtttccattatattcatgaacttaaatgctttgggattattctatgttacgatgttaccaaccttatacaaatttgacatttttctttttttctttaaataaattgaagatcaaagcataataatcgaggccaggggaggcaaagg

SEQ ID NO: 39922 - DNA, 720 bp, Arabidopsis lyrata
  Intron number 1 from transcript 317774 (locus 317774) deri ved from phytozome v7.0 (chr-ID scaffold_3; pos 3849357 to 3850076)
tgcttcaaaacgcgggtcgtcttatagtaatcaaggttttgcttctactctttcgaaaactctgattgatttcttctgtgattctcggtttacaaatgaagtaggaatgaaatctcggttgatgaagacgcatgaagcttcagcaatatctgtagtgggattattatcacttgcatgattggaaatttgaatcttaattagtttttggagtgttctgaacttgtcttatttgatgattgatccatgtgcagagtttttctgggttttcgaccttgtggtatagaatgatatatagtggcgttaatcttggggaaaagctttcagggtactgttaggttttgcttcctaaacttcttgagatttgcagtgatattagtactcttcgatgggtaaatcttcagacttctagattttgcaggagtgcaagagactttgttgaaaggcttcacttattgcctaggcttccatagagtagaataagccttaatttatgagttttccaagtgctaattcgccaacttcatctattaagtccccacaaatacttgagatgttgtcaatgtcattgtgtctaactgctttgaggtttgattgtaccttgttggaactttttcagtaaaacaatgactcatcacattcctcttggcattgtccattattgacgcatcattcttctgtgtttcagatcattcctctttcagctcagcacttggtgtctgc

SEQ ID NO: 39923 - DNA, 412 bp, Arabidopsis lyrata
  Intron number 2 from transcript 493561 (locus 493561) deri ved from phytozome v7.0 (chr-ID scaffold_7; pos 14969187 t o 14969598 reverse strand)
cttcacctccggtaacttcaatttccgcaagcttttgattctcctctaggcaaaattaaccaacctgctttgattctcaggaaaatattgggaagcgtgaggttaatgcagctggatgtaacactctctatctttctgagtatgtgaagctctttttgattgctttgagtttttttttttttttgatattgaagagatggaattatgtttgtttcaggtcatttgtgagagagatatatgatggacaattgtttattaaactcaaaagaggatttgagtttcctgctttggatccatgggtatgtgttttacgattcttgaagcaatgaccttactatgtgtatttgtttcttttatcttgactaagttattgttcttattggttttgcgttttagggaacgagtgatcctt

SEQ ID NO: 39924 - DNA, 768 bp, Arabidopsis lyrata
  Intron number 1 from transcript 341138 (locus 341138) deri ved from phytozome v7.0 (chr-ID scaffold_3; pos 3982643 to 3983410)
aagtttctaggtctcaattttttaccctaattttatttatatctctttcttgatttcttttttcagctttattttcccaaaattccttttccttgttttgttaaagattagacctttcacgttcaaattaatttctttactttttgaattaataaggagaacatgacatcatcatccccttggttttcttaatttcaagttagttaaaaacaaaaatactttaaagtataggcagatgatcagttcactctttttctgtggtactagttttgttttggtcgagagagtgaatgaccagacattaggagtttctgttaagatttcttcatgtgcttttaaagaaacaaaaagagtaaaaccaccaaataatctcttctttgacttagtttgactttttgtccttgataatctctgctttatatatctttcgtggcttctgagacatgttccctattcttttgtatatataatgtgcatcgaaatatgtagaacacatatctttcttatctatatatcataaagatgttcttgtgaatctattagtccaaagtgagtttaatttcaaacaatcttggtccgtaagttaacacatatggtgtcttagtttggtgggccaccaactacttagtacggtctaatagtgcagccctcataaattcataattcaatattgtggtacattattatgcaaattttgaatgaatgatgaaatcatgaaagtgatgtatttttcattcctttgttggtattcctcatatttttaggatt

SEQ ID NO: 39925 - DNA, 890 bp, Arabidopsis lyrata
  Intron number 1 from transcript 894415 (locus 894415) deri ved from phytozome v7.0 (chr-ID scaffold_6; pos 11125070 t o 11125959 reverse strand)
agttacaaacttacaattcctattaacattaacatgtataaataataataacagaagaagatttctgcaaaaaaaaaattctcctaattgccgttttgcaattttaccttctatttctaaaaacaattatatagattaatcatacaaaatcaaaaataatacgcaatataacccgacgtaatcaccttattgtgataaataatacagcaaatcgaagttctctcaagaaggattacaaatctatcttttttgaagttcaaaaatctaagtgatttgaaattttagaaataaagggttaaatcacaaaaaaaaatggctacttggaggatttattttttcagaaaatcctactagaaaaactcaatgcatcaataaaatttaattatctatatttgagattaatttaataaaatttcaatgcagaatagtgtaaccgaaagagtgacattaaaattcatttaatactgtaatactaatatttactgtaaatttaaaacagctttaaaaagaagacttaaataatagatatatggtaactcataaactcatgttaccaatgatacccatagaaaaaagaacaacccattatcccatataaaaacttgcatctctaaaccgcagcaattgataagagtctctttcgtcttgactagtatctcttaattaacccacagaataaatttacaagtgaccgtctcaaaaaacttccttataagtcctttcaagcttcttcatcattcatcaccaatctctctttcatattggtatgttgtatgtactcaatatgaaatcattcttcttctgtatatactcatgggatccaaacttaaactcctaaatcactcatccattttctctacagccacagtcgttaccaattggcccctaag

SEQ ID NO: 39926 - DNA, 204 bp, Arabidopsis lyrata
  Intron number 4 from transcript 320039 (locus 320039) deri ved from phytozome v7.0 (chr-ID scaffold_4; pos 621713 to 621916)
tccaaagtgctcggttattccttctttgactggtatgtatatgctactgaagaaaagcctttatatgttttaaagccttaatggaagtctcctggaaaatttgttctttgatttggagttagtaatgaatgtggtttgatattctcggtttgtaaccttctataagtttttggatgtggcagcgactctttgattgaacaggcg

SEQ ID NO: 39927 - DNA, 707 bp, Arabidopsis lyrata
  Intron number 4 from transcript 493615 (locus 493615) deri ved from phytozome v7.0 (chr-ID scaffold_7; pos 18384130 t o 18384836 reverse strand)
acatttttctattgctgcatccttttgtagctatcattgaggtgttgatttgttagattgatgcttaagattgtgttaatgtagtgaagtatcctgactcagtttaatgtttttttttttttctgtttattgatttaagcatgaaacaaatcggagataatggtacttagactatttgttaatgtagtttatctaggtggtgatccagtgtcgttttctatccatggatgattaacaaactgcgttaaaatagtgtgtttatgtagtgaagtatcctgaatcaatttgatgtatttctctatgtatggcttaaagcacgagacaaattggagtttgctatttgtatggtagcgtagactatgtgttaatgtagttaagccaatgttgttttctatccatggttgattaacaaactgcatatcaaataatgtgtattagtaaacttgtcttactgctgaccgtgcatcagtcttggactaggtgctagctgcgtcctttagaacaagtatagtgagctattcttatttactacctgcgattatcacaataggcattgggtttaaattagttgcttaggtattcaaatcattgaacctctcaggcttcttgtaaatttgataatattcttcaaagtatgatttgatgttttcgtctcttaagctcagaatgttgatagtgctgtgatcttttgttggatagggcttgct

SEQ ID NO: 39928 - DNA, 727 bp, Arabidopsis lyrata
  Intron number 1 from transcript 943308 (locus 943308) deri ved from phytozome v7.0 (chr-ID scaffold_6; pos 22893928 t o 22894654 reverse strand)
aggcgacgccgattagcaatctcaccggagcaaactcagtcctcgaaacaaaggaagaagacgacgagacttaaagtttcgagagagagaaaggatggatgagagaaaatgaatgaagagataaagagatatcttcttattttgttcaatgtaatgagttataaattgggctgtttgacttttgcgcgtgagggtagaagcggtagaaacatgggctgaaatttttaatgtcttgggccgatgagcataatgtcgaaaatttaattaagtctggattcgttacttctcacccaattatctctagacattatcttcaccagattaaaacaatgtgtgagaaaataaaatctatcttattttctacaatcaggcttctcatcgccacattaataatggaatggtgaaagacttcgacaattttgatgccacatcaataatgaagttacatgctccataagtaatgccacattattaatttattagcttttgaactaccatcctaaacccaaaaaacaacactttatgtgtcaagatatattgtcattaagctctaattttatgaagaacaacactttataggtcaaagctaataataaattgaaaagaaaaaaaaaatagttagttttgggccaaagcccattacaaaccagcacaaataatccgaaacagtagtttgccgttaataaaaacagagtggaagagcaaaggacagaggagacaaatcacg

SEQ ID NO: 39929 - DNA, 776 bp, Arabidopsis lyrata
  Intron number 3 from transcript 931117 (locus 931117) deri ved from phytozome v7.0 (chr-ID scaffold_3; pos 18462900 t o 18463675)
ccagaacttggtcagctttctaacttgcagtacttgtaagccatctcttcctcaatgtcgattgattctacaggttttctgtttttgtttttcatcttatattctacttatgtgtttaggatggatttgaatttgttatgcatatgcttcatcttgcttgtttaatgactgtggcataagatagacttcctgaatcttcacattacttccgtttggagagccttaagggtcatttagatactttctagatttttttttgatatctttggtaatcgctaatcgatgccattttagatctcttaagataggcttctcgagccttgttactggaatccttcataatcatctgtcagtttgaatagatagggacctagaaccatggcattatgaaagacattttctttttcgaattctctatgtcaaatgttctccttaaagtctattaaaaaaatatgtaactggagagtttggatctggtatttctctacaggtgatctcaactctgcatatttgtgttcctgcagcgaaatgttttcttgaaaataaatcaatctgaattgcttacaaaaatagtttctactttcatgtatcttagccctctacgattagtatagttcttcataattactgggtatcttgtttgctacatacttcattatgttttctgtaacatgaacttctggtaaaatagtttagagattttccagtctacaataataattaagcaaagcttaatgacagggagctttatagcaataacattactggggagatac

SEQ ID NO: 39930 - DNA, 550 bp, Arabidopsis lyrata
  Intron number 1 from transcript 934807 (locus 934807) deri ved from phytozome v7.0 (chr-ID scaffold_4; pos 19597204 t o 19597753 reverse strand)
ttaaggtttaccaaaacgatcctatgaatatttttgaatttataaatgataaatttctacatgagataatttttgaatgattgtcatgtgaatcttgtaaataaaacatagttttttttttcttaatgttattattgtctttatctaggatacaacaagatttgtctgcatccaatttctttaatacctttttctacaaagaacttgatgagttgtaaggtatttcatctcatcacgagaaaatatttctcacattctcctgattctcaatttatccttattatttatgttgattggtttatttgtgctttttctgcacattataacaactcatattttggtgtgtttctaaccattttcttaccaatattttggtcagaatatgtttatgtgaagaaccccacactaatttcaatgctcatattctagttccactttctatgattaacgaactgattcaaagtcaaatcttcgaactccctcacgatattggcgagcaatataaaccttgtagtatgctaccttgtgcacttttctcagctatctgaag

SEQ ID NO: 39931 - DNA, 414 bp, Arabidopsis lyrata
  Intron number 4 from transcript 492909 (locus 492909) deri ved from phytozome v7.0 (chr-ID scaffold_7; pos 10166841 t o 10167254 reverse strand)
acagtcgggtgagtttagttgtatgtgaaaaatggttactaaggaagtatatgtcttttagtctctgttgtttttagtgaaactatgaatctattagctgtctggtgatttaaaacatcatggcttcttgagattcctctatagatatccatctctgtgtcatcttctttactagctctaatcaaagcgtattagttgattgatcagatgagtctctaactgattttattcaagataaaactgtctgtgatagagatcaagctctctgtttcttccggtttggatagatgtgtatggttaataaatttgtgcttgttttgcgatgatgtattcttcttgagcagtaagaacaactagattaaccttatgcctttgcctgttacatttgctctccagacgattgcaacagtctgc

SEQ ID NO: 39932 - DNA, 482 bp, Arabidopsis lyrata
  Intron number 4 from transcript 489858 (locus 489858) deri ved from phytozome v7.0 (chr-ID scaffold_6; pos 20019392 t o 20019873 reverse strand)
tccaccttcaccattgcctctggattacacacaaggtttctcttttacttgtttctcttgatatatcgaacaacgaaaaagatcgagaagctttcgtttagagcattgacataagtaagccaaaatcttgatggttgtctcaatttatgattagtttgacttctgagttattagaatttagctgtttctttacggaatcaagaaccttcttctgctcattctatttgtctttctatgtataagagtataaagacttaatgtactttggtttgtttgcttaatctaatggctatcattagtttggctgctgaagtttagagaattttagctgcttctttaccgaattcaacacagattacgatatgaagaacctttacttcgttcgaactcgtttttcggagtataagagttaatgtactttgatctgtaattatttttgtttttgtgcatttttgcagagccacctccaccaggagtatcaa

SEQ ID NO: 39933 - DNA, 343 bp, Arabidopsis lyrata
  Intron number 1 from transcript 480452 (locus 480452) deri ved from phytozome v7.0 (chr-ID scaffold_3; pos 20557660 t o 20558002 reverse strand)
accatattaataaaccagcaataaaaagtttccaagtaaattgagcttttttcttaaactttctatgttgaacgataaaatttatgttgttttctacaaatacggtctgtgatataagtatttgttgttgtaaactattttaataaagctatagtatttgttttgagccaatttgcattttggataagaaaaaactgaaaggtcaaaactcttaacggctttggttctcagtaatatttgaatcgacattgttttttaaagagtgcaacaattgaagttgcattttcttcctttttcagagcacattaatgttctttttacctcgtatattgacagacgaaac

SEQ ID NO: 39934 - DNA, 941 bp, Arabidopsis lyrata
  Intron number 1 from transcript 936454 (locus 936454) deri ved from phytozome v7.0 (chr-ID scaffold_5; pos 3542700 to 3543640 reverse strand)
ttggtagctgcgtggacatctgcgtgatcacaaaggtttgtcttcaccctgctttgattaattatctacaaaactcctagagattagctgtataaaagaaatgatatgcttgtagtatagtaaaagggtcttaatctccgggaacaaccatcgttggtttgctctcttagtttctcgtttattacaggcttgttgcttagcctcagtcgcgttgatcgcttttatgttcatgtctacagattgcatagagtaattgtttgatatgagatgttatgttatctttaactagtcatggaaactcttttgcttattagtcttcgcattatatgatccctaacttagtgatactgtcttaagttgcccagatttttatattgtggaagttgaaactgagctggtcgctgatgccatatgttcgtgttttggtagctgcgtggacatctgcgtgatcacaaaggtttgtcttcaccctgctttgattgattatctacaaaactcatagagattatctgtataagagaaaaaggtcttaatctccgggaacaaccatcgttggtttgcttgttttctctcttagtttctcgtttattacagatgtccgtagaattggattagtcaagaagttgaggcctaagactcacccctttcagcattgcagggatagcgctacttaatgtgattgtttatatttgtatcctgtaaaaaaattattgggtctttgttcacaagcattttccttttcacatggtggtgcgtatgatcagctctccgcctctccatatagtttagagtacatcattcaaacgtgtaaagatgtgtatgttcttgtgctctcactgtggaagctatataagactgatttcaatactatgggcggatacccgagtagttgaggctagaggccaattggtgctgacaaaaatcgtgagaagattcactat

SEQ ID NO: 39935 - DNA, 585 bp, Arabidopsis lyrata
  Intron number 1 from transcript 473770 (locus 473770) deri ved from phytozome v7.0 (chr-ID scaffold_1; pos 22083876 t o 22084460 reverse strand)
aaaacagagattcttttaaactaacgaagacataggtatgtcttctctgatctgtctgtaacattagttttgcttggcttttattggtttagcttagatcgctttgttttgcaacccaaagatctgacctctgagtctcatgattttgcaaagaaagcttagtcttttgtgttcttgaaatcttaggtttgtgttcttgaaacttatgttagcttctttggaattcagtgaggtagacaaaagtttaagtttagtacggttatcaaaagagattgatttcttgaaaataattgttggaatatcaagaatttgtgtaaaataaaggaaataaaattagtttaactttgaggttttgtggtgattttggttagttgcacctaactttttctcaatgtttcttggtcttcacatttctataattccatttattatatttcctattgtttaatttaggtagctttggtataatctgttaacttgatgtttcttctcatagagatttgaggactttatgttaaggttatattatactaagaaaatgtttttgcagcgtttttctgaagtagaagctttggtattcggaaa

SEQ ID NO: 39936 - DNA, 644 bp, Arabidopsis lyrata
  Intron number 1 from transcript 887494 (locus 887494) deri ved from phytozome v7.0 (chr-ID scaffold_65; pos 28837 to 29480)
gttatccaaaatctatactgttttgacttagggtttgattgtttgaattaccagttggaattatgttttgttggttaataaattatcacaagttgacaactaatcaatatatgtgcgtaaaacatttcgttttggtgggttcggttttttttttttttttttttttttgaattggtttttgtccaccaaacccacccttacacaaccaatcattcaattcggttgaacagattcgattcttgttcttaaagagattatggactttgtttgttcttctcacttctctagttttatacaagtatgtgtcttaattcggtttgatctgattccttgttcgtttaagacaggtatccaattatacatgtaaggtcaataaccacaatcaagatctaatccagttttgactttcatatattagttttgagttaaaagacttattcaagttatgacaagttgacaacttaacatgttgaataatagtgcttcgaggattcaaacagataataatattgagaaaaatcattcggaaactctctctacagaaaaaagctttctcatggcggcttctaccttttcttcttcgtcttcttttgtaggattgattccatcacggcctttagtgttcatcaagtcacaggaagaag

SEQ ID NO: 39937 - DNA, 477 bp, Arabidopsis lyrata
  Intron number 1 from transcript 475672 (locus 475672) deri ved from phytozome v7.0 (chr-ID scaffold_2; pos 9930990 to 9931466 reverse strand)
gcgacggcttcaggtgccatttccttctaatttacttgaatctggttatcgattttgcttttaatttcccttttgatggacaagaatctcgatttttttatcatgaattttagggttcttactgttttggtttttatttgatccaatttgtctgattcaaatttttctattcttattgatttggtgctttgtgttattgttcgtgattgattccttcaagttctcgattcggctctttaagaatctctgttctgatatctactttttataaattgtctaatcatgaagataatgttcttactgttatggcttttgggggttgtcgaatcattgcttctctctgttttggtttttgtttagatccaaattgtgatacttagagtccgattctcttaaagttgtatcctttatctttctgacatgttttggggcgtttttacagttgcttttaagtctagggaagatcataggaagcaa

SEQ ID NO: 39938 - DNA, 366 bp, Arabidopsis lyrata
  Intron number 2 from transcript 475246 (locus 475246) deri ved from phytozome v7.0 (chr-ID scaffold_2; pos 2889414 to 2889779)
ctggcgtcgtctctaataacaacgctcctcttcatgtaagagctattctcattcaaatttacagtcttttatgctctgttttgttggttataagcttatctaattagaaattttgtaacttttctcaatggtctcatgtgggtttgagttctatcgttgctgtgttcataatactgagtaaattttatctttttcctgtgaaaagctgagtttggtcttagagttttacacgattactccatgggtttattagtcttcttttgtcaaaatcaagatgatattgagtgatgattgtttgaaatttgaagtccttaatcttgtgtttgtgttttctgtagactgcgagtgccatttactctggtagct

SEQ ID NO: 39939 - DNA, 920 bp, Arabidopsis lyrata
  Intron number 1 from transcript 353559 (locus 353559) deri ved from phytozome v7.0 (chr-ID scaffold_7; pos 3694876 to 3695795)
ccctcgcgatcagattcttaaagctcaagaaattggtactctttctagggattattatcatccttgacttgttcgtatcgaagttcggttttcgttattgtttgtgtgtgtaagaatttgagcgacttgctgaaagattgtgtcaatcgaattggcttctttgatcagattttatgtgtgtttggctgatcaaattcaaagcggaatttcatgtgtgtaagaacccgctttgaaccattgcatgtttgaaatagggaaactttgtagagaagaataggacaacacccattatctacatttatatcttttagtttattgtgtcctctgattgtactagttaatgggtggtgaagctgttaaatccagatttcatgttggaacctacttacttggctttagcagaaattagatcttatgaacctgatttaactgttctctacttatgcttaagtcacctcgcaccttgaaatttagttggcctttctgtgaaattatttataggtgtggttcaaccacagtctagtgtttggaaagctcaattatgttgtgtttttatagtttgcttgctgtattgtgccacaaagtttgcaaggaaaagattgctacactgcttgattggagccaataaatcttaaggctttgtaaattatcacattcagtgggttcctcttaggagtggtggaggaacccactgattgtgaatgttctttttggcgtttcttgaggcttacttttacactatcctactccgaggttacagatttatgtgctaatatctacttatttacatatgtgtgtgttttgcttgcctaacttgttatattctgaacaagaatattgatggatgtcaaaatgttagcatcatttatatgttgttgattccagtctcttataagcgtaataagataaagccagagggt

SEQ ID NO: 39940 - DNA, 485 bp, Arabidopsis lyrata
  Intron number 2 from transcript 478899 (locus 478899) deri ved from phytozome v7.0 (chr-ID scaffold_3; pos 6197690 to 6198174)
cttgtacctgctcctccgtcatttgccacgtcaacagcatgtgcgttcttctctctttttctacatcatcctatcttttctttgtcagattatcattaatacactagtatattactagtagttttaagcattgaagtaattcaaatatagtaatatacaattaatatatgatgcaattagatctacgtctcattcattttccaaggtactgaaaatagatttgtttactcaacttgttttatttaataaagcaggtttagatgtggacaaatttattgaagccgtcgctattgaccttttttgacgcgtctgtgaatctttttttgggtcgtttttgacgagtccgtgaatttcaatttttacctattcaacttttttcactttcgtgttgggtcgaaaataaaaatttggagatttaaacttgtttgtttttttcccacgtaatattgaaacagagttctcaaggcacaagaccttcaaggatc

SEQ ID NO: 39941 - DNA, 562 bp, Arabidopsis lyrata
  Intron number 1 from transcript 473899 (locus 473899) deri ved from phytozome v7.0 (chr-ID scaffold_1; pos 23756613 t o 23757174)
gctaaacctagagttctcgctctttccggtgatatatctttaccttcttcttcttcttcttcttctctcttttgattcttcaaatttgatagcatttctgtattcatttcacctttaattacttcgttcttcttcgcgttgtttggctagttctaaggatttggattcggtgtttattgcattagatcggagttttatttcctgtacagtttgaattatggcattacagtcgcaaagttgaagtctacgaaagttatcgaagagaacctgttgaaattctactgttcctggcccttcctagactcgtgagagctcaattaggttttcctgtcaacaaaaaggattttggtagtgtctattaggtgaatcaatctagtgtactcgaggagaatctgtgttgtgttctgattcaagtggaagatatgttgcctctgatccatgtttcaagctttctcgtccaattactttttaggttcttaattgttgtaatcaactgagtatgctttttgttattctgcttgttacagtcaaatcgaagggtcaacggaagaaagcgtttctt

SEQ ID NO: 39942 - DNA, 406 bp, Arabidopsis lyrata
  Intron number 2 from transcript 471331 (locus 471331) deri ved from phytozome v7.0 (chr-ID scaffold_1; pos 4756747 to 4757152)
ctccagtggcaaagactcaaatctttgtaagatttctacacgacccatttcagtttttatgttttctattcacagaatcacagattatttcgattgtagacaacatttgttttcttcttctttgtgaaaatacgatttcgattcaatctcattgcgattattgagttccctgattgttgcagatgttttataaatgaatcttaatcttatagttgaagattcatggatttaaaaatgctctctttttgcctatagagcctttatatgaatctcctttcttcattccatagcttaagagtttatcaatgtcaattcactgaatccagttgaatttgaaaaaattgcatttatggttattgattttgagtgttcttggatcaaacttgttatgtagcttgtggagaag

SEQ ID NO: 39943 - DNA, 400 bp, Arabidopsis lyrata
  Intron number 1 from transcript 473229 (locus 473229) deri ved from phytozome v7.0 (chr-ID scaffold_1; pos 13342932 t o 13343331)
ttttttcttgcttttgcgaagtcaaagataaaaaaaataaacaaggtttgtttcctttgttcgatgctgtttcgtttttgtttctcagatctgtatgttcttgatttgtttctatgtgtttgttctctaattctgtgttttgattaaattgaccaactctgattatgattcatgactctttatctttttattttagttaaaattattctttggatttgtaagtcgacttaagagtggaaattggaaacatttctgtctttgaccagtgaatagaaattgtttttagtttgttttcttcgatccaaaacaatagagtagttaggttttgctttgcaagaatctgtcgaaattttatgatctgcttgtaaataagtaaaagagtgtagaaacataaacactt

SEQ ID NO: 39944 - DNA, 177 bp, Arabidopsis lyrata
  Intron number 3 from transcript 495747 (locus 495747) deri ved from phytozome v7.0 (chr-ID scaffold_8; pos 17627104 t o 17627280 reverse strand)
aaggtaaagtacttgtttttcttctcattgactagtcaattcaagtaaagtttagttcttttgataatatgatcacttggttaggactaatgattcacatataatgctggtgaatgaggcctttgagtagatttggggttttgagtttgtttcttttatgagtcacaggtcatacag

SEQ ID NO: 39945 - DNA, 289 bp, Arabidopsis lyrata
  Intron number 2 from transcript 485800 (locus 485800) deri ved from phytozome v7.0 (chr-ID scaffold_5; pos 16844830 t o 16845118 reverse strand)
cggcgttaggtacgtacaaacatatatatcaatagatcattatattcttcgatagttagaaaccaagttctaaaatataatcaaacccaaaatttgtttcctacttggatagaaaagtttcatcagtcttttacatcgatataggaacaacctagatttcatagcttgaccaatatcacatgaccgatttaagataaactatcggaaaagaaagcgtcaatcctcatgtgaagctttgtttccattcttatgtcttactctttcctataattgtaggggaaaacattat

SEQ ID NO: 39946 - DNA, 744 bp, Arabidopsis lyrata
  Intron number 1 from transcript 892273 (locus 892273) deri ved from phytozome v7.0 (chr-ID scaffold_6; pos 1075916 to 1076659 reverse strand)
cttctggaactcaaagtaatctttgataattagtccgcgattgatcaaacacgagagacctctctcgtgaccgtgaaattggtgatgtatatggatcaccaatttcacggtcacgagatcagcgatcctctttgtaaaacattcgcagagaaggagaagagttttttagggtttagaagaaggaattaaaatttctcaaggaagaaaagaaacgatgaaatatttataaagagaggttcacgcaaaaagaaaaggaaacatcagattgttttccttttttttttttttatatttggactttaaataaaataaggaaattgatcacaattacggtccgtttacaacggtcttatttctctaactgcaaggtgtgttccactatccttcacgcgcatcatcgccgtattttgtgaatatctgatcattggcgtcttagattctgagaatttccatagattaggttcttgttactagctactagcctagaccggacttggtgaagttgcacatatgagatgcggtggtggatatttgatgaagcaaagtcgcttgagtgatgagatagtgaccaaatttgaatcaagatattaagaggcagaatgaggatgcccaactcaaagctttgaaagttgacatttctctttaatttcaatcagtccagcttttggtgaacaatcctggaatactttcataattcttatatacaagtcaattgcgttttgtggtctcaagattcttggaccg

SEQ ID NO: 39947 - DNA, 373 bp, Arabidopsis lyrata; identical to SEQ ID NO: 39104
  Intron number 1 from transcript 938169 (locus 938169) deri ved from phytozome v7.0 (chr-ID scaffold_5; pos 16283151 t o 16283523)

SEQ ID NO: 39948 - DNA, 471 bp, Arabidopsis lyrata
  Intron number 2 from transcript 489959 (locus 489959) deri ved from phytozome v7.0 (chr-ID scaffold_6; pos 20876412 t o 20876882)
tctcctcgagcttgaggctcctatcaagatttgtggtaatgttcacgaattcgatgtttttctctgtttactttatcttacattcgtttttgtgttgtgggtttttgataaatttccctttttttatgtaagggtttagctttgtatgtttgttgtttggaagcttaaagcttagatttgtggacttatgagtgtacgattgaagatggatatgttgcgaattagttaattgctctgccacttcaagtagtgaagaagtgacttgtaacttttgtgagtctctgaggaacatgaaattggaatctcacctgacatgttacttgaaggaagatcttaaagcttcatttgatatctaatagttttgtttttttactgaatttgatgtatgttaccctctcttctgctgtcatcataactgtatgatttataatattgttgatggttttaagtttatatgttgatgagcaggag

SEQ ID NO: 39949 - DNA, 654 bp, Arabidopsis lyrata
  Intron number 1 from transcript 483494 (locus 483494) deri ved from phytozome v7.0 (chr-ID scaffold_4; pos 21376404 t o 21377057 reverse strand)
gcgattcttgcctctctcgcctttctttgacttcggtgcgtaacttctttctctgtaacgagctatttagggttttctgctgattttttggtatctattaagctttttttcttctactcttcactgtcttttatgtaattggaggtgaatcaggcatgtacgtttcgatttcgagacgaatcgagctcctagctactagatttggtgttagtggtcgctttgctttacgtttttttggagtagtttatcttagattctatttgatgtaatagagctagagatgtcaaaattgaatcggtgagatctctgtaaccggacttgaagtcatttttagtctctggtgcaaaaccaccacaagttttagagagatatcgatttcttaatgatctgtgtttatttacttacggcttgagaataaacattgcaaccttttgcttttgtaggctttacttagaatgtgcaggtttcatgttggtgtttagtatctgctttgttcggatgttatattgagtaatggcttgaaaattttgaaaatgggatatctgtagaagctacacagctgtgtgaatattgatataattcgatcaatctgctaactcttttttctcatggaatccaggttctaacttgattaacagtgaaaaggagactaag

SEQ ID NO: 39950 - DNA, 544 bp, Arabidopsis lyrata
  Intron number 2 from transcript 477504 (locus 477504) deri ved from phytozome v7.0 (chr-ID scaffold_3; pos 690199 to 690742)
gcttctacgattcgctctgctactacgtgagttttaatctcttcatttcgaattcgtgggctttcttcgtttaatgctttgaatttgtcttgatctggagtttgctttgagtatcgatgataaacctctggctttggttgatccagtttcttcttttcatcaatttggttcccaatgcactctcactatgtgtaattacgagataccttagtttctgcttcgtttagatcaaagaatcttacttttttctctgtctcttcaatttttttttgatctgaaaatctatccttacatgcaaaggacaatctttgctaatctcttcttctttcccaaacgcatgcatgaattgttttgtgtttttgaatttccttttacttggttgttgacccataagacaactatgctaaataatttcttattcatttattctcttgtttgtttattatgttaagaaagcttattggtgttgttcaggattgttgtgtagtagctgcttaggtaatttctaaagctttatttggttttgattacagagaggttacga

SEQ ID NO: 39951 - DNA, 465 bp, Arabidopsis lyrata
  Intron number 2 from transcript 317048 (locus 317048) deri ved from phytozome v7.0 (chr-ID scaffold_3; pos 250485 to 250949)
gaagaaattgtccccccgtcgatcagataacaaaggtaaattcacatacatatatgtgtattaaggtttcgaatttgatttgattttaatccagatatttggattttagattcattaattagatgatcaaagtatatactaattaaactttattaataaaacgtatataaactaaactgaataatttatcaaatcatttttgatttggagaaaagaaaatactttacatattttgtttctagtcttgtatgaaaaatgaattgcaaaccaattaaaattgggtaatgaaggaatttacgttatgctaatattttcgatttgatagctaatataaaagaataatttattgagaagtttgtatatttaaacacgtttacccatttttagcaagttttgaaatattttaaaacaaaagaaattaagcctgttataatgatttttttgaagttactgaggccagacccc

SEQ ID NO: 39952 - DNA, 824 bp, Arabidopsis lyrata
  Intron number 2 from transcript 337811 (locus 337811) deri ved from phytozome v7.0 (chr-ID scaffold_1; pos 32131224 t o 32132047 reverse strand)
ccaaggttaaatctttctttcgacattctctcttactaatagtttatcggattcgtcgaaaagtgtttgtttagtaggtaaaattatatatatgttgcaagtattgttaaataacagacctttaatgattgaagcttagatggaagtttctttagtaaatcataattctattcgaggatgcaaattgaatcgaaaagcaatgtttgaatcttcgtataatgttcgcttacccttattggattcatcgaactcgtttgttttactggaaggtgttttgtttagtagataaaaccataacatttgttgcttgttttaattgcaagtattcttaaattttagttctttaattattgtagttggcatgctaatagaagtttagatggaagtttcgttattacattgtaatccgcttacatatgtattagcttcaagatgtttcagtggtattgatctggtacaaatttacgattttataaagaaaattttactacttttttcttcgttctagccacttaagtgttatgttttggaccttttggcataaaaattatgttggggagaacttcttggtaatttgctttctcttgttacattagaacgtatctgatatgattgtagacattgagccagtgtatattattgtaccagagttgtttaatatcgacctagagcttatggtgttatcaaattgggatcctctcatatcagttatataagtatggctgtgagtattgtagagcgaactaaaagtgtgtttgcgtggatctatttgttttgttagcatattaggatttgaaattgtctttaatcaagtgtagagaaac

SEQ ID NO: 39953 - DNA, 605 bp, Arabidopsis lyrata
  Intron number 1 from transcript 477212 (locus 477212) deri ved from phytozome v7.0 (chr-ID scaffold_2; pos 19048251 t o 19048855)
ctcctaaggaggccaacctcttcaagctcatcgtcgtatgttccgatgctctctctctctctctatctctcagtttttgctttgtctttaaacatgcgatgtaatgttctgttcagcacaaattggattacgatgagttttgtccaaccctaaattaagttaatcgtcaatgtgttgggtcaatagaaaagtcgttgacatgtgaagtaaactgtttggagttttggttccttaatgtgttagttagtttgatgtaccaatttcttagcttcaattacttttgattatcggctattgattgcttctgggcttctttagtcgcctaggatctttgacacaggctgagatagagagacctggtcgagtttttttgctcagggattcttagtttactttgaggaacatgaaaaccaatctttatcgatatattgtttcagacatcttttctaaagtctacttcagcatatactttggttttaaccaatatattgttcaacctgctttgaatagttctcctttatttgtaatgtaattttctcaagtgttttagtatatatatatatcgcatatagttattctgagtgatcttataatgcagaaatcat

SEQ ID NO: 39954 - DNA, 710 bp, Arabidopsis lyrata
  Intron number 1 from transcript 474854 (locus 474854) deri ved from phytozome v7.0 (chr-ID scaffold_1; pos 33002137 t o 33002846 reverse strand)
ccgtttcaactctttggatccagattctcctccttgtaagctttcttctccctttcaatttcaccaatttcgattctttctctgatgggtctttgttatttctctctttggatctgaaagtttcgatttttccctatttgcattattaggtattcgttagttttcacgatttccttctctcgtgtattgactttgaagttttggttataatctcttaagattctgtgtttaaaggttatgacttggctttgtgtgggaatcatcttaatcttgagggttggttttagttttttagaaaggttatgactttttaattacccgttttctttgactattgtattcagatctagggttaagatgttttgttaggtctttgtttcaatttttggtatatttggttttgatttttgttgttgtttagtttatgtaggtaacacgcatatcaagtgttaaagagtcaagatcacaaaaagttctatcgggtgatctgggctgctttgttttgtaatctaattgcagaaacttgctctgacttggtggagtttgatagcttgcgtaaaaggttcaatctttctccgttttttcatcgatgagtaggtactaatctggaaatttgttgggagagaaaaggaagattttactgctattgctagagaacttttctgcatccatgctggtagagagcatgcgtggatactgtgttttgggtg

SEQ ID NO: 39955 - DNA, 371 bp, Arabidopsis lyrata
  Intron number 1 from transcript 918289 (locus 918289) deri ved from phytozome v7.0 (chr-ID scaffold_8; pos 21715055 t o 21715425)
ctgagcctgagtacttcgaagagaagcgtaatctggtattctattttactcatcttccggtttggatttacggtttatctgagctttagatttctgagttgattctgtgtgaaacgattaaggatttgttattcgtctttcgttgacttgttgtgtgtgtggtttaacgattacgaagttagatctgagatgttttcttacgtttttttgttcttgcagaatgttatagttatagtgtcttgctcagaagtttttgaacattttgagttctatgtacctttgtttttttctttcatatctctgatgtatagttttcatgtttgttgtgtataacaggaggatttgtggaaggatacatttccagtgggaac

SEQ ID NO: 39956 - DNA, 817 bp, Arabidopsis lyrata
  Intron number 1 from transcript 938815 (locus 938815) deri ved from phytozome v7.0 (chr-ID scaffold_5; pos 18800978 t o 18801794 reverse strand)
tagataaggagaaggcagagttgttggctgcaagagctcctttctcgtttgatcacttgaatttttaagttgacttggagtttgagttttgcttggtgtttaggtctgttcgtttgtgctttggtttcaaagttagagtcctcttttttgttctgctagtttgtgtttggtttgaaaaggaggtgatgaccaaaacttccttcgattccttttcttccttgtttctgaagttttgttgcgtgaagcattgatcttatcaatgttgaaaaaaaacagagagtaacttattgtggtctgttcatggtgattatacgtatgaagaggtgtgcgagtgtgcaaacgaggtctatattaggcagggattgaacatattgtagaaaacattaaaaaaaaaaaaatttcagataatttagttattaatcgattaattattagaccagttattaaataaagaacaaacaattatccaaccaaaaaaaaaaacaattaatagctaaaccaaacttattaatacgtggattaataagactctggccttgtgttgtttagaagaagctgtgcaaagaaaaaaaccctaggaggagcaaaagccattcgccttcagagttggatgcgtttaggctaaatctgcacatttgtactctaaacacctaaccattgtttcgtgtattgttggaacttttaaaggcttgattttgacagtagaatcgttaactctgttttggtttcgtagctcgagattgtttgacttactaatttgaggttcatatatgttctggtagcttgattgccaagactcttcatctagatcaataag

SEQ ID NO: 39957 - DNA, 207 bp, Arabidopsis lyrata
  Intron number 1 from transcript 490540 (locus 490540) deri ved from phytozome v7.0 (chr-ID scaffold_6; pos 24954594 t o 24954800 reverse strand)
gtgttcctctcactaaagaagttggattccatcaggtttttttaaataatgttttgatttagtttacagagaaaaatcagcctaaaaaaaacaaaatgtgaaaaagtaaaacttaaaatccgtgatttgattcatttgactctttttagctcacttattgattttgtgatcatctcttcattaatattggtgatttttaacagttcg

SEQ ID NO: 39958 - DNA, 339 bp, Arabidopsis lyrata
  Intron number 1 from transcript 943572 (locus 943572) deri ved from phytozome v7.0 (chr-ID scaffold_6; pos 24154376 t o 24154714 reverse strand)
gttggcaacgaccattacacccattacaggtttcaaaatcagaaactatcaatttattcagcttcttttttcagaaagtttcttactttatttgcaaatcttgagaatctctcagttttgggttgatctatcgatttctgtgtttagtgagcttgattagctagtgtaagctgtgtagttgggaaaaactactttgtggatttctgattctgcttaaaaatcttgacttttgattaaatcggtagcagattctcttcttttgattttggttactaaaattgagctgtgttactgctttgtgcagattgtgggagctgttatatatagtgttctggtggc

SEQ ID NO: 39959 - DNA, 263 bp, Arabidopsis lyrata
  Intron number 2 from transcript 487900 (locus 487900) deri ved from phytozome v7.0 (chr-ID scaffold_6; pos 4250257 to 4250519 reverse strand)
ttgtttccgtaagctttttttttttatgtggttgtctgttttttttttttctctccgtgatgctttttactttcaacgacttgctttttgatttcgtggaagacaatcttaaagcttccatgactttattgaagctattattttataggtttttctgtttggtgttagtggattattactatttgatatagctctggctggatgcactttttaacctggattgatacttgtttttgtctgcagggaaagtgtttctttgattt

SEQ ID NO: 39960 - DNA, 681 bp, Arabidopsis lyrata
  Intron number 2 from transcript 474936 (locus 474936) deri ved from phytozome v7.0 (chr-ID scaffold_2; pos 420232 to 420912 reverse strand)
gtcttgagttcactgatcaccaggtctctctcgattacatggtctttttagttgattatccaatgaagttgattggttttaagattaggcattgcgcaagtttgattttcttgtgacaatgtatcaacttgcctttgtttcattgtcaaagtttgatttttttgacatgggttgtgatgaactagtgaattcttagctctagattagtggtttgttctgtttctagttcagggatttgggttttggcaaaattataatgataagtgttgtggggtttgcctagtagttgttactctcttcttggtttagagttttgcaagttgaggagagttagattttgtgcgtttaaatcacccaaaccaaaacccttaatccaattcactggacacgaacctcgtaagctgaaggcaataatactattgccattgatgctgagctcatttctttttgcttcttgattactaaattttggttgcctagtcctgcagaggatttctcttgtacgctgagattaggtttggtgatggaggattctatttgaaaatgtgatcttttgttccggcattttgcagaaaattctgtttccggttttgaatctcctgcttcttctgtttttaaaaattctgctatggttcttgtgtcccagccagagagtgcgggaagtataaggagacagattgg

SEQ ID NO: 39961 - DNA, 636 bp, Arabidopsis lyrata
  Intron number 1 from transcript 478170 (locus 478170) deri ved from phytozome v7.0 (chr-ID scaffold_3; pos 3436895 to 3437530)
tccctcaccattctcctctgaaccaaggtctctctctcactttcgatctctgttttcttcttgttctttttgggtttagcttcgttgctagattttcttctttctcaatttcatttactccgtttagctagctggagaaaccctagtttcttagtagattgcagatctgggttcatcaagtacctgcccacacatctctcttactaatcgtttctaaatttagttactttcgtagttggggttttttttgatgatttcgtattaccattataaattcttcagccaatgtgtgcatatagcttccttaatttcatcttttgatttgataattgagtaatgaatgttgcattcgatttatcatcattcccatttcccactttggttcttgagacttctcgcccaaaagcttttgcttttaatttatggacaagttgattttttttctactttttcttaccacaccgatgattgtcattattaaggaagctttccattttgttcatctttatactcctgatacctgtgatgtgtctggtgtcattcttggctactacttattcatagatacaattctcattttttaaagttaactgttatgtggctctaaatcattacatcttgtgttttgtgttctct

SEQ ID NO: 39962 - DNA, 882 bp, Arabidopsis lyrata
  Intron number 1 from transcript 948554 (locus 948554) deri ved from phytozome v7.0 (chr-ID scaffold_8; pos 2682112 to 2682993 reverse strand)
ggctaaaaaaattcgtttgcatttggttcgaatttgattcaatttcgttgtgggcgttatcttgttgtgatcatttgacttttatgttcttagatccatagagtaagagatctttgtaatgttctctttgatcttctcattgttttgatgaaactttcttgtctgatccattacactttaggaggtgaaacattgacattgaaccatatatgtgataatgcataactcagcttttttggattttgtttctcagtgcttagtttttgggtaattgatcacaatactaatcttaagaatgacgttgaactgcattgtaatttgtgaatgtctatcaacgttcatggctttgttgatgaatgaggtttatgttttatttatagagtctatttagatgggatcatatgcggttttggttcatgagtttgtttgtggttgtgtacggatttgtgatttgatgcattaaacccgtgttgctttggagttaggatctcatagattcaaggtttgactgtaacagattctttctttaactacattttccgaggatgcaacaaatatctttatcggttactcattgtaacagtagtcatacgttttataaagggaggaagagacaactttggtcataatattctgctgctgagatattgttttgatctaataggtacttgctgtgaagaaaatagactcatctgcgctttgagattagaatcgcttgtgtggcctgacgacaaaaaacctcaggtgatgtttctgctagttagattcaatctgtttgcaaaatacttgtgttctgaatacatttgaatgttcttatattgatcaggttgttctttcttttctacagccaggttggttcttgccctcggcgctgaatctaaa

SEQ ID NO: 39963 - DNA, 1026 bp, Arabidopsis lyrata
  Intron number 1 from transcript 914026 (locus 914026) deri ved from phytozome v7.0 (chr-ID scaffold_1; pos 25572114 t o 25573139 reverse strand)
tctatatctcaatcctgaggtaataaaaaggaaccccaatatttttatgttacagtttgataaccgtatatttaaatttatatctataaattggtaacctttgaaatacacccatcttagagaaaataattttatatatatatatatattatatatatatatatatatataatttgtataatagatattaatagcctaagtaaactaatttgattatgaaaaaaagttaattattttcattttagttttggatgtttgttatgataaagctggtttatttttagtaaaaaaaagtagtattatttttggttgtttaaaaaaaaaacaattaagataaaaactttgcattaaactttcttatataaacgttcatacttggacatcatgatcataaaatgcccactatagttatgttaaaaccttaaccaaaagaactccaaacaccaatataggcccattaaataacagcccagaaatgtaaagcccaatgttttatttttgttttacatgtttgttcttataaagctggctcatttttcacttaaaatttttaagaaaaaagttcttgtaaaaatattgcattaaattttttgatagaaatgtttttacttgggcatcataataacaaaagacctatataactatgtataaacttaaccaaaaaaactccaaaaaccaagacggcccgtataataatggcccaacaatctaaagccctatgtttatgataaaaacgttcatatcttggcattattattacaaaaggctcactataattaagacaaacaaaaaaaaacccaaaaaccaatatggacacatggaataacagcccgtaaatctaaagactaaaactcaatgtttcttttctttcttcctcgggaaagagagtcatcgagcaataatggagaaacaattctctctttccaatatgaacattcgtgaaaaacatttatcctttttttttttttttttatctattgctaatataatttcttccatttttttaaaatcaggttctaaagaaga

SEQ ID NO: 39964 - DNA, 987 bp, Arabidopsis lyrata
  Intron number 2 from transcript 918980 (locus 918980) deri ved from phytozome v7.0 (chr-ID scaffold_1; pos 907450 to 908436)
ggttatagtaagtaatctcttcgttttgatttctttatgtcttcgttcgtggagattatgtttaattttaggtttaaaacttagataataaagtgttagtggaaaagccactattgattttatttggttggttatcagatggagatagcttgaatgttgttaaaaccaggaagagtgactgtttgatgtataagtgttttaacaaatttctcagctatctcagttgttttgtggcattcagctaaattttgaaaaagggaatcttttatatgtttgtattattagttctagcctgtgtagttagcgattttagaaatcctgatatggggtagaagatgcatagcaaccatggctcaagattgttggtgctaacttctaaatgtccatagaatgagttaatgagttatatcaaggctcaacttttatctgtttttcagtgtttgtaagtatagttattttatcccttattggattggttcgaaatgtgatttattctaggcttcgtctttctttattttcttgaagaaccatatatgcttcgttattgatctgaatctttgacgttccgttcttgtggtgccctattacttgactggttcaagccgtttggctttgtttggaagatgtaaatttaattgtgggagagagatttcacgaatttaaacctgtttttctcccttttcgtggtatagtttggaaagagaccctgcaagtatagtgaatccattgaaagggctgagagtaaaactaagcttatggatatcaactcatgtgaaaattaagcagttttttctgaaaatgtacttttgtatagctgaaatgttatggttgatattcttgagaatccacgtaagtggcttatctaggtgttcttgaatgatcatctgttatacaaaaatctgggaactagagctgtatgataaaacttcttgttatgaatatcattttaaaagcatgtgtctaactaatttctatatggtttcagtt

SEQ ID NO: 39965 - DNA, 463 bp, Arabidopsis lyrata
  Intron number 1 from transcript 485334 (locus 485334) deri ved from phytozome v7.0 (chr-ID scaffold_5; pos 14710998 t o 14711460 reverse strand)
ttagatccaaaccctcttcgtttcattgatccaaggtagatttgatttcttccttcttcttcttcctcttctcgatttgggtttcgttcgtctcccgtaaatttctttatttgcgagctgtttcatggatctatgtgtaatttgatttgtttctggtgaaattcactactaatggagaacgaaaatcagctaattttttgtgggatctgtttgattttaaggttatgtgtttgtttcgttgatgggtaatgttggatctgtgaattggagaattagcttagtttttttcgattttctgttttattccacgttgatttgtttataatgaaagagcttgagcgttgtgatttatgttctatgaatgttaatgtctaaaaaaggatatataaagtaatcaaatttagtggtcttttgttgttgctttgtagatctaatagcttgagcttgtggggattttagttat

SEQ ID NO: 39966 - DNA, 846 bp, Arabidopsis lyrata
  Intron number 2 from transcript 489456 (locus 489456) deri ved from phytozome v7.0 (chr-ID scaffold_6; pos 11867321 t o 11868166 reverse strand)
caattcctgaaactctattcggaatcttctttgaggttttgcacagtttcatgactttactataggatttttcccaccaaaattctttgttcacattaggcctgggcattcggatttcggatcagatatattcggattcagataattcgggtatgaaagtttattatccgttcagattttatgactcttcggttcagtttcggttcgaatatatttgggttcggataatttgggtaggagagtttattacccgttcggattttatgagtcatcggttcggtttcggttcagataggtgtcggattcggatcggttttcaaaaaaaaaaaaactaaaaaactgttcaatttaaataaaaattggtttgatcttactaaaatttggttaaattttgcaaaaatatgtataatatttaaaaatataactaaaaatttccgaaatctaggttatttaggatatttttgttatttgctataaaattacaactaaatctaactaatatttttggatatatacttttatttccggtttttggatatcttttcggttttcggttcggatcgggttcggttcggataattcggataggaaaattcattatccgttcgggttttgtgactattcggttcgggtacggttccggatttcgggttttatgcccagccctagttcacatagatcttggttttaaagaagtaatggtaactttgtgaccttttaagcatgcatgagctaaatctaaactgtttttatgtaactttactagtcctaatgtttaatgttttaatttaacttagctctaataaagtttttgaatctgataaaattattgacaggaaataaatc

SEQ ID NO: 39967 - DNA, 559 bp, Arabidopsis lyrata
  Intron number 1 from transcript 489456 (locus 489456) deri ved from phytozome v7.0 (chr-ID scaffold_6; pos 11868324 t o 11868882 reverse strand)
ttcgtgtctttcttctatcaaggttaattacctttttttttctttgattctaggtctaatctttgtttcttgcataatgcatgggtcttgtcttgatcttgaaaattttgcttctgtaactacattactcggctctcttgttgtcattttctgtcaggattttttatttcttgacaaagaatctatgaaatcgaacacatttacttactttttgttgatctgacaagagttagacagatttttctgatgacatttgtaataatgtctgaaatcttcaaagttgaaaaaaaaaaacaagttggattttttgtgatcttgaaagttactacaatgcttcactcactttagtgtctcctcttatctcagttttgataatcttgtgtttgatcctaaaatttctttatatactctcatcattttagggttatggcttatatttgacggttcatcaaattaaaattttaataaataatgtttttttttccttttttttttttttttttgtcaaacatgtttttttttccttacaaggtctttgctctgattagatctggtgacg

SEQ ID NO: 39968 - DNA, 894 bp, Arabidopsis lyrata
  Intron number 3 from transcript 942561 (locus 942561) deri ved from phytozome v7.0 (chr-ID scaffold_6; pos 17777589 t o 17778482 reverse strand)
caggtattttatatattggctgtataagtcatgttttgttgcttgattactgaaatcatgagctaaatgagttattgtgaaagactagatttggaaatgaattggtttagtttacatttgatgcattcttgttgtctgtttctgatttttgtgtgattgtcaaatgtttaatcctgttttgttccttgatttgtgaaaccatgagcatttttaattcacgaagaaagactggatttggatatcaaacggttaagtttacactgtgatgcattcttttggtctaattttgatattagttattgtcaaatgtgtttaaacttgctcaagcctgttttgttacttgattttttaaaccatgagccttttttaagccattgaggaagactactttttgaaatcaaacagtttagtttacatttcgatccattattcttgtctgattttagtgatgtcaaatgtgttttatcctgttttgttgcttgatttctgaaaccatgagccttattaagccattgaggagtactagatttggatatcaatagtttagtttgcatgttgatgccttcctcttttcttgatttttctggtctgattctgaatttaatgattgtcaaatgtggtaattctgtttaagcctgttttgttacttgattaccgaaaccatgagccttattacgtcactggtgtagactagatttataaaaaaatgtgtttaagcttgttttgttacttgatttctgaagccatgagcaagataaaccatttaggaagtctaggtttggaaatcaaatcgtttagtttacattttgatgcgtttctcatttcttctttcttctggtctgattatgattctgatgatattgtcaaatgtttttaatcaggacgatactactg

SEQ ID NO: 39969 - DNA, 458 bp, Arabidopsis lyrata
  Intron number 1 from transcript 477717 (locus 477717) deri ved from phytozome v7.0 (chr-ID scaffold_3; pos 1570437 to 1570894 reverse strand)
cgggtcatcgaagaaatctcagcttggttctgtcggtgggtttactcttttcaagaacagcccttttttgttttgaatcgaatcgttggtcaatttggttcttattgatatctaaattttccaactttcttgtcaattattaatccccaattcttaaagtttgatactttagctgttaattcgttggtgtgatttgagacgtaagtgccttaaattagcattatgtaactctgtaaattgcaacagtagatttacattttgagtttcttaattacactgaagagtgagtgagatagattcttgtttgtatagttttatcaattttattgaatttgtttctttttagatcccattgagtatcttatcaagtgagcctttagtgatattctgtaatttgtgttatactctgagcttcacaagaagtttttttttttttttcctgcagggaaaactggaca

SEQ ID NO: 39970 - DNA, 748 bp, Arabidopsis lyrata
  Intron number 2 from transcript 924700 (locus 924700) deri ved from phytozome v7.0 (chr-ID scaffold_2; pos 1383166 to 1383913 reverse strand)
aaaaggtaatttaacatttatattttttcttacgtacctagaaatttaaacatttttgtttctatatgatttggaaactttttaaccagcaaaatgtatgcacatgatttcgttcggtttggttgctgtaatatttggtatagactgaaaaccaagccgacataattccacagccaagctgaaataaataaaccaaacaccaaactcgatttatttcaatttggtgtggtgaaatgtcgatttggtttttgatttgattttgaatcataaccatattataagtagacaaataattctatttcaattatatataaatatattttaacttttatcagttttaaattatgtaggtttgataagaatttcctatttatttgggtatataaaattcaaatttgatttggttttcggtatggatcggttcatttttaatactaaataaccaaatatacaaaaaaaaaaaaaagtcaatgtgaaaacattgctaaaaatttaatttcatttgaagtatattcgtatacaaataatttttgttaagtcgattcggttggattaaatcggggcctggtttggttttatgtggtacgatttttgttttttgatacaaaaacaaaaaaattaactttttcgattatggtttctgttttttcggtttaggtttggtttggttaaaatccatatctatacctaaaacatttacttattttggacaggtgaaaacactaggtttaccggtgatagtgttagg

SEQ ID NO: 39971 - DNA, 480 bp, Arabidopsis lyrata
  Intron number 4 from transcript 947269 (locus 947269) deri ved from phytozome v7.0 (chr-ID scaffold_7; pos 19333008 t o 19333487)
gtgacatcttctttgaggtaattttacaactaaactttgtgaacctttttcttgcttatttctttcatcttggcattgatagtgtactctgattcccctattctcagttaagcagattttacctacacctgtgttttcttgcaaatccttagaatcacttatttgtgtatttaatcagcgtggggtacaacttctagaattgggcactgtcttgttctgtgatttctgttgtccacttttatagaatgatatgtgttaaatctataaaatctgtttatgcctatattttctgcagtgtaaatgttgcttgttattgtcgttctgttttcttctattccagggatgtttgtttttataatttattatgcctgctgctgattttgtttgttttttgcctttttatttttatttttatgaattttgattgagagatcttgtgtttaaggttgttttcataggaggacgcacacaagctggaac

SEQ ID NO: 39972 - DNA, 700 bp, Arabidopsis lyrata
  Intron number 1 from transcript 919092 (locus 919092) deri ved from phytozome v7.0 (chr-ID scaffold_1; pos 1317953 to 1318652)
gtttcttattcgttaagcaatagtaaaggtttctttgggtttttcatgtttttttttctttctttcttctttttgattgcatttaaattcgttttgtgttatgatggataggggtttacgttttgatttatttcctcgtttgattgaatctgagttttgaatttgagccattgatgatgaattttgagtttgtcgattgtgattttttcaatctttgagctgtttttgagtcatggcattgttgagtccctgtatgacagagatttgacttcaattcagacgtgtctgatagagtttgttgcttagtccctataacttgtctcattctccatttagctactagtggttacagagatattgatactatttctaattaccttaaagcagaaattctatatgctatttgaagctaaatgcaattttttttttttttttttattgtagttacgatacactgcatttaatgtagtcgatttactatgcccaagaatccattctttgcacatttattgaatatttcgttaaagctgaaacaagaaccccatgtggcaatgttattgcacattaggatatgcaatcttggaagctttgaatttgttgtaaccagttcttatttgcatttcttttgtggagaagctatgtccttttgacaccctttgttttctccaggttgctaccttcaatcctgcagttgggtccc

SEQ ID NO: 39973 - DNA, 1034 bp, Arabidopsis lyrata
  Intron number 1 from transcript 898924 (locus 898924) deri ved from phytozome v7.0 (chr-ID scaffold_5; pos 19472576 t o 19473609)
caagattcaaaggcctcacctgcaaggtatgcatattaaactcactagctccttttatcactgcttactcaattttggacttttttttttttgtttagttaatacaaatttcaaaataaacactcacataattatgtaactgtttggggttttctcttaaaagcaaatgaaaatatcatatcacattctcagtcttgcaatacataactaggactaggaggggtcaaattcttataggtctatagtttaatatagtttctccaatcccatgttttttgtaagttttgattccaaaacatatatgtagtcccagtttctttgatcataattaagaataagtatttgatgtacttagaaaactaaagacattaagatagatcaatccagatgcatcttcgttatcaatggtgatcaaatagatagctttgtaatttaatcataaaaaaaaaaaaaaactttgtaacttagtttgggcctattgggcttaatttcaacagttctgcccaatatattatcaattgtttgattttctttttcttcttttcggccataaatattactactacaagatacggatcaaatacaaaaaagacatgtaccatataataaagatgcaattgatttaaatgagattcatagatttcagagtctttatttatgtaaaggttttatgtcataacacaactgtcccaaataaatgaaaaatagttactgatccataattggtaaacaaataaaaatcctaaaacaaactattatttttgtttccttgttaaagtcaaagaagaaaacgatagttttcttgtttcctttatcctaatcccaaacttggaatataattaccccatttttagaacttgtaagcaaattagcttctccaatttcaaatctcttacgcgctttgtaaagtaaagaacaaaagtgatgattcatttatgttaattttatagtcaatcatcatcattagaaaagagatgtgtgagtgtgacctaaaaaaggtaatggcaaacagaaaaccttggtaccagagagct

SEQ ID NO: 39974 - DNA, 142 bp, Arabidopsis lyrata
  Intron number 1 from transcript 915153 (locus 915153) deri ved from phytozome v7.0 (chr-ID scaffold_9; pos 1250223 to 1250364)
gcggtgccggcaactctagaattcacaagagaaacgtacgtgagtttgattttgatttttgtttttgtttttgtttttgaaatcattttctctttaaatttcaagaagaatcaataatttgattgtgtaaattggcagatcc

SEQ ID NO: 39975 - DNA, 520 bp, Arabidopsis lyrata
  Intron number 1 from transcript 488289 (locus 488289) deri ved from phytozome v7.0 (chr-ID scaffold_6; pos 5844060 to 5844579)
tttgtggacaggtgagttctgtctctggtttccgcaaatttgctctaatttcttatcgatttcgcaatgaatcgaatttttgggttttgtttcgcattaaggaaaaaatcgagattctgatacctttgaaattggatgagaattggttgtaatgtttttctttttttttccgatttctaattgtttgatgcttgttatagggtttgtgttcttcatcttatgttattgtcggaatttaagaattgagagaacgattagatgatgtctcgcggttgttttttgttgtctgaatatttgaagcaaatttcatgaacaatttaaggttttgtttcactgggattttggatggaatttggtataatttggtttagggtttcgttcttcgtatgcacactatacaatctctgtagcgttagaaggattgtgtgctatttggaatccaatttcagatttttcagaagggacattaactgctgctgttgtgtgaaattttctgagtttttggtttttgctttgcagg

SEQ ID NO: 39976 - DNA, 192 bp, Arabidopsis lyrata
  Intron number 3 from transcript 319144 (locus 319144) deri ved from phytozome v7.0 (chr-ID scaffold_3; pos 11732605 t o 11732796 reverse strand)
caaacatattgattgatttcaaatttgaagctaaggtatgatttattttttctttttctgtttttatgtttccattaaggcattatatgtaacttggtatgatattttcgtcaagcttatttgatttttttttttttgtctctcttctatctattaggttgctgattttggtcttgccaagattgcttcgga

SEQ ID NO: 39977 - DNA, 383 bp, Arabidopsis lyrata
  Intron number 1 from transcript 489665 (locus 489665) deri ved from phytozome v7.0 (chr-ID scaffold_6; pos 14169107 t o 14169489 reverse strand)
tggcttcacgtctaattgtggtctttggcatcctggtaatttttctttctttcttctaaattctactatgattctactcttctcgtttttgtcttttgatgatagtataagctagttttctcatttttctttttttgttcttttttctcgggatggggttctagggtttagtttgttgatgcttgtttttttcattaaatgttgttcttcatccaattcgaaaaacaaaatagcaaaactcaaacattgtcaagccaaaatcagtttctcacagaaaataaataaaaataaaaactgtaaacctacatcgatttcgaaatttgccaatgtatatatgattataccatccgttcatgtatatttattgaatgatttaggcattt

SEQ ID NO: 39978 - DNA, 854 bp, Arabidopsis lyrata
  Intron number 1 from transcript 496538 (locus 496538) deri ved from phytozome v7.0 (chr-ID scaffold_8; pos 20975091 t o 20975944)
ccgcctggtcgtccccaacaggttatttttttctccattttcggaaatttgtgttctgattatccaatttttggtatggaatcaagacaatgttgattgggatttaggggtattcatcgtctattttcagttagaaaaagcttattgaagattcgaaaacttagatggataataaagtaaattggttctacaacataatgttctcttgtgtacagattttcttgtttgaagaatcgtctactgaactgaggcattattgcgttttaacttcgccgagtatgtgtgtgtaaacgtgttgttctttaagtaattagcgttacaggaatcaagaaactgagtgaagattgagctcaatactgagatttatatagattagcacggtaggttgtagacactaccacacacgatcatcttgtgtagaagtaggaagtttcctagcagaaagttgggaacaatgtgtctgtaaagggtttttgagtgacttctgcaaggatttggttttctggttactcgtgactgcaagtatcacaaggatgtgtgcttgtttttgctccaaggtttaggcaagggtccatctcaatgttttttattatatcaacatttgaagagagaccattctggtttgatagggtctgaagaatttatttgattcgaacagtatctattcaactggtcacattgatgaaatttatctatcaaggctagattatgtcttggttttgttttacataacacattaaatctttactcaattctgcagttcttacttgtgataatcaaaatttgattctggggtaactgtctactttaaattttcaggattaccagcagagacaattatcgacaggtacgtg

SEQ ID NO: 39979 - DNA, 791 bp, Arabidopsis lyrata
  Intron number 2 from transcript 478747 (locus 478747) deri ved from phytozome v7.0 (chr-ID scaffold_3; pos 5517665 to 5518455 reverse strand)
aaggacatctaccttccaagggattactatactgggtgagcatgctctgtagataagacattgaatgtttgaacatccggggcatatttttacttcacttcaattagattgggtgtctttattatagttttctcttgcttcgtaaaccactttttgtgagttctacgtgtcatcatctgcagctcatgaattggttgaatttataagaattttctaaaatgtctatgtcaaacatgtccggttgtatatccaattttctgaaaatcacatttggagccttgaaacgtttttttatctacacttgaattttcagcgtgagtaagtatagtacacctaaaacttcgtcctcttcgagtcactttagggaaagaatacagtgatatgttccatgttcagtcacactttgagtgtgtttattaaagttgttgaggtttaacagtgaatctagagaattgaagagatcaatgaagtaattagagttctttggaagatgttctaaatggtagtgaaggttggaaggaagttgggtttgaattcaatttgaagatgtatcaagtcttggagaagtcatctttatactgaaacttgcaaggtttgcaggcaagtgcttgctttttcatgtttataatgatggcttctattgcaggagagttgtaattccaactttacaatcggcttctcgtcaaagctgtacatatttcttgcttattgtgtttttggttcctagcctgagattttgtttgtttgttggatttgttgcagagatccaagggggtttggattcattcagt

SEQ ID NO: 39980 - DNA, 383 bp, Arabidopsis lyrata
  Intron number 1 from transcript 478393 (locus 478393) deri ved from phytozome v7.0 (chr-ID scaffold_3; pos 4241199 to 4241581)
actgatatttggggagaaattgaacgttctgagaggtactcgtgagaatttgcttaaattttagttgttcatgcttgctactttttttgcgaattttggttccgtacttggcgatgcgtataaggagaaagtcaaattttcccagaattagttttcacaagaataatctgtctggttttgattcaattatgtatacaagttgaagaaaaacgactcatcgcataattcacgagaacaagttaaaccgaaaatgcgtatgatgatgactccaatttatctcataattgttcagtttttaagctgataaattgggtcagttccaattttgattgctcatttttgtttttttttgttttgatgtgtatagttacctagtgtgctct

SEQ ID NO: 39981 - DNA, 435 bp, Arabidopsis lyrata
  Intron number 1 from transcript 931123 (locus 931123) deri ved from phytozome v7.0 (chr-ID scaffold_3; pos 18568034 t o 18568468 reverse strand)
gggttagtttcagatgttgctttgttttttgaatcaggataagatctgaattgggtttttctttgctggtagatatcttaagattagcttttgccctgttttagtgggtcaaagatcactgctttaggtagagtttaaccataaaggttacagcttggtacctctgttctagtgggtcactgctttaggtagagtttaatcataaagattatagatttggttgtttcggtgatcctttcgtatgtaccattattcgaagtagttcgtagaaatgagagaaaagggtttaaattttgccagcaattatacttttgatttcgcaattgcgtatcatactatcatgtttaaagtttaaactcctgatatcatatcagcaaggatttgattgcttctcaatgtgatcaaagcaggtgaaagttctttctttaacggatc

SEQ ID NO: 39982 - DNA, 571 bp, Arabidopsis lyrata
  Intron number 1 from transcript 915787 (locus 915787) deri ved from phytozome v7.0 (chr-ID scaffold_8; pos 3486534 to 3487104)
gcctaaggttcgtggtgtggctatgaacccagtggagcatcctcatggaggaggtaaccatcaacacataggtcaagctagtacggtttggcgtgatgcatctcctagaaggactggtggtctcagaggtctagatgctacttcagccggcaaggccgaatagagttaaacataaactttttttctcgttttctttatttcatgttttgttcttcgtcgccgtccctctcgaaagcctatatatattatacattgcaaattttcagcaacagttttgattattgttgaagcttttaatgttgttttctttccgaatcttttgtttctatatggaaaaaattctatcgcataagcatttatttcttgttcctgaaccgtattaaacctgaataaccgatgtattaagtattaaatgaattgagttatggtcacggattaggttctttgtttttaatcccaaattgaaagtttaagacatgtgaaaacattaatgttagtgttacactcaggaagttaagaaagaacttgagttgatgtggcataatctattgtcccaagtggatgcagggtt

SEQ ID NO: 39983 - DNA, 801 bp, Arabidopsis lyrata
  Intron number 2 from transcript 479960 (locus 479960) deri ved from phytozome v7.0 (chr-ID scaffold_3; pos 11848061 t o 11848861 reverse strand)
accggcttcgtacgtctcttcttaaactcatgtttttttttatcgcacctactcgtttttttttattaataattattggtgatttttttttttttgataaaaatattgattgtgttgttgattgatgtggtcccattcatagtgggtcattaaatgttttttattttattgatttgctacagaatttatattaaactttggtatggaaagagagagagttgacttattttgtggtcactttcatgtagttaacaaaaacgttttacccataacattttctaacatgtacttaagtttcactttcttgataataaactaaagtttgataacatagttttgtaaattctatgcttcaatttttgattggtctattactctctctttttttttctttttcttgacgtgattattcttcttttctttttgtagttaacaaaaacgttttgctcatattagtataacatattctttacttgcacttaagtttcactttatatataataaacaatttttataagattgttttgtaacttgtaagtcttgtatgcttcaattttagattggtctctttttattgacgtgactattcttcttttcttttttgtgactattctcttcttgtcttaataacttgtacatatgtttcaattttagattggactattactctcttttttattgacgtgactattcttcttgtcgtttttgtgatatttgtatgattaatcttctcacttaacaagtatggtggatgtgatctgatcaggaaagggcaaagcttataaacaaattcgcagactt

SEQ ID NO: 39984 - DNA, 558 bp, Arabidopsis lyrata
  Intron number 1 from transcript 479960 (locus 479960) deri ved from phytozome v7.0 (chr-ID scaffold_3; pos 11848961 t o 11849518 reverse strand)
ctgcttcaggtttttacttctatttttaacttcacttcttacttcttgattcacaatttcacaaacgttgactttaacaaaacaaaaaaatccttcctattttctgattttggttctagttatcgacataatttcctcaaatccttttctctaaacccatatattacacatttggaaattttttttttttttttgggtgaatagtcgatggatgagtattgagtggtccaaaaatcaaaattgccaaagagaaaaaaaaaagattagcttgtatggaaataaataatcatcctgagtacagaaacatgttccgctataaaacatgaatttgttggtctaccctgaaattttttcttgtcaaccacaaaattcataattttatttcctcttttgagaagcctgaatgataaagctaatgttttgtacttatatataaaagaaggattcatgatttgaacattgaaccaaatggtttgatttgacatttattgatatattagttttggtttatttgggctaaaagggaagacgtttgagacaatagacccaagaaacggt

SEQ ID NO: 39985 - DNA, 396 bp, Arabidopsis lyrata
  Intron number 2 from transcript 487754 (locus 487754) deri ved from phytozome v7.0 (chr-ID scaffold_6; pos 3733877 to 3734272)
tcatatagcatcagagtctcccacccgacccgccagtatgtttgtgtccaagttcccttgtttcctgttgcaatttatatcttataaagttattgggtgcatgaatggtcactttgtcttccattattgaatactactaggattatgatgaattttatttatgcatagcagtcaaactttttgcatttataaagttccacatgtactggcttcaaattatacttgcactgctctaattcatcctttgttttgtttcgaagaagaagtagactttttgttacaccgctttttagtgacaacaatctttagttttcaaaatatcttttccctgtaaactgacattatctccccacccatataggtgggtcactctttctttttgataggaaggtgctg

SEQ ID NO: 39986 - DNA, 410 bp, Arabidopsis lyrata
  Intron number 2 from transcript 911646 (locus 911646) deri ved from phytozome v7.0 (chr-ID scaffold_1; pos 7698558 to 7698967 reverse strand)
tccgtttgattctttccgccgttaccgaagaaacggtaaatattatttgatttttatgtatgggaactgattattattattcacaatgatttgatgcatataaacttagttttaaaattgctaatgttacaacatattatgaattagatgcagtgtaagttcgaattcttgcttattaacatagattacatggatttagatgatctgaaaaccccttgctcattggtagtctatgattaagtgtgctccgattacttagttatgatcatgtttgtgtaaaatttgttttcagggatgactcgtttcgttttaagttcacagaagagtcttgatggttagctaattctgtgtttgtgttgttcttacggtttgtagacttgtctttgtacctggaatctggccgtggagat

SEQ ID NO: 39987 - DNA, 581 bp, Arabidopsis lyrata
  Intron number 1 from transcript 494724 (locus 494724) deri ved from phytozome v7.0 (chr-ID scaffold_8; pos 5405087 to 5405667 reverse strand)
cctctccgtcaatccaccgcaccagatcttcaaaggtatttcgccgtttttcaattgtttttcttcttcttctctcccgatgattaaggattgtgttttgagtctttctcattacgtagactcgaacacaatcctaatttttcagtgttattgtagctcttctctctcccgatgcttaatcggagattaaattagcgttaacagagtttattataagtctctaattagggtttttgttgtcttttgatcgcttttgataacattaccagtttttttagctcttggggttttaattttagaactaaattcattttttttttaatgtttggaatagttaaaagcattgatttttaatggtactattagctctgtgtctgcttgttatcaatttggttgttgtttagtattgttgtagatccattagatgtgagacgttttttgtagttcattatgttcattgctcgataattttggcatattgcttatgtagagaccaaaagctgattctattactgtgtcttttgttagaggattagagtgacattgtggccttgtatgtgcagatatccagggttctgaca

SEQ ID NO: 39988 - DNA, 832 bp, Arabidopsis lyrata
  Intron number 1 from transcript 337726 (locus 337726) deri ved from phytozome v7.0 (chr-ID scaffold_1; pos 30218137 t o 30218968)
agacatcgacattcttgagctacatcttccttcaggtacattaattattcggatatcattataatttcgaaaaattacatttttaaccttcaaagtgtcatcggtagcactttatatctcgaaagaatttcactaacactataaaccattaaaataatttactaacattctaaacctcgaaactagctttcctgtttgcatcgtcgtatttattacggaaaaataaggaggaattaatttatgtttatatttcttttcgtaggttatactatatataattagtatttcaataatgaatgctaatttttgtttcgtataataaaatataaaaactattaaaagaatcacttggatattagaaacaaagaagaaacttagttgttattcactaaattataagtctgcattgcaattagcttgatatatattttaaccgaaatatagcccaacacaagatatttgttaaaagctttgattatactttgcttccacaaatctactttgtttctcttctccaaatattgtaaagtatactttgatatcacattgcgagctagtttgattctcaaactttcttccgctccacgttgtttaaagggatctcttgtttaaatgtccaaacggacaatttggccagtagtgctaggtctaggaatttagatgaatcatatgtaaactaatttttcccggtttggatcactagaccggttgtttaattcaatttgtggttaaaaaaaagaaccaaagaatataagttatttaattatcaacgaaaagtggaattgatgtttatataggtttgaagaaagagcatcttaaaatacagatcaac

SEQ ID NO: 39989 - DNA, 384 bp, Arabidopsis lyrata
  Intron number 1 from transcript 492352 (locus 492352) deri ved from phytozome v7.0 (chr-ID scaffold_7; pos 7391889 to 7392272)
tggtatccaaggtacatgattttggtttctcaatcttaattttccactcagcaagtgtatcctcgagtctgcttctgcttgtcattggttacatgttccagcgattatttactttggttgttatagatctagatcacgggatttgagtaagattgtcgatcttacgcttgaagatagcttcttaaatgtcctcaatgcaagtttgatctatgtgtgaaccttaatggttttgcattgtagttccgtttatactgagcaaagatgtttctccattgcttttttttctttttcttggttttagataatctgaatgcttgacgtaaataatgcttattcattgtaaatgtaggttgaaaaacttattaaagttctaccaagtactcc

SEQ ID NO: 39990 - DNA, 531 bp, Arabidopsis lyrata
  Intron number 2 from transcript 934076 (locus 934076) deri ved from phytozome v7.0 (chr-ID scaffold_4; pos 16511915 t o 16512445 reverse strand)
ctgcttccgcaccctcaagctagccactccaacttgtaagtctttcttttctctttccatccagttgcgcttagaagaatgatgtttcaaatgttgattcttttggagattgataatgatattactaatcattatctagacaaggtggcgttgaagcccttgtcttaccctagaaatcagaagtgataactcgaaaatgatgtatgaaagtaatatagtttagattgacctctcagcttgataaacaattactagtggtattagttgggttggtctcctccctttgtctcttgtatgataattctagtctaatattctcgtttcttatcactaagtcacaaactagttcaaaaaagtggttgacagttgattttttaattcacgcataaacttttatcttatttctgtagattaaaaagtaacatagattttgattttgagtccatctagctttttttacatgtaacaagtaacctgtttttgcactggtcatttgcagttggagatctaaaccacctgatctctgccaca

SEQ ID NO: 39991 - DNA, 503 bp, Arabidopsis lyrata
  Intron number 2 from transcript 496525 (locus 496525) deri ved from phytozome v7.0 (chr-ID scaffold_8; pos 20931932 t o 20932434 reverse strand)
ttctcagaagcccgacaaacgcctcatcttcattggtaatctcactaaatcggtcctctttttttttttttttctcggatacgacttaatttgcacctgcttcgttttagtattgttggatccagaattttcattgttttttgtggaaaattatactgtgtttatggtgaaattcgaaatttctgggtgggtaattttagatctgagagattctatcagtgagcttgaactcgtgttatgtttcgtattattggaattattagagtttcttctcaattgggttctgtttgattttaagaagtgagactttgtggatctaaaattccactatttggttctggtacatggcaaagacaatggtgaaatttagggttgttctgttttgttttgaaagtgtgaatctttcgttgtgagaaccaaggtctttggatagaatgttgagaatgctttgttattgtgaatttgcaggacctccagggtcagggaaaggtacacaatctcca

SEQ ID NO: 39992 - DNA, 836 bp, Arabidopsis lyrata
  Intron number 3 from transcript 495390 (locus 495390) deri ved from phytozome v7.0 (chr-ID scaffold_8; pos 15541297 t o 15542132 reverse strand)
tcttgcatctggtaagtggatcacatacccaattggtttcgttagatgatgtaaacatattgctgaaagatgtttcgaagatgttctgatcattaggctttaggctgtcgtgcttttgaaaactttcttttgacttgaatgtaaatggatcagcagggccatgtcaaggcaatatcttcagtggcagcctaatgcattaggagaaagagcacatgtgtgtttgtttcctttctcctttccctgacactgcctctcttttccctactctcaccctaacacttcccttttcttagatatattctaggttttgtaagatatggtcttacataggtgtagttagtgtttttgtttgatatgatagggtgcagctctatcttacataggtgtagttagtatttttgtttgatattataggatgctgctcacatcttttgtgatataggactgtatcatagtttatgtgactgtgatgaatctatctagagggtcatcaatctgctaacattttgagacgtactttgtgcctaatatgattgtttgatgtcttgaagacatatcttatgccttccagagagtgtaacctgaaatcaagcttgtcacgtcatattatgttggtttaagttgctatcataacttctgtgatgctgtatgaattttatacgtagagagttgactcaaactaaagttttcttggaatgttgctgaagtgcaaaataattacagatgctacactggagtctttatagttgactctagattttttgttgttgttgttgttctaattactggtttgcaatgcaggtattctcggcatttgggtttgtccacaagattac

SEQ ID NO: 39993 - DNA, 505 bp, Arabidopsis lyrata
  Intron number 1 from transcript 321717 (locus 321717) deri ved from phytozome v7.0 (chr-ID scaffold_4; pos 19640358 t o 19640862)
attctctactcaccaaagtcgaagtttttgttcaggttagttacttagttataacgttttaaattcatatataattttatcggatttattgatatataaatcttatagagaaaacaaataactttggagaaatgcctacatacagtatatataatcaaattcaaaatagtaactagtttctacatggatcccactcattaaatttattcactagagttagatgaaattcttcctattttcaatatattcctttctgccttttaaaatttctattgtattttatgaattctagagaaatgataaaaccttttaataggcccagcttctgttccttggactgctctcacaggcccatatatactagttagggatttggtttttcattatctcatagttccattcgagtctgaaacagataaagagagagatccaaataatagctaaatttctaacgttacaaatgcttacagagactatacgacgcaggagcacgaaggattacaat

SEQ ID NO: 39994 - DNA, 568 bp, Arabidopsis lyrata
  Intron number 2 from transcript 495556 (locus 495556) deri ved from phytozome v7.0 (chr-ID scaffold_8; pos 16740557 t o 16741124)
cagattatcatcagatcttcgaaaccccaattttacaaatcaggtaaaaagtttctccctttatctctcttcgatcaccgtttgtctcttgcttcgttttcttttaccgatctgtgattgaatttgagttcttcgataaattttgattacatcaatttggttttcgattttgattcatagagattgaattgaaaattatgtttcaaatccttcgtgtttgtatctgattccgacagagaagaagatcttggcttttagcttttttttttttttgtaatgaattcaacaacgatgattttgatttggtcaattgatgttttcttgctatatgatatgtaattgaactgtatcagcttttactaaattgtttggatctctcgattatacataaaacaccatatatatttgtgttctgtgataaaatcttattgatgatcgtgtgaattttggtagcataattttgtttgttaagatgatttctgagatgggtttatgatagttttgcttcttacttgatgaaccatctcgtccactttgcaaaatcttttattctatacagtgttctaaa

SEQ ID NO: 39995 - DNA, 864 bp, Arabidopsis lyrata
  Intron number 2 from transcript 484164 (locus 484164) deri ved from phytozome v7.0 (chr-ID scaffold_5; pos 913295 to 914158)
gttagaatcaagttttgggattagatcaaagttcatgttttttgtctaattttcagtaattcaaagttaacagctttattgtcaatggctaatgtgtattggtttgagatgaatccattcctttgcagcatgtataaacaaagattcagattaatactaatagttaataagatttaagttcaataaaaatggttatggcttttagaatcctgaactaagttaatcggtcacatgttttatgattatggcttttagtgatttatctttatggacactcttaaaagttaccagctattagcatattgctaattaggcttgatcgagagacaggtcgcttttttgctgcgttttgtcatctacgtgtgtgcctttggttttcgttttgtataagcaaaagccgaataaaacgctttcagatcaatacaaattagctatacttatctgtgatgattagcttagtctgatttctgtgtttgttgcctctttgccttatagtaatgatctgaaagataggtgcctttttttgtatcttatcttctatgagactacactctttggtttggttctgaatcttttttgttgaaggttctaaactaaacgaaattactcgtcttgttgcagattgtttcgagagacaggtcgcttttttgctgcgttttgtcatctacgtgtgtaacattagctttgtctgatttctgtgtttgttgcctctttgctttatagtaatgatctgatagataggtgtctttttttttgtatcttatcttctattagactgccctctttggtttggttctgaatcttttttgtgtaaaatgttgagtaaactaaaggaaattactcatgttgttgcagattgtttcg

SEQ ID NO: 39996 - DNA, 345 bp, Arabidopsis lyrata
  Intron number 2 from transcript 929425 (locus 929425) deri ved from phytozome v7.0 (chr-ID scaffold_3; pos 6764127 to 6764471 reverse strand)
tcttcttctatcaactccctgttgccaccggtcaggtaatttatttttcatattaccgaacgtctttgtaataatcaattgttaaagttgcctaaaacagtgtgactacttatatatatatatcgttctatttagtttgatatggttatggtttctaacttctattcagatttggtttttagcaaaatatttgcattttttgtttcacttttgatcaatgtttgtttagattgtttcttctccggttttttttttttttttttgtttttttaaaaatattttcacgtatgccatatattttctttgatagttgaaagagtattatcaattaaagaagagccaaga

SEQ ID NO: 39997 - DNA, 616 bp, Arabidopsis lyrata
  Intron number 2 from transcript 478454 (locus 478454) deri ved from phytozome v7.0 (chr-ID scaffold_3; pos 4470784 to 4471399 reverse strand)
aacccaaactcgaggatccttgccttaaaaggtatttaactgtttccttcgatttaaagtaacttgcgtcgtattatcacttataacgcccataagattctccttttgaagtgtattatcagttacaacacccataagtgtttccttttaaagttttccccagaactaccattgatagcttccacttcatttttgttaagtatatatgctatttatcacggataagatgtttttgatttatttgaagttgaaatgactctgtccatgttgtgatgcgtcacttgatagaaaacctattttattaaattagtatggaaaagtaactacactcctcgagtttatgttttagtcctatactcttgttctggacgtggggtgatagcatgtttaatactgtagaaaacatccgtatagagttctgtgttttccgacatgtgttatatttctcgtggcagtgttgtgtctcaagcttagtgtagttaaactagaaatttggtttgtagtgtgaatgtttccttgtataggctattacttatttcttccttaatttgttgttaactttttcttaaactcgtatatagctcaagttccaggaactactcaggatcatctacag

SEQ ID NO: 39998 - DNA, 605 bp, Arabidopsis lyrata
  Intron number 2 from transcript 490685 (locus 490685) deri ved from phytozome v7.0 (chr-ID scaffold_7; pos 428289 to 428893 reverse strand)
cttctccggcgacgttttgagacttctgggagcaggttcgatgttcgtggctctcttagcatctattttgatttctgttatcctttgtctctttcggaattttatgatttgattttagggttttcgtatctattttgggtcatctcaacatgtcttgcagattttccggccttaatttcggatctctttgatgctaatttttacttcaattactacttctttgatattcctgatttcttttatttcggattgtcttactgaagaagagagtcatggcagttccagtgatcagtagatagatcgatatgattatttccttatccagatttttcttccaactgttgcttcgttatttgatccatgactagtagtaacatgtgtctctctactaaatgtgcttgtaagtgttgcaaccttagacttttattgggggattacctaactctgtgatgatttgattgttttattggatttctggtttctcagctgttgatgatgctgattgaattcctgaatcttcgtttctgaaattgattttgtgttttgttattttgcctgttaagtttgtagctagaaagggattgttgtgctgtgaattctactga

SEQ ID NO: 39999 - DNA, 418 bp, Arabidopsis lyrata
  Intron number 2 from transcript 490257 (locus 490257) deri ved from phytozome v7.0 (chr-ID scaffold_6; pos 23310067 t o 23310484)
tgtaagtttttttcatttcgtttttactttctatggcacaaaaatattaacctttcttcattcttcaaggtttcgtgctagtcttgttcggtcatgtggcaaacagtctcgaaaagtcgagttaagggtctttggcctttacaaataaaacatatgtggatctataacttattttgactagagctaggaactcaaatatcaaataaataatatagacaaaccaatttctctaacaatcactttataatgctctaatttcaaaccaaatctaaatttatatgattttatttgctctcatcactttcaatgttggtccactagctacttctgtttttttttttctttcttgttcataattttcttgtcaaaaagatatataagagtaatcaacatttacttggtgatgttgcaggcactt

SEQ ID NO: 40000 - DNA, 207 bp, Arabidopsis lyrata
  Intron number 1 from transcript 336539 (locus 336539) deri ved from phytozome v7.0 (chr-ID scaffold_1; pos 16591488 t o 16591694)
aggactacgacaagcctcgagtggacacattagatgtaattcttttctttcatcttctgattgtttagaggttgatcacgatgtgttggaatttatatcatagttttgatttgttggagatgactagtagatttccatcgttagattagaactggtttgtttacatattactaactgattattttttctgttagtatttcgattttg

SEQ ID NO: 40001 - DNA, 292 bp, Arabidopsis lyrata
  Intron number 2 from transcript 349218 (locus 349218) deri ved from phytozome v7.0 (chr-ID scaffold_5; pos 20388930 t o 20389221)
taactctaacgggcttcagaaaaccggcctcttgggtaacccaagactaaccttccatattcttttattcattttttccttcacaatttcattaattgatttcttcttttgatttaggaaatttattgacataccaaaaaagcctatacgctaacgggcttcagctaaacagaacccgcttcctgcgtaaacaactaacatctgttttctttattttctatttatcttacaaagtacaaactcttaattaattaatttctgtttcattgcaggaaatttctctactgggctc

SEQ ID NO: 40002 - DNA, 335 bp, Arabidopsis lyrata
  Intron number 1 from transcript 907640 (locus 907640) deri ved from phytozome v7.0 (chr-ID scaffold_2; pos 4719103 to 4719437)
atattacttggttggtaagttttcttttttgtataaattatttttgatttatatgttttagttctttgttatatatctaaataagtttcagttttttttacgtgaaaattaattgtataattttctgaatggtttgttagatgtgatcggtgaggttgttagtattgggacttgtgaggaggatctaaaagattgcgagacgcacatagaaaaatacgaagatgaattcgtaccaaatcattattatctccggactttactctagctgtgtctaaaacccaatttggatactaaaaatgaagatggtgcgtttttggatgattgtgacagtgata

SEQ ID NO: 40003 - DNA, 387 bp, Arabidopsis lyrata
  Intron number 1 from transcript 949261 (locus 949261) deri ved from phytozome v7.0 (chr-ID scaffold_8; pos 11675693 t o 11676079)
gtttgcgacgtttcctctctccctggattttctacgtaagcttctctctcgttttgcttctagatctccatgttttctctgtttttttttaggtttttgctcgtttagtgtttgattttgttgtagatctggatttaggttgttatatgagaagaaatctggaaataaagcttgtttagaagttattcttcttccttaaacacgagttttttgttcgttttagatctggattaagatttttgaaatgacaagtttctggaaatttacaacgcttaaaagctattttccatggatagttctgctttcttcaacacgattactgtttatttatgtggctttttttattaaacagtgcgaaatcggaaggttcgagagtgaatcatctcc

SEQ ID NO: 40004 - DNA, 429 bp, Arabidopsis lyrata
  Intron number 1 from transcript 484347 (locus 484347) deri ved from phytozome v7.0 (chr-ID scaffold_5; pos 2503168 to 2503596 reverse strand)
gcgagtttggcgaaatcaaatccgataataatctggtctgttctaatctttctcttacatcgtttcttataaattcagtttggattgtgggatcagaggggtggatttgggtttgattgatttttcatatccaaagagcatgaatgcctctctatgaagctgaattaatgataaagctttggtctttgagagttttctttagataacctgatatgtaagaaagcacttgcactaggcgttcaatggagactgatggctttcccttgatttgtaagaactggttttgtgtagatgttcttttcctttttttcttttaatgtatattattgcgttttcagtctcatatatttctcttctgataagtgttctgaagatctttttgcgatgcttgtagcctccatttggggaaaaagggcgtcaaggagaaga

SEQ ID NO: 40005 - DNA, 730 bp, Arabidopsis lyrata
  Intron number 1 from transcript 471112 (locus 471112) deri ved from phytozome v7.0 (chr-ID scaffold_1; pos 3858965 to 3859694)
ggcgtcgtccgaacttaccttggtatgggttcatatttaaaaaaaaaaaaaatcatttcgtgtctttatcagcattatttttcacagatttttcagttttagagacattatttctctgatgaacaaagattttgttcatatgatatcatttagattttgcctaactagtcttaattaaggacgtgttcaatttgattctcttccatttctgtcataaggatgatggcaagcagaagaaaaaaatctgatctaattaaaagaatatttaatgctaagttgaaatttgtaaatctacagtaattgactcatttcaacaattttttaccatgcaaatttgccgaagaagtacattaatgttgttgttgaacaaaaaaaaaacattattaattgttgttagaaaaaaattgatttaagattttgtgtgcatgctcttcttgggaagatatgaattattatcaaaatctacaaaaaggaagaagaagtatgaaaattttcattctttcctaaattagttaataaattgaaatgactatgtgtaggattggtgacatagtcaattcaatttttatcccgttaaagaatgttatcaataaattcgattgttgaccccccaagaaaatttgaattgaaatgcgggatcgtaagaccaaaatattatttgatagtactatagagtaattatttttattgtttgataacataaaacgacagggggtaaaaaggttcagct

SEQ ID NO: 40006 - DNA, 558 bp, Arabidopsis lyrata
  Intron number 2 from transcript 471924 (locus 471924) deri ved from phytozome v7.0 (chr-ID scaffold_1; pos 7200352 to 7200909 reverse strand)
ctttcaagccttcaaattggcttgggaagcctaaagtatgactcttgttttctcgttatatgcactttctttcacatgaaaattcattttttcacactcagccaactagatttcttttgaaaatccgtagtgcatatcctaccaaatttaaagtccagttttcctagaggtagtgaatttagtgatgtgaaaaaacaaaatttggactgaatactgatgataaacttggcaaatatcctcctgtagttctctttcggctcaaagaaatttggtatagttgaatccaacaatatattttttgggcctttatgttgagaagtcaatccgagtgcctgatgtactaaagataacctggaatgggaaaatgaggaagaatagctaggttgcttcatttgtggggttatttacttcttattctctctattttggattggtcctttctatctcctatgatatctgttgcaatttcaagaaatgctgtttgattaaaggggtgtcctgctatggtattctttgtttacagacagctagctctttggcttgtgcccagaaaggctg

SEQ ID NO: 40007 - DNA, 750 bp, Arabidopsis lyrata
  Intron number 1 from transcript 493172 (locus 493172) deri ved from phytozome v7.0 (chr-ID scaffold_7; pos 11691993 t o 11692742)
ctagttcgaaacctaagcgcggagttgtcactgtactcgaatttatacttttttcagtttcttaattaacgaagctccctatactgttaggattttgaaattttggttttcgtggctatagctgagatatatgctcccttagtagtcgatttcaggaaattgtgttggccgagaactgttgtttcttagttttgaaccagtggattagagtgatgaatgctcattcatttttattgctgagatttatgcttctgtggtaatgaatttccagaaattgtgcttcgaccaactgttgttcctttagctttgaaccggcgaattaatggattagagtgactctagatatatgcaattagatagcaaagactgcacattcatttctgttgtttaattaatcggaaatggtacatgtttagttagagagttgagtatgaagattaaatactgcagtttgggaagaaattatgtgctgtgtgtttggctggtaaggaagaagttgagttattatgtggcagagtattcacattattgtgtgctacttataatatgcatcacttgctttgattatgattatggagcccctggctgtcatagagaatttggaggctgctatattcttccaatatagttttttgtttattgttgatcaattcactgttggtgagccttttctttttctaaggttcttatcgtcgtgcttctctcttgtcaacaggttatacctttctcaaagggaagtgcacacgaaca

SEQ ID NO: 40008 - DNA, 415 bp, Arabidopsis lyrata
  Intron number 1 from transcript 489746 (locus 489746) deri ved from phytozome v7.0 (chr-ID scaffold_6; pos 18350877 t o 18351291 reverse strand)
tcaattacaggtatctattgcttacacatcaattttgatttgattcttttactgaatcttgatttagggttttgattcttgatttcgaattacttatatttagatcagaaaagctttggtatatttatctcctgaaatcgtagtaaaaaaatgaagcaagggttcttattttttactgaacttagtaaaaatctgcattcagacagaaaccctttttctttgtaagtgtgaaaagattaatctttcttctttggaagattttgagaattttgatgtttacatatttagataaatcaatctgatttgaattgttgattttgaattggtttatgattgtgattgttgttctttttagataataactcagaccgaacaaatgtctttgaactttcttgtagttgtggatcttgtgggt

SEQ ID NO: 40009 - DNA, 663 bp, Arabidopsis lyrata
  Intron number 1 from transcript 950765 (locus 950765) deri ved from phytozome v7.0 (chr-ID scaffold_8; pos 19408282 t o 19408944 reverse strand)
cccttccttctgcgttcttttcaccccgtatatagtaaaatacattagcacacatcttgttatatccaactgtttctcactgccacacatttataacttgcacaatctttttttgtaccttttgtccagaactaataatacaccatatgaaatagaatgacaatctataaatttatcgaactttaaggagtaatttgtgcgataagaatttcaattagatgttcatcaagtagttactgttgtgatttttgatcagttgtacttgagctcaactctttgatatcctttgagaagagttctgtgttgttgcttgttagttctacttctatgttgtgatattgaaaaacggtctatttctccacgagaactatcgcatcacgatagatagagcccaaagtatgaccccgatctatatatctctgaaacaaaagttctatacctatttctccccgacacaaaagttctgtatctaaatctctccgaattaatagttctagatctattaaaccataatcctgggtttcgttggtttattttatatttaaccaattattgaaaaactaaacccaattaaaccaaagaaaaccagattttcttaatatctctcttcccagagaattgcacacagagagtaagatcggggcattggctgagaaggaaacc

SEQ ID NO: 40010 - DNA, 354 bp, Arabidopsis lyrata
  Intron number 1 from transcript 941659 (locus 941659) deri ved from phytozome v7.0 (chr-ID scaffold_6; pos 8937031 to 8937384 reverse strand)
acatcgcgtcttgccgatcgcttcacgcgaaagtccttactctctttctcctcacttactcgtttctccatagctcgatttctcagtaaactaaatgtggttttatacatggcttctgatttttgttttctggatcatctttcttcgatttttccatgttcgtagaggaacaattctttatctgcattatcataatcatcatctaggttaattttgagttaataaatttggtacttggacaaatgttaagaaaattttcccgaatatgcattccttaagctcacaaacaaaatcatgaattcctcatttgtatccgtttttttgatagggagttcaattacgggtggttggagt

SEQ ID NO: 40011 - DNA, 656 bp, Arabidopsis lyrata
  Intron number 3 from transcript 489405 (locus 489405) deri ved from phytozome v7.0 (chr-ID scaffold_6; pos 11433768 t o 11434423 reverse strand)
tctccccaggacagaattggaaatctaagcccgtaacttagttatgaatctctcctcctttgatttttactcactgttcttagactctttctattgaatttgctttgttacaagtttggtttaaacatgtcctctgtcgaattgcttcttctgtttggatgttgttgctagaacagtaagatgtgataatccttttatgtttagtttaacccctttatagacaagttattatagtattacccatttgttgttgttgtttaaataagcttagatctttctatcttttaagaaactttggagagattttaatggcacaatgcttcttgcttcttggtctgcgttgtcttcattttgtgaacttttgttacttactgacctgttttatctactgttatgggtacttttacttcacaggtttcattcgctattagctcatgtttatgctagtgttggttctagtccttttctatgcattccttgacctacaaaccaatcggttaagctcgtgtttttgcttcttgtgttttcctttggaaagttttagcttttagtctcatgttacctctttttactgtctgtattgttttgttgttgtcaactgttcttattgggtttatgaagaggattattccagaagagtttgtgagaagaacgcc

SEQ ID NO: 40012 - DNA, 1055 bp, Arabidopsis lyrata
  Intron number 1 from transcript 348104 (locus 348104) deri ved from phytozome v7.0 (chr-ID scaffold_5; pos 14840639 t o 14841693 reverse strand)
agatctagcggtacaagtgcagatcaagcggagtgaaagcagatcaggcagtacagatgaaataattatattataaaaaatattaatttcaaaaaaatgttttacatacactatacatactaaataattatattacaataactttacaatacttttcatattcttgaagatgtattttaaaatatctattaagtattaagtatttataagtatcaggatatttttttattattctttctataaataactaatatttctggatatataattctatttcggatatttttgggtatccgaaatatttcggtttcgattcttttggttttaaaatttagtatctattcgggtgttttcaaatttttggttcggtttggtttggttctttttgcttcggttccgattcggtacattcagttcgggttaatttgtcaaggcctatatataatacttggagagagacttgatccaaatatttatcaaattttataaagtaactatagtgtttaacaagatatttataagattttacaagacatttatagagttttacaaatgtatttataagatattaattactaagatatttataagattttacacatgtataaaaattgtttgtatatatactccctccgtttcatattacttgtcgttctatgttattttacgtagattaaggaattttgtaaattgactattttaacctcacaaataacttcagtttacaattctaattctactccatttatttttattttctcttttaatcgttgcaaacataacctcttagaattcttccccattcaatacaaaattaacagtttttactaaattaaatatacatattttttacttgactactataaaaatgtaagtggagggaacctgaaattttcacgtcaataacacgattgaagaagaaagctaatggaggcaaatattaaaattcaaaacttgtcacgtttccatggctacttttaatctaaacttttcaccaacaaacaacaaaaactatttgtttgatttgaatagcactccaacaaatagtgacgatc

SEQ ID NO: 40013 - DNA, 593 bp, Arabidopsis lyrata
  Intron number 5 from transcript 341028 (locus 341028) deri ved from phytozome v7.0 (chr-ID scaffold_3; pos 3514467 to 3515059)
cacataccaaccagccaaccgtagaaattttgcaggtaggtgagttttgattcagcacaagtaaaatagtccgttaacattgtatcgtaaaacttcaaatagtttttgtttggaagctctcattgatgtttttagtttcactttttaggtcttgtatgtcaattctcataatataagctgcagagtttctatagataatggtacagcacgtgtgtcaggtactcattgatgcactttggttttaactttcatcaacaatactataattagtgtataaaattctcactttgattactttctttgagatagcattttatggaccaggaacatgtaaatttggttcttctttcaagtatcaccatcatatacagggagaaggaggaggatgaggagattctattactcctatctcattaagttattccattattcccgttttgcttaatatctctttggtctcggtttttatcattttattgttggttcatgtctaggctctttttttttggttttctatgtttaatatagttaatttgaaattggccttcgtttttgcagatttgggcagaatttgaagcggaggaaactgatcg

SEQ ID NO: 40014 - DNA, 539 bp, Arabidopsis lyrata
  Intron number 2 from transcript 478241 (locus 478241) deri ved from phytozome v7.0 (chr-ID scaffold_3; pos 3672739 to 3673277 reverse strand)
gttttttatttggcaccgctactgcggcataccaggtacaatataagtttctgtgagcacttcttgacatatatataaacaaaatctatgaactatttcacacaaataattaacatgttaccatgcaagattcttatagacagtactatagttgaatccatatttatcatttttaaaatcacgtttaatagaatattataacataaaacaatatatattgaagagtagagaatccaatatttttaagacgatgttttgtacataaatatatgtagaacataaactttggcaaataaaaatatatagaatagaaaacgtatagtacaaaatagaacaatggtaacaaaataagagtattttgatcttttttgtcttttctttgctaaattatatatctaatgaagtttgtatcataatatatagttacctaacatcactttaacaatatggtatattaaaaattagcctataattttaaatcatttcctaaacacgtacgaatgctattttgttatggcattaggtcgaaggtgcaatta

SEQ ID NO: 40015 - DNA, 824 bp, Arabidopsis lyrata
  Intron number 3 from transcript 472753 (locus 472753) deri ved from phytozome v7.0 (chr-ID scaffold_1; pos 11251655 t o 11252478 reverse strand)
gctttgtctttggaactgcttcttcggcttttcaggtcccctctcatctccactctcctcttttttgtttttttgtttgagttatttatcgttttccttttaagtttaagaaaactgaaaccaaaattattcaccacttaaaaataggtcacatcagaacatataagttcacatgtgatatgttcttattctcccaatactatatagccaaaactttttttttttttaaagaaaaagcaaacacaatcccacgtcttcttttctagttggaacttggaagtggaaatctaaagcttttattccgtcgtaatcttgttgttgttgttgttgttgttgtcaagttgtactgaaacgtgtgtgttaaattagtttttgttttcttatatgttcttaattaaaatctggtcgatatattagtatacaaatgagtgcatgacgcgtaaacaaggccatgtatgttcatcaatcacgggtcgccaatagttggtcctcttcttgcggtttccgtttttccacaatttaggtattactaaagaaattactagatttttttccgacaacaacgacccattcttttgaacatttccacaatcttcacctttaccttttttttctttcaaatcaaagtcaagaaaccaaagtctttctttctcacaatgtacatgtctctcacctaaccaagcacacccaattaatgtttcctggccggaatatatacctaaaacgaaaatgcaaatatagatggaccaacgttataaaaaaaattaatgatatcaataatttgtgcagtacgaaggagcagtgaaggcagagggcagaggtcc

SEQ ID NO: 40016 - DNA, 360 bp, Arabidopsis lyrata
  Intron number 4 from transcript 491436 (locus 491436) deri ved from phytozome v7.0 (chr-ID scaffold_7; pos 3664723 to 3665082 reverse strand)
tagaacttcttctgctctcaagatctcagaaggtgagtcttttaagcgtatgatagagaatcaaatttatggtgggattggatataattaacaattgctctagttgattcaaccgaggtagtgaaatcttagaagaaagataggtgtttgagagtttcaaatataggtgaatggcctgtgtagtgcaaagtttaaacttagtttcattgagaaaagtctttgcatgtggaatttacgaatttgataatatgtggtgttcagattggagaaatatgttttcttacagtttattattgatcaatttttgttggattcgcttaaacagggaaaaaggttggtaggagtactgaattgttgaag

SEQ ID NO: 40017 - DNA, 638 bp, Arabidopsis lyrata
  Intron number 1 from transcript 486583 (locus 486583) deri ved from phytozome v7.0 (chr-ID scaffold_5; pos 20131263 t o 20131900 reverse strand)
tcgggtacgtatacccagcaacctaggttttaatgggtaatatgattaagatcatctaggtttgatttgtgtctgttcttaattaagatcaagaaaccaaagttctgttttgtgggatgtgggtatctgaaaaaggttgtgtctttttagttctaaccctaactagttaaggttgatcagtgatcaccatcgatcgatctctcaggatccatcggacacgtacgtgggtcagctttagcttttagatccggtaaatcttttaaaaattaagaaaacttcgttaattgtttatgggttttaattgtgttatcaccagctttgatatgtataagattcatgaaaccccatatatacgttttgcctcctctgaatagatgtgtctttctaattataattagagaaattaaatagggttcatcatgggtagagatatcgtagatccattagcagatatatcttcccgcgattttttttttgcgtaattagagttaactttagtcatcagggaactaaagttttgtttctttggttttgaatttaagcaaattcagattagtaattaaatatctcttgtacgtggtttcttttgtttataaactgtagagttggcagaaccattgagaggtactatcgctgta

SEQ ID NO: 40018 - DNA, 1035 bp, Arabidopsis lyrata
  Intron number 2 from transcript 471114 (locus 471114) deri ved from phytozome v7.0 (chr-ID scaffold_1; pos 3865579 to 3866613)
tttctggtttttccttcaaacattttattcggattttgagtttttttgttaaattttattttatctttagtttcaattgataattgccgtaatttcaaatgtatttttcttgatgtgtaaattttggaatgataaactccctaactttacactatagtaaagtgtatgcttgaattgtcttggtcgtgggttattatagctatcggtctaacttttttacattcacctacaaacacaaatttgatcaaaaaaggaaacaaaaacttttttgagccacaaaacttttctatatatgtgtagtagtatgaaactagtaacgtgttttaaagtttcgaggaaccgtcatttaaaaatcaaatcaaatagtcatattttcttctactgcaaaggtaaactccgcactctattcttttaaaatggtgtccatctttttttaataatcgtcatttcgctaagaatgcagcttttgtgttatagaatgcaaattttctaaattaagaaaggtcaacaaaatataaaaaaaaagtagaatttctttggggattgggcgagagatatgcgtgcacgtttacgacaaattagattgaatttaagtattacttgtttagataagcagctgaacgaggatcgtggatgatagctgtattttctgtgcttttttttcattttaaatgacatttatacaggaggaaggaaatgccttgtccttgcctgatcaacatataactattttttaatatatatactagcaactgtagaagtccatcataatgttacataagcccaatataattgaaagctcaatagagaaacccacttgaatcaggcggagactccaactcttgtcgccccatcaaacagtttccccagtggtttgagtaatttacgaaattaccctccgtggcttacgtgttctgatcggggaatctttccgccgcacatgagctcacgtctaatttgtgccagactgccagtctcatactccagttttccttaaaaaatattgttggagttttgagaacaaaattaaagacg

SEQ ID NO: 40019 - DNA, 927 bp, Arabidopsis lyrata
  Intron number 2 from transcript 495986 (locus 495986) deri ved from phytozome v7.0 (chr-ID scaffold_8; pos 18704147 t o 18705073)
gtagagatcaacttctgcgtctcttgttcttacaagtaattcgatttttcttactttgagatttaattagatttgtaatcaagattgaaaaattcgattttgattctattgttttcttacttagaatcggatttatagtactctagtgtagtcagagaacctaaagcaagctactaaggttctcgtggtgagaaagaaaacttggattattcggacactgcataagaatgatctgattcatgcttgaggtcattgcttagtcgtagtcagatacatgaacatcctaattagcattttgataagtttcagtttcttcaaaaagtaagtcattgctattaggcagtttgagatttgttttcatgaaactattaagaggttttgcatatcagcaaacctgttccaaacagtaattacatctctataactgttgttgacactgattttgtctcaagacttattcgtgctgcaatgtgtatgcatgtatataatttttgagttccaattgactattgatataagctacatcatttgaagttcttgaggtttcgttcttttgtaggattcatttcagctgcaaggtgaaatatatatgatttttagattagagatgtgtggtcgatcaactttggttggggatgattcttagatgctttaaaacctgaaaaccccgattttgtttcttatatatgaatatggtaaatgacatgacttcattgaatactcttttgagatttattcttagctgtaacatttcgtaacatacatttcatgttgatgttgtatacttgtatgctacttaaaagctgataccttttgaacttctacgcaaaaggcataagtaactctttcaacagtgtgactggtgttctgtatattttaaaggtttgttcattccaatttttgatgtgcaggggaactgcagtcact

SEQ ID NO: 40020 - DNA, 966 bp, Arabidopsis lyrata
  Intron number 1 from transcript 473113 (locus 473113) deri ved from phytozome v7.0 (chr-ID scaffold_1; pos 12778479 t o 12779444)
ctcgtcgcctctttccctagcgtctccattttctggtatgtctcatcttctattttgtgtttagcttttggtgatgtaatgtatcaagttttctcctcaattttgattttttgggtttgctggatttttcactgttcgtgtgtgtgcttggctctagcttactttaaaaacctctattttcgagattttatttgcagaatttgggaattgtgaaacatagttgtcaatggtgaattaagtttatgacaacaagtgaagataacatttttacaagttaagcttcaatttctgatatcttagctcatgtaatgtagtcatgtagttgtaggctgcaagtgaatgttgtttgattttcagtacagaaatgttgggcatttagcttattactctactagtagctgtatctcactctagtgttattgttacgtgtttgcttcttctttgagatccaacctagttctgttgactttctttgtctctcatctagctcatggtgattagttaggtccaatggtttatagattttgctcacaacaatgtgtcacatgaacttgtccgcctcttttgatcattactttgttgtaaagtctattgtaggaccattgtaactaggctaagagttaagtagtgaattataagctttgccagtttagcaacagaccttatggttaattgatagctcaagggttaaaagggtacctagaagaatgcattagggtcattttgggttttgtctgggtcttggttctgggcagtgtgtcgagagttttgggtaccgtctaattaatcaagtctctagtattgtatggtgtagctttttctttggtgaattgtatgaaggattttactcactggttccaatattatcagcttgatacacaatcaaacctataatgtcatacttatcaaagtggtgttgctgtcttttcaggtttgtccattgcgtttgatctcagcagtcaaact

SEQ ID NO: 40021 - DNA, 428 bp, Arabidopsis lyrata
  Intron number 2 from transcript 933777 (locus 933777) deri ved from phytozome v7.0 (chr-ID scaffold_4; pos 15194328 t o 15194755)
aaagatcatatcggaaactgtctccttcacacaaggtaaattttgttcacctgattttgagaaatgtggtacgattattagagacaatagtagcaatattccactgaaaatgtatttagacgtggttttccatagttgtgtctagagaaaaattgaacttcttcttgctgtttcagaagttattcatttctacagtttattactaaccggtattatgttgatggtttaatcctgtagcatattttagaatttcgaaatgcttaggatgcatagcagttaagagatcaccaaacgatttcgcgtcaagttgtttcttttgtctaatcttctttgtttgcttatggttataatagaactaatagtttcagttttgactttgttttccttgttcaggcattggtatcccattaccctatcaagtttcagag

SEQ ID NO: 40022 - DNA, 539 bp, Arabidopsis lyrata
  Intron number 1 from transcript 490118 (locus 490118) deri ved from phytozome v7.0 (chr-ID scaffold_6; pos 22543275 t o 22543813)
gagcagtttcggattcttcgtcaaaaaggcactgagtaagttttcttgattaggcattagacttaagaaattatgggttgtttttgggtttcataatttgcatcatatatgtgatctctgaaattatgacatgttacttcttttgagattacttggtaatggtgtataataaagaaattgtgggaataatagattggattgagtcttttgacgacccaagaatgtctacgtggcttggctttaaaacgatgttgactcgttaatagattcaatatgttaattaggcagcaagcaaccgtagaaagattattggagatgtagatcgaacaaattagaggaattggacatcaaagaaattgcttcttgatttggtatcccatgatgttttttttttttttggaatttgtttttctttgtatcctatatatagagtattggtagtttgttgaattaaagattacgttaaccatctcaatgtttttaaggtttgcgtttttcttgtcacaatcgatatttcagaaaaccgggaactggagaat

SEQ ID NO: 40023 - DNA, 581 bp, Arabidopsis lyrata
  Intron number 2 from transcript 478163 (locus 478163) deri ved from phytozome v7.0 (chr-ID scaffold_3; pos 3416035 to 3416615)
tagccgacttttaaatcaaggtctcactcttctcatttcttccttcttagatctggatttttttgtttcctgtttatttatcttgattatgcagcatttctctctttgattacttgtcctaatactccttgtctgaatcacataattggatctttgctcatattagtcatatttaatctcacactactttattagctcttgattgttcatgctcttgatgctttcgagtcttgttagctcagttaatgaagattggttgggttttttttgtggctttgctttaatagcttatattgttttggtggtaaagcttccagatttgttaactagattcaagtgttatgtaaaagttaaagatcaaatttaagaaccatggctgaatatgtatttcaagaaaatcaagctgactgctacatagatacagtcccagttgatcatatgatctctgtttaatactttaattaattttctaaatgctgaagtatatgttcttctgtctttctgactctttattgattggtttcatgaaaatctctcctttgttttctttttgttgtgcagaaatttttcggatcaccgga

SEQ ID NO: 40024 - DNA, 556 bp, Arabidopsis lyrata
  Intron number 3 from transcript 478163 (locus 478163) deri ved from phytozome v7.0 (chr-ID scaffold_3; pos 3416734 to 3417289)
gtcttccaccagaggtagccatttttcttcctaattatcttacaaactgtgttttgttagaacttttctttatgtgtttgttgaagaagcttccttttcatccccgattatcttaatagaacatagaaagtttcttaacagaatattgtggttgaaacccacttgcaacatgaaatatgtatggatggctcatgtattcttttattggagcagcctaatattcctactgcaaggaatataaggtatgagttagctctccatctccttctttgaatatgtggtgccatctgtagcctatagatagtggcacgttcaagagttagaagttacggtctttgtatgcccgatacgtaatagttagtctcgactgtctaggttattcttcatagaaaatccctctggagctccaacttgaacctttttttatctcttgtagagagaccctgtaaacccttaatctatagatgatgtttcaattccatttactcatttcagaagttcagaactgtaataaaattgtaaccttttttattcttgtagagaataggtggtcctc

SEQ ID NO: 40025 - DNA, 713 bp, Arabidopsis lyrata
  Intron number 1 from transcript 471361 (locus 471361) deri ved from phytozome v7.0 (chr-ID scaffold_1; pos 4917146 to 4917858 reverse strand)
cattggaaagcttcaagcttttttattctctctctgggtaattctttaattctaagaaaattaattcatattgaaatttttatagattgttatttttattagttttttttttttttatctaaagtcgaagcagtactatgtttctttgttcgtcatgaagttgatgcttttacttttcctcttatagttcttctgttgaattcgggatttaggaatatgtttatatctatcatcaaaatgtgaataatgaatttatatacgattgtttctttttatggaatcacttattgaatttttttacttatttgcatgctttgaaaagttatatatcagaagcctcaagatttttgtgtttggattatcaataaacactaggtttagttttcatctaatgacttaggagggtttagcagaggtttttagaatcaaaccatcgaaaatttgattacatagtaacagaatctgattctttttcaagatcaccaaattttttttgtccaattatgagcattgctgttgttgttatacttttcttgttctttgtagaatgaccttgaccttgcgtaaactcttattcatgaactgatattagaatgttcatgttgatccttttatacagtttgattttaggtattgatcatctcattttgccctgtgtatgtgcgttgttggtatttgatagggacgggaccattgtataaaagagttagtta

SEQ ID NO: 40026 - DNA, 721 bp, Arabidopsis lyrata
  Intron number 2 from transcript 920442 (locus 920442) deri ved from phytozome v7.0 (chr-ID scaffold_1; pos 6495977 to 6496697)
cgattaatcccaaggataatcacatctctttccaggtattttttattgttattctcagtttggccctgtttttttttaatatttattttgctttttaagccctgaaccataatctacgttcatacaagctctgtatttagatgttgtcacaggacatttgtctatatctatgaatcttttgtgcaaaacacaaactcagaattatttattattaaggaaaaaaatctaaaattatgttagtttcctaagtaaagttagatttttttagtaaagtttggagtggcttatgataactatgaatgaaataaagtaaactaatttatgagagaacaaaagatcctagagaaaatgacaaggaatacgttaagtgtagagagaaaaaaggacaatagaaggtggggctttcagctagaggtcaagttttgtgaggtagaagtattcattgttccaattattaacaacaaacaatttggttttgaaaaatcaaaacatccttaacttttatagttgtgtaatagaaatggtagttaggaattagacaacaaaccatttggttttaagaatcaaacatcttgtgtttggtatgtgtgtgaagagtttatgaagaggagattggtcccgattatagttgttactctgttttgagcatatataagattataggagaaaatttggcctgaaataacaagagttgtgaattgtggaaatacagtgtgagagt

SEQ ID NO: 40027 - DNA, 591 bp, Arabidopsis lyrata
  Intron number 3 from transcript 480309 (locus 480309) deri ved from phytozome v7.0 (chr-ID scaffold_3; pos 18274958 t o 18275548)
ggactttggtaagtctcttcttataaactaatttaccttgcttaaaaaaaaacttctttgggcttgcatttagatgtgttattggtggaggttttgattgtgtcttatatgatatctgtgaactgatccttatcaaagagtaattagctcgcagcaataacctaaggatttaacttgaaaaacaccacgttagaaacagaaataataatggaaatgcccttaaggtggatcatttgtgtctattatatcatatataacatagtttagaaacctgcatagtcatagtactagctgtattacttagtgacatctaacagaacactcagcgaaacattcctaactcctgactaataaagataatgcctgaatattttgtgtatatctctttttttctttcttatctctgtgtaagtagtattcatggcgacatactttgccattttgggttttgcgttcagcatttggatctacttctgaactgggataccctgttccctgttatatattagttcaatataatctgatacacatacttcaaagtttgatggatgtctttccacatgtttaagattggtttgttgaacttggaga

SEQ ID NO: 40028 - DNA, 1032 bp, Arabidopsis lyrata
  Intron number 1 from transcript 929548 (locus 929548) deri ved from phytozome v7.0 (chr-ID scaffold_3; pos 7274555 to 7275586)
actgccaagttcaggttctctacctctagccaaatccatctctcattctcactctaagaaaattctcaatttatgtttgggattcgaatttatacactttgtgaataaacgtatccagatatcatgattaggatcgccaattatgtaatgattattccgtcaataatattacgaaaactagacgttcgtttttgtttttttttttctaacatgagctttcgttttttaaaaaaatttgtttttataacaaacaaaagtttgatatgctttatacacaattttaaaattttgccaactacgtaatttctcttgcatgttaacgataaatttagaagacaacaagatgcggaaattttaattaaaaaataaataaacaagatgtcactttaattagttaaacatgtcacggtccattgtggactatatgtgacgaatggataatgttgtttcatatttaagtgcacatcatgtcatttacaacatgggaatataatgggtttgtgtctaaaattataggcatgtttttattcttcataatcatactaatgtttatatttagcttaaatttataggcatgttgccaaaaactaaatcataagctaaatagcaacattattattttgttttaattttttggttaaatatagcaacattaattgattaatcaatcggatacgtacgaaaaacatatataatggtcgagtattggatatctggatatgatcacatgctaatctgagttaatacaaatatacaatttatggacagtacatacaatacatgcatgaaattcactgttttatactataatccacaatattaacattttttataaaggtttttttttccgacatagataagtcgcaaattttggtttccatactcttctaaagagatggagaaaaactcgaattagataattgttcttggtatttatttcatctcatcagcaatatcattaattgtcgggaacaaaaatatgtggcttatgtgacagggctgtgacgcatcaatcctactcgagccaagtgg

SEQ ID NO: 40029 - DNA, 440 bp, Arabidopsis lyrata
  Intron number 1 from transcript 471382 (locus 471382) deri ved from phytozome v7.0 (chr-ID scaffold_1; pos 5012228 to 5012667)
ttccatctcttcaccaatcccttcacttcactcctgtaagtcaaactcaaatccatcttctttgttttttggtggacgaagaagacaacacagacctcaattttgttttgttttgtctttgctctgtcacaaaatcaaaaaacctttctttttgttctttcaaaaatggtggaattatctggatatagcttgaaatcttcttgttcttgcgtattattgcttaaacccacaattattttcccgagaaaatgaaggaacagtgcgaaaagaagcaagttctgttaccttttcgtctaaagttttctcctttgatctcaatgattccattagaatctcatatttgtgtcacttgaagattctcacaaatccaaaggttttgtttttatctcaatttggcctaattttcatttttatttctctctgttctttcagattttaga

SEQ ID NO: 40030 - DNA, 1021 bp, Arabidopsis lyrata
  Intron number 1 from transcript 344930 (locus 344930) deri ved from phytozome v7.0 (chr-ID scaffold_4; pos 14961752 t o 14962772 reverse strand)
atttgcttcctggtaagccttgatgcatctttagattatgggatcaactttttctcgaggtaagttcacatgaaagcttaaatgtccaggtttgacttgatgttatgaggaaattcttattgtatacatgatttttccttttgagttttgtttaatcgtgtttggagttcttgaattgaaattctgtaagaaggttttagattagaaactctagttagaagttcttgcttgttaacttggtgtgggttttgagagtggtgactggtaagtaaagaaagaactcatttacacctgttctcgtatttgttagactgagaaagatgtatcattttttgttcaaatttagattgtgagtagtatcatatggtgtttggattataattatgagttttctctggatctttctttgactaaatcactgaggtttcagttgcacaagggtatagttttaaggagtatgatgattttgtaagaaccagagggcattatgttgctagtttacaggttcccctttgctatcaagtctgttctaaaactatgatatgcatatctaagtaattcctgataataagtttagtcttgtagattatgagtgattggattgtggcttgtagtaggaggttttttcacataaagcatttcaaattgagtttaaccctgagaaccaccatttgaataagttaggaaagattttataagtttctgttagggggagcaaatatcatgaactcttcattgttttacttatagaatcatcttagcttctgcaaacattctttgtttttttagtggaacttgattttggagaatagctaattcttgggatctgatggcagattagagaattttctagtggttatgtagtatattcccagatttagttatgtaatagcaaatatgatagttactgaccgtttaaactgcaaccataggtgtttccagagattttaccacgtcttacactactctgtttaaatctttgacaggttcaacaacattgtctccacattctctgacacta

SEQ ID NO: 40031 - DNA, 575 bp, Arabidopsis lyrata
  Intron number 1 from transcript 474325 (locus 474325) deri ved from phytozome v7.0 (chr-ID scaffold_1; pos 27682367 t o 27682941 reverse strand)
ctatatatttctttttctctcctcagccattataggtataactaagctttccttatccaaattttttctttacaccattaatgttcaatactaaggatatagttgcaacttttttccttccattttaactcattttaaacttgcctgaaaaaaaaaccaaaatcttaacataaatttatgagtaaaaaagttctatatataaactataacgatataacactatattacacaaagtttttgcaatgtgtatgaactgaaaatttatttctttttagttttttgcaacaccaaatttaagcttgatataattatgcaaaaaattatgcaagttttttcttttgttttgaacacaattttgatggtggcttagaaaataaaaattttgtttccagtcatatagtcgcaaccgaatgtaatgactatgagttcctttttggcatttttttttcgggccactaaagctctttgctctcaaggttttgtaattaactcttgttctttttgataaagtatattcacatcttctaaaaagaaaaaagaataccctaatgcaatttttatgttgaaagattcaa

SEQ ID NO: 40032 - DNA, 575 bp, Arabidopsis lyrata
  Intron number 3 from transcript 484717 (locus 484717) deri ved from phytozome v7.0 (chr-ID scaffold_5; pos 6302957 to 6303531)
ttgagacagttgatatccaagaaaagaccaaacatgtacgttttttaagcttttctctctctttctttctttgttttttagacattgaatctgaatctcgggtctatatcctttattggggatttaatgtttttaatatgtcagaacaatttattatttttgagaaaagaaaattaattactatcattctttttgacaaaacaaattggttcgtcctccctttaattaatattgttggtctctaattgattcatatacatatgcctctatttagtgtattaaaacctaaactataataacttaattttttaaatgtaaaaaaaaacattttttgttaattttagttaaaaggtaaattaggtattaatattattctaaaactgtttcttttttaaaaaaaggatttatctgtctaaattctttgagggaattagtcttttgtttgtttgttctggagggacagaatcgtaaacttgatgataattgttaatgtctgaatctttaagcttctcttttttttttaaaaaaaaatatattaataatcttctgttgactcatgtttttgtgttgtgcag

SEQ ID NO: 40033 - DNA, 671 bp, Arabidopsis lyrata
  Intron number 1 from transcript 481021 (locus 481021) deri ved from phytozome v7.0 (chr-ID scaffold_4; pos 370028 to 370698 reverse strand)
ctctctctctctctctttggattttcaaaacaaaggtaaaacctttttttatcaatacccttataagctttatgtctctctcttttagatttgtttctctgagatttcgcattctaaatctggagccgtcctttattttgaggggtaagagagactcagagaaagagaaagagatttatatacacctctctttctctcttctttctcctttccttagcttttgatccttaattattaggtaaatcaagaaccatcttcttttatatcttttcttcttcttcattagtttccaccaacctcaatcgctaaatgtttcaatattccgattgtttccaacctccctgatttttcatttctgtttcttgttcaaaaatgtgggttcgattcttatttcttttcagatgatgtctttgattgtttcagataatcttttttgttatgtatgcgtaaaacctgttttatcaaatgtcttaacgggtgtctctgattattgtttcatcgattgattgttcgccaaggaaactctctgtattcaatagctctctaaaactgaacccttttttttttatgtgtatctcttattacattagattggattctgcagttttctatgaatttattttaaccggtttttatgtgacaacagaaagcttaaatccagactataaagc

SEQ ID NO: 40034 - DNA, 415 bp, Arabidopsis lyrata
  Intron number 1 from transcript 481014 (locus 481014) deri ved from phytozome v7.0 (chr-ID scaffold_4; pos 347932 to 348346 reverse strand)
acttcccggcgacgttctccgacttccgagagcaggttcggtgatcataactttcgtctcaaatgcttaattcttgttaactattttcgattttgtttttagggttttttagtttctattttgggtaatctcatcttggtttacaagttccttggccctaatctcggatctgtttaacgttagttatgtgacctgtgtaaattttgcccgattcaattgctatttttggtgtattttttggatttttcttagtgaagatagtcacaaaatttcacttatctacaagttagtgagcattcgttttgcttgatttgtatctctcttgatttgatcccaaaccttgtattgatagtcataattgattctgattgacttcctcaattttgtttttgttagaaggttttgaggtggtttt

SEQ ID NO: 40035 - DNA, 484 bp, Arabidopsis lyrata
  Intron number 2 from transcript 935345 (locus 935345) deri ved from phytozome v7.0 (chr-ID scaffold_4; pos 21551376 t o 21551859)
gaacgacgtcagtggcggagctagaatttaaatttaccggggtcaaaatataaaaaatattttaataaagtgtggttgttttttttcttcaaattatattgcatatagcttatgttttttttattacatttacaaaaatgaaattctgatatttataaaaacatttggtttgtctaaaacatgataataaaattaaaaacaaagaaacttatatataacaattagtggttatagtctatatcattttgtaatattaaaaaagttatggtttaaggggtcaaaagagtagttttcatattaggcactggggtcaatttataggaatttaatcaaatatctatgtatttgtttaaatatgccataatattagtttgattttgaaaattcaccggggtcagttgacccccatgtttctatgctacctccgccactgaacgacgtgttacaaggttgctcaggaaataccttagccagtttggagttg

SEQ ID NO: 40036 - DNA, 479 bp, Arabidopsis lyrata
  Intron number 1 from transcript 919773 (locus 919773) deri ved from phytozome v7.0 (chr-ID scaffold_1; pos 3863605 to 3864083 reverse strand)
tgccggcacaccggtgatcgtactcagagatcaaggtttgttttccggccaatcgaatcaaatcaaatcaattttcaccacatttatcggaaatttggatatcgatttatttaatttatttctaattatgttcttttcccgaggaatcaaatcgaaatatacgctttaattagatccaacgtcaaagattattgtgaaatactgaaatcacattccttgttttagtttttgctttagtacggatctattgataaaaactttactcttatgatatttatccacttttattcattcatagtataacctttactcttatgatattgaaccacttttattcttagtataaactttactcttatgatatttaaccacttttattctataacgggaattaatatgattattttaaaataaagttgatcaaatggtgttttgattgatcagatcattgccgactgagacaagtgttccacggagct

SEQ ID NO: 40037 - DNA, 576 bp, Arabidopsis lyrata
  Intron number 2 from transcript 486239 (locus 486239) deri ved from phytozome v7.0 (chr-ID scaffold_5; pos 18616756 t o 18617331 reverse strand)
tggtgtggcattgcactatacctggtaaagctggggtaagtatcaatcgtgaaattagggttcttcagttttcttatacctttgcttgtttaacttctgattgctagtagctacataaagagatttaaattagggtttattgatttggacggtaaagtctttgtttttatcattttctgattcttatgtcttcaaacttgtaagcttcaccaacctcttccctttttttctctgtgattctggtggatgattctctcatgttaattattcttttgcattcacatagaaccttggaagattatctaatatgaatcttagtggaaagagtagctgtgtatctatctccttgtttatcttatatgtgatgttttaaaattggtgcatataatttttgtattgaatacgaccttgaatatgaactctgctgtgtatcttactttgattttacctgacatggctaataagagtgttactacaagagcaaatgcttatatccatctttagtgttgttcatagctaattttacatgtctctgctgcagactgattgggaaggtggattcttcccattaacgat

SEQ ID NO: 40038 - DNA, 636 bp, Arabidopsis lyrata
  Intron number 1 from transcript 916187 (locus 916187) deri ved from phytozome v7.0 (chr-ID scaffold_8; pos 9825825 to 9826460)
ttttcttcggtgctcgtcggttttgcagtgaaacggtatggcttctccttgaaaccaatgacgaagctcttggttaactaactctgccagagggattacttcgagaagcacaaattcaatgactcttcttctttgccttcatactcctttcaaaatggtaatctatctcaattggttactttagggtttttagttttcttaaaaaaatttggaaattggaagcttaaaaaccaaaaggtactcttaattatgaaagtttgtgtatgagcagggaatgtgttttggtttctcatgtaacgcctcaattgagtttttctggatccaaagattcttaattgtgttatggaacgtgtttaacataagctcactgcgttttctcttttgaattttcttctctttgcgtttgattttttgaatcagaatgttggtttagtgttaagaggtttttcctttcatatgatttcctgatgggaatatgtgaagggaaccgcatacactaaagagaaagttgtatatgttgtatttggagtcaagcatttgaaattctgtttgtgtcttctctcttcagattcttgggtttcgttgtccttatttgctgcagcttctgtcttcttctcttctttggattcccttatt

SEQ ID NO: 40039 - DNA, 347 bp, Arabidopsis lyrata
  Intron number 1 from transcript 476009 (locus 476009) deri ved from phytozome v7.0 (chr-ID scaffold_2; pos 13394882 t o 13395228)
gtggttagtttttcttcttcttcttcttaaagtttcctttttttatgcagtttgttgggcttgacttctgtcaagtattggcaaattaggaaaattgtatgaatcaatcgattggtttggctgattctcttattgcagaggctaaaagcttggattttttagtacataagaactgtgattacttggttatatgactttgaatctttggtgatgtataaagtagaagtagtatgatcattactatccttaaaggttaagactttgatgtggatagctttcactctcttttgaatttgtgttgttttgtctgttttacaggtttatatttacacccttgtggttgtttc

SEQ ID NO: 40040 - DNA, 407 bp, Arabidopsis lyrata
  Intron number 2 from transcript 482991 (locus 482991) deri ved from phytozome v7.0 (chr-ID scaffold_4; pos 19246069 t o 19246475 reverse strand)
tatcgtgcgggcattgtccccgtctcataccgcaggtacaaatctatgtctagggtcttggcaatatttagaagatcataagaccataattgtctttaaaacaaatttagataaaacggctaaaaacaattagtggaggtcattttgttctctattttaccttttagcttaattaaatgatactttttagttgctattaaaaaatttaaactaatagttgaacattcttagttttaagtccttgaaaatcaaattttgatgatattttcctaaattttagtttatttgctgtctctaatgaacaaattaatcattacatttgatatctaagtgagtgactaaacgagtgtgaaatgttggttttgtttgtagagtgccttgtaggaagagaggagggataaggttca

SEQ ID NO: 40041 - DNA, 752 bp, Arabidopsis lyrata
  Intron number 1 from transcript 490061 (locus 490061) deri ved from phytozome v7.0 (chr-ID scaffold_6; pos 22189544 t o 22190295)
ttcttcttcatcttcctcttcttgctgaagataaggtattcaatttcttcttatcctatctttctcttatgaatcttgattagtagtttctatggctctggagatgtgtcaacaaggtcaatatctcttgcaagtttggtactggtttcacttgttatctcatgggaaagattctgattatgttagacttttatatctaaaaggatagatctttttggctatttgactttaattttttaagattgtaagtctaatgttctgtcttaacttagcttttataaccatctaatgttttgagattgtaattctaatgttctgtcttaaagatgttctaatgtagcaatcacttagttgattgatgattgtgtagatcttagtttttgaatgaaggagactaattcaattcaagattaggatatggaatatcaggactttagtttctgggtatcggactctgttgattgatgaatgtttagttgaaaaaaggactcatttgttctgtattaacatagcttatgtaattagtttagtcactgattcttggtcttaagatatgcaatatcagtgccttagtttcttggtatcaaactctgttgattcatgaatgtttagttgatgtttcccttttcaaggtgtttttgtctagttgaattgggcaaattatttgttttcagcaaatctatttcacaagcaactttctgagtctgttacttactatttgttctctctctttgtctttgaattgttgcaga

SEQ ID NO: 40042 - DNA, 584 bp, Arabidopsis lyrata
  Intron number 1 from transcript 485347 (locus 485347) deri ved from phytozome v7.0 (chr-ID scaffold_5; pos 14816109 t o 14816692 reverse strand)
ggtttgtgggaagcttttctaaattggcttcgtaggtgagagccttcctcaagatttcttcaatcttttcttttcttgttttgtttatcttgagcagaaaattttgtttatcttggacttttgagtttgttgttgcttttatttgaattcaaatacctatttgaatatgtttcggtctttttttacgaagaaattgaaatcggaatcgaaatcgtgtagcaaccaaattgcatcatcataatcagctcagtagtactggaatcgttctaatttggaatgttgaagctgagtttgacaaggttctacaaataatggcagattctgtagtttttatttctaaaagagacaaactttaggcatttgatgtgctccttgtttgatttgattgattgccaagttttagggtgtttttttttttttgtgtagaacaggttctgaaacttaaaatttcatgaaagattgcttctttttggtgtctaatttatgtttctatgctctattcgtgagtcgtgacctggataaaaagttcggtagtcattatgtttgtttcgatatgattttgcagcctcttcttcaagcaagaa

SEQ ID NO: 40043 - DNA, 651 bp, Arabidopsis lyrata
  Intron number 2 from transcript 474354 (locus 474354) deri ved from phytozome v7.0 (chr-ID scaffold_1; pos 27848689 t o 27849339 reverse strand)
cgaacactccatcttcttcttctgctcttcctcctcaaaggtataagctttttccaacttttgttttcctctgatccaaccctttttgtttgatcttcgtttacttttccttcttgggtcattttgaatactgaaattttgtgctttgggaatcaaatcaccagttgataatcagacaatgtggtttttctcaattctttagtgctctgctcacgacagaatttgagatctagtcatttggttctgtttgatttcttcatgtcaaatcttgaaatgttcatgagctctttacttttaagatgatatattcgaaaattgggatcagttatgattcaataaactagtgatacacattgcctttgtttacttatctctcaacttcagatttgtaattttgtgtcccatttgatcccatcttacctcctctgcacgttctgttttaaaactggttttgtggtcctttcttttccccgttgtagtttcgtggcccagatcaattaatgaaaaaagttcctttttttttgtggcattatcttttcttgatgtaacatctcaaccttattgttatgagactatggtgcgattttttaatgcttttgatattttgtgttcttggtgtgacaggcttttgggtaaagtggcattgatcac

SEQ ID NO: 40044 - DNA, 461 bp, Arabidopsis lyrata
  Intron number 2 from transcript 495055 (locus 495055) deri ved from phytozome v7.0 (chr-ID scaffold_8; pos 13616036 t o 13616496 reverse strand)
gcgttagtttcttatctttgcctttcccttaacgtttgacttattgattgttctaggcatatccctagttttagagccttgtgactgattaggttcttccatttttacttttttctgattttggtatcattactttttcctttttgttgcaacgtgaggattggattcttacttttctcttttaagaattattcgtttttaccttgagaatcttcttctaggtgttttaaggatcattctctgttaacaaaggagattaaacttaatcaccccttggttttgttatatgctcaatctaactgttatttagtgttactgtatgtttctaatttggtaattggtttttgaataattcttgtttgaatatgaggttttaagcttcttaattagtaaatgtgagactgagagtttgttcttgtctttcagctgaggctgttctacttgggtttcaacactacctt

SEQ ID NO: 40045 - DNA, 802 bp, Arabidopsis lyrata
  Intron number 4 from transcript 923187 (locus 923187) deri ved from phytozome v7.0 (chr-ID scaffold_1; pos 24659279 t o 24660080)
aagctgctctagagttctctgtgaatactcttaatgtaagcatttgtttttttttttaattttgttgttacttgcagcgtgaaagaaagaatcttcatgacctaaatggtgtctatatatttaatgttcaagaaagaaagtgtattgaccgtccaatagcaagaaattcaatatcatagaaggtatgcagatatataaaatacgtttagctcgatatttgaggcttatacattggcatgatcaaaatagaaatttggtttcaatagtttatttttgtttttaatttaaaatttattgtatatatctctcatgaatgtggccaaacaaatattggtttcaatagttaactgtgctttttctttctagccagattaagataaatgcttcgactcttggtaagagttatatcgtgtttgtgttttacaatatgcttaaaaagaaattccatatacaatgttaggccatattgattcagtttcggttcattatgcaggaagtatgcaaacacttgatgttggatgcaggactacgttttatgttttctacacatatatggcagaatatattgagttcaagttttcaaacatagaaccgagaaatcagaaaagcaaaacttttatatttttaagccgaatttcatattcatcgtcctctactacatgagcagtgttggtaatgtttagatttcatgttgtacttatgaattggtgcaggatttggatgaactgaatagtggtagagagatggtttacgagagaatccaaactcacttaacttgatcgaagtcatatcaagatactga

SEQ ID NO: 40046 - DNA, 670 bp, Arabidopsis lyrata
  Intron number 1 from transcript 911053 (locus 911053) deri ved from phytozome v7.0 (chr-ID scaffold_1; pos 5257559 to 5258228 reverse strand)
acttcctcgataaggaagctttcagttaagtatattatcatacttagcaattttctttcttctaatattctctctctttagcaattccactgtacataacttattgaattcccggaaatctcaatcgatatatgggtttcttgatcagcatggagatagatgagtctagcttcagtgcattgtattagagatttagctgtcttatgtttgtattggccaattagttggagcactttagggtactctgtttcgtttcttctaattgttttccatgaatcgtttcatagtggtcttacatccagtagaaagtatctagtatgatttaaattgatccggattttgattcaaagtcgaccggtcatggtatggtcatgttcgtttcataatcccatggcgattgcgactgcgattttgaattgcaggataatgttcgtttagcaattcgcgcgactggttgctgcgattaatcgctatttaaaaactcgcatcgctaattttttcttgcgataaaaaaaatcaatcgcaagtcgcagcgattgatcgcgcgattagtcgcatgttcctgctactgccaaacgaacagcatagtcaaaagtcattcgtcaactcttgtaaccagttttatttctgtgcagacatcttaaaccctgattatttcaggggtttatat

SEQ ID NO: 40047 - DNA, 580 bp, Arabidopsis lyrata
  Intron number 4 from transcript 483509 (locus 483509) deri ved from phytozome v7.0 (chr-ID scaffold_4; pos 21431579 t o 21432158 reverse strand)
cacttggccgtgctcttgtccccggctgtggtggagtcagtcttcttcttacctctctctctctctctcgttttccatttggtttacatatatatggtttgaattcgatttcttaaaagaaaattttaattatagaaaatatactataacaatttcagattttcgtgattgaaaccgaatctattttgaattagcatgatacggctttggactcaacatcttattttttatgaagacacaatataatttaaattttcttataagaagtttaattttggtgtagttttttttttcatttattttgtttggtctttggttttattcttgttttttttttttaatttgaatgtaaacctattatttgttttgacaaaaaaaaactattatttgttattacaaaaaaaaactaactagtttaactgaattaaaatcatcaaagtttgtccttttataaatttcactacttagtatagattgaaccaatttactttatgttaagtgactttaatgaacaactgtgaaaatgaaatgcttgttaattaactttgtccataaatatgttatgaatgtgaatagggac

SEQ ID NO: 40048 - DNA, 608 bp, Arabidopsis lyrata
  Intron number 1 from transcript 936755 (locus 936755) deri ved from phytozome v7.0 (chr-ID scaffold_5; pos 5733709 to 5734316 reverse strand)
attgaacagtggctccatcatcaccgaacctgcaggttcgtttttttaactctttctctctggtcggtcaggggtaaaatcggaaatccaattcttataaaacgcagctttggtcttagatcatgtccctcagacaatatcactcgttaatctgtgtctgaatctcacaaggtaataatttagctaatgcaaatctctatctttatctcttctccatcgctaattttcttgcaaatttatcgttaattatctcctgatcttcgctctgaatcatcgatcggtgattctcgatctcagatcggcttttccttagttcataattctgattcgaaaccaatggatccgttgtttatagtgctaattatttgaaatcatctttggttttataaaatgaagctagatttgtaattagatcgttaatgatgtcttgtttagtagttatgttttaatttaagatctgactctattttgcttataaaagatctaactttttagaatgtttggttctttcttaaaaaaggatccaccttttgatctctgttcggttttgattgtatataaagttcttgactttgtgaaatttatttctttttggagaagcagtgaaa

SEQ ID NO: 40049 - DNA, 603 bp, Arabidopsis lyrata
  Intron number 1 from transcript 481243 (locus 481243) deri ved from phytozome v7.0 (chr-ID scaffold_4; pos 2114460 to 2115062 reverse strand)
aacatcttactgctcttcaggtaaaaagtttgactttgatttgtttctaaagttttgtcttttattttagggtttttttagtgaattgtgtgattgaagacttagaaagagattgagctttttgtgatctcagaactttttgaacataaaagttttaactttatatttaaagtttcaaccttttttaatttgagaatcatgatttatgaatctgaaccatatacatatgttttagttttgaatttgactcaaattgatctagtagtttgttgaattgctaaaattttgatcaaagacttgaaaaggattgacctttgtgatctatgatccatcaaagttctcttttttagtgatctcaaaggtttgattttagtcacatatcttttaaaaaattcaatttttaacacaaattttaaactgataatcattagacatgagatccaggaccttttcatgctctgttcttagcacttttgtatgaattttcgtttgtttgatagtttctgaagctatatctttgtgaatgttactctgtcttaaggctataatgtttactaatgaatatttgttttgtgttacagtctggttgctgcaaaccttcag

SEQ ID NO: 40050 - DNA, 678 bp, Arabidopsis lyrata
  Intron number 2 from transcript 486460 (locus 486460) deri ved from phytozome v7.0 (chr-ID scaffold_5; pos 19607625 t o 19608302 reverse strand)
tatcaagtcagcctcaacgatccgatttgtatttttttcaggtgatctatctttatactctgctagaaattcgaaaagttgtgaaaatttcgttccctggatcggattatgaaactctctgcgtttgtttagtggataatcgtgctcttagccttgttccttttgaatcttatgctttctggtgtatatacgagagaatttagttgccaattttatagttgactgattgatcaattgagattactgtagatccgccctggagaaattgcgtcagagttctttgagttattgcatgatttggtctcgaatttctattgctgctgtggatttgttcatttttgagactttgcatatcggaatcgagtacctttatctttaatcgttgtgttcagctttgattcctaaattcgagttaagaaagatttggggcgtattgaaatgtgagactaaattagtgagaacaaacttagggattaaattcgagttaagaaagatttggggctgatataaacctgttgaagttttgttggtttctgattatggattttagaagataatgcattagctcactttggactaattcttagaggtaactctgttcaattttagcctgatctatttttatctctgatgcttcttattgcagacaaaggaaggaagattctgagtattagtttt

SEQ ID NO: 40051 - DNA, 351 bp, Arabidopsis lyrata
  Intron number 3 from transcript 333224 (locus 333224) deri ved from phytozome v7.0 (chr-ID scaffold_180; pos 6217 to 6567 reverse strand)
atcgtgttagagcagtggtgcgctgtgaagcacaggtttgttatcttttgacctcctgtgttttcttaaatcagtattgtatactgttttgatgttatctccattcttgaaaatagtgtattggtgcttgttcggtttcatgattttgcggagtagttttgtttgtttcacctcgttacactgttaatatgggaattcattacttcttcatattggtatcagcataaccatcttagttttcttatatgttggtcatctcagaaatttcacatatcattcatcttgtcatcattttccttgtttgaacatatataatgttaactgttaacttttctcataattttattcagt

SEQ ID NO: 40052 - DNA, 702 bp, Arabidopsis lyrata
  Intron number 1 from transcript 474017 (locus 474017) deri ved from phytozome v7.0 (chr-ID scaffold_1; pos 24857158 t o 24857859 reverse strand)
tttacttcaggatcgctgataatatcctcaaacaggtttcttcttcatactcagactttgaattttcgatttaaggtctttgattaggggtttatattttgaccttattcttgtgattgatgatcgcaaactttttatttctctctttcatgaaattattgttggctcaaaagagttgaattttgaatatttccaatgtttttgcaccattttgtcacacttaacgtttgattgttgttgaggtgatattgattctgtgtatttggcatatgttcttcgagttctgtagttgtttcctcgagttcgatttgagatagtttgcatatgatatgatcatggtggtcacagaaactgtttttgatgaaaaaagaaagagaggagaaataatggaattagttttcattctatgaaaggtgaaaaatcttgtggaagtatgcgctttagccccttgacatttgtgcttgtattgtctcagtggaattttggatatcagatgttctttttttgagtctttgttcttaggttccttagtagtttaagaactgcatcttggcagaaaaagtctatattttattttggatgtctttaacttgatatttagttgttggcttgttgtttctctgtaagtcattgttttttttgtctaagttcctaatcatcggcataaatgtttttaggccgacatatttcgggcagagaaga

SEQ ID NO: 40053 - DNA, 537 bp, Arabidopsis lyrata
  Intron number 2 from transcript 910338 (locus 910338) deri ved from phytozome v7.0 (chr-ID scaffold_1; pos 2360048 to 2360584 reverse strand)
aacggtactcgctacttttcggagcttttccagaggtataaaacttgatccttgtttgtgcacaccttttggttgttaagttttccttggcactaattttgctttttgttgcaacagtttctcgtaacttatctaattctttttgctagcttggtcttatgggttcattatcgggtttctaagggatgagtgttatgatacaatatgctgtttggcctcatcttcatctctgaaacaagattcacggtttcccatgattcctagtttatgttttcctaggatttttgcaagacaaaagatggttcatgtcttatacactaccttaccttctcttgtgcatttagttggggtagagataaatacgtcagaccatctgcttaatcctccccatagtttgcctgatgaattgactgctgcttgctatctgaatctttcttaggctgttttgagaaacgtttgaagctctatcttgataattttctatttgcactcacagctcaagtacattcttttatccgctcattgcaggcatttgac

SEQ ID NO: 40054 - DNA, 715 bp, Arabidopsis lyrata
  Intron number 2 from transcript 495887 (locus 495887) deri ved from phytozome v7.0 (chr-ID scaffold_8; pos 18362861 t o 18363575)
gtggtgctcctgcttcctcttttcccttcaaggtaccctcatttctgggcgctgagctcccctctctatatttggatctagctccttcttgttcctctggtttataaatttctgtctggatatcgttttgttgatctctggtgtcttagcttgagcttaactcaatcgaattttacgggtttatagcagcaatcagcatccttttgtttggaattacaatctttggtattttgctgatttgattatctcaaatgtctgaattggctgaaatctttttgatttgcgagtttcactaccttatgttgcttcccgaccacatagaatcacgtgtctgcaacagacataattaaacttcataggtaaattaagattaattgaagaagtgatttgtttgtcctgattcttagtggcgcacacaagtatgtgtagctgctgtaaatatggacgtataatgatatgtaggcttttaggtgggcattttattagctgctatttgctcataaaggacctactaacatttcttctagtttttagctcatcaatcatgtcggccttatgattcatgaattattcctctctttggtttgtactgagtactcgtggttctttgtctcctttgtatgtcatttgttatatgattttgtgtattgagtgttagttaatgaagattcatcctgggttgtgcttttgtttcagggtggagactcgaggtttg

SEQ ID NO: 40055 - DNA, 439 bp, Arabidopsis lyrata
  Intron number 1 from transcript 931232 (locus 931232) deri ved from phytozome v7.0 (chr-ID scaffold_3; pos 19615828 t o 19616266)
tccttcattgtcacttttcatcgatcttcatccgtgtaagtcgaatttgacatttacggtgacattgtgtttgggttttgggtatttgtctcatgtaaagttttaatttacatcgatgaatttttttcttttgcaggaagagcttggtgaaacttctgttgaaggtttatgagtttcattttgatatatcaattttaatgttttggtaaataattgatatctaattgatctctatgtgactgttcttgacttcttgcaactgagttacgctcatgagaataactgagttacatgttttggcaagatgtcgcttgcctgtgatcttgtggtgtcatccatgtaaaaatacaccggttgtggtacttccatttgtacttcgtttgtatagcttccacatttacatgttgccgtttttttatctttattgcaggaagtggag

SEQ ID NO: 40056 - DNA, 488 bp, Arabidopsis lyrata
  Intron number 2 from transcript 931232 (locus 931232) deri ved from phytozome v7.0 (chr-ID scaffold_3; pos 19616317 t o 19616804)
aggaggtatatcaaagttattttatgaccagatttttcatgataatttagtttcttatttgggtaggagaaaaagatactcgcttgtttcatatgtgcaaggtggttaaatattgatactttgttttgatctcataggaagctttatatcgtagatgcactttaagtatgttcttaggttcttctctttggcaaagtctgcattttttgttttggactgtttttttattagtgcgattaacatagactttcatgtttttacgggaagcagcaaaggaacaatgattgtagagtaatgggattagtatttagccaagttttggcaagttgtactgccgagtgaaaaagacacacctgaggctaactccgaccacatcctgtagattttgtagaatggaagaaaagttcaatcctttttgtagagttttaggtcttcattattatttttgttcagtcttgataaagttgtggagctaaattatcagtgga

SEQ ID NO: 40057 - DNA, 725 bp, Arabidopsis lyrata
  Intron number 1 from transcript 486975 (locus 486975) deri ved from phytozome v7.0 (chr-ID scaffold_6; pos 439944 to 440668)
tcctccacgtatttattcttatttctccttcattctttttttgctctatatataaactaaataaaaattcaaatattaccgattagttttgttgcagtggaagctatattatgttaccagttttcatttaacatactggtcactagctattctcaaaattggaaaagctggctccatttcaaaaccgtatttaatggatctctaatctataacccctgaggttttgtgtattttatgatttttatctctagattatataagcattgtggtatattacgaattatgcttggaatgttctctttttgtttgcatttgactttttaaactgatttaattgtttagaatataggcctataaggaggaaaactacaataaatacacacattaattaatacaaggcggtaaacaaatactatttcttaaagttgccatcaaaaaagaattgtcaaaaactatttaatacttcttccgtcccacaaagaatatcgttttaagattttatagtttcacacaaaaaggttgtttgttatttgtaatgcaaaattttgaataactatctatttttaactttacctttttgatatattaatagaaaagataattttatttagtgcactaataaaatgtatagtgtaacttttaatagtttttcaatgtgtgaaaaaatgtataatgagtaaaacatagaaaatataacaataataacgaaacaggtcaaagacgtc

SEQ ID NO: 40058 - DNA, 542 bp, Arabidopsis lyrata
  Intron number 2 from transcript 354079 (locus 354079) deri ved from phytozome v7.0 (chr-ID scaffold_7; pos 6337755 to 6338296 reverse strand)
ctcacgtgtaagtacttagttctttgtttttcttactccatcaaatttgctatatatcagtctaatttttatgttacatgggattcctcacaaaaatagcatttgaaggaagacaattgaaatatgtcctaaccggaaccattagtcgaccctaacagagttctgaaatatttaaagtagaaagtttcaacgaatataccagaagacttactagtagctgaaaatggagaaagagtcttcaaggcaagtttcaaagaaacttcaaaagccaactcatcattgcccgaacgaatctcaagctatcaacatcaatgtcttgttatttaattatagagaccattatagagatttgccatatgggtcatgtcttcctcgcaagatgatagtcactctcttgtcatgtctggaggatatttttgatcattcatttaattatagagatttgccatatgggtcatgtcttcctcgcaagatgatagtcactctcttgtcatgtctggaggatatttttgatcattcatttaattatagagatttgccat

SEQ ID NO: 40059 - DNA, 419 bp, Arabidopsis lyrata
  Intron number 1 from transcript 335696 (locus 335696) deri ved from phytozome v7.0 (chr-ID scaffold_1; pos 10970702 t o 10971120)
aagtcgatttcaagcaaatcggaggaacaaccgacgttatttacctccagcgatcgttcctgctatagattatcatccccaccgacgctggttgtcgagggcgtcaatagctcaccaaatcggtgaatcgtggcttacgaaatcggggataaattcaacagatcttcgagtttcgattcgaaatcggtgacaatcggtttgtaaaggtaggaatgtctctctaattgtgtgaattgatgtgattttctgttttaaaattagggttcctcggatttgggaaattagggttcgtcgaattggggaaaaagggtaattcgctacaaggtcactgattatatctttgtctgtggttaagcatttgattaaattggagataatttctccctaaaccttttcgtgtgttctctggaatttgcagc

SEQ ID NO: 40060 - DNA, 936 bp, Arabidopsis lyrata
  Intron number 1 from transcript 475585 (locus 475585) deri ved from phytozome v7.0 (chr-ID scaffold_2; pos 8830287 to 8831222)
tggtagaaagcaacgtgcgacttgaattgaaggacattatctgctgtggattttttcatccgccactttttatataggaatataggtgctcttggctcgacattttgtgttctattttacaagagtcctacactttttgggaatataaaaaagagtacaggatggagctcgaggagaatagaaagtttttattcctttcgcaggagtaaggatctagggttagtgcgaatcaataagttggaacaacttcgtaagtctttttatattgaaaaaaaagtcctttcaagcaattttacaatggaaaaggaaattttcttaaaattataaaattctttgaataaaaagtctatcatgcgtgaatcaagcgtttgtatgattctttgtatagaagaaatcataaacaaaataaggggcttgttgctgcccttttttaataaaacgattcaagatcaccgaagtcatgtctaaacctaaagattcaaagtaaggataaagaatcctgaaacaaggaaatcctgttttcaattgtttgaaaaactagatcagaatgaagaataaaaattgattctaaaagctgagacaaacaaaaaaagggctagagactactcaataaaaaaagtacttaaggattctccggtgagatatttgagagttgtttaacttgagttacgagagtacgaatgttatgaatgctttttatggaaaaaatatttagggtttcaatactggctaatttatttaatgtttttatttctctatttaatatttatttgaatttactattttaattttatacagagagttaaagtgaacttctacccattgaatttgtttttctcgagccgtacgaggccaaaacctcttatacgtttctaggggggggtattattcatatacatctatcccaatgagccgtttatcgaatcgttgcaattg

SEQ ID NO: 40061 - DNA, 602 bp, Arabidopsis lyrata
  Intron number 3 from transcript 343774 (locus 343774) deri ved from phytozome v7.0 (chr-ID scaffold_4; pos 771553 to 772154)
actaagtactctactttccctcacaggtaatcaaagttttgaatttgatgtttgtaatgtgtgttaatgcttggaagaattggttttggatgataaaaagtcttacttggtgatgaactaagattttgggggttaattttcttagtattttgcagtcatgtgttggatttgtgatgggttaaggattggtgttatggtacttgttacttagaattctggtcttatgaaactgatgtttgcattgtgcacaaaagttgaatcttgaatagtgagtgccctaatgattagaagaatcagtttttgttaatcagtaggcaatgagctaagattgtggggaggggtttagtcttcttagcattgtgttggatgtgatgatttttgtttggtttaagggttgatttatggaagttgttactaagaagaattctggttttatgagattgatctttgcgttgtgcacaatcattttagaagaatcggttggttgataggcaattgagctatgttttgggaacaattggcgagggtttatgtttatgaatgttttggttatgtttttagagggtttgtttggtttttcttttatagatcagagggtgatt

SEQ ID NO: 40062 - DNA, 343 bp, Arabidopsis lyrata
  Intron number 2 from transcript 935201 (locus 935201) deri ved from phytozome v7.0 (chr-ID scaffold_4; pos 21067229 t o 21067571)
attggcctttataaatagattggaagattcgtacggtaactcctctttctttcttattttcttcatttatatctctagatgtgtgtttggtgatagaattgcacaaatatagtaatgtgagctcttgtgttagggattaagaggacatttcattacaatgtcaatgaatttgtaagaatagatcagggtctttgattattgtttattatgcttactacagtagagaagatcccttttggattttctattgcttgttttgttgttgtggtttccttttgatttctatattctttctccttcttattcaggacctggatttccgtctctaagagggcttcgaggc

SEQ ID NO: 40063 - DNA, 734 bp, Arabidopsis lyrata
  Intron number 2 from transcript 888011 (locus 888011) deri ved from phytozome v7.0 (chr-ID scaffold_136; pos 6230 to 6963 reverse strand)
tacagacttgtcggtgataggtaattcccactccaagaggaagtctcttcttctgttaatatatttatctattccaaatataaaatatttgtttttagcctaaatatgtctgtataatgtcttagtttgtgttaaaggggaaaaacccaaaacaaaattgctgtataaggtttgattttatgtttgataaaaagttaaaaactaatacaaaaattcactaaccagcagttataccagatcaactaaattacccaatagtgcttcatgaaactttttggttcaccttctgattcggtttttgaataagcctttagatgatttttgatgtagcatgcatatattagtcataacttttatcataaattaggtccatttaataaggttgataatgcgttattgtagagtagtttcgaacgtgtttgacatatgatgccatcgtagtatccaactttttcaagttttagaaaaagttcaccatctcttagcacaaatgggaaacaattacttttgagtctttttactttattttacaaaagcttttatgttgtcggtaaactaatagaatgtaagaacagaaacataaatttcttcttttcctgtagtgtaaaaacagtgaaacggaatgaatgatatagtaaactaatagaatgtaagaacagaaacttaaatttcttcttttcctgttttgaatgttgtcaggtgggatttaatagcaggaagagtggtcggacgaa

SEQ ID NO: 40064 - DNA, 651 bp, Arabidopsis lyrata
  Intron number 1 from transcript 887541 (locus 887541) deri ved from phytozome v7.0 (chr-ID scaffold_891; pos 2589 to 3239 reverse strand)
ggattattcagcttggattagctgagagtacagtgagttttgaaagtttacgatgatttcgtctctctttgtgattgttgcgatgaggtttaatctgattttcattggggattggtttttgtagctgtgctttgacttgctacagagatggatgtctgagaatttgatggagtcgatgatgcaatctgatgatggtaaattcgatattagtagtatcgcaatgtataaacctattgaaggattactggaactcagaggtgtagataacattcactcgttattcttcaatttcttgaacatgaaaagcttttttgcaattattagttaaaaattgactgcaaaattgttttagaatttgtttgattgatatctgttcttgtatatatttgttgtaacaacactgtaacattgatgatggtaaatttcttattagggttctttgattttagggcaattagagtctctgtttttgttgacagattcacctagaatctcttaaatgcatggatcttccactaagcttgtctcttatcttgtaccatgtttcttgtgtatacaagttgttacaatcgaattatcattctgtttccttatatatgtttatatgtatctccagataatcgctcttagaagagcaaagaggagaaacat

SEQ ID NO: 40065 - DNA, 860 bp, Arabidopsis lyrata
  Intron number 1 from transcript 925757 (locus 925757) deri ved from phytozome v7.0 (chr-ID scaffold_2; pos 10687647 t o 10688506)
ttcgccacgtaagcgctttgctttttttattcaaattgcaaattggtccatataatctttttactttctttattgccccacatataagttagaacgactaatataacctttcaattgtactagaactagattatgaccctcaaatgtgggattagataccaagttatagagtaaaacctctctacgttaatgctcgatggactaataaatacgataaaataaaaatttatcagtttcgagttatgttaggctacaaaattaaccaaattcgagaaaattagtgacgaaacctatcgttatcatattcgaaacaacatctaagtgatgttacatcttacacgttgaatcatgttggtgttatgataatcatatatcaatcttctttttcatgtccaaaaaaatccataatactgatgaaatcagattttttaagtatccgattttcttaattatgcatacgacataagtttcaaattattgaaaccatatattacaaatggttgttttaagttgaatggattgaatataataagttggaaaataataagttgaaaatcattcaatccattcatctccaaaattgtagttgaatgagttgaacatttttgctgtagaatttgttcaatttttcaggtttttaagttgaatgggttgaatctatttttcaactttttcatctcaaatggtgaaaaattagtttaatgttcattcaactctttcagtttggtattttttgtcaaccatttgcagccttcgtgtaggttacattaatctatttcatgagtttatgttttaggattgagtctaatctatgattttttcactaaagtatcaaacattctttgacacatgcgttgcag

SEQ ID NO: 40066 - DNA, 182 bp, Arabidopsis lyrata
  Intron number 1 from transcript 485952 (locus 485952) deri ved from phytozome v7.0 (chr-ID scaffold_5; pos 17405751 t o 17405932)
agcaatcatcaaactgtgagagacattttttcttttttcttttttttttaatctttgtgttatcttctttatcatatgattccatggagattatgaaccgtttgtttctctctttttaatctgaacttatttgatttttgttttttttttggagagaagcaggtgttgaagcaattggagcc

SEQ ID NO: 40067 - DNA, 961 bp, Arabidopsis lyrata
  Intron number 1 from transcript 326382 (locus 326382) deri ved from phytozome v7.0 (chr-ID scaffold_6; pos 8386644 to 8387604 reverse strand)
gaagagtttcctcgaggtaaagataagatcttgcttttctgggttcttgaatttgatgtgaatcttcttatggattgatgaataacgttggttgacttcgatgatggagagtcttatttgaaatgtcctgactttctagtaataacgaatcaattgtgacaccatgatttagatggtggttcgaattagcttccgtgaatttagctgatatgttgaagatatttctgggttttagggttcttgaggatttataggaaaatggttttgtctgagatactaatagattctggaatctatctctgaatttctgagatcaagttttcagttggttttgtgcattgaccattgttggatttgtagattgtttcttcatatcttaggcatggattatgtatgggtatatagttctgatgaatgcaaaatacacatttattgaggaacaacatgaacatggtagctttctcaaaatttaaccacaaaaggctaaaagcaaagtccttggggaatcagagtaaacttgggaaagggttgagatgtattttatcttagatttgagagaagaaaccatatttaatgctttcacattactgttttttgatttgttgtaggacatacatctctgaaactgatagtagcagtttttttcctctgtttgattctcttttgttaaaagtgatagcttaatgggtagctgataaaagtgaaaatgctgtttgtttatgatactatagcaagtcattctgcatttcttgcaatgtcagttgttctttcttgctgcaatgtacaagcctctaacaaatgttttccgatctttgatggtttttgtctggttcctggaatgataattggcttagatcgtttcaaaccagccaacccgcaaaagtgattcaggctggtttgcaggaaattgttgttacttgcaataacagacgttttttgtttttctcagaaagggcaagga

SEQ ID NO: 40068 - DNA, 876 bp, Arabidopsis lyrata
  Intron number 3 from transcript 908156 (locus 908156) deri ved from phytozome v7.0 (chr-ID scaffold_2; pos 11372346 t o 11373221 reverse strand)
cacagatacactggtatttactttactccttcattgaaccacaatctcattctaatagtttttgcttattgtggtttatagggttgagtaattaggtgtaattgtctaattgtctacaactcctatttttcatgcatatgcatataaaatcatgtaacttaagaaactgtttgttcacgtttgctatatattattgtggagttggttggttagtcatgaaactaaagaaagagtcatgaggaaagtctgaaaatgcttgtgatatgcaaagtcgcctcttaagtaaattaatctgattcttgtgcgtaatctggtgcttgcagtatcttccactacatttcacaagcttaaatggttttacaagaaaatactgcaagattcttgagggagaatggtattaagcctggagagatgtgacactcaaaaagcgtcgtatatatgcaaccgtttaataccagtaaaaggtgttgtaattaacagaccaaatagcgacgattttgtgacatactaatgttctcgtataatagagacggtattgttacgtgcatacagtctcaatttgtaacgttttaactactaattttgtcgagacataattcaaaaataagtgactagtacttgatcgcaaaagtgtcaaattaacaaccaaaatgttcaatatatagtcacaaatcagtgtgaatataccatctgttttgtgactatccttatagaaatatttttttttaaaaacgctgaaacaaaatgaaaccaaaaacatcctaacaaatccaaatccaaaaacatcctaacaattccaaatccaaaaacatcctaacaaatccaaagcaagataacaaaagataagaaattaagtcttagataagggagaggaag

SEQ ID NO: 40069 - DNA, 640 bp, Arabidopsis lyrata
  Intron number 1 from transcript 481210 (locus 481210) deri ved from phytozome v7.0 (chr-ID scaffold_4; pos 1830057 to 1830696 reverse strand)
tttgcacttctaattaatcatacttttagtttttagtatatttagtcgtctcttaactcaaattttcaaacttgtcatgcataaacctgtagctagggttgcacaattttttttctcttcatatgtctatctttaatatatccacgtaaatttctttaaacaatttatgtccagacaagagacaacatataaaaatagtatttttgaaattaattctcccaacaagagaatcatagtttaatttcattttgttataattaatttcaatcagcgggaaaaatattaataaaacgtacacaacaatacttactaaatgggaaagtgtctttagtcaagtcgttaagccctttttgattttaccttctccatcggaattcgactccactaatagatcggatcttatcgatccaaagatgttaaaaaaaaaaaaaacaatccttactaaatggatttaacaaaatttagaatttagtccaagaaacagagatttttgcgaacaccatattctctggtcttgttaaaagaaataaacaaggggtggcaaaaaaaaataaaaaaaaaataaataaacaaggacacaacaacaaaatgcaaagctaaatcttaataacttagctctagcttttgttcttgtgtagtg

SEQ ID NO: 40070 - DNA, 448 bp, Arabidopsis lyrata
  Intron number 1 from transcript 476856 (locus 476856) deri ved from phytozome v7.0 (chr-ID scaffold_2; pos 17433619 t o 17434066 reverse strand)
attttacaaaacctggcttgctcttgtttttggttcttaggtcacttgacaaggtaaaagatctttgcttttgtctctttttggttcgaatctcaaagtcttggttctaagttgtcttacccttcgagttctttccttgctagtagctgttttactttctggttctgcgtaatcacaatcaccggaaagactaatacttgtgagcttattgaattcctggctttttttttttttttttttttgaattcctggctttaattgttcatgggtttgttttctattattgaattttacaacatttttcttcttgttctgttgcaatctttctaatgagatgtgcttagtgtttttttttaagctttgaaaagtctttgaattttgcttgtggactaaagtgattatggtgtcttcatttgtgcttataggaaatttggaaacttgtgggatt

SEQ ID NO: 40071 - DNA, 393 bp, Arabidopsis lyrata
  Intron number 3 from transcript 344273 (locus 344273) deri ved from phytozome v7.0 (chr-ID scaffold_4; pos 5906536 to 5906928 reverse strand)
tgcaaggtggttaaatattgatactttgttttgatctcataggaagctttatatcgtagatgcactttaagtatgttcttaggttcttctctttggcaaagtctgcattttttgttttggactgtttttttattagtgcgattaacatagactttcatgtttttacgggaagcagcaaaagaacaatgattgtagaggaatgggattagtatttagccaagttttggcaagttgtactgccgactgaaaaagacacacctgaggctaactccgaccacatcctgtagattttgtagaatggaagaaaagttcaatcctttttgtagagttttaggtcttcattattatttttgttcagtcttgataaagttgtggagctaaattatcagtgga

SEQ ID NO: 40072 - DNA, 416 bp, Arabidopsis lyrata
  Intron number 1 from transcript 925075 (locus 925075) deri ved from phytozome v7.0 (chr-ID scaffold_2; pos 3549450 to 3549865 reverse strand)
atacgaggacctactgtttcctctcgaggagaaacgtaagctctctctttctctctgttgttttgatttctttttgactatgttgttttgtacggaactcataattgtgtaggttgatagatattcttattgcttgtaggataatcaaagttaccgcagttttgaaggggaatatgaatttgatttttcgacgtagatgcgtttagagatatgtttgtgtaatgcagaaatggtaggcttttaacgaaattattcttcttttctaggttgagttgagttttctctttgaggtctatgattgttcttgtgttagttacccctataggcttatgaaaaattattgtagcttcgaagtggaaaatgaatttgatttttcgacgtagatgcttttaaatgtatggctgtgtaatgcagaa

SEQ ID NO: 40073 - DNA, 648 bp, Arabidopsis lyrata
  Intron number 1 from transcript 339216 (locus 339216) deri ved from phytozome v7.0 (chr-ID scaffold_2; pos 14012817 t o 14013464 reverse strand)
gcagaatctgacaaggtaaaactaaaaaaccatttgcttaaaccacaaatttctctaactgttgttttcaatctccttctggtgtttcaatcggtgagaattaatctcatgttcatatgaatctgtttttgcatatatatttttacatattgttaccaattaagtcttatgtctgaaattagtacaggtttactgcatctaataaaagtcaacttgcttgttcggaaatggtctcgactctcgagtatgaaagttcattattttgtagcatgttttgcataaacatacaccacaaacaaaaataatacatgcttttgattattttgggacggttatttaatgctcaaggataccaagatttattccggtatttaaatttttcgaatggaaacatgtaattaagatcctctctagcctctaattaatataggtcgaatacaattttatttttttgttcttggcattcgttctctgtttattcctgtaatactcattcaccttgtcagtttgtgtgtggttattgaaaactatttgtcataaagtttagaaatagttggtacaaaaaaaaaattatttgatatatgtaaacactattgtatggaaggtgaatataaatgtgtcttggatatttacaggaagaggagcttg

SEQ ID NO: 40074 - DNA, 626 bp, Arabidopsis lyrata
  Intron number 1 from transcript 491406 (locus 491406) deri ved from phytozome v7.0 (chr-ID scaffold_7; pos 3555934 to 3556559)
cttcgtctcgaaactcttcgcagcctcaagctgtattgattcgccttatgttcttagttttgttgcttcttttttttcaaatttttagcttggactgaggaattgagaccagtttaatcacaactaacgaatggactcagttggcgagtgtgatgatttggaaaatttgaaagtaaacaaattacaaattctggaatctggattatataatgttcttttgagctctttcttgttttatttattgatgataaaatcggttaagcttcaaagtctgaatctttctaattattttactttgctgtaagtgcaagtgtttggcttcatagtgtagaagttaaagttcttttatgtatgtccatggttgatttggcaaataaaaattagagatttgtggtgtaaatttgaatgtttgcttcttttctcactcacttaaaggagaatttatcatgttgtatctctgaaatcttactgggactgcaacaaacgagctttatttacgctgttgttttggtcatgtacccttaaaccagtattcttgttggatagttaaacatgtttttttgtggggttttttccggtgaatacgatcagagacaagagaagaagtcgatatctggcagttttag

SEQ ID NO: 40075 - DNA, 689 bp, Arabidopsis lyrata
  Intron number 1 from transcript 894564 (locus 894564) deri ved from phytozome v7.0 (chr-ID scaffold_6; pos 12030275 t o 12030963)
aacggtattcaggtaactaattcattatatttttactcattaaattcttcgttacttgatattaaagtttaaaaattgaattggacactaaatttggttaccacctatataagaagaattatttctagagagcaatattttttcttttaatttgtcaaaacattataaaatcttaccatggttgtctttatgttagtttcgttttcatcttatttttatttgagaattcttccatcttaaactatttgtagccttgtaggtaatataaaaggttttcattaaaggtataatttgatttgtcaaaataatttttagagattatagactccaatatatattatgtatattttttaaacaatgaatatactaaaaaccggtcctggattgttatttttcatgaacctatgaaacatatgtggctgaaaaatcaaaagatttcatatggtctaagttagtaactgatgaagttgtgttcaatgtttctttcatcactctttaagagagtcatgctttcactataattctaatggaagaaaaaaggattagcctacagaaaattaagatattatcgattaattagtagttttatctaactttatttttaaagggataattgatattatacccaaataactgattgggttttttgattgaatattgaaatataggcaacaaagagactaagggag

SEQ ID NO: 40076 - DNA, 350 bp, Arabidopsis lyrata
  Intron number 3 from transcript 323545 (locus 323545) deri ved from phytozome v7.0 (chr-ID scaffold_5; pos 14613586 t o 14613935 reverse strand)
cggcacaaagtacaagagcttgtaagtttctgaacaactcttttgatttaagtctctaagttatgtgaaaagtttcatgttttaggaacgttattcttttatcttctgcttacatgttgctctttttttcatcttgcacttcttcttctcctcgacttggtcttccgtttcttatctgaaatcaacaataattccggaataagaagtgcatacatctctatcaggactttctgaccacctaatcaaaggtaatgtattagttactgtttcatgtcatcactcactcggtcccacattatcatattttccgtttttttctataagcaattatatatttttaaccttgtaag

SEQ ID NO: 40077 - DNA, 455 bp, Arabidopsis lyrata
  Intron number 1 from transcript 920607 (locus 920607) deri ved from phytozome v7.0 (chr-ID scaffold_1; pos 7108700 to 7109154)
tcgacttcgcttgcaaagagtggggatttttccaggtaaagtctccaactttataactcttttataaagcagcccatcgtctttctttattaacatattagacgtaagacgtcacatggagcttatactagttttttgccagatataagtttcatatcattatttagtaatttacttttttgcttgacgaaattgctctgcaagaactcgcttctctttacaaaataacttttttttttttgttccaggcaagcctcagagtttacttttttttttttttttttttttgaagaaattaggcagataaatcgtttctttacaaaacaacccctgttttttcttcttcttatttaccatgttaaacacaggttttgtggagccaaacactttctgtttcaaattttaatattttgattaatgcttatgtctttatggttatctacagcttgtaaacc

SEQ ID NO: 40078 - DNA, 684 bp, Arabidopsis lyrata
  Intron number 1 from transcript 477795 (locus 477795) deri ved from phytozome v7.0 (chr-ID scaffold_3; pos 1866590 to 1867273)
aagttaatcttattgagagcagagtaagtttgttgcttctttttttctggctttaattttgttttttagtttctaagtatatattctcatgtttgcaatttttggggaaaattttatcagtgattttgacatgggtctctttcgatttctggtttaattctgttcctgatgttttttcgtcttttgcttttgtgtttgagcttatgtagaatgatttatagtgttttgattgttctttttttcaaaaaacagaaattgaaagctttaggatttcaaatcgtttgaggtgatgaaacgtgtcgttagtttgatagtggtctctgtgcttctccttggcgtctctgtcttcttctgtttgatttttaatctgagtgtttaatcagattttgttattcaatttcacacttaaattcaaccgactctttctttgattggattctactatgtagtgttaatcaaaaaagttcgaattttgagttttgtgtttgataaagactctcctttgatgcttgaattgaatgcaaagcactctttttgtgtggtttgtgtatgataagcttaagccctttcattgatctctcttgttaatgcgtttatctcatcttctattggtgttctctgtggtggaactaagtaatctgcaaattttgtgtgtttgatgcagacagtggttcctctcaatac

SEQ ID NO: 40079 - DNA, 358 bp, Arabidopsis lyrata
  Intron number 5 from transcript 477396 (locus 477396) deri ved from phytozome v7.0 (chr-ID scaffold_3; pos 324248 to 324605)
ttctcgacagactcgagtcttttggtgaatttgaggtaccttcttgtttctggtttttgattgaagatcaatttgatactctctggtttgtattcttatacttgttgtttttttttttccttggtgagagattgctttttgattgaatgacctgtatttttgtgattcttgggcgaatgttattggaagatgcttctgagtaactttttgcattaaagaaaagttgttgactctttgtttttgtagattctctgttgtattccatttcctcttttatttatcatctcattgacacttttgttgcaactttactttattcgcagatcttgcattttggggataaagttatacttgaaga

SEQ ID NO: 40080 - DNA, 943 bp, Arabidopsis lyrata
  Intron number 1 from transcript 474549 (locus 474549) deri ved from phytozome v7.0 (chr-ID scaffold_1; pos 28986848 t o 28987790 reverse strand)
tcctcttagcattggttgatttcagctttgttgaggtaaatatcatcttctcaggtttctatcttcagattctgatttcattgccttcagctttactttttctgggaaatttgtgattcaaattttgagattttggtgattgagttggttgatttagggtttccttttggtactctttctagtacaaattcgttatgtattgaaaaatttcagctttggattgcaaaacgttgtcttgttgcttatttggtcccttttaatacattttcttaatttggttttgcgtttttcatcaacagaatatataaatttggacttttttggtttgtcatgttatttgttctttagagctgtgattatgattttcgttgtttgatttgatgtatgaagcctgcgcaagtttgtgtctttcgtaatagtgattcacgttcaatgtaacctttaaactgcttggtcaggagatagaacaccaatcttctagtttcacgtttcgtatgcctacaatctggatatttgtgctggaaaattggctagcaatttacatgttatgggcagtttttggttgttgttcccatggctcacaatcggagttactttatcgtttcagaacattcacgttacttctctgtatagggtttagttgatgaacccctagtaatatggttttatttaagtagatcgatgtatgaaattgactgtgacattctatctaaaacaaatatcacagttacatcacatttagaaatattaaaagaaagttttgatgccagcatgaatgcgaattggaggccagtttgcatatcaggctcatcgtcccgtgagacctggcaaaataaaacatgaaattaagtgtattttatacagttatatttatcatcttattgaatattcggtttatcgataaattcttatacttttttcacttcaacaggttaaagcaact

SEQ ID NO: 40081 - DNA, 391 bp, Arabidopsis lyrata
  Intron number 3 from transcript 484660 (locus 484660) deri ved from phytozome v7.0 (chr-ID scaffold_5; pos 5153781 to 5154171)
gtaattggagagctgttcctaccaatactggttctaatcttcattcttcatctctcacctctctctctctctatagatttgtatgttgatattatttagattaatcattgagagtgagagatagataaggagtcagaatggtttggattgaaatttgtgttctccaaatgggttttgatttccataggtttctttctttaggtctttaagattgtggaattagcttaatgaaaaacatatgttgaaattagggttttgtttattgcccttaatatttaagatctaatgcatgagatcttgttattcctttatatattattaaacttagatattttctcattaattggtttttaatttttgtttgttcttgtaaattttcagggttgcttag

SEQ ID NO: 40082 - DNA, 633 bp, Arabidopsis lyrata
  Intron number 3 from transcript 496171 (locus 496171) deri ved from phytozome v7.0 (chr-ID scaffold_8; pos 19509098 t o 19509730 reverse strand)
aagaggaaattgtcactgcactacaaagtaacaaaatcgaagatatctctaacaatgtcgagagtttgacggaatggattagaacgtggcgaccctgaagatcttcatatgaagacaaattgacaatgcatctgtaatggttttcaaggttcagtttttggtagtttcattttgtggtttctgaatcgatgatcttggttgcaatttgtatactgatattctgaagcactacaattcagcttatgtatgcttattttgatgatatttaatgaaaagataaagttttcatcttttctattgtttttgttaaactttacaaatgtgtgaaaacctgattgttctgataaatcataaggttaagaaacataatctggataaatacttaaatttaatcactcactatctcgaaagtcaaagaagctgcgaaacaagcaaggtacgattaaacttgaagaagcaaagtctctgtcttctcttatttgacgaggtctaattgttctttctgtcattattctaagaattttggttatgaagattagcatctgatcatatattgttagcaattgggaaataaatttggcaaagcttgaatcttttcaccttcaacggcgtgcctataaggtgttcgacaaa

SEQ ID NO: 40083 - DNA, 396 bp, Arabidopsis lyrata
  Intron number 1 from transcript 948105 (locus 948105) deri ved from phytozome v7.0 (chr-ID scaffold_7; pos 24620335 t o 24620730)
tttgctacgaagcattgacaattcctatcttccaggttttgcttcttcttatttcttatcattaaatctttcttattcatagagtttctgctttcattatattgacaaactttgtgtcaggaaaacgaatttgttttgttttgttgttttgcaagatataaattgaaaaactgtgttcttgaaaatatgtgtataaatttagcaagacggtagagtatatatcatgaattataaaacaatattggagaatgattctaatggatgtaactagagaaatagagaatccgttgctaagtttcttttctcaaattttgaagtgttgatacagctttagtcacaattcattgtttttgtatttcagtcacatttagcttgctcttcttgctgtcccaaact

SEQ ID NO: 40084 - DNA, 388 bp, Arabidopsis lyrata
  Intron number 1 from transcript 477707 (locus 477707) deri ved from phytozome v7.0 (chr-ID scaffold_3; pos 1543663 to 1544050 reverse strand)
aacacaaaagacaacagtagaaaaggagaaagaaaaacaaatcccactttgatctctttctacttgtatctctcatcttgaaattaaaaaaaagcaagaggtctcttcttattttgcaggttgttcctctttgcctcaccatttttgaacaacatcatctgatcatcatcactgaatctatccttttttgaagcacctacctcaccactttgcagtacaaggaagtatccaagtcttcattctatctctctcttttgttactttattataccctttaaccaaaaaaagttatttaattattataaataactaaaaacctaatctttgccctaaatcactcaaactcgatctggtgaaagaaccctaatttagaaacatctaaaaagct

SEQ ID NO: 40085 - DNA, 891 bp, Arabidopsis lyrata
  Intron number 1 from transcript 314794 (locus 314794) deri ved from phytozome v7.0 (chr-ID scaffold_1; pos 29516370 t o 29517260 reverse strand)
aatctggttaagagacacaggttggtctacgatttgctccgggaagagctcgatactggattacacgctctttccatcgtctccaagacgccgtctgagtctcctccataaggctaatagtgcctgtactgaataatgtatcttctgtgacattgatgatgcttattgaagctttaaagcttaagttgttgttaaaaaaatccaactcttttcgatttaaagattgaatttttcccatcaaaggctctgttttggattttattgcagaaccaaagttttcatatttacatgcgcttgaggttgtgtgttggtgtttctggatttgtgtgttcgaagaaagacacttgcttttagttcaattcgacttctgtgttttctagaaatcactcaaaacttgattgatcatagcttgatgaattgatctaggctccatttagttgaaactccaattaatgatcatgtgtttgaattttcaaatgaagctcgtttgttagcttggagccaaaaggcttgttgctttttttttttcatgttgcagtctctttcttcttcagattattctcccattgtcatcaatggcgttgcgtcttctaatcgctaacgctagaaacaaaacgccttttccaatagtccatgtcaccttatttagcaacaaatatactactactttatgggcttaaaccaagtttaatcagtgatcaccttttgatttgtgggtaaaacgaatcgtcgttttcattttctggagaagctaaaccgtccctcttctataagcttatacatcaacagaccggacatagttacgttagtatatgtcgtaagataaaaaaaaaacatcttcattcatcactacattggcgatgagagagctttcggagcttaacagagacg

SEQ ID NO: 40086 - DNA, 594 bp, Arabidopsis lyrata
  Intron number 1 from transcript 482183 (locus 482183) deri ved from phytozome v7.0 (chr-ID scaffold_4; pos 15408795 t o 15409388)
ttgctcttcgtcgcctcttctcaccatcccaactggtaatcactattgccctttattggatcttgcttgatcggctctgattttctctgaggaaatgagatcaatttagtacctttttcatatttggtattgttactagttgtttcttctggttcttgagttgccagatcttatgctttagcttgattaaggattttgagtttaaatgactttgttttagttgtgtagatctgcaagaattgttttgtttctctaattatttggtttgataagtaatcattagtttggatcatggagatttgacgtttgcaggctgctatttttgtttaaacaccaagtttgagtctttgagatctgacttgtgttatgattgagcatctggtttacttgttctggtggttgtgatttctaatagcagtgtaggtgttgcgtttatttgattcactctaatgaattcatggaggttggtaatgttgtccacaatgccttgtgatcattgcttctttacttatctactatgtttattttctgatgataccaaaaagaagagcctaacccttttaacttgttttcatattgttccaggactcagca

SEQ ID NO: 40087 - DNA, 740 bp, Arabidopsis lyrata
  Intron number 4 from transcript 470636 (locus 470636) deri ved from phytozome v7.0 (chr-ID scaffold_1; pos 2235953 to 2236692)
actatcatcaacttacatcaaatcttaggcaacaggttcctcctccttttcattacctgttatttgcgaaattttagttttttttttgatccctatattctttgaaccagaaattaaacattaatctttgagaaatcatcactcacatattttttttgaactctttgagaagtcaatcattttttttttgtttaaataagtcaatcacaattttctttcgataactagtttctctgtttagttcatgttatagtaaaaaaaaggtaaatgttcatttgtagatgaaagattttgggacatcaaaatgtgaaaaagtaacattactttggaaatttagtttgtttttaactgagatgactagctaggttacttgacaatctttcttaagaattgtctttttatatatgttttgctttgtcagtaaaatattatatctttgtggggctatgaactgagaagattccaacccgtgattgcctttgtccattaaataatttcaatttttactttcctctaattatacttttttcttcttctcataaacaatttttattcactactagacaagataggcactgtgatcagcgtaagacatgtgcaaattcttttaaccatatacacatgaacttcaataacttttcttttgttttactcgctctttgttctcatcacaacaatgtagacgtattatagtgaatcatacatgtgacattttgtttgatatatctttcttttggtag

SEQ ID NO: 40088 - DNA, 830 bp, Arabidopsis lyrata
  Intron number 1 from transcript 916456 (locus 916456) deri ved from phytozome v7.0 (chr-ID scaffold_8; pos 12538364 t o 12539193 reverse strand)
tcccctaaggtcaattacaaatctcccccaccaccgtatgtctacaagacaccctactattgatactgaattgtttcattatcaagaaacatgattccaatatttgttttttattattatttttttctcttgattcttctgaattttttttcttttgatcaattatatctttaattttttatttgataaataaagttggtatctttttacatacacttttgttttgtttataatttgtttgaattggctcaaaatttttaataattttttttttatccattgattaaaaatattttggttaggatataaagctagtttatatcagaaaactattaaaaacttatatataagatatataagctctttcgtagttcaaagcaaccaagaaacaatgaaactaaacgtattgaagattctcttttggtaaatctttaaatccaattacgatcatcgctaaatcgaagcaaattcgtcccaaataaactgttactgtttgacggagttgcatatatgtcgcatatgtgagactattttgcgactaaagcgagtgacttgataaagcgtctctgaatcgtcatatttttttgtataatttatgaccaaaattccgtagtcgtaaaaatatatcaacatatatagtcgtggataggtgaccactttctgacccgacagttgggtcgtaaatatgcgatgaatgtacctctgtttttgacgtagttgtatagaatggtctacgcaggttttcttgtatatatctaaagatgggttttgtattattctaatgaattatacgttagttttcaaatgtagggtaaaagacaaactctcct

SEQ ID NO: 40089 - DNA, 827 bp, Arabidopsis lyrata
  Intron number 1 from transcript 932970 (locus 932970) deri ved from phytozome v7.0 (chr-ID scaffold_4; pos 10074879 t o 10075705)
tctctctttttaccatcactggagaaaaatctgttagttcttgttttctttctctttttctcaatttgctctgtttttttttttttcagattcagacacttcttatggttactctgcttctaatcagtcagattttggttaaactatatggaaaagctctttggttaaaagtcgaaatataagacttctctttggtctctttttatatttttgggttattttttctgggtttaatgagaaaacgtgtccagattttgttttagacttgcttcttaattatgtgatttgggtttcttagtgaaaattgttttttttttttttggagttggaaccattgtgatttggtctgattctctgtgagatgcaacagagtgtgttttcatgtcaagcaaagcaaatttttttgttttattacacaaagaaaaaaaaagagtttattttattttatctgtgtttgttttgtcatgatcaaattatgatgtcagtactttgatgtgaaaaaggaggctctgtttcttccccactctttcctcacgggcttagtcatcattttcctctctgttaactcttgtcttctttctttagtctaattacaaaaaagagaaaattttggttgctgtgcagtgaattaaatagcaccaatgtggtaaattatgagagagcacttagtgcattaatagcaacagcagtgaccataccctcttttttgtcaaagttcccaagttgaggatctgttcatgttttacagcttcttttgtcacctaattaaattaaaacctattttaatttcaggtgctacatttctggtctggttcggtccaactttc

SEQ ID NO: 40090 - DNA, 658 bp, Arabidopsis lyrata
  Intron number 1 from transcript 349589 (locus 349589) deri ved from phytozome v7.0 (chr-ID scaffold_6; pos 827120 to 827777)
gatgtgattctccctccgatttctttttgcattctgctattgtaacttattgatcaacatgatgttgttttgagttaattttagacttttgtgggaattttttctataacagtctttcagttttattttttttgctttcattgtctttgaatgtgattttgtactactactacaactaccaaagagtaacaaaggaaactcgaaacagaggcacgtacatgacgggaacacactgtcgaaatcaaaattacatttgttttcttttccagacttgttatagggtaacacaacgcatatataatgttttcctcaaaatggacacttaacaatataagagcaagtaaatcaaaccaataaagacccttcatcacctaagattttgtgtgaagaagtttcgtttgagaatgtgtttgcataatgcaacaactttgggattttgttgaatggtctataagaatgtgtttgtttagctttaatggttgttactctcggtccgactcttttttggattatgctattgtgtgacacattgatcaatgtgactttattcagattataattttttttagcattacatctaataaatactagtagttcataagtcaatttaattaaatcactacatttaattgagagcttctcgtatgtacttgaaggt

SEQ ID NO: 40091 - DNA, 591 bp, Arabidopsis lyrata
  Intron number 2 from transcript 496399 (locus 496399) deri ved from phytozome v7.0 (chr-ID scaffold_8; pos 20388316 t o 20388906)
gcttcttggtgttgcttcttctataaacaacgaaggtttgtttcttctagctcttttgttttgtcttttttttacccgtggtcttttaaaaaaaattgattttgtgttccaaaaattagggtttaggtggttttctcctgaaaccccttgtctgatttttctgaaattttgaatctaaaatcgtctgtgttagaagttatcaagacttaaaatgtttggtttctatcaaacatttggtttccccaagaaagagagttaaagttgaaagctatttcatacccaatacttagctctggcttgttcttcatcaaatgcatataaagatgcaatcttttctccattttccaagaaattttgatcatgattagtataaagaagaagaatgcctgttcctagaccatggaaagtttgtatttttttcaagctttctctgtttcccgagaaaaaaaacgaaacttaatccttagtttgtgtcctggagagaaaaagatatgaaatttcaagaaattccttagtttggcgtttcaaacgattttaataatcctaattgaatatatttatcaattttgaaaatccacagggaaagctttg

SEQ ID NO: 40092 - DNA, 386 bp, Arabidopsis lyrata
  Intron number 4 from transcript 342565 (locus 342565) deri ved from phytozome v7.0 (chr-ID scaffold_3; pos 11408984 t o 11409369 reverse strand)
caggtgagtttgttttgggaccaaaaacttcgtatgcatgttcacgactttttaatgttctgtattatgatcccaagaaaaaatagtgtgaaaaaagtctccatagaaggactcatcacaaaagatatggggataagtctacaacctctatcttctctggtcaggttgagaatctcatgtttctctaaagagttgtgtcttgttagtctagagggcgatatggcttcgcgggtttttcataatcatctccactgaaaatgcatgtttgttcttcggttgtagttgagcttcatctagtcacttgggagatttcatgatatattgtatatttttggttaatattttgttttatgttcatagtctcagctttgcctctgggtgcttag

SEQ ID NO: 40093 - DNA, 517 bp, Arabidopsis lyrata
  Intron number 1 from transcript 948648 (locus 948648) deri ved from phytozome v7.0 (chr-ID scaffold_8; pos 3173587 to 3174103)
atcagagtcaaaatcttaaaagagttctctgctttgcctaaggagatcgatccattctttcaaaccctagatcctgaaggttaaaattttttcaaattttgtctcctatcaattttgccaattttcaagccttaatacgatttgattactctgttttctgattttgttctggattagggttagttcataattgatcgtcttctattcctctattgaataagaaaggttgcagatttatagttttaatccaaggctatatcagttactagtaaagatcatattttgcaatccagttactagtaaagatcgtgttggtttttacgatctctgtttttattctatatagatctcttgatagatttcattcatgtgtcttgtcaatactctcggtgattagcacttcctagagaactagtttaattggttgtgttacgatacttttgcttccacaacatccaaaatgtgagggaattttccatttacttgtgtttggttttgtgctgtgtaggtggagaac

SEQ ID NO: 40094 - DNA, 916 bp, Arabidopsis lyrata
  Intron number 2 from transcript 490509 (locus 490509) deri ved from phytozome v7.0 (chr-ID scaffold_6; pos 24757886 t o 24758801)
gcatccccatcgccaagctatctgctaagctcgaggtattcttcattactttggtccttctaaaatgctagaaaatttggattggaaaagaaaattaagagtatcacttagtatgaatagcatatgagtagaagggaatggcttggaatttgatactggaatctacgcattttcttccctcacatcttctttgttcttggtctgtgtttgtcaatagttttattggttttgtcgaacatagatttgatttttcccattccataatccaaggtctagcatgattcagggaaccggtgtctagctatgaaaatgttttacagtagatattagttgctacgtacatcctgcaaatgtgtttctatgaaactaacaaacttctcgtacccagttccatatggaattcttagtcattgccattagttcattgggcattagtggatcagtgactgtgtagattgtatattatttcgcaaaatgggaacttatctgtgatgtttgtctctgacctgatttagatttgcaccctttgagctctccaagccctgtttcccatcaccatgttactttgtgttgtatgtttgtgtaatagctatgggagattttattgattatttttctagtttgcctggttctttgttcttctggctacatctttgagaagaattcagttgaatatgtagttcgacactgaagtctaatcttttgaaacccagcaacttccgttcaccaaatacgttctaaagaatggtttggatgcaaatgactgaagacttgcattgcttgagtcccttgtgacaaaaatgtgcacttgaatttttatattttgtgtatgtccatgctactatatagttcccactttcttgtttgatgatcacaatttgagaaaagcccttttggttttcagcaaaggccacac

SEQ ID NO: 40095 - DNA, 194 bp, Arabidopsis lyrata
  Intron number 1 from transcript 923259 (locus 923259) deri ved from phytozome v7.0 (chr-ID scaffold_1; pos 25070348 t o 25070541)
gactgaagaagagcatcggtttcttcttcatcatcttttaatctatccattgacatttgagacttaaagagtgaaaaaagatttcaaagatctttattcaatgctctgttttggttcaaagatctttacttttattgaattctttgtttttcttgaaaggttgtttcttttgggtttggacaaatttgggaaag

SEQ ID NO: 40096 - DNA, 483 bp, Arabidopsis lyrata
  Intron number 1 from transcript 935031 (locus 935031) deri ved from phytozome v7.0 (chr-ID scaffold_4; pos 20433353 t o 20433835)
aggccaaacggatccccgatccaaagtttcaacaagtctaaataagccctcgttcttcttttttttttttttttcattttgctttcagtttagcaaataaggacttccttgtgtttcctccttatcttcaaggattaaagacccacaattgtccaaagtttgtaggagttatactccaatatagattttaattaaatatatagctttgattcggaattcatcaacgttggtcaagtttttccaaatcaaaggatttggcttgattcaattttatcatttttcattgatttcatgaattacactgaaatattgcgcaaaagtgtaaactttttgacactgcacatttcaggagaattctgttcatcatatggattgttatcttataatatgtttctctatgtactgtgtagaaaacaatattgtctttgtataacgaaatgagtttcagccctcagcgtttgcggttgttgggaccttctgaaa

SEQ ID NO: 40097 - DNA, 450 bp, Arabidopsis lyrata
  Intron number 2 from transcript 488535 (locus 488535) deri ved from phytozome v7.0 (chr-ID scaffold_6; pos 6894804 to 6895253)
acaattatcaacctccattcccttcttggaaacaagtaatcaactactatttcactttataatttcttacttggtctttaaaaccatatgttaattcttctagtcaaatctttaattatatatcccataggtgtggtctaaaaagttagtgtgataatcgagagtagtgttatatatgaaatatataataacataaacattagtatatggtttatggatgaaagaatataattgacatatatacctactacactggttttctctaggtgcatacgtctgtagccgtttttcaatcttgaaaagtaatttttgctatgactaaagcaaatcaatattaggtattagtcttagactaatccactggcataatatcaatttgattaatttttaatcatttcgtatatgtttttgaaaggtggtcgtcgatagccggtaatcttcctggaagaa

SEQ ID NO: 40098 - DNA, 832 bp, Arabidopsis lyrata
  Intron number 1 from transcript 943306 (locus 943306) deri ved from phytozome v7.0 (chr-ID scaffold_6; pos 22870822 t o 22871653)
tccgtcaccatctcgtgcagcggaggctctagtcggtaagttttgtgtgtggcttagataggttacagaacaagtttggatttttacctggttttgctttggtttctctgtttagggtttaagggttctgcttagtctctctggtaattactgattaagtggttagataggaaattggatatgaaagttgtgaactttatgctattcgatggcaaatgggtgactgagaagaagagcaaggaaagaggatgttagactttttgttaattgcattttacaattttgcaggaacttagagttggctgtgaagtcaagtgaaggtgcaaggaggtctacaagactgagacttcagcctttgcgaaagccaaagtcaagcccgaagaagaagaaacccgttaaactccattcaaagatgcccaagaaacctcccactgctttcttctttttcttgtaggtactctccctcatatgaatccaaattgttatctatatatttaagctcagctggacttccttgcagtcctctcttaaggaaaattttgtgtggattttgccattggactttaggatgaaattatttatgttgttatgtgttctggttactttagaaaacatacaacgaaacacctgttgtatatgcattttcctcttgcctcatattgccttatctttttggttccaaagggaggatttccggaaacaatatcaagaggagaacccggaggtcaagtccatgcgtgaggttgtagagaattagtttgtggtatatgaatttaaaacatgatggctaattggaggcaacggtataccagtttcgccggaagtggctaac

SEQ ID NO: 40099 - DNA, 364 bp, Arabidopsis lyrata
  Intron number 1 from transcript 923205 (locus 923205) deri ved from phytozome v7.0 (chr-ID scaffold_1; pos 24740628 t o 24740991)
tttcagacacccatcattgcctccgaggagccttggtatgctcatcttcttcttttttggctatacatattattttcgttactataaattctaatagtgtttgtttttttaaacgattgtatgttttggatgaatgaaagcaaccacgatgcatgaagaagattcaagtgatgtttcaattgatcttttatctttaatttatcgattttctaattttacaaaaatgttctcactgagtagaatatacttttgagttttgagttaaatctttcacagtctgttgtggattagcaacgtttcaagccatattaactattgtgttgtggcagttcgaaagattcatataaattggactattgctaca

SEQ ID NO: 40100 - DNA, 633 bp, Arabidopsis lyrata
  Intron number 1 from transcript 938612 (locus 938612) deri ved from phytozome v7.0 (chr-ID scaffold_5; pos 17967658 t o 17968290)
caacaggttcctgtctacgcttagatcccgatctggtgagcttaccaatcaaaatttggcctctttttgttacttcgtggcttaagttgctaaatcaattgattagagcttgcaagttagattaatatgttcttgttagttatgctagtgagataaaaattcagattcatatagtagtgtctgctctcttttgatttgattccggctctagtttgtgttacagagaggttgtgtttatggagctgtgatagatgttttttgctagtgaatttttttgtgaaaaaagacagtgaaatctaatgtttttctctcaagacttgatgccttttcttttaagactcttcagagaaatattatcttcacttattggttttagcttgtttctttatagttctgtacttcagtttacatttgagcttactttgattctgagaaagtgtgggaaaatgcacaaaactacaatcttttttctcaggatgttaaagtaatgttgcactatttcttgaaatgctttgtttgagaatttgagttttgatcctaaagttcatgagaaattagatgaaatgtttgaccttttcctgtattatgctcataactgaaatgatcttctcaccttttgatgcagagatctta

SEQ ID NO: 40101 - DNA, 382 bp, Arabidopsis lyrata
  Intron number 1 from transcript 494809 (locus 494809) deri ved from phytozome v7.0 (chr-ID scaffold_8; pos 6991598 to 6991979 reverse strand)
aagtttcaatttttcaacatcctacgacggcaaaggttcgttcttcgtcgctttcatggaatttgatcctttttcttgaagcttgattcttttttcgtatctataggctctgattttgcgtttgctgatttggttttgtcttttgacggtgaaagttttgatttttagcagttttattacaatgacttgctttttttttaggtttgggtcttttgtttgtgtcttattgttgattctgttttgtaatctggaaatgtgtgtggtaagggttttgatttgagtactctagagatattattgtttattttagatcattcttttcttttgtaagatgatgttacaagctatgtgttttcttctaaattttaatactttagggttc

SEQ ID NO: 40102 - DNA, 371 bp, Arabidopsis lyrata
  Intron number 1 from transcript 907926 (locus 907926) deri ved from phytozome v7.0 (chr-ID scaffold_2; pos 9281023 to 9281393 reverse strand)
ctgcagctggaaacaagagcattaacgccaaattggtcagtcttattagctcgattcttttgagctccctttgaatttttttttgttttctctccgatgattgtgaaattgattgaatttgcagacccttttgttagattttcagtttccggatgtgattctgtttctaatttggagaattttgatcggattttgttgttagggtttatgttggattcttatttaggtgttttcgtaatagggttttagtgatttatctcgaaccaggattatagatatgaagatgcttgcaaacattcttgattgtttttttaattattttgatttgtttctgtgtactacttggttaagtcttcaggtgttacttggag

SEQ ID NO: 40103 - DNA, 611 bp, Arabidopsis lyrata
  Intron number 2 from transcript 480640 (locus 480640) deri ved from phytozome v7.0 (chr-ID scaffold_3; pos 22119125 t o 22119735)
atactcgcacctctgtacacatctctctccttatatctcgtgttgctcttgctttacaagctcttaaatgcagaatttaatttggtatatttgttcaaagcatgtacccattagtctcttttattccggctctgatctgttttggtacaagatcttggcttcttgtgaattaatcttttagattggcaaagttctgaattttgtggttctgatttggcactgcactctgtagttgaccaaccattgctgtttgtttaaagagctgagtaagggaaatgaatgtctattaaatggtgctgttccttaaatgccgtctgggtgtctcattaactataggcttaatttaatgttttcttctcttttgagctctatctttggagtccttttaccttgtctgaagcagggaaacacttctacgctcttagattctttcattgtgagaaaagtaattctgatgttttgctcttagaatgtaagaagtccatgactttagatttaggaattcctctgaagtatttcgaagtttgaattgaaattaaattcacatgtatcctcctttttggctttattcccattagttatgataaactatgtgtttatgttgtagaatt

SEQ ID NO: 40104 - DNA, 754 bp, Arabidopsis lyrata
  Intron number 1 from transcript 324943 (locus 324943) deri ved from phytozome v7.0 (chr-ID scaffold_6; pos 767298 to 768051)
ggcgaacacgataagtttctggaagctcttcaattgtaattttactttcttccaccagcaatttggtttactgtttctgtgcgtttctggaagctctaattttagctgaattttgcgtaatttcgcttaatttgcttcatctatgataaattatactacttgatccgtgaagttggcccatttgttaaaatgttatgttagggttgataaagtgataaacttttatcagatcgaagtttggttatgtggtagattcatctggagtttttgcctatgtaactggattctgcagaagcaacaatgtcttttttgattggttaggttagattgtatattagatagaccagagtttatattaatagctgatgaatgttttttctcataaacccgaagtatagcttaagcatattttaggttgccaaaatgattcaatagagaggacttggcatctggtttctgcataaaaagtgggattcttcagaaatcgtatctttctttattgaaaatattcaacatgagaactgaaaaagcttcatacaagtcagctttttgagctatgcatgaaaccaatttccaataagtcctaaactacaggtcagaatttggtaatggatcgttacttccaaatgttacattgctcttttgtgtgtgaaaggcttctctctctttttctgaaaaagaatcttactttgttgctgacaattttcttgtgtccttaggtttgatcgtgactggaaaaagatagaagattttg

SEQ ID NO: 40105 - DNA, 407 bp, Arabidopsis lyrata
  Intron number 2 from transcript 945285 (locus 945285) deri ved from phytozome v7.0 (chr-ID scaffold_7; pos 6134323 to 6134729)
attgttgcttccactgcactcccggtgagagtttgttatttttactactgaatttgcttatacataacttcacttcacatagtctcttgctggggtttgattttgtggtatctttgaactgaaaaaagattttatgaaatgttgtaaactagttgaaggaatatggagatggtgcttgcaaagttttagtctctagtatcttgcattttgatgtctttgtagcccagtcagtaacaatatttgcctaaagatttctttctagcccaatcaggaatcatatttaagtagctacttacattaatgagctggaaactatgaaggcagtattcgcttgtgttatggcagaaaagttttgtgtgggtgttctgagagttggcttcttcttttcatttatgcaggaactgaga

SEQ ID NO: 40106 - DNA, 345 bp, Arabidopsis lyrata
  Intron number 3 from transcript 475241 (locus 475241) deri ved from phytozome v7.0 (chr-ID scaffold_2; pos 2850632 to 2850976 reverse strand)
cgttcacgctcacagtcgcgatcaaggtcaaaaaggtatctgggttctctagtttttttttttcttatcttttacaactagttctttccgtggcgacattgcaatgtgttatgatattgatatcaaatcaaataaatccattattgtttagtgtttgatgtctttgttttgttgacacacaatataattatcatggtcttctactgggatgaatggtctgatctgggtcattgatgtttatgtgtgcttcatacgttagttcaggcattatttatctgcagtcgtttctacttaacctgaccatttatattttactctttcagcaagaggagaagtggatttgat

SEQ ID NO: 40107 - DNA, 530 bp, Arabidopsis lyrata
  Intron number 1 from transcript 932166 (locus 932166) deri ved from phytozome v7.0 (chr-ID scaffold_4; pos 774222 to 774751 reverse strand)
gcgagttctgtttacgaatttagtgaatcgtcgcagcaaattttgagaaattcgttagtttttgtttgaatctctctcacgaatttggtcgaacacttggtgggtatcttgtaagaattattttcttaggtgatctttcaccttttaatttgcgatttcgaacctagatcgttttctcctttctttgaatttagggtttttgtaaagatgaatttgtttatgacattagggtttaaatgtagggttttgatggtgatcccgttggtttatttcgtataatcactgattatcttcagaattagggtttgaatttaggcttccggattctcctttctttgaatttagggtttttaataaagatctcgtgtatagtataccgttttggttagtttcgtatcatcaccgaatatcttcagaagttagggtttcaatttggtttaattcgtttgtatggtcatgtgtattgatggatttggtgaaatatgtttgtttggtgatgtgtattgatggctttgattcttttttgcagg

SEQ ID NO: 40108 - DNA, 704 bp, Arabidopsis lyrata
  Intron number 1 from transcript 489815 (locus 489815) deri ved from phytozome v7.0 (chr-ID scaffold_6; pos 19502292 t o 19502995 reverse strand)
cacactctaggtatatttctccacttgcatcagtgttctcgatccttgtttcaatctcttctctgttctcaatctgtatgaattagattctcgaattcgaataggggttacacgaaagtttggatttttattacaaagaagagcttatgaattggtttaggacaagtcattgtgtttttttttttggagaagagtaagatttgatctagattatatgaaattgaaatgactttatagttccattatgattttgttcatcaaattgatacaaagttttgtcctttatgtattctcatatgatttgtacttagattgtattggtttgttcaatacccatttgtgatttagaacactattacttcttcagttactattttgcttcactcttctttatgggtatgaatgtgagttagttagagagatttagagagctgttagtatcgaatcagtacttcgtttcatcgcgtgtgtatacatgtttacagagttaatgaatgagttttacaggtgaacgaactcttataaagtatcagaactaaatttcgattcaaaataagtggtggatttcatttttctagagcgtgactatgcgatagtcttgacttccaatcgatacaaacatagttttgaatggaattgctgatcttctgcattatagttactctcgtcaatggatattttttggtctgttgctgaaacaggag

SEQ ID NO: 40109 - DNA, 563 bp, Arabidopsis lyrata
  Intron number 1 from transcript 919953 (locus 919953) deri ved from phytozome v7.0 (chr-ID scaffold_1; pos 4565460 to 4566022 reverse strand)
gatcaaactcatcgagctctctcgccttttgcaatgttagcttctcttcttcttcatccttctcttgcttcttttgagcaaaatgggcattgtggttttctataaaagctctagattgggggatctatcaacaaaaaacaaaatcaaacattatcgatgaaataaacacaaaaaatttaataacagaaagagtaaaatggagaacaacaaaaatttgagaacgaaatttattttacaaaattcatccaaaatgtaggttaccttttgtaaaaggccctttacataatctaaatttttctttagtcaattagaaattttctcgtaatagccttcgtctcacaatcgtgttggggctagggtggatccagcaaatttgatctccacccccgatcatgttaattattagaaaaatatttactttgtttgtgttacgatttaagcttattgaacaaaaaaagttttattttgaatatatatataaattagaactttcaatatatatacatcttatagaatttaccaacgtcctctaatttactaagcggacttgattgttgccaagg

SEQ ID NO: 40110 - DNA, 190 bp, Arabidopsis lyrata
  Intron number 3 from transcript 482264 (locus 482264) deri ved from phytozome v7.0 (chr-ID scaffold_4; pos 15762655 t o 15762844)
ccacggtatgtacgattctattcgtttttttcttccggcgttcttgtattttacatttgtgattttcaaaaaaggaacacgcaaacataaaagttgcataagtcaaaacctaactcattaactaaacatgaatttcacgttttttttttttttttgcagataaagaaattcaaggaggcattagagaagc

SEQ ID NO: 40111 - DNA, 794 bp, Arabidopsis lyrata
  Intron number 2 from transcript 888226 (locus 888226) deri ved from phytozome v7.0 (chr-ID scaffold_7; pos 865652 to 866445 reverse strand)
gtattcttgaattgctaagtgttactatacttcaaagtaaaagttttttttgactatgtttatgattcttcagtggtcaattttgcgatgagattcgattgaaattggagaatgatttcatgaaatctcttcaggctgaggttaattcatgactcatcttttttttctagtgtctcattgatgatagtctacataagaagcactcagattttggtttttgttttccatacttaaggctatagagagtggtgaattggaggctatcaagcctttgccttggtaccctaagactcttgcttggcattctaatttttcacgcaaggagattagaaaaaaccagattcttgagaggtacattttcatgccagttgcttcagaacaagtattcaattccattcccgtacttatgttagttcatgctttctcctagttatttagccttttttttatcggggtcttattcaggtttcatgagtttctcaagttagaaactgaagttgggaacatgacaaggcaagaatcagttagcatggtatggtagtgtaacattctttaatcgtatttgttggtactctctttagttttcgtggtgaattttatgattatgcaggtacctcctctcttccttgatgtacatccagatcattttgttctcgacagtaagtgatttttattcgacattgtttgagttggctgtggacttgaggagtaatgtttaactgatgcacttgtcttctcttctcttttgtctgaacagtgtgtgctgcacctggttccaagacatttcagctgct

SEQ ID NO: 40112 - DNA, 944 bp, Arabidopsis lyrata
  Intron number 1 from transcript 891943 (locus 891943) deri ved from phytozome v7.0 (chr-ID scaffold_7; pos 24196832 t o 24197775 reverse strand)
gaacaaggtaagcttaagatcgacagcaagttcttttaatatttggtttaccttctaaagttgtagactcgctctaagaagtattgagaaaggttggttaagatgattcagcaatcagcaacgcccatagcagtttactgaatgattaaagtgaccgcacggaatcatggatccattctctctctctctctactaagagttgacgaaacctatgaaaaaactttcccttttcatttttcagtttttttttgttatgggtcgtatgggtcatatcgaaaatttttgtctttttttatgtcgatgaatcaagcgcgtcttctttttagttttgcctttgtttatttcaatttttttccccttttctattttctttaaccccatgtttcttttatgcgcttaatcaatataaaaacatgtattcctatgtcttattgacttcaacttttggcaagaaacaacaagatatagtggaagctccttgaccgtttaaacgcttttacatgaagtgggagatttgatttttagaaaatccaatttcttgttgattgttaatacaaagtttatcggaggtttgaatagtaagagtactgcagacagtgccatccgtcgtggttcgtgtattgtggaaagagcttgtccatcggatgtcgtatatgcaaattaaaactgtccattgtggatctgactgttgcagagagaacttcatcgttgaatcattgttcgtagaagcatttcatcgtaaacacatatgttgtaccagtctatcatcatgattagataaaatattacatgataatgtaataggtgacaaaagaaacaaaagcaacaagatatattaaggatataacagatccaacatttaaaatggattttggatatttgtctagacaataaaatattatgtcagaacacaacaatcaatctgaaacacatatagagacaac

SEQ ID NO: 40113 - DNA, 530 bp, Arabidopsis lyrata
  Intron number 2 from transcript 896218 (locus 896218) deri ved from phytozome v7.0 (chr-ID scaffold_5; pos 1049322 to 1049851 reverse strand)
tgtgagaaaaaatgtactgtcatttattctttccctggcttgaatattccacttctgtttttactcagttttgtttttagtttctagactctagttgatgttggaattctccctttctagatcacaaatcatgcatgtcatattaccccagctgacaccactgaaccaatcatctctttttgtgggaagaagtgcaaagctgtacttttctttcaagtctctcaacccttgcaaatttcattcagttaaaaagcgtggtgtagcttctaggcggcagatgttgaacgtccattaattgtcaattagattattgggtgttgcctgcttcaattaggctagtgtaccttttttactcaacctagacatgttgtggccgaaatcctggtataactgaattctaaaagacacgagtctaatatcctgtgttgttcccatgtattttctgtcctttaccaaagcattatgtttaagtgaaatttcttgttcatttaacagctctttgaaggtgtcaagaagtacgtcggtgtcaa

SEQ ID NO: 40114 - DNA, 790 bp, Arabidopsis lyrata
  Intron number 1 from transcript 495109 (locus 495109) deri ved from phytozome v7.0 (chr-ID scaffold_8; pos 13989450 t o 13990239 reverse strand)
cttacctagtcaccaatcacttggctgccatttttcttggctgtgtttcgtcatccaaaacgaagctttgatcaaactggtacgccgatgattttctttctttcgcttttattagactgaatcaaattaatgttcgtgtcgatgtatttcttagggatctttaagggaatattctttgatttgttttcgaatttttttatcgatttcagatgatttgtgtgttttctttaattggatgtttaagttttttttttaatcaatattttttcatgggtttaggcaattttgttgaaaggtgatgttttttttttgtgtatcaattggttaacttgtatttataaacagatcattaagaagtgttgcttctctgtatgtgtcttgagattgtagtaatagctaaattatacatcaatggcatgttgattatacacttttgaattgttatttcgtatcgcaactttaaatggtttggactttacttaaagatcaagttcttgataatccagtttcgattcaagaaaagctagtttttatgacttccattttcgtgtaattctgccacctggataggaatacaagttgacatacatttcctaggtctgtgattcattgtttgtttccccatgtgatattttcttgtccttgcttgttcatgtcagttttccagatgtatgacttaagcgtgatggtttctttgtcgaaatgactttaaattggtttatattactgttattcatttcatacttgaaggttggatttttttttctgcagtttacaattcgttgttttg

SEQ ID NO: 40115 - DNA, 724 bp, Arabidopsis lyrata
  Intron number 1 from transcript 496474 (locus 496474) deri ved from phytozome v7.0 (chr-ID scaffold_8; pos 20746545 t o 20747268)
catttctttttgcatcaccagtcctcctccttggcgttagaccttcttcttcttcttcttcttcttcttcttcttcttcttacttgttttctgattccaagttgtgaaagctctttgatttttatttggaggtgttttttttgggatatatctgtcggtggtgtgtgtgtagatgttaggtttttcactttattcggctttgttcttatgaacaatgtgtcgacctaagatttactcttgtttcactcgttaagacctttatttagtaagatttgctgactcccagtttgctttaagctggagattttctttcctaatttgttgcatctgtggcaaaatttgtggttttcttctgttcttaacttatctctgggtgggatgcttgtgaactgaatataagctttgtttggagttaccagttttcacaatgtcgcaaccattatctcttccatttgttcaatcatatgttttttggttgaaattgttaagctagtttggaggatttaaatgtctcaaactcccaatccaactgttttctcatgaaaatgttctccatgaattatattagtcttgtttatatgcttctaactcattttggaacatataatttccggtgtttgcaatgagttgatttgggattgtgcagtttccataaagacttacatattttcttcatgcatgtgtttcagccgaagctattcttcttggatttcaacattacctt

SEQ ID NO: 40116 - DNA, 349 bp, Arabidopsis lyrata
  Intron number 2 from transcript 474089 (locus 474089) deri ved from phytozome v7.0 (chr-ID scaffold_1; pos 25697671 t o 25698019)
ataagaccgaaccgtaagtttatctcttccttttggaactgactgttttgttccaatactgatttattcttgttgattttggaaaaatggtgtgtttcctctatgaattaatcttcgaaacattggatatatctgatataatttaatggtgatcgaatgaatcaaaggttggggacttttagtttcttatggattttgatgcattcttctgtctgatgattgtttagaagagagttgtgtgttgtttcttgtgattggttttagatggaaagatgccaaatttgtgattttgttgtgttttattaatgtaatagaccggtaaaggctaagaaacgtggaggtgggttta

SEQ ID NO: 40117 - DNA, 521 bp, Arabidopsis lyrata
  Intron number 3 from transcript 491781 (locus 491781) deri ved from phytozome v7.0 (chr-ID scaffold_7; pos 5128081 to 5128601 reverse strand)
gcggtgcattaaataagcggacacgtacttccgtaattcctgattttttgtttggcaacacatgatttagtgtattattcttatggagctgttttcaccaaaatataggttcatagttctactgaacagaccttttgaaccaaacactgattcaaaatatgcacctatgtagtcttctgtagaaaatggttctgtttttctagaaaaaaaaagttagaaatggtagtagtggatatttatgtagaaaattcttcgtttaagataattgtgcttccaaatctgatgcatgtgaaatattatttcaagccaggataaattacatagcattactattgttagatctacacagtttctcaattgctttttcttttcttttatgcttgtgttctgaccttaaaagtcttttgataccacatggtgttgttttcaattttgattctgaattttgaaagcatgtggcagctattcattatttgttattactaattcacatgttttaattttgctattatgtgattcag

SEQ ID NO: 40118 - DNA, 1053 bp, Arabidopsis lyrata
  Intron number 1 from transcript 491781 (locus 491781) deri ved from phytozome v7.0 (chr-ID scaffold_7; pos 5129382 to 5130434 reverse strand)
attttccttttgccgcgattttggattcaaggtacgagctttttgattctcatcttcaatcattgaagtttggtctgggttctataattcaattctgtgtgttgtcctttgttctgcttattgaagatgcttgacttcgtctcatgaagttcgtatctttttgattcagttctcttctagggttttcttgtgttagagctctgaattctggcaatttctagtttattgggtttttgtggtaatgaagttcgattatggtggaaacacgaattttcaggagaagggttacttcaatttttctactttttgcttggaaaagtaatatgtttgaagtttagacttttagtttcataattagtcggcaatgtagataagctgtgaagaagacatttaaaggaattatctttcattcttttcaaattgaatatggggctggggttgattaagtatttttattggattggtgattcttcaacacatttcacctggatcttagttagagaaagaaaggacagttccatgctagatttgtttgggtactatctctattcttgtgtagttcattttccacttaactagagcttctcccttttttttgtaaattggtagactaattttgtttccttattggtttaagctcttctgctgggttggttagttgcttcgttttagatgagaataatatgcggtgttatatggctctgagcatgatcccggtagtttctggctttatgaagcaaattcatgcgaagattatgtgaagaacccaaagtactctgaaagcaaaattatatattcttgtgtttctataaatgtatagattttagaattttatatttttttttttgctttttaaagacttggttagtgcaaatgaaatggttcattatcttgcttgttttcatgtatgctctctacttacagttatcttttaatttgtttctctcgcaatgtcattctcgtagtaaattattccggaggcttgtcgctaaggttttgattccatttgtcacttttgtaggtgaaataatttgacagctgaggatttaagca

SEQ ID NO: 40119 - DNA, 591 bp, Arabidopsis lyrata
  Intron number 2 from transcript 496694 (locus 496694) deri ved from phytozome v7.0 (chr-ID scaffold_8; pos 21673421 t o 21674011 reverse strand)
acgtctctttcatcgccggtgaacgtcgcggcgtctctgctctttcttgaccttgttctaatgttctatatcaagtttcgattttagtttctgggttcgatagataggactggatgatgtctgattcttctcaggggaaaacaaagttgattactttactatttaatctcgagattttagagtcacagaatgaatcatggatattcaattttgtttcttgtgttgttttggtaaagttgatgtctttggtttttttatggtcgattgattgtcgtacttgagttgattggagagacactcttaaattggttatgatcgatcaagctagtttatatatgaggctaagcaagcagtcttactgataaaagttttggccttctgatcttgaagagtctacttttgtttttttgactcaggctaaggtagaaagactagattgatgaactaggattgttgttccctttaggtggtagctcaacgttcttggtgtcattcaatagtgtttcatgacattgtagtatgctattttgaggtttgattgatcgaatgaattaggttttttcttttttgtttacaggagaaactttacca

SEQ ID NO: 40120 - DNA, 651 bp, Arabidopsis lyrata
  Intron number 1 from transcript 889519 (locus 889519) deri ved from phytozome v7.0 (chr-ID scaffold_7; pos 6703441 to 6704091 reverse strand)
ataaaaggtaagctatactatttaacaaaaatggaaacatctttcaatacatgcctatactgttagtgtaattaaacaatctaggcatctatctagtaacacgtatagatcttaaagtgagaatgatgtggctcgtgagcctatgtcttgttgagtttgtcacaatgattgactatgcaatacattattattaatataattaagcttgagtttgaattagttagttataagaatccgagtgatttgtagcagcaatatgtcaagctagatctttctcaagcagtataacatcaatggaaagatttcttggtcgcaactttcttgctcttacattaatacttcactcaattcaagcaacaacatcaatctctcatgtaaatcactaaaaacctaaacctgtgcatgaatatctattcatttgcagactatattcttgattatctttggcatgttttccaggtttacgttgtatatttaggcgctaaccggctaaaaaacgctgctttagcttcaaaccaccaccttcatcttctttccaaagtcttcacaaggttaccttcttcaaaactcatctcttttttttttttttttgaaccaaaactcatctctttaacagtccttttctcttctcggtcaataatctcgtccgca

SEQ ID NO: 40121 - DNA, 526 bp, Arabidopsis lyrata
  Intron number 4 from transcript 906456 (locus 906456) deri ved from phytozome v7.0 (chr-ID scaffold_3; pos 21148180 t o 21148705 reverse strand)
gagagcggtggactatactatgtaagtacctttgaattataataacttttatctgtttacgggagaaatatagtgatttgcctcaagaaaaaagcagaggaaaaagttaatgatatacttgaaggccggagtagaagaaactcgttttttgagattctccataggacagtagtttacacatacaaaagcatgccagtgttgtttatttactaacaaaattgctaatagtttccaatggtatgagcaaccatatgatatgtcttccaattatttcgcaagactgataatgctaagttgttttaccctttcatgctcacaagattaaccaccttcttgttatgtaataattccaattcaattattttgcaacactattggtataactgttatagcttatgatttccttgtttatcattactcagaaaggactgtcttttaaatgagcagattttttaaggcgaagactgaggtctaagtaacagatacaaacttgtaactatgtgcaaaagtagttagagagacccgg

SEQ ID NO: 40122 - DNA, 341 bp, Arabidopsis lyrata
  Intron number 1 from transcript 906456 (locus 906456) deri ved from phytozome v7.0 (chr-ID scaffold_3; pos 21149282 t o 21149622 reverse strand)
aatccaactcttcaagtagtagaagaagaagaagatgcttagggtagaacataactaagcacatttgcttcctcttgtctgatgatattatcaaatcgctgtgtgtgattcctctttgagtttcatcgcttttcttatgtgtaatggatttgtttctttttttctttttggattcagttttcaatggaaactttgttgttgaaacgttgttattttattcgaagcaaaatcagtttataattacttgctggtcagtcatctttgtatagccaaacttctttgtccatatagactctgcttcttcagctgccggaaggaccaggttctcaacatataaagaa

SEQ ID NO: 40123 - DNA, 416 bp, Arabidopsis lyrata
  Intron number 1 from transcript 354567 (locus 354567) deri ved from phytozome v7.0 (chr-ID scaffold_7; pos 8905519 to 8905934 reverse strand)
tactgattttggattgtctgtgttcattgaagaaggtaagtttgtgtaatcaaatcctcttcttctgttttttagtgttatacatatgcaaatgttttagatttaagattctggagttgtgttgtggatatagattttgtcaagaatagtatgtatcttaagagtcttttagtgatgtttgagtacatagtggtaagtttcaaaacagaggttttgcaagttctgtgtgaatttggtaatgtgtgtaaatggattattatagaacttgtgtgttcttttccttttcttattgtcaaattatgccagtttagttagttgatataatcttgtgttcatatgcttgatgtgttttgtttctaaaccgtaaaacaaaaattgcaggaaaagtttacagggatatagtaggaagtgctgac

SEQ ID NO: 40124 - DNA, 759 bp, Arabidopsis lyrata
  Intron number 1 from transcript 937642 (locus 937642) deri ved from phytozome v7.0 (chr-ID scaffold_5; pos 13978775 t o 13979533)
tgatcagaacttataaaggctggaaaggaaataacgtgagcttcttcttcttcttcttctttatctcttatgattgattttgtttttctgggtcagatttaatgtctttgagtaagatctgaaacgaaaaacctcagattttttggtggaattactcagtagttgtggaataatcattatctttttttttttctgggtttggtcatttttcctgaagtttataagagtaataagtttgacttgtataccctaatttttagatgtatgaagctttttttttttggttgtgctcatttggaatttgacttgctcatcgttaaaactagtttccattttgctctcatgtaatgattcatcaagatttgttcttttcttgaaagaattagagccaaacaactaacttacaagaaatcattagagtgtctctatatagcaccagaccatgttgttttacctggtttcgtctcatagttagttccgtgagtcttcgtctagatgttctaaagttattaggataacgtgtcaaagatgttggtcttttacaaagtttttttatgtttatcagaagtttgagtaaaggtttgccttagatgtgcgatcacatagttacaagagtttttattgtctttaagttgttaattcaactgttttggttatgtatgtaactaaatttgtgacattgtcaattttttactgatctttgatttgttctttttttctccaggtgttctttcttggaggaaggctcgtgtttggacc

SEQ ID NO: 40125 - DNA, 793 bp, Arabidopsis lyrata
  Intron number 1 from transcript 893008 (locus 893008) deri ved from phytozome v7.0 (chr-ID scaffold_6; pos 4352892 to 4353684 reverse strand)
aaagagagagagagtgagtgattaagagaaaagaaagtttgtttttcggctgcaattctgagtttatctccttaacctttgtttctcataaaaaaaaagaaattctaaaactgggaattagagaagaaaccctaacttgcagtgtccgtacttagatctctttatactttccttttatggatccattaatcaagtctttgttagtagttgtttgttcccagatttgatctcaagtaccttcgatctgtacttgtgtcctgttttatcttttgttttttcatcggtttctggactaattggaatttactatctacacatacatatattaaacacatatatccttgttttttctgtctcgtttttctaacatatttcttgtatatattatatatggttataatcagataaatatgtgtgtttatatatatgttgatgggggaaaagaagttgacagaagagagtgagcacacaaaggggaagttgtatagaatttttgtatatggttgcttttgcgtgctcactctctttctgtcataacttctcctttcatgaatcttccttattccattgttctagtaattcatttgtgttcatatctgtctgtgcataccaaattctctatgtatacatatgttgcatctaattttctttatttttatataatttgaaatgtatgtagtttcaaaactttgtacattcatgatggtgaatatcttagattttgtattccaagtaaattatattccactaccattaaaccaaattttttttttttttgcagactctagcacat

SEQ ID NO: 40126 - DNA, 255 bp, Arabidopsis lyrata
  Intron number 1 from transcript 471128 (locus 471128) deri ved from phytozome v7.0 (chr-ID scaffold_1; pos 3906139 to 3906393)
ccagatctgtctctgaggtgctttgcatttcacttctattatcttctcttttgactcttcttttctgatttgaaatctctaagatatggctgcgatcgcttataatgttagctagctggtgatgattttcttgggaactgtttttctgtgatggaaagtgaatttcttgtctttgagctctctgttaggtgttgattggattctgttgttgtttgttcaggtccttgatttctttggggtagacccaacaaaggg

SEQ ID NO: 40127 - DNA, 399 bp, Arabidopsis lyrata
  Intron number 1 from transcript 483403 (locus 483403) deri ved from phytozome v7.0 (chr-ID scaffold_4; pos 21038938 t o 21039336)
cgtagaggtattgttttcttcaacctctatcggaaattctgttactttttgtgaaatcgcttatggattgtaatcgttgatgtataagaaggatctagggttcttcctctagattataatctgggtaatttggtttattaaacaaaatttgagtttttgttaatgggtcctcaattttgccctcgtgctgaattctctgtcggtgatttattttctttgtggcgtttacttgtttggctgtatctgctgattgccacaagttttatttttgtggggttgtttaattctaataatcacaattgtttctttgttagaagaattgatactttattggacttggacggtcgttaattcgtgctttgttttcgtatagctaattgcttctcagctggtgagagg

SEQ ID NO: 40128 - DNA, 502 bp, Arabidopsis lyrata
  Intron number 1 from transcript 890400 (locus 890400) deri ved from phytozome v7.0 (chr-ID scaffold_7; pos 11078587 t o 11079088)
cagtgccggcccgacatctgcgagtgccctacgcaaagcttcaaaaagtatgcatttttcatatattacaaaaaacattaacgaatcattatcggatttgcagttttcttttttaaaacaaatttgcaaggaaaaaacaataaattcaaaagcaaaactaacaattaacttcaaaaactaggatttttcacttgtaaaataatcaaattgactcacatacacgcataagaagtatcatgtagcgtcagttttttttttttatattcaatcagcgttttagagttttttttactaaatcaaaaatttagtgttgaagataattagtttgtctttaaaagcccatatcattttttaaaaaagaccctacaaaataaatttattgcttttgcagcatatccaaaacttaacaaattttgagttttaaaggccctaacattttggggccccaatcgctcgcttcagttgcttggcctctgcgccggccctggctatatgagcaaag

SEQ ID NO: 40129 - DNA, 631 bp, Arabidopsis lyrata
  Intron number 3 from transcript 473017 (locus 473017) deri ved from phytozome v7.0 (chr-ID scaffold_1; pos 12352087 t o 12352717 reverse strand)
acaagatcactggttaattttcttaaacccttaactaagtatcttctttttgtagattctcaattcttgttagaaaaaaagaaatgattattaattacactgtaaacaccaaaacccttcagaaactgtgttgtgctgaatctattgatttagactttgcataaagaaacccatacttttgtgtcttttatttcctttttctgaattcagcaacaacagaaaaaaaaaaaaaaaaaaatcaaaagtacgattttgtaaccatcagaaatgaaaaaagaaatcttttacccacccaaaaaagctttggcttctaagttttttttttttgaaagaagttatgatgctggtgttacagtgacctgtgaatgccatttcttttgtttgttctactttttacaggaaagtgaataatatttatattttcctaagaaataaaagattcattcagcttttgtttctttgttcagtctcagactgacaaaagaacaaaagaattcaaccttttgtgcagatcacatctgagattattctcttattcttgtttctttctgtttgtctttaacaatctcaaactctcttttgtcttcttcttttccacttcagcaagagacaatcttgtgttcttgcaaag

SEQ ID NO: 40130 - DNA, 462 bp, Arabidopsis lyrata
  Intron number 1 from transcript 476546 (locus 476546) deri ved from phytozome v7.0 (chr-ID scaffold_2; pos 16127995 t o 16128456 reverse strand)
cccaacaggcgcacgccaaaacctaccaagctcaggtactacttagctgatacactggttcttggtcttggagattgatatcaagctcgatgcaatcgtcatttatgtgtttggttgatttgtacatattagaattttgatctgctgggaaaatgtcgaatttgtgaaatttgtggaaatgcatggtttcgtgaagattacagtgttcttttgccttgatttggttacgtcatttgttagtggacattatcaaaatgttcttaatttctgtgaagttgtctggtttgcttttactttcctgttagaagtttgattttgtgtgattaagctaatgagaagtctatgaatattgatactctctaatgtcttcaatttatctgtttatacgtttccaacataatccaatcttcgtatatctttattgcagagctagcattaccccagggacagtgctgattattc

SEQ ID NO: 40131 - DNA, 507 bp, Arabidopsis lyrata
  Intron number 1 from transcript 334263 (locus 334263) deri ved from phytozome v7.0 (chr-ID scaffold_1; pos 3741735 to 3742241)
gtcagttccagaaacttgctgatcaagcatcagtaagcacaaaaacaattaaagttattaaagcatttctcaaaagaattgttgtcctttttataaagccgagccgcattaacttgccactgttgagttagtttttcctttgttttctgcaaaaaaaaattgcttttcttttcggtgcaaaaacctttgaaaagtggaaaacattcgtcaaaattaatagaaaaataaaccaactttggaaagtgaaaagcaagacccaacttgtaatatgttctttgttttcttatagaatttttctttgtcatatagattaagtcgcgtttaaccacatgtgtatcatggcacattcaccgttttcggatgtttaacacaagaatgttttttgaaaaaattcaatatattttctccccaaaaagtaggaaagtaaacttgagacccaaagtcataacttgttttgaagttaattatgagtgtaacgatggcaggttccggtgaatacggtggtgg

SEQ ID NO: 40132 - DNA, 818 bp, Arabidopsis lyrata
  Intron number 1 from transcript 923523 (locus 923523) deri ved from phytozome v7.0 (chr-ID scaffold_1; pos 26499522 t o 26500339)
cagcttatttgattcaggaaaacctatctaccaaagcggatcggctcactgaaatgttgtgataaggctttggttttgtgtttcatatttgtcctgttaaacgctgtttttctgtgaaaaggctttggctttgtgtatcaaaacattcttctttctttgtttaaataaaatatgttaaagtttatggagagatagattttttccactaaattctcaatggacataacatttttatttttcattttacactagtcttacatgctcacttggtttttgagctacaactacaaacttggttttcactacatccaacatggtaaatcaagcctcaacaacagcttcaccctcaagtaaaagtaaaaccgccttttaaaattttggatatactgtgacgattttatcaaactctttcaagtttggagactgcatcaaagtttgtttaaatgaaacaagaaagttcgcctgccaaaaacttgtatatctcttgaaactccacgcatgtgaaggtacgcttataattctagttggcattcaccaataccaagatgttgtaggtagctgactatggacttcttgtacatcttttcgaggtgatacccgagttgctcccttgctttcccgaaatgaagaaaacctgagaaaccgaaactcgtctgtgttatcatctcctaagctctctaaaaatgtattttcaggtgcagataatagcaagtagtgtacatagcaaaactataataaaaaaacggtcataatctgtgtctcactcactacatatacttttaggacaagactacaggtcctgtgactaaagaggatct

SEQ ID NO: 40133 - DNA, 740 bp, Arabidopsis lyrata
  Intron number 1 from transcript 495243 (locus 495243) deri ved from phytozome v7.0 (chr-ID scaffold_8; pos 14720210 t o 14720949)
ctcttcgttctcttctccctcttcacttcatcaaggtctcactccccaactactaaaaaccctaatcttgatttcgattcttcatgacttctttagatctacttaatctttgtcttttgatttggtcttccatgtaagaaaatgaacaagggatcgtaataagtgttttgactttgtgattttacttaactatagtgttttttcctctgttctaaaaagcggtctaggcggtcgcctaggccccgactaggcgctaggctctcattcgacgcctagataaccgccttgaccgcctaaaattacatagatcttgtttaatgtattttttcaatttcaattacagttttatttatatatatatatatatagttataaatattcatatattgtttaatataaatataaataaatattttatctagtttttgtttataatttcataatttttagttttatattaatattttatataacttttatatataatatcatatatataatgtattatgttataaacgtctaaaccgcctaaaaaatcgcctaggttccgattaggcgttctaggcgctaggcactgagtcaccgcccgcttagcgcctagcgctttcttgaacactggttttttcttaaaagattaattcctaaatagatctagtactttcttggtttcttttgtttcttggcggattcttttgctctctctagggtaagcgttcgacgtcagatcaagtcaacgaggc

SEQ ID NO: 40134 - DNA, 778 bp, Arabidopsis lyrata
  Intron number 1 from transcript 941744 (locus 941744) deri ved from phytozome v7.0 (chr-ID scaffold_6; pos 9357034 to 9357811 reverse strand)
gagcctgaagttccaagaagagctccaagcgccaggtacattgtccaaagatcctccttttttgtttcctgcaattagggattttgaagaatttgagcggttcttagctctcttctagagattcataggtttccgtattgtggtagaagatacagcatttcgagaacttgacggttaggttcgttgatttgatcttcattgctgaagaaatggtgattaaggaaactgattattgaattgtttttaaaagctgctttgatctatcttataactatgatcatgtttatgtcaagaatcgaatcttgtcttgcattttcgggtgagcagcggttgtagatggatatcgaatctttgtttctttaacttctaattgtagaacctctaatgtttgtctgtatacagattaaggtttatgtggaatcagtgaaaccaaaacgagaagaacttattcgatttgattcctttatcagtgtctttgttcttgatttagacgttagttacttgtcttcaaacatcaatatttgatgtcttagatactatcttttacttgaagttagattatattatgtgaaggttgcattgttcatccaactattcacagctctatcgatacgatcaatgttaaaaaagggtaaaactgccccctatgcaattgtaactttgctcttctaagaaattgttttttaatatagttgtctctcgcgtgctatctcatctcttacatctcttgctatctcatcactttagtgcaacagtctttggggtatcaaccgaatca

SEQ ID NO: 40135 - DNA, 542 bp, Arabidopsis lyrata
  Intron number 1 from transcript 481346 (locus 481346) deri ved from phytozome v7.0 (chr-ID scaffold_4; pos 3510405 to 3510946 reverse strand)
gatcaagcttggattatctcacaggttcgtatctcccgagatttgtatagtattgctcccacttgttgctactttggtatgtatgattttgttggatctgattaatccacaagaactgatccttcatgcttattacttgcctcgtatggatttgtattagattaagaggtaaatagtatcagcaagttctgaagatcttgtattgagctgttcaatatcgaaaatctgtaattgctaagtacctttgggatattttaccaaatattttgggcacaattcatttgatttgtgacatataaagataacactttagctgcttcctaagcaaactaatctcgcaacgcgatgtagtttcctagtcttgcttgtacaattgttggattatctacttataatatttctctcaaagaaacctttcttcttgaattttcagtttcgtcaaggtttaagattgaacaaatcggtcctgtatttttctagatgttagttgacgtgtggttcgattcaatgattttcttttgtcagcaaccaagtcctgttgg

SEQ ID NO: 40136 - DNA, 254 bp, Arabidopsis lyrata
  Intron number 1 from transcript 925915 (locus 925915) deri ved from phytozome v7.0 (chr-ID scaffold_2; pos 11959048 t o 11959301 reverse strand)
ccggccactccatcgaccaactcgtaagcttcttaatcatttcatatccattttctttaacaactttaatttatactgaaatgaaactgaaaatcattgttgtaggcttttcttctgaagcaaaaataggtgttttaccttctcctattcttttaaataaacttaatttggttatgaatactgttttgatcacttaatcaaaacaatttgtggtttcagctacaatagcaggtgtttttcttcttccattcttg

SEQ ID NO: 40137 - DNA, 946 bp, Arabidopsis lyrata
  Intron number 1 from transcript 890697 (locus 890697) deri ved from phytozome v7.0 (chr-ID scaffold_7; pos 12651528 t o 12652473)
ctccttgtccttaatctctataacaatcagttgaggttcgttctaaatccaaaaaacaataatacataatcaattgtgttagtgttctgatatgtaatgtctcaaagatgtaaaattttgatctggatttgaatctttaggctaaattctttgggttttggatatgttctttaagaagcaaatccgttattgtggtgatgtctagattgagatagattttaaagtatgtgttgctttgtcttgattaaaggttatgtttggtttggtttggtttggtttgtttgttttttcaattttcagcttcaattgggtgtgggaaagatttatacattgatggtgtcaaagaagaacgaataatcaatttttctagctgccaaaatcttggtttaacttctgctattataggttataggttttgggttgattgagaaaaaacgaggcaaaggaaaaatttaatagcaattctccacatgtctccttggatggttagttttatcttctgtattagatgaaataatatcttttttcccagtgcagtgcatctaagattattactttttcttcccataggcactgctggtggcattaaggaattataatctctcaattcagaacttacgatacatggcttaagcacctctggagaaaaggtcaagctcttgcttttccttcttggcatgaatcatctcacatatgtttggccatcctcaacagtagaacagttacctgaaatggggcgagtgatatagaattctaagagtttttgttattcccgaaattgggaatatgaagaaccgtatgtgccgcatccttccattgccaagacgtctaatcattgtacaatagaaatgactgatttgataccttcattccttagtcaagtcgacgtctatgtgttacaagaattacctgaagagttgggagcattggagcatttcctacccac

SEQ ID NO: 40138 - DNA, 413 bp, Arabidopsis lyrata
  Intron number 2 from transcript 946999 (locus 946999) deri ved from phytozome v7.0 (chr-ID scaffold_7; pos 14370911 t o 14371323)
atccatcttctgggttacttttacgtcgacgattggtgagtttaatttcttctttgatgttattgtttgcgtcgtgaacctaaaattagttccttgatggtttctttgaattcttgtgaattttagcgcttcatagttgttctttggcattgattgctaggggatctttctaaggtctaaagatctgctttttacattgtcttgtttctatccagtgaattgagaaattacaacttggcaaaaattagaactttaacagttttttttcttttgtcttgatagtgagtgtagtatgttgaaactatagagttatggttgtggccgtatggagttggatttgtttttgatgtttgttgtgcttgtttggaaatactgcagtgatagtgcccgattcctctggaaaacgataccta

SEQ ID NO: 40139 - DNA, 319 bp, Arabidopsis lyrata
  Intron number 2 from transcript 488832 (locus 488832) deri ved from phytozome v7.0 (chr-ID scaffold_6; pos 8217624 to 8217942)
gtgaaaggctgtgaacacacttactggtaatactgttggatcttctctttgttagatgatatacatctggtttggtttcatctatattttattacttacaaaatttagtctcttgtatgaacatattgatttcgtcagatgaattttgttttctttctcctaacttttcagttttgaaacttggtttgaggtttaatcctactgtaaactcttggtcacttttttttaatcttgtgtttgattctatgcctacgtagtaaactgactttctccttgggtttttaagaggagtaattcatttctatctattcagtgtcac

SEQ ID NO: 40140 - DNA, 733 bp, Arabidopsis lyrata
  Intron number 1 from transcript 494309 (locus 494309) deri ved from phytozome v7.0 (chr-ID scaffold_8; pos 762733 to 763465 reverse strand)
ctcatcttgatcccattcaagtaagtatcttttgctccttaattcttgattttgactcttttttgttaattagtttttggtccttcaagttttgggtgattcttagttcttgctgcagtttaccttttttctgttgttttctttctttgttccttgtagttaattagtttttttggcgtcagtttgtttcattgattgaagaaaactagggtttaaattgaatagaaaaaagtatgagggtgaaagtagaatggccatgaaaatataggggtaataatgaatggccatgaaaataataggggtgataatgaaagataacattggtgcttagcttgttaggattgtctaaaaaatacctgaaataagatatttttgattaaagttgaaatatatcacatttctcttttgtttaaggaaattcaaatttagggtgtaaattgaataaataaaaagtacagggggaaattgattggccacgaaaagaacaggtggatgaggtaatgatattataaaatagaaaatgattcttagcttataggcttgtgggaaccaaaaactggaaaagtttaaccttttgataaaataatataaaacgtcccaactttctagattcttccactatgtgcacttaatcagtcacgccgaactacttttttgcccctatatttatattttatttaaatctaaccccatttctttattttcagtccggttgctgcaagcccccaacaaa

SEQ ID NO: 40141 - DNA, 698 bp, Arabidopsis lyrata; identical to SEQ ID NO: 38330
  Intron number 1 from transcript 907833 (locus 907833) deri ved from phytozome v7.0 (chr-ID scaffold_2; pos 8489344 to 8490041 reverse strand)

SEQ ID NO: 40142 - DNA, 487 bp, Arabidopsis lyrata
  Intron number 1 from transcript 890245 (locus 890245) deri ved from phytozome v7.0 (chr-ID scaffold_7; pos 10282002 t o 10282488)
tgcccctattaaagttaaggggttttttttttgggtatctacaacaaatgaccatagaagatccattaattagttctctcttatatactatttgacataaactgtatataggtacaaagacaaatctgtcctcacttctcttatctcttctctttcattgtttctttttttccgacgagatcaaaaattttacgatgccaagggaacaatttaaatcagaaaaaaaatcttagagaatcaaaactgggtggagaaataaaaccggtgagttgtgttcatatgtgataatgatacttttgaatcggcgaagacgaaatccaagtctgatttagttaagatgaaaatcaaggcaagtatggtggttttgtttttaggcaaaaatggttaagttttattagtgtaaaaatggtggtaagtgatggtggttccaatttgatgaacaagcaatttactggtgatgatgttattgttgttgattcgagcgggg

SEQ ID NO: 40143 - DNA, 1008 bp, Arabidopsis lyrata
  Intron number 1 from transcript 470983 (locus 470983) deri ved from phytozome v7.0 (chr-ID scaffold_1; pos 3442695 to 3443702)
attgcgaagttgagacatctcataaactaactcaggttatcaaatctctctccttatgccgtgtttggcaattcacgttttcgggtctgctttcctctttctggggtttcttgtgtcgcaacgctacttctttatgcctagaaatcgaggaaactaacgatcggagatgcttttgagatcaagtacccaccttttgttttagaatttgtgtttccatgtttttgtctcttgcgtaaagatttcgacttttcctgctttccttgcataccattgtcatatgttcgtctcttgggttaatcctttacgagatcattgagaattccatacaacttgttcatgtttgggatcgatgcttacgggttttgctttgatcaggtctgattatgaatctgggtcagtggttcttagaaaattggctctgaaaacactagattttatctttgtcctcgtcttcgtgcttttgtgggttctgctttaattcccgtgtctgtgtttgttcaattgatcatgtcttcttggaatgaatcgaatgtatttggtatccctcaacaacttttttcacgatctgaggtagttgaatcttcagtttgatcttaaatatctgagctttattacttttccccgtcgtgttgctctggacaatgtgtgtatttgagctccttgcggttttgtttgtatctttcatagttaatttcaatgttcatactcagggtaatgtattacaaagttgggtcttttatctttgtgtttttgcttcttagttgtcagatattgtacatatctgtttgccacgaaactaggattgatttccctttgctgtttgatttagatgtttacaagtttgtatcttcttgaaagtttacatttttccaacagtttgagctgttgaaactaggattgatttccctttgctgtttgagtacatatctgttcttttgaaaatgttgaaaacttttaatgttgaaaatgcagttcttttgctcttgttcaggtttcactacgctgagc

SEQ ID NO: 40144 - DNA, 614 bp, Arabidopsis lyrata
  Intron number 3 from transcript 473798 (locus 473798) deri ved from phytozome v7.0 (chr-ID scaffold_1; pos 22497876 t o 22498489 reverse strand)
gtcgtcccaagcgaaccggtaatttctctttcttctctgttttttttaatagagctaatgttttcttgaaaacaatttcttcgcaaacatataactttctttttctttttttttggtaaccgaggattacccgaaacccggaattagtttcgggtttcgggattcctaccaaaacccggagtctgttgatcttgcaatttaaaacatctacaataacctaagtagtaagtagcactgaaacgggtacgggaacgggaaacgggtactgtcaactagccataaaaatctgcaaactttatttcgactttgctacttttaatgaactcttatgaatatatgcatagcctttgtttgttaaaggtgacaaatttcaactttttaataaattttgtggatgttagccaaattctgcattggaattatgaaaaacatgtttttttttgttactgaattgtatggacaagaacaaaagaaacatgattgtgtgcaaaataaatcagacccattaaagttttgacttggttttttttattacagtttttgtcttaaaaattctgtttgaatgtgattggattttagggacggtgtggacagcaagtgcacacataataaca

SEQ ID NO: 40145 - DNA, 334 bp, Arabidopsis lyrata
  Intron number 1 from transcript 938506 (locus 938506) deri ved from phytozome v7.0 (chr-ID scaffold_5; pos 17607121 t o 17607454)
ctgctcctctctctcgtctcaccattctcttccaggtttgtcatttcatcgagcgagaatgagaaaaattcaagatttttgtttcattaaagttagaccaattcaaaattttcaatttcactgtgtaatggtataatcaaaacatttggagatctgtagaaatgaaaagctgaattgagctctgtgtcaagatagagagtattatcccaaatcttcttagcttcagttttttttctaactttgaatgtttacaaagggaaattttgtgttaaagctgagttttttttggacagcttcttgattatatacactatgttgtatttaggtgcaaggt

SEQ ID NO: 40146 - DNA, 448 bp, Arabidopsis lyrata
  Intron number 1 from transcript 328440 (locus 328440) deri ved from phytozome v7.0 (chr-ID scaffold_7; pos 3539963 to 3540410)
gctcataaaatgtaaaaaaaaagaactcctttcatttttctctttttgtcattttcactctttattttctttactttaattaatcatctaatggttgctttctttaatgtgagtttggttttggtatcttaaggctttgcattggttttgtgaagtttggaaataaaataagtgttgttgactcttctcttcttgttccatatttgatggttggtggtgaattaatgcaaagggtcttaggttgtctaggaaattaagtttttaactctgttgaattgtggcccatgaatgatatccttagttattgcattttgcatcttgcccttttgaagtacaatttgctttaccaagtcacaaaaatgggtttgaactttgaagggtttttaggttattgtttctagatttgatctctgaaattactgttttggttcatgccacagggcaggaa

SEQ ID NO: 40147 - DNA, 871 bp, Arabidopsis lyrata
  Intron number 2 from transcript 895676 (locus 895676) deri ved from phytozome v7.0 (chr-ID scaffold_6; pos 23269250 t o 23270120 reverse strand)
ttcaaggcaagtactatcttaatcccactcttcaatgtctccagaattaatgaataaaaaatcttaattttttagaatctaatctaaatagtatcagattaatatcaagtattttgagaaagttgcaagaatatgcactttgtaagtccatgtgcatgttgaagaaattttttgtttccttgctaaaccagatagcatcttgaaaaaaaaaaaaaaaaaactgtaataaattaatgtaaattattatatattttattaataaatatccttacattgtctatttttttttttttttttttttgcaaatgaattcttttattcattgtaagttgggataaatgaatcaaacaaaggccttaatatgtttatatatatatatatatatatatatatatatttgatcaaaactaatatgtttctatatatacgtctatttgtgaatgacatatataaagtaatttgatattacaagttggttgcattgatttgtctttttcgacaaatcttatcttgaagttagaaagcttttattcttcccaccagctaagaaatgtcaaacgtgttatcagaaagagaagaaatgtgagacatagtttatcttgtgaaaacataatcgaggagatgatatttgaacacaattttgaatctaaaccaaatcatatattaagattcaaaaccaactgtttttaacattttaaagttttgcttataaaacagaatatcagccataagaagttaaactggaaaactaatttaaaaatgattacattatagatttagaaatatgagaagttttacctaatacaaatactgaatctatagttgttatgttttaggaagctagaaggtaaagtagcactcatcacaggag

SEQ ID NO: 40148 - DNA, 721 bp, Arabidopsis lyrata
  Intron number 3 from transcript 949890 (locus 949890) deri ved from phytozome v7.0 (chr-ID scaffold_8; pos 15487736 t o 15488456)
ctagtggtgagggattcccacttaatattcaggtaaaatttttgattaatttttatagtacatttgatcatggccgctttcaattatttcaaaaatctagtgaaaaatttaaattaaatttatgcttttaatgaaattaaagatccaatctctattattattaaaaatattaaataattttatagtatataagatcttgtggattcaccacttttctttaatacatgttctctccgattcacgaaaatgtcggtttagagtaatttttcgttttgtaactttggtgttttaattttttgataagaaaatattcaagtgatccatcaaatatattaaaaatattaaataaaaaataatatgaagagaacttttgttttgtttcaacttctttttaattttttctggaaagtagatccactaatggatagagttgtataggtcatgaaattctatttagcatgtgtagcttggagtaactaaatatagctagtcaagaattagatttcatttcagagcaagattcatgtgcattaacgttgtagagaaaatgcatgttataacttattagaactactattagtgattcctctctaatgtttttaaatgttaagattgatccctctctaattgattggataaaagacaataagttttacgatatcttacacagagatccgaattgttaaaagtgatactatgtttgtttgtttttttcaaggcg

SEQ ID NO: 40149 - DNA, 498 bp, Arabidopsis lyrata
  Intron number 2 from transcript 490786 (locus 490786) deri ved from phytozome v7.0 (chr-ID scaffold_7; pos 862142 to 862639)
aaggctcagatctgggataccgctggtcaggaaaggtacgagttcttagattctctgtgttttggaatcttaatcagaagaatttgttgatttctgaattgctttaacactggatctgtactttttcctgaaatcgacttggtttgactagaaaatgtgcatagattttgttacttctttagtacttctcatgaatttacgctagtttatgaacacctatggatccgccttgaccagatcctgaatttgtatcatcgaaatgtatactactatagtgtttgatccgatctaacaataaggtaatctggataatcatgtgtaggaacagaagtcgacttatttagattcgacattttgtatgattcttagctgattgaatcaatttggctcatttctatatttggaacagaagatttgggattgttctttagtttcgtgactttgcttttgttgctctaagcagatacagagcagttacaagcgcctactatagaggag

SEQ ID NO: 40150 - DNA, 500 bp, Arabidopsis lyrata
  Intron number 4 from transcript 473398 (locus 473398) deri ved from phytozome v7.0 (chr-ID scaffold_1; pos 14625158 t o 14625657)
ctgattacactgccggcgtcgtcgtcgcattttatgtaagtcgccggccatttatttgttatgttttttttggttggatttatttgttatgtttgattacaaaaaaatgtttttttctttttctttcatccatctgcatgaacgtttaagtcttttatttatttaattatttgtcgaaaattttcattattattcttgagaaaactcatgaataacccatttgatctaattcaacatctttttttttttttgccgagaaaatcgtcattgaaaatggtttaccaaacgttttgtcgaagaacgtttttcacattttccctgtttggttgcctagaaaatagtcattaatatttccaagaaaatagttcctatgtttccaaagaaaaagagcaccaatctttaaattcttggaatctaatattatgttaaatggaaaaataaaatgaatatattttgattttgcagacatcaaacggggacgtgttcgagaaaacacacga

SEQ ID NO: 40151 - DNA, 644 bp, Arabidopsis lyrata
  Intron number 1 from transcript 900951 (locus 900951) deri ved from phytozome v7.0 (chr-ID scaffold_4; pos 14867083 t o 14867726)
tttttaattgcggtaactttagataattattaatgtaacaattttgattaatttgtattaattttatttttaactaggatgagaagtttttttttttgttggtaaaatcaataatttattttgattgatattaaaatgaatttataaccatggagcaagtaattgttaaaaattaatatccgttaagaatgaaacaaatcacaaatataaaatatatagataaatagacataaatatatacatctatttagaaagtcaaatattaactattaaaattttataaatcaagaaaagtctctaacaataacgtttgatatgaaactgattttttttttttctgtttttctcaaaaaaaaaaaaaaattgttagaagatcggatgtaagacagatatctaagagtttgactatattaccaaaaaaggcaagatatttgttaaatgttagtaaaattagggataatgatagattatagtagaaaaattgttaccacaccagttcatgtattattaaatagcatccaaaatactaaatagaaggttaaagaaaatctttggtttattcatattctacaaaagaaatattgtttttggtttctgattgagaccttcttattagatatctgagacccaaattcaagtgacca

SEQ ID NO: 40152 - DNA, 531 bp, Arabidopsis lyrata
  Intron number 1 from transcript 487562 (locus 487562) deri ved from phytozome v7.0 (chr-ID scaffold_6; pos 2884177 to 2884707)
tctccatcgtttctccctgaagatttgttctactagcttttttgggtatatcttttacttgaatctctaaccattaaagttcttccattagttttttatttacatctaagtttctttgtgttgagtttgattaatgggatcgtacttttctaaagttctagcctttttaaacgaaaaaagcaacttttcgtgatttttttttcaattgaatagcttgatttggaaattttactattcaggctgttgttttccctttttatgcgtttgtctattttcttgcttttctcttgttcttcaaggcgatgaaccagaaaagttttgattttgattttgattttttttcatttagctctgattgttgccaaatttgtgaaaatgttgtgaaaataggcgatagattcgcagatcaatagctattcctaagttgttgagttatataacaggttcattgatgcagagttgttcttgtctaaacttgatagtttcagtaatgcggctttctcaggatctttttggctattattggctgtg

SEQ ID NO: 40153 - DNA, 364 bp, Arabidopsis lyrata
  Intron number 3 from transcript 324152 (locus 324152) deri ved from phytozome v7.0 (chr-ID scaffold_5; pos 17900295 t o 17900658 reverse strand)
ggtggtaagttcttcttagaatctcattaacaataagttgggaaatcaattattgttttttttatgggaatttataaagttttctgacataatatcaaaattcagttcaatttgaattggatatgtgatgtagtataggactctgttggaaatgaaaaagaaaaaaaaaaagaacattataaaatatcaaaaaaggtgttaacaaaaatctaaaagtgacaataagattggttagtgtatagtgtagcataagaaacttattgacttgttaactaacagcaactttttttggttgcataaaacccatgtttgtgcatcctgttttatagtggtttggattagacagagagctaaagagacttgt

SEQ ID NO: 40154 - DNA, 625 bp, Arabidopsis lyrata
  Intron number 2 from transcript 348000 (locus 348000) deri ved from phytozome v7.0 (chr-ID scaffold_5; pos 14150996 t o 14151620)
agtttttagacaatttggctataaacttggtgtcggtaagtaagaaatcagaaaaatatagaactatagaagtgatcgatcactctaatatttaaattatcgaaagtagtatgtcatagtatgttagttaatttatctctatgactaaaagtttcttatttatgtttccatattttgagtttaaaaaaaaaaaattgaattgatattactaacaaaaagtcatgaaatagaatgttgctaattattagtattttgttttttgtctaagaactatattaattgtttcttaggttttagatacaattcaaaattctgaccaatatataattaataaatcacgggctcgacttgatcatatttttaattgatccagccaatgttgtttttgcataagtacagttaaatgataaatatgaaagatattaaaataataagttgtgaaaactgaaataagtatagtatatttttcttctttaaatttcacctacttcgatcatattgatattgtggaagcgcaagatatattcactatgtactctatatgcatatataatgattagtaaatctaccaaacaaatgttaattgttaaacttgatgactaacaaaaatttttttatgtataag

SEQ ID NO: 40155 - DNA, 393 bp, Arabidopsis lyrata
  Intron number 1 from transcript 491093 (locus 491093) deri ved from phytozome v7.0 (chr-ID scaffold_7; pos 2304301 to 2304693)
ttctggcgagttctatctacttttttcttggaaaggtaatcatacttttaggggaaatttggttttgctgattgttatttaggtatgaatctgcttgacatttgagtaattctgaggcattgcttagaacaagttttgctagtgcgtattatgagaaaggcataccattttgtttcttacgattgatgatggagtatagtttgatattttcattatgttttgagcattatgttaatgcatgacaaggtttgttttaagagcacttttcttagtttgtgttacattacaagcttgttttgttgttgttccatcatttcttctaaactcgaattgaaaagtgataattaacatgaaacaggaaaatccagttagaactctttcttggggctgcct

SEQ ID NO: 40156 - DNA, 957 bp, Arabidopsis lyrata
  Intron number 1 from transcript 947127 (locus 947127) deri ved from phytozome v7.0 (chr-ID scaffold_7; pos 17721006 t o 17721962 reverse strand)
ttcatttccttaaggcgtttgctcacgcgtaagttcttttcttggatacttagtttctctctgaatttcctgaatttacattgattgtggataaaatgatacttgagagtttctttatagaagttggtgagttcaaaatactgataattttgatgttgatcctttagagttcaaagtgaagatgaatgtagatagataatgttagagattggaggttttaaaattagtcattgaaagaagggatctggagcttgtatgacaaatgtaggagaagaaatcagattgatacttttgtcaatcaccatttcatttgttaaccacaagtgctgttgataatgtcgtttgtatttgaattcatgcctcttactttgaggatttttgaagttgtttgttaataatattaagttcagataaagagtagaggctcctaattatggtggtatgaaagattagttttctattggtccctgtatgcatgtgtggaaaagtttttatgaaagaaaggatatcaagaacagtttctttgtggaaatgcttttcatccggtcttctaattttttaagattgtaggttcccgtggaatgttttttaagatttcataaggttgattttcgcctcacatttagtttggttgatttcataatgtctgcggaatgattttattgccttactatcccttgacataagtacaagatttttattcatcatgagattcgttctggtggtctgggatgatgctctaattcagtgccacgttatcattttgactttagcagttgatcaaaagattttgattttgttacaatgaatgtgagaaactttttgtttagcttatcagtgatgagatagaaagagatggtttgtataatattaaccctctgcaaacttttcaattaaatgctttcatagtttttcttgttttctttataaatatttgtgttcctgcgatttttaggt

SEQ ID NO: 40157 - DNA, 611 bp, Arabidopsis lyrata
  Intron number 2 from transcript 475152 (locus 475152) deri ved from phytozome v7.0 (chr-ID scaffold_2; pos 2220611 to 2221221)
agaacaagcttctctctaagaagaataggtatgtgttcttaagtttttccatctttaatttactcgtcttcatcaattgaatgcaaaacatggaaattgcaataactttgtaactttggggatgtttgtatcgttctttttatcttttagataggtgttggttttgtttcctgtagtttcttctaagaaccattagtaaatgtagaagttctcatggaaatagcgataaatctgtaagtttgggatgtttaaattgtcttatttgagttgagtattggtttgttccctctaggttcttctaagaatcattagtaaatgtacaacttctcatggaaccagcgatattttgtaactttggatgtttgtattgtctttttttgagttgagttattggttttgtttcctctaggcttttctaagaatcatcagtaaatgtttaggaagatcgaattttgtgtaaagctctagtctagtactctaatatttttcatgtgttgtagtactcgctatcgaagaactagttagaataaatcgtttaaggtttagtgctcttgtggttatctttctttgctgcttctgattttgtattgtgatgtttctttgctttgtag

SEQ ID NO: 40158 - DNA, 846 bp, Arabidopsis lyrata
  Intron number 1 from transcript 493153 (locus 493153) deri ved from phytozome v7.0 (chr-ID scaffold_7; pos 11600643 t o 11601488)
tcccaatcatcaaaatttcttcaaaaggttagctttcatggtgatctatgtagtctctttctctttttattttcttgtcaaacgattcaattccatatgtttctaaatttaacaattggttcttctttagctgtactcttatctaggtttaagcttttgatcatatggttttggaatctgagcttatatgtgtctttttgattgttggtttttgaaaggatatgacttgtttgatttggttgtggtgcaaaagcgattattccctgtaaccaacatcgatttgtctacctgtccctttgtttgccttgtgtgtattcaaaagtactaaactttatgctgatgaatgtataaaatcttaactttgagcatgggttttaaagctttgcaattccttagtttaacctgattctggtaaaaacctctgctttagtttgtctccaaccttcgaatagatgtggtttcttctgtagagagagatttagagagtggaaagcttcgatttttggggtggaagctctgaatcgattatttctttttctggcaatagaaatcttaaggcagtagcaaaaaccgatatttgatttctgaaagatgtcagatctgttttctgataaccctatgattgagtgactgattgtaagagcagacttgtcaaggggcttttagtacatatgtttgagtttgtttggaggaaatttcagaactaagaccatttttttcttgtgtcacgaatcacagtgtctgtatatagttgctttactctgttgtaggcttgtagctcacttgttctttttggatttttatttcatggagacaggtttttgttctccttggtttgagcaagtt

SEQ ID NO: 40159 - DNA, 577 bp, Arabidopsis lyrata
  Intron number 2 from transcript 942790 (locus 942790) deri ved from phytozome v7.0 (chr-ID scaffold_6; pos 19890304 t o 19890880 reverse strand)
ctctggaggttagttagtcatgttttcttatatggagttgtttttcttttcagtcaaaacctctgttcatgaacaaaacaaggtttctgcagccatatgtctattaggtaactcgagaacaacactgaattagatccgacatgagccgaataaagtttgatcgttgtggaaagtgtttaggttacagtttactggttctattaagtctctttggatttatagaccacattaatattaggcgctgtttaagacgttgttttaagtttgagtcgcctcacatctgaaaggcgaccgaggcgaaaggcgatatcagggggtctttatgccttcggtagcctttcgccttttaaaacacaggactagaagaaaagttgtgatggaggatggagtttttttgagcggttaataatttactagaatactattttactaatttgttactagataaagtactgtttttttttccgagatttccagcatttgattacgtgactaaaagctctgtattttgtgttctttccttatggtttgtatgtatacaggttgcaacttcttcattagcatctgttgcaagact

SEQ ID NO: 40160 - DNA, 571 bp, Arabidopsis lyrata
  Intron number 1 from transcript 482865 (locus 482865) deri ved from phytozome v7.0 (chr-ID scaffold_4; pos 18724519 t o 18725089)
ttcctgtcacatacgatacgctcgttgcgactcaggtgcgtttctgattatctcgtaaccctaaaaagatttgattattttgcatttaggttaaagtttatatatttctctttttctgttgatacgttgttagattggagggtttttctgggtgttgcttgcttaatctcgttgcattgacttgtgttgttgaccttagattcttaattagggttatttgatttcatcggaaaaagttcacataaatttaaaaagatttaactttaaaaagcttgagctaactgatttgtatgagacgccccgttgaaattattgaaacaaacccaatttggacattgaactcagcttgacatgctagggttaagggaaacaaacccaatttggcacttgatttgttttacttgagggtcatcaatgaatcaagtcatgcgtttttttttttttttggttgggaaattgtattcaagtgtttcctctggaatgttgataatgtgtgtattgctttagggaaagttatattcttttcttgtttccaggtgggaaaaaagctgaggtctcttgcaaaacaccc

SEQ ID NO: 40161 - DNA, 942 bp, Arabidopsis lyrata
  Intron number 1 from transcript 470584 (locus 470584) deri ved from phytozome v7.0 (chr-ID scaffold_1; pos 2061849 to 2062790)
gattcaactacaatttgcttcctggtatgaacgattaatctcgttggtatactgcgatgctctccaattttgattctttttttaggattactagaccttttttgcttcttagctcagttgcagaaacctagttatgatacattttcgagttaattccaatactgctgtgtctcaagttcacaaatgtgttatctaccatttagctttatagttcgattgtgacaccattacgctaaattctgcctcttagctttagcttcatcgcttattcgggtttggagcacttgaattgtcactgtcctatgatcagatgatctttgtagtttttgatcttcagcgaagaaaatgaagtcgttttgcttcaaagcatctttgaaggaagggaaagttaccaactaacgtttagtagctactcaagcattattgacttcactcataggagtggaactaggatatgaatgctttctatgagtttgtgaagaaagcaattagttttggtgctactaaacgtcaattggtaactttcacttccctcaatgatgttttgaagcaaaacgacttcatcttctttgctgaagatcataaactacacaaattcttggaatctttggctgctacagacactcttttatgtagaaacttttctcatgaaagcagtttattagtctcttttacttggctgtggtggtagttttagagaatctccatttttttgaaactgcaaacttctttaaagtacactctcccagacttgtaatatcaatatagctttttgatgatcttcacattcatgctattcgctaactgttcctttgacgcccacaaagttatctgtagtattcgctcagctggttgaatgttatatgttgacctcaatacccttttagtgtttattaatattggacaggttcaacgacattgtctcctcattctctaactcta

SEQ ID NO: 40162 - DNA, 738 bp, Arabidopsis lyrata
  Intron number 1 from transcript 896994 (locus 896994) deri ved from phytozome v7.0 (chr-ID scaffold_5; pos 6940198 to 6940935)
ccgctgcaaaccgtagacctaaaaatctgcgcctcgtcagcgacggcgtccacaacaaacgcctcaacaccgacagcctctttctccgcagcaggatcctcctctgtctccacagcaggatcctcctccgtctccacatccgaactctgaggctcagagtcacgcgtttggctgttcctctcaaggtaacaacttccaaaacgaattgccggatctccaggaggatacgcttgaggctctgactgctctgcttatggtgccggaccgtcatctgtttacaaccgacaccgttgccagacccgacgtggtatgactcttggtcccttctatagtggttttttctgattgctttgtgtgttttaggatagaagaagtctgattgttttcaaaatgtttagtgtgtttgactgtttgcttgttcttattgttttgtgtggcttaggatagaagtctgattgtgtgtctgtcttaggatagattgtttttaagaagtctgattctttgtttgattgttttaaaaagaagtctgattggttgaatgttaaaaagaagtctgattgtgtgatgtcgtatcagtcttcatgctgtgtttgagatgttatcacatatgttgcaggtttgattgggacgagaaatcaagactggtaaggaggattaccaaagtttttacaaacaattatgtgtataattgcttaaatgtagttttgtttaatcacttaggacttgttcaagaggcac

SEQ ID NO: 40163 - DNA, 546 bp, Arabidopsis lyrata
  Intron number 3 from transcript 484242 (locus 484242) deri ved from phytozome v7.0 (chr-ID scaffold_5; pos 1785636 to 1786181 reverse strand)
ctccgagcttctttggtcttttttcacctcttcaggtgtgaaattcattaacaaactaaagatcaaagcttttttttttttcttctcattgttagttcgaaactctgtttttggtaaatgaaagttgaagactttatggtttttggatattttgttgctgtttctggtttttgttttcattcggtttatggatgcaaatccaaaccatattactggattatgggattaaaaaaacccttcaaatgttcttcattttaggtcaaaattgtgaaattttgactttagaaattaaggatacttttttttgggtatcagaatctttgaacaaaagaacttagactttagaaagtaggaaactttcagacaaagaacattgtcaatgtcaaagagagaaacaaaggtgtagtttagaaacccattagtattgtttctctgtctttcttttataaatcttgaatctttaaagaatttgcttggatttgttacttgtcttttgggatattatgtgttaatacaaaggtgatttatgtgtagggagcatttggt

SEQ ID NO: 40164 - DNA, 659 bp, Arabidopsis lyrata
  Intron number 1 from transcript 495088 (locus 495088) deri ved from phytozome v7.0 (chr-ID scaffold_8; pos 13811159 t o 13811817)
ttctcctaaatctcctatatttcaaggttagtaagttactacaacatatacttcaaaaaaaatctacttgaagattagatttgtttggttttgttttacattctttaggcaacattacatttgatttgtttacaatcttataatacgatttacaatttaaattcgttttttttttgggtttgatttataaaataagaacaaaaagcaatttctaatcggtttggtttgatgcaatttcggtttgattcgtttttgttttgaacaattttaaatattagtaagtaattattattacatatattttaatacataggtaattaaaatttactttttcaaaagatctagtttagttttaatataccaaaattcatttagtaatgtcaaatatacatatgaacaaaaaaactgtcaaatataccaaaaactctcgaattatatcaaatattacattggtccatctcaaattcagaataatttattaatttatggtgcttattaatttatccgtattaatatatggaggtttttgtttaaaaaaaaactaaaaccaatccgattataaacacatttggatttggggtccggttaaatttggttaatagtccggttacatttggttaataggcttcccggaaaagaaagtgccgtgccgcaacatc

SEQ ID NO: 40165 - DNA, 358 bp, Arabidopsis lyrata
  Intron number 1 from transcript 946647 (locus 946647) deri ved from phytozome v7.0 (chr-ID scaffold_7; pos 12272064 t o 12272421 reverse strand)
gcaatattgagtctaagtacacttcaagagctgctgatttgtataggcagattcttgttgtagaagctattgcagaagatactactactggtctactggaaccgtctaatgggtgggtttttcttattctgtcaaggaagagttattgatgccacttcttggccatgttgctccaccaaagtaatcatcatgtttcttagcagattccggaatggacagctcgtcgatagttaaagtaagcccgtacgtgtgttttagtgacagcattgatcatctagctaattactttcatcttttaactattttgattactaggttgaagaatgggactaatttgattactaggttgaagaatcag

SEQ ID NO: 40166 - DNA, 374 bp, Arabidopsis lyrata
  Intron number 2 from transcript 486584 (locus 486584) deri ved from phytozome v7.0 (chr-ID scaffold_5; pos 20134073 t o 20134446)
tgttggccgaggagtgtacatcgattcctcaactggtatgcatatattgcttatctttgtttataccaatttgctgattcatgtagagagattcagaatttctatagtgattgagaacattagaatatattcttaccactcttttgttcagcctttactatctcaatttaagttactatttccttgggagtgacactggtgatcttcggaccattgctatttttctagactatcaaaattggtcctttgtttgtacagatagaggaatatttgctttggtctcaacaattagtgtttttcgattttatatatatatcattatctgctatctgtccatctgatggagcttacttttgttactgcagattattcaa

SEQ ID NO: 40167 - DNA, 620 bp, Arabidopsis lyrata
  Intron number 5 from transcript 476825 (locus 476825) deri ved from phytozome v7.0 (chr-ID scaffold_2; pos 17279864 t o 17280483 reverse strand)
gctcagagcagcacagatttcctcagcaggaacaggtttctcttaaattctcttactttctctctttttccgttttgaattcctgaggttttagttatctctgttcttcagattttaaagctttcgtttttagcaagtcggtgtttttttttttttttggctacttagatctgactatccgactctgttcacacttgatggagcattgttcgctagggtttatgttgagtctctcctttgatcattatgttgttgtaaatcccacctttaggctaaagcgagcaagtgattaccgagaattggaataaaaagttgacatttttctgaattcgccattcacttagaagaagcaaaaatcaagcttttaggggttgtgatctagattcgatgcgtgtaagcttataagatgattaccgtttcgtgcttcagatccataatcatttcatggttctgtagaaacagttgattcactatatgtcaattatcttcttgcttcacagatctctttcacatgttggtttttattccttaagggcattgacctttgaacttacatgtcaagtgtctatgtgtgtccttttgcagaggaaaaggtggggaggttgtttaggagtgttctc

SEQ ID NO: 40168 - DNA, 728 bp, Arabidopsis lyrata
  Intron number 1 from transcript 891439 (locus 891439) deri ved from phytozome v7.0 (chr-ID scaffold_7; pos 21082802 t o 21083529)
ctgagaaggtaaaaggaacacacttgtgttggctttgctaactaagatgattgttgtgttgttcatggatgttctaatattatatgcttggtttttcattgtctagataatgagttgatctgattgaagagggaggctaagtttaaaggaggattctattcttaaagaacattttcctacaatggagtacaaacagataagtctttcattaaaatcttattcattcatttatctctctattgggttagagtatacatgtaggctaggggaagatagtatcttgtcatattaattcttcattgcctagacacataaaatttctggttgaaaaaattttataaacatagattatctcaaatctaatccaactaatacttaaacaaagctttccagaagaaacacaattatatatatatatatatatatatatatatatagatatattttatgaggaggaatgtatacaatagtgtaatttagtaccaaaacgcagctaaaggctttacatagaaagattgaaacaaaaccatttatgtgtttcctttttattaccactctttcatccaacagatcggagctagactctatcgttgccaagcatgttttttgttatctacaaatctgcagaaaaaaaatgaatttggaaactaacaataatatttgagtttagaatctcaccagttttggctgtatattggcatgatgcaggatcttaacttggactcgtc

SEQ ID NO: 40169 - DNA, 446 bp, Arabidopsis lyrata
  Intron number 2 from transcript 477950 (locus 477950) deri ved from phytozome v7.0 (chr-ID scaffold_3; pos 2657619 to 2658064 reverse strand)
cgccagcttttgatttttctttgagctttccgtacaaaatgtgttgtaaagttgtttacttttttttgccaaatcacccatcatcaactctacacaactctttttaaagacctcctccgcaattaacgcttttgaagacatttctttgggttctcttttaaggttcctgcaaatattcatattcggatctgagtttcttagtacttaaaagtgtatcaagccattaagatttattcgttactctttgtttattttggttactagtgaaaccagtttcagctactggaaaagcattgaatctgaatcattctggttggattatattttttccaatcttggttactaattgcttttgtcttgttctagatagatttcatgggttttgagtttttaacagaactaagtgttgttttgtaggattgaaaacttgaacacaccaaatctac

SEQ ID NO: 40170 - DNA, 406 bp, Arabidopsis lyrata
  Intron number 3 from transcript 477673 (locus 477673) deri ved from phytozome v7.0 (chr-ID scaffold_3; pos 1366794 to 1367199)
ctgttaacgaccccttcatcaccactgagtacgttagtgttcttccttggttttgaaagtgatcggttaaataccattttgataccttgatgataagattctcttagtccctctgataccttgatgatactctcgttagatttggaagatggatcgtatccatatagattatgcatgtgtgttttaggtgtcagatgatttgttctattagttctcagatccggaaactggtttagtgttctttgttcatattgtttagcttctcagaatatttgttgagctgttgattgtttttaatgtctatgtaatgttattaattggcctgtttgtgattaaagttgatatgattgagttgatttttgaacgttttaattgattatgttgtctttgattgctgcagacctac

SEQ ID NO: 40171 - DNA, 335 bp, Arabidopsis lyrata
  Intron number 2 from transcript 328325 (locus 328325) deri ved from phytozome v7.0 (chr-ID scaffold_7; pos 2896926 to 2897260)
aatccgatccactttcgcttctggttctcctctctgtacgtcttccttggccctgaccaattctccaattctctaaatttaagctttaggttgaaaattgggtttctgggtatccttagcagctcaatttctgattcgttttacagacttaatcgttcacatatggtttggttctctgaattctatttatcataaagttatctaatttttgtgaagttgctttgtgcattgccttggttagctgagtgaatccgggaaaaagaaaagaaactttatttctttcattttgattttctatgttgtctgtgtccgtctcagtgccattgaagttgagt

SEQ ID NO: 40172 - DNA, 935 bp, Arabidopsis lyrata
  Intron number 1 from transcript 492703 (locus 492703) deri ved from phytozome v7.0 (chr-ID scaffold_7; pos 9110554 to 9111488)
agcacaatcctggccatcagtccgattttgcggaggttgtttttctagggtttctatgggaattcgaaattatgtgcgggtttatcgtgtttgtggcggtttttaagtgtttcgatttgagcttctaccgtttgggtgtgcaattagggtttgcctttcgagtagcgaatctcattgatgtcccgaaactgtcttgttattcaatcaaggcttgagctatatgattttcaatagtcaaaaaatgattctggctattggttgaagctcaaatcagttttagctgatctcatgaatgtcccgagattatctttgtattaatgcttgagctcttctctttttaaggaggatttacagtgatttggaatattggttgaaactcaaatcagttttggcactagaaaaatgagttttgtatctcttttactgtccctctggtctgttttcctgtagacagtctatgttagcccttctctgagtagcttatctcattgatttcccatgattatctttttattcgatgcttgagctctttgctttttttaggtgtattttcagtggttttgaatattggttagagctcaaatcagttttggcacttgaaaaatgtgtctggtatctagttttctgtacctctggtatgactatttacctagagacgatctattttagcttgaacaattttgttgcaattagggtctgcctttgtcaagtagctaatctcattaatttcccgagattatctttccatttagtgcttgagctcttcgctttttcaaggtgtcctttgagtggtttttattatcggttgaagctcaaatcttttttggctttgtgggaactgagatatatctgttttggtatctgtttttctgtatgtctgatatagctgttttcctgcagacaatctacaagattagctttggacagatttatct

SEQ ID NO: 40173 - DNA, 1040 bp, Arabidopsis lyrata
  Intron number 2 from transcript 489372 (locus 489372) deri ved from phytozome v7.0 (chr-ID scaffold_6; pos 11202573 t o 11203612)
gtcgtcaaatcagtaccgttggatctagatccaaggtttgttcgtttgttcttgtctctcttctctctcgttttttgctgatctgtttgttccacttctctgttttggattcatcaaaatctgacatagactcgttgatctcttaattcgacctaattcttgatttgaatcgtggaacacaagattctctcagttatacaacataccaaagattcaagatttgagccaacttttgtaaatgttcctctgctccaagattccatacgtcctttttttttttttttgctttcaagaagactcattgaccaaaatcaaaaagcatcatccttcgagtaaaaaaaaagcaccgtgttttaactagagagggttattatggtcatttgtgaaggcggccgtgtgatacgtcgccgttttactgtttttgttcgtttgtgaatttgagtggtagcaagtggatggtttgaagaaagaagagatagattttagtgattacattatatgcatagattgtttttaaggtatgtataacatttgatataagcagaggaatatcattagttttgggttatatttggtagtttgatattatttgggattagttgtgtttataatttgctaatgaagagtttaaggataagtttgtctgaagttttgttaggttatcaacctcaatgacgcgttgtttaatgtttttatgggtcacatgggaccattttctcaacattgaatttgtgtgtgtgtgtgtgtgtggggacttctacgtctgtttcttgtgactcaactttattattcttcatttattgaacgttcttgttcttacttttcgcaggttcttgtaacttcagatttggattttgatgtcaagagattacagaggaaaaaggtacccaattcttgaaatattctggagtattttgcaagcagttttcggttcttgatgatatcgacaactcttttcagcattaacttgaattactgaactttgattgtgtttttgataagcagaacattgcatcacttagatcaccattcagcgagcg

SEQ ID NO: 40174 - DNA, 745 bp, Arabidopsis lyrata
  Intron number 2 from transcript 948891 (locus 948891) deri ved from phytozome v7.0 (chr-ID scaffold_8; pos 4848728 to 4849472)
agatcaaggagcgccaagatcaaggggtgctcaaggtgagagaccaagatgattcttaagataactaaagaatttaaaatgaagaaaaaaatgttggttttaaacaagtgttggtattttattaggtaattttcatgttggctgatgtcaattagatcgtttctacatattttatatgaccgttgcacttctggtgattagtctagatttcaatccaagattattttgagtttaatttttatttatttatattaatatatatgatctagcaaaagagacttatttgaaaacttacgatatatatattttgagcttatctaatgcaaataagattgtgtttaattgtgttctatcgcaaggtgcaattcccatcttctataaggttgtgacaagcgacgtaaaacaactcaaaggatattttgggaagcatttttgggatcaagaaagaaagtgtaaggcatccagaaattggagacagtttgtccaaatacatataattttttagagggagctcatggaatatgtttgatgacgaatttttatgtatagtatcttcatgtatataatacaaatcctaaaaatgttaatttagacagattgttatagtttcattggatttgagcaagatagaaaaaagttatggaaaatattcttctcaaaattaaattaagtttcatattttagaaatctaactaatctcattttgctttatctcactggttgatagttcggagagcagtttcat

SEQ ID NO: 40175 - DNA, 428 bp, Arabidopsis lyrata
  Intron number 1 from transcript 482640 (locus 482640) deri ved from phytozome v7.0 (chr-ID scaffold_4; pos 17399758 t o 17400185 reverse strand)
gttctcaagtaagcaatctcttctctatctctcttcttcatgcttctcagttcataagcgtacattattgctaatgatccatgtgaatattgctactgttgaagatgccaatttgctaaaatgaccttcttttcgttaatatctgtttattttctgatcaaaaatgttggcgatttgagattttttggtacgagatacagtttctgttcggcaataactagatcgtgttgctcccatttactttgctgtaacattttgtttgtaatcctgtacattgaactagttatgtttggtctctttttgaaatctgtgtgattcgttaattgtttgtctcattccagaatgagttggttttcgattaactctaagctcttgacaatgtttgtattgtaggactgagctttgccgattcagtggtcagaagattt

SEQ ID NO: 40176 - DNA, 666 bp, Arabidopsis lyrata
  Intron number 2 from transcript 488114 (locus 488114) deri ved from phytozome v7.0 (chr-ID scaffold_6; pos 5185729 to 5186394)
ttctctattcttcattagatcccgtaaggtacattaccatgtcttaatttttgtatttgtttgatatttatattaggtgtagttgttgtgttgttttgatcaggagctcaagttacagcgacagtgaagaataaaagacattaatacaaaacatttcttgtgggtttaactgtctcagtagatcttcatgtttactcttcttttatttaaaagtaaatgacgttttttcttctcttttctaaaatgttcactttcgagttttgtttggatcagatttgaagaaagccaagagagtttgctctaatatgatttcagaaaaagttaaatacatttgttttgggaatctttttttttataggaaaatgtctgtctttggtaattggtagattggtagctgcttgtttggtgagaaaaattcaacaagagtcctaaataacatttaaatatatatattaaaaccatatccacttttataaacattttctcagcagagtgtagatctcaaactccttacttattcatttgattttgattcgagagatgtcgatgttactaacatgttgtagccattgtaggtaaactgttaaaatctctctgattcatttgttgctgtgttttgtttcttttctaccagaagggttgtcttaaggtaacagaaccaagcag

SEQ ID NO: 40177 - DNA, 342 bp, Arabidopsis lyrata
  Intron number 1 from transcript 923651 (locus 923651) deri ved from phytozome v7.0 (chr-ID scaffold_1; pos 27221660 t o 27222001 reverse strand)
ctgttcaggtatttttaattaaccctcatgcgatagtgactgagctaaattcaagtgatcgttttttttcttttcttttggatctttctctgagaagcagatctagttagattttcttcaataaaaacccaatttttatgcattttggatcgaattcggattgcattgatcataaaggttcagactttggagataatgattgattcagctgttttttttcttctaaattgattgtgaaagcttcgggctttttgattctattggtagctaaattctccaaatgcttctcttaagttcttatttttggttctttgtggtttttacaggaaaaagttcaaggag

SEQ ID NO: 40178 - DNA, 706 bp, Arabidopsis lyrata
  Intron number 1 from transcript 353562 (locus 353562) deri ved from phytozome v7.0 (chr-ID scaffold_7; pos 3708908 to 3709613 reverse strand)
ctcgaatctccttgcttgacttgggaacttcacttgtaattgtgtggcttcattgttctctcttaactacatactttggattttgtaccgcgagaaatccttctcgtcctatttgcgacctcccttttcagggaatgggtgtctctgcacttcaggcgcaatattggaagcttaaaactgctaggaatcttatgcattccaagcggcaatgtttatcatggtggttggtagtctggcaacgacttgctctccacgtcttcgtatggccctaccagagtggtagtgctcattatcttttgggtctttaatccccttgctatagcttttcagtctagctatttttcttattgctttttgacctggatgttgtccgtagctttgaaaacaacataccatggctactcctcctatgtaagtttattggtctctgttgagctctccctagaggagagttttgtatgcctgtaacttaatctaatggagtgtttgttgacaaaaaaaaaaaaaaagatagagaatatagaaacctctgaagtcttctcccttctctctcctcaagcagctcaagtctccgttgttttttggccggagattaatgtttggtggctcctatagcaccaacgttgatcttctttcagttttctgtttgtttctttgtttgatcctcgcagttgcagtttgttttggacggtttcgacaccttgat

SEQ ID NO: 40179 - DNA, 856 bp, Arabidopsis lyrata
  Intron number 1 from transcript 917996 (locus 917996) deri ved from phytozome v7.0 (chr-ID scaffold_8; pos 20452739 t o 20453594 reverse strand)
ttagttttggtatagttggttttgttgctggtgtaagtttctatggttatctttatgatcaaatgaatgagaaaacaatttttctcactcctacttaattttagtaacatattttttgttgttgttattgaactacttgttatgattatgatgggaacagttgaattacaatgattattatgtaattttcaatagattttggctttctattaatgtttttttgtttgtttcgagtttcttggcatttgtttgtcttagtgagaaactcatttcaaaataacgtaagatttgtttggtgtaactcacgtgggagtaggcctgggggttcagatatttgggtcgggttcggatcgggtttagaaaactaagatccgttcggaaattttaaaaattcgggttcggatcggatatttcgggttcggatttggatttactcgaagtatccaaatattaaaaaatttgtatcctattctatgcaaagtattgaaaatactcaaaaaatctataaattttaagtattttatacctgaatctaaccaaaagtagctaaaacaatcaaaaatatcttaacatccgaaaaatttagacacttaagttattacaagtataaatagtacaaatatattatatctatatatttatatttcagatatgttcggatacttgttcgagttcgggttcgagtttttggattgtgaagtttagaattcgttcgggtattttaaaactttggatttgggtttggatcagatttttcaggtcggattcggttcggtttttcgggttcagatattttgtccaagcctacgtggaggaaccaggccccacgtgccatcttttaccaggttgtaatccc

SEQ ID NO: 40180 - DNA, 729 bp, Arabidopsis lyrata
  Intron number 5 from transcript 471067 (locus 471067) deri ved from phytozome v7.0 (chr-ID scaffold_1; pos 3680177 to 3680905 reverse strand)
ccaaattgctgcagactgctgaatcaaggtgagctatcttattaagctatatgcttttgaattaagtatttccttgagtgtttgcacacaaacttaagaaatttcttgggtgaacaaagccttggtgtgcgtcaccctggctttctttagttaaaagtttacagatactgggtatgagaaaaaaaattatttgtatgcaactttgtattctctttgttataccattcttaatatatatatatatatatatatatatatatatatatagccaatcaaattttatgttacttgtagcattcagaaagagttgttaacggctacttattgctaaattagcattcttgatgaatgatgttatgtgacaatgaattatgtctctgtgtttgcaaatgataatgatcgttgagcaaatgatcatcaactattttccactaggaggcctatctgtctatgaatatgcatatgatcattagaagcttgtctccagacttgtttacctagcttttagttgtaaatcatgcacttaagagatgtgtgaaccttaaaagacaaagatgtgtttgaaattttcatcatgttaacctattagaacacgagccttaaagttaatagactgaagatgcccctgatgtataactgtcacagtttctattataggtttgcttaatttcctacattactgatgtctgtgcagaaatcaggagggtctctagttttcctgatcctgat

SEQ ID NO: 40181 - DNA, 427 bp, Arabidopsis lyrata
  Intron number 1 from transcript 477645 (locus 477645) deri ved from phytozome v7.0 (chr-ID scaffold_3; pos 1286135 to 1286561 reverse strand)
tttcagagacgaaggtcctcctagcgaagtcgtgggttcgtttctttacttgacatagcttttacttcttcattgatttttgaaagacactattaaagatgttggatttgtaatcggagctttgaaatgaatgagctgattcttgaatgtgtagtagtaatgtacaagaactaaagttcaacttttatcattgatttctcattgacgaatcgtatcatgctactttgattacccttgattgaacttagtcttgttggaatctatgtagagaaaacactccactaagctattttacaagtatgatgcttttgacggatttgtgtgtcttgtttattattagtttcagtatatgcttgtgaagacatttcctcttgattcgtttgtgatgaggttctttctttggttacagaggtcgcaactttccttc

SEQ ID NO: 40182 - DNA, 257 bp, Arabidopsis lyrata
  Intron number 2 from transcript 947896 (locus 947896) deri ved from phytozome v7.0 (chr-ID scaffold_7; pos 23301237 t o 23301493 reverse strand)
ttgatactctaagaagctaccaggacttgcctccggtaatcttcttactttgttttcattaaatcgaaaaacctgataacatctctggttctccaagtcttaattaaactgtgattgttcagcattatcagtctccactttattattggttattgctagtgtcgcttcacagtgtatatatatatcatttccttcagtctctttttttaatttgacttatttgtttatgatttaattggttttgtctttacagtttc

SEQ ID NO: 40183 - DNA, 535 bp, Arabidopsis lyrata
  Intron number 1 from transcript 947896 (locus 947896) deri ved from phytozome v7.0 (chr-ID scaffold_7; pos 23301597 t o 23302131 reverse strand)
ccgacgccaccgtcctcggctctcctctcaaaacggtcagcttttagttttctctgttagatctcgcctttaagtaaagtttctgtatggaccatttgaatttgcgttagtgatatctggagatttcttttgtttaagtaagattagtttacatatgaacacagatgactctgtctcaacaagtgatcaaattcttccaaaacaagaacaaatggactgataaagctttgtcagaagctatctacttgacccatattggctctgatgattattgggttttatagttttggttgattggtttctagagcttgtgcttttgcttctcttgttgctgtatcttctgttacaatttctctttcgtttttcatattgaatcttcttgttgctgcatcttctgttagtgtgtaagctgttgttcttctctttgtttggtttatagttagttttcgttttggtttcttttattgactctaagactgaatttggttcctttaaacaacctgacagagtcaaaatgaatggttgctgatagcag

SEQ ID NO: 40184 - DNA, 494 bp, Arabidopsis lyrata
  Intron number 3 from transcript 355442 (locus 355442) deri ved from phytozome v7.0 (chr-ID scaffold_7; pos 14698929 t o 14699422 reverse strand)
gcggcgacaaggtaaaaagcgaacaaaactcgattttcattttttgccgccgctcacaaacacgaaaggcgcttttaaccgctagggtttatccttttttatttattttaaaaataaagtagaaaattaactaacgatcctagccgttggattaagatcctcggatccatttttccgttaaaccaatcctttttggtcttttgattcctcgaatgtagcgtagagagaggtttgcattcatcgccgctcacacatgctctgtctcttcactctatacaactttattttttatcctaaaattccacgtcagtatataactaaccgcgataaagtttattcttcacccaagggtaaattagtcattctcttgtgtgtacacacatatcgaatttcacttccgttgggatgagaacacgtgtcataaagtttggttaatgtatgagtttatggttggtcgcgtcatttgtggtttatttttttttgtttcaggcttg

SEQ ID NO: 40185 - DNA, 535 bp, Arabidopsis lyrata
  Intron number 1 from transcript 897508 (locus 897508) deri ved from phytozome v7.0 (chr-ID scaffold_5; pos 12839812 t o 12840346 reverse strand)
tcttcttgagctcgctgcccctgttaagatctgcggtatttaacttctgtctcgatatatcagctttttttttctctgtttgttcgctttgggatctgagaattttcatgattgtgtagtatcatcttgccttctcttatttagtttttaatgaaaaagtttgcatttttcttggaggagatgagtttagctttgtgggaataggaaccaatagaattgaagttatgtgggaatgtagaatagagaagagagagagagatgtaggttgattttggttcctgtcgattcataggttgattgtaacatttgtctctaggcaattgatagtctcggaatcttggaggtttgcgtggttttgtgagagaaagcaagttcatttttgatatttctcgacaaaaacgcattgcttcgatattagcaaattctcttgctgctatcttcgtttatcttcaactgaaatatcttttgtgatgattccggtgaattcctaggttgatgtgtagcttttttctttgtatcgtttcaggtgatattc

SEQ ID NO: 40186 - DNA, 755 bp, Arabidopsis lyrata
  Intron number 1 from transcript 346015 (locus 346015) deri ved from phytozome v7.0 (chr-ID scaffold_4; pos 20605431 t o 20606185)
gtggtggtaagtgtgtgctactctacttattagcaaacttctctccttttcctctttattagatctctctctgttatgatcacttgattcagagtctcaacgtttctcctctgatctgtgttgtttttcctctgtttgtaaaacagatacgcttgtgttttaagtagatcgattgggaaacccaagaacacaaaaagagttcctttttctaagtacccaagaactgtttggttcttctgagtgattggttcatgtgtccgagattctgatgattggtattagctacatataggtgagtattatggatttaaacagttttgaattattgtacttgtttagtttttctggagaagcttagggagattggaaacaaattaagatcagtcttttttattacatttgtttgctcatgcaatgtaattgaaatgaaacttaaaaattaggcttttcttcttgtttagtttattgctggtttaggtttggaacagtttggcataagaaatgcaaatgttatatgttgaaggagacaaggaatcttgttttcattttttaagattttgtttgtgctttccactgttgttaactatttagatcaacaatgtgaaatggagtgatgttacctgattggttatttgtttatagttcgaggaatgacatcagggttgtgttttaatgagcttttttataatgtagcaatgtgtttttaacttgcaggtttccaaattttgtactagtgtttgggatttatagagagt

SEQ ID NO: 40187 - DNA, 749 bp, Arabidopsis lyrata
  Intron number 2 from transcript 483224 (locus 483224) deri ved from phytozome v7.0 (chr-ID scaffold_4; pos 20217697 t o 20218445 reverse strand)
tctacggcaacgaggtgagttttttttcttctttaaagtcaattcttggttttggatctacaaaatatcaacaattcgggttgcttccttcaatgctaaatgaatccttaatcaatcgaatttgattttcgacaaattttctggaattttagtttacaacaacccggttcagaatatccaagtagatttttggtttggtaagaaacttgaatagcttctggatcttgagatccaagaaacttgggcttgaggtttgagtggttgaccaatcctctacctaattgtcgccgcctagtcgctagccaagtaacttggatttgtttactacattattttgaacaattttaagttcatcccataaaacaataaaattaaagtatagtatttaacttgcattttagtaacgatgatgcatactcaagaggttttaaacatgttaaattgtctttgtttatttgtcttagggggtgttattcattcatggacttaaagtcaattcttaaaggtttagatttgatttctgatattgtttttaacaatctgtttgtgtggagttcaaaatctctgcagtatatctaggattatgattctaattatttactcatgaaatccaaagatgtttcatttcaaatgatttgatatacaaagattttacaagtcttttagttttgaataacactggattttaatgaagcataaaagaatattttggcttctataaagtaaataattctttttggttaaggtgt

SEQ ID NO: 40188 - DNA, 326 bp, Arabidopsis lyrata
  Intron number 1 from transcript 344798 (locus 344798) deri ved from phytozome v7.0 (chr-ID scaffold_4; pos 14135047 t o 14135372 reverse strand)
cttagccctcgtcataagggtcaaacctatatcgggtacttctttctctcatctctggctttcgttttttttttctttccccaattcgcatttggaattgaagattctgttggatcactgatgttgtggctttttgaatcaaatctgaaaagtttgattgataaaggatttacattttttgggtttatttgattgaattctttgtcttcttaaatttgatcaaatagaagatttgacggtttaatcagactttcggatgtttagtaattgattgcataatctggtttgcaggttcacggtaaacccgaggaggagaataaggcagc

SEQ ID NO: 40189 - DNA, 833 bp, Arabidopsis lyrata
  Intron number 1 from transcript 331131 (locus 331131) deri ved from phytozome v7.0 (chr-ID scaffold_8; pos 6010888 to 6011720)
attatctcaattcttccttttcttctgctggagaggtttggttttcactcctctgttgttactaaagttgttcaaagttttggtttttatgtgtttgacttttgtgattttttatgttagtgaagcttggttgcttcttttagttgtctagtgtatctttgtttgctaaagttcttttttttttcttaggataaagtatgatttttgaaaggattttgttttcatgaaactatccagtgaatggtctgatatgttattcaaagtcttgatttttatgtgttgacttttgcaatattgaagttagtgaagctttgttgcttccattagttttctagtgtatcttagtctgctaaagttatcttttttatcaggataaagtatgattctttatgaaatctgtattcatgaaagtatctagtttgtcgagtttgttatgttctctgaatttgtttgagtctgatattttaatcaagtcttcgttttgatgtgttgtcttttgcaagtttgatgttttggtagcttttgttagaatacaatgttgggaaagcttggttgcttccaccagttgtcctctgtgtctttgtgagcataaagtatgactctttaaggggtttagctgctgtaatgtataataatactgaaattgtccagtgaatggcctctggtgtcacataacttgagatcatttcatttccgaatctgatgtgttaacctctgaagtatgttttatagttagtttgcattgactttatttgatctgggtctggtaacttattgtgcttatttgttatgatgtagatttcgtcggttaaggttatccgcaataagcatac

SEQ ID NO: 40190 - DNA, 398 bp, Arabidopsis lyrata
  Intron number 2 from transcript 948939 (locus 948939) deri ved from phytozome v7.0 (chr-ID scaffold_8; pos 5602307 to 5602704)
catcgttgatctgaagaaaggcgaagtcaccaaaggttagctttttcgttttgattatggcaaaatttgattttgggattatggcaattgggaattcaataagcagaatctgaaaatttgatttatgataaaagtgaaaataattgggaatttagaaaaaagagaatcttgaaatttgatttttacaccaaaggttagctttttcttgttgattatggcaattgagaattcaaaaaagagaatcttgaaatatgattttacactaaaggttaggcttttcttgttgattattgcaattgtgaattcaaatgaagagaaactgaaatttttgttcaagatgataagtaattgatttttcgactttttgtttatggttgatctttgaaatttagggaaat

SEQ ID NO: 40191 - DNA, 430 bp, Arabidopsis lyrata
  Intron number 2 from transcript 478591 (locus 478591) deri ved from phytozome v7.0 (chr-ID scaffold_3; pos 4955327 to 4955756)
aggaagttcgcggtctatctgagaaacacggcaaggtaaacgcatctcatgaatcagtgtcttaatattcatatatcctctctttataatcatcagtgacaaatgcgtctgctttggtacacaaaaacgttcttttatgtgtttcactgttcttttgttttactggactttatctgcctgcattacttcaagtagtatactatctgtctaaatatctatcatacagatagtgtgccaagtttatatggtttgatatcattgtaataaaggagaagggacgagagagtgtaaacggatgtttgaatctatttgtttgtatgcttttcgattgaagacctttataaagtttcaagattgcacaagattcaatcgagtctgtttttaccttcgtgcaggtcccaggactagctgtagttattgttgggaaccg

SEQ ID NO: 40192 - DNA, 573 bp, Arabidopsis lyrata
  Intron number 1 from transcript 900606 (locus 900606) deri ved from phytozome v7.0 (chr-ID scaffold_4; pos 12696790 t o 12697362 reverse strand)
tgttgacttctggattcaatcttgatcaaccaaacacgtttgcatgtgctaggattcacaagatgttgaagttgggtctgacattgatgactgataagaagatttcaagcttacgggggagattgttggataagcttgaatttagacttgagaaataagtctttgtttaagagataattatgtatattttaggagttatctaaaatatactcctaatcaaagtaggaatatgtctatgagttttatgtataaatatgagttaccaaagtgtggtagaccataagagattgagagattagagctttaggttttgaggaattttcctaaagaaataaagagagttattctttatatttgagttcttaatctttctttgaacacaagaggccgcccgcggaaaaaaaaaaaggccgctctagaaaagtgtatacttataaaaaaatttaaccataaaaaaaaaacaaaaaacaaaaaaaaaccttctctcacgcttcaggtgattcgaactcatgacctaagatatgtggtgtatgacataataccactaggctaccaaaacacattggtatttga

SEQ ID NO: 40193 - DNA, 488 bp, Arabidopsis lyrata
  Intron number 1 from transcript 496220 (locus 496220) deri ved from phytozome v7.0 (chr-ID scaffold_8; pos 19670109 t o 19670596 reverse strand)
tccctcatagtgttgtgagttttactttcttttgaattacgtacttccttctgatcaattcatatgtaatataaattgtttaatttgcatacgatttgttaattcgtatcattcaaatgtagattaactaattgtttgcatacaagtccaattatatatgaatcttaaatctagtggttacctcaaagttttcgagttaattagggtgacatcacgtcggagtaaaagagttgtattaaccttcatatataaaatcagtacgtgtgtttgtcttatgaaaatgaattgatcgactttaacaaaaaaaattgaattgatcgtagcattaatgtcacattaatctgatcagttgcttttgcataattccattgttgtatgaatgtctatgttttgaactatttttctcattagtaaaaacgaagaatctatgcttactgttttttattttttggaaatttgttgatgtgtatagaggacgaaaaagctaa

SEQ ID NO: 40194 - DNA, 488 bp, Arabidopsis lyrata
  Intron number 2 from transcript 907761 (locus 907761) deri ved from phytozome v7.0 (chr-ID scaffold_2; pos 7825774 to 7826261 reverse strand)
aggaggtatatcaaagttattttatgaccagatttttcatgataatttagtttcttatttgggtaggagaaaaagatactcgcttgtttcatatgtgcaaggtggttaaatattgatactttgttttgatctcataggaagctttatatcgtagatgcactttaagtatgttcttaggttcttctctttggcaaagtctgcattttttgttttggactgtttttttattagtgcgattaacatagactttcatgtttttacgggaagcagcaaaggaacaatgattgtacaggaatgggattagtatttagccaagttttggcaagttgtactgccgagtgaaaaagacacacctgaggctaactccgaccacatcctgtagattttgtagaatggaagaaaagttcaatcttttttgtagagttttaggtcttcattattatttttgttcagtcttgataaagctgtggagctaaattatcagtgga

SEQ ID NO: 40195 - DNA, 519 bp, Arabidopsis lyrata
  Intron number 3 from transcript 490193 (locus 490193) deri ved from phytozome v7.0 (chr-ID scaffold_6; pos 22940514 t o 22941032)
gccactacttgccgtctttggttagttctgagcttgttctcgagttttatactctgttaccgtcgatgattgtgttatttcttgatgtatagtcactgattaaaacttagaatagggttcttggctaggtagatgctcgttagtaatgagtcttcaagtgtcataaaatgatcgcagaagaacgaaatgcagcttttctgcacttgtttggtgttagatggatctgttagtaacgattctaatgtgtccagttgtatacttgtattgattcaatgctgaataagagttgattcaggaatcaatggaaagagtcctacgtttggttttggctcaaaggcctaagaaaaggcttaagatttcatagctgagaaattgagtggtttatagttaattgataaatgaacagaaaaacgtggttttgtcactcataggttctgttttgtttcctcatttttgaatctttctcgtttcatcttttcgatagccagtggtaccaaggcaagctaggatctctcagga

SEQ ID NO: 40196 - DNA, 980 bp, Arabidopsis lyrata
  Intron number 1 from transcript 935946 (locus 935946) deri ved from phytozome v7.0 (chr-ID scaffold_5; pos 731582 to 732561 reverse strand)
gttttgattttagggtatgagatattttttttatgtctacgtttattacaatagttaggtttctttctaaataaggctttattgaattagtgcaagagtttttctaattaggatattctacaaagtgatgatgcttatgggtttttgggtttcacggagatttattgttgattagaatatttaatttttttaatatgagttttgatttctcatattacgggggagttgtttggaatgctcttgtttttaggtcaaaattttttaatccgatttgtggactatccgtgataaggacaattatttgtggagttgcaagatttgcacccacgggatgttgttattcccaatttaccaagactaaaggcgagctgaagttccatccctcttttgaagtttgttgtaccccgaggagtgtttgacatgatttgtccttcctcgacatgatgtccacgacataggtgttccgctttgtgattgcatattttgcgttttgcgtctctcacttttgtcgtgaagggagtattggagatacgcaagatgtgtatcttgcggaccaagtaatatggatcgttaaagtccattatggagtgaagcccaaaccgaagaatattctagatctctatattacctcttgtacaagctatatacttatgtgtttaggaaagtttacattatatgggtgttagcattatgttaatgttgacattatatatatgtatcttgtattttcatatttgatacaactcaataatatattttattccataatatttgacagtaaagatagcgttacgggaagatataaactagtatggctatataatacttatcctttttttactactacgtgtgaggttttggatttagaagaaaaaacataggttcgtgaatactaatactcttgatcgtcataatatcttgaatcataatctgtatagcgatcaggggccagtgtttgcagacggatcaatctactgggt

SEQ ID NO: 40197 - DNA, 505 bp, Arabidopsis lyrata
  Intron number 2 from transcript 490231 (locus 490231) deri ved from phytozome v7.0 (chr-ID scaffold_6; pos 23229095 t o 23229599 reverse strand)
cttgtcccttacgctaccttctttgttcctcctgggtctgtttacttttcctctgttcctctatttgatcccaattctgttctcgacgcctgttaatgagattaattgattttgatttctttcttttgggacatgattgcatcagggctagtctttgtcttatgttttgttttggtgaagtttagtgtatcttctgaacaattacccgaatgagactcatggattttgctttcttcttttgaacattgattgcattagggagaaaatctagagactctttgtattgtggtgaagtttgaatttgcttttgtatgttgttagcttttggttttgattcaatccaatatgtagttatgaataagtttatggcttctttggtgttactgagatgtgagattgatgagacttgatatagtttcttttcatttgttggcccggtttttaatttctatgttgttttgaaaatgcagaactggaggtggaggtggtggtactccagccaaag

SEQ ID NO: 40198 - DNA, 816 bp, Arabidopsis lyrata
  Intron number 1 from transcript 480580 (locus 480580) deri ved from phytozome v7.0 (chr-ID scaffold_3; pos 21719927 t o 21720742)
ctctcgccgtctatctcaccggagtacaacaagtggtaaccacctctacttagatatatatccatgcatattggcgttactgttgttgtttttactctttaataacttatctcttttctttgggggttgatgactctttaatcttttgatcataacaaatgcttccaaacaatcttcaatgtcttcaaaattgataacatataacaatgaattaatcgattctagttgtttcattaataaaggaaattaaaattcgaaaatatgaatgtgaattctatagtctacgggaattatttcattaggatgaaaacaattctcaagaaatattcaacgtcaacccgaatgttaattattacatttgatttgcagtaaattaaattgaagataatttgatagtgactataccaaactaattatagtttgaggttatcagtaattgatgacatcatgcagttaagctttttgatacatgatatatgtatgttgtgcccaagaactaaatcaaaataaaaatttgcgatcaaaataaaaaatcatcagaaattgtgacaaagtttgtttataaataaatattttcaaaactttgtagcatgcgtttaaatttttggctaggatagtcctgaaatatattcagttttctaattggcgttttagtttcaagtagtgttttatcaatttctatataaatttagaaattgactgaattttctaataaaataatcttacgaaaattaaactaattaatgtaaacttttttttttctgatggtgaaaatggtaaaaaaaaaaaaaaaactagacggtaggacttgggaca

SEQ ID NO: 40199 - DNA, 827 bp, Arabidopsis lyrata
  Intron number 2 from transcript 945600 (locus 945600) deri ved from phytozome v7.0 (chr-ID scaffold_7; pos 7350393 to 7351219 reverse strand)
cttcttctctctcctggtcctggtaagggaatttttgattttttagactccagttttacattttaccaaatcggtgattgattctattgcgttgattttgttaaatttgtcttggttcctccattttcgttatgaacctcgtgaaatggtgaattgttgttttgtttgtttgtttgcatcagaaacctctctctctctctctctctgctctctgcaaacacacaacttcctgatgcgtttcgtcctttttgtttttcacagcgtcgtcagtcttttgcacgtctgtgttttcttgcttccttttgtttctttgttcgttatacttttgtggaccctattcatgaattttgattgcctcatgacttatctagagtaaaaacaaataacatcatccttaattgagtaatttcaagcgtcgaatttacttctgttgaatctctttcttcttgtttgtttgaattattaaagaaaaaaaaaagattagttttgatgacttgttgactattgactggagagtgcatacatctgtagtagagcaatgctgaaacagcttcctacttcatccagctgtcaaattaatagtacctctctgtttttttcatttttcatactccaataaatttttactagaaaatggggttagaaagaacgagtcttgttgccaaaaaaaaaaaaaaagaacgagtcttttagcatttctatttctcgtatccaataatttcaacttctaagcaatgtagctactagtaaactaaaattcctctctttttttttgtgtgtgtgattgtttagaaaaaggaaaagcagagagcagggcagagccggag

SEQ ID NO: 40200 - DNA, 748 bp, Arabidopsis lyrata
  Intron number 4 from transcript 482816 (locus 482816) deri ved from phytozome v7.0 (chr-ID scaffold_4; pos 18428167 t o 18428914)
gacagaagaagaacacaggtaaactaaatcatctctctacgttaacgtcaatgcttttcttctctagatttggaccccttacactttattttataaatatacgtacgtctttttcttggaaacgtgtttatgtatacgtataaagatacgtatcgtataaatatatatatatatatatatatatatatatatgtattctataaaattaagatatatagacatccaccaaaacaattgtaactttagtgcgtgtcttatgatctacgtattggttagacagagagacacacattattttgtagtagatacttcacatgtttatattatcttaaaaatttatttaccttttttatgtatcgagtttagaaatccattggtaaactatatacagagcagatgaatttttgtttcttctaggctcttgatttgtggaatgggtttaattggtgtcttggtgcggttatttgttttgcacgcatggacattgtagtgggacatggaacactgatataaacacgaggcatgcgattttattttggctacaactatagcatctagtttagttgtttgtattaatgtcgtattaatgtcatgctcatattaaaatctcgtataatgcatgttgttgataaaaaaattattgtttttcttatatgaagttattgcttatgtgttaagagtcgatttggtttatttaggttttggtttgattatggtatggttgatgaatgtgtgcagacaatttctc

SEQ ID NO: 40201 - DNA, 356 bp, Arabidopsis lyrata
  Intron number 1 from transcript 495062 (locus 495062) deri ved from phytozome v7.0 (chr-ID scaffold_8; pos 13650475 t o 13650830)
ccgcataccctgccgctgcttctgccaccagccaggtactataataatatctatcttccaaaaccaatagatagagatatatattttttattttttggtttatcaaaaaaagatatatatatcacttgtggttggaaaaataaatgatatatcacttgttactttccaaaagatatagaaaaaaaggtttatagtttctttgatcaattacatatttttgttaaattaataaatcttttggttgtcgaaggtttttttttttgttttttttttgataatattacagacagatgatttttttttttttttttcaacttgtagtttcaagcagctgtggccacgctcaacctagccat

SEQ ID NO: 40202 - DNA, 1020 bp, Arabidopsis lyrata
  Intron number 1 from transcript 475748 (locus 475748) deri ved from phytozome v7.0 (chr-ID scaffold_2; pos 11208843 t o 11209862 reverse strand)
ggaaacttggaagtggggagattaaagcgcgtgaggtaattcttgtttttaccttgagttttggtcaaacaattttaccgcgttagatttgttctttgaccttaaaatttaagcgtacaaattcaacttaatagaatctaaataagtgatataagcaacgagcataagataatttcaactactttctagtcgataagtcaaccggttaaatctagaaccatgttttcaaattctgagttcgaacaccggttaaaaactacaattagtatgttctactttgaagagatgtatgagtcttggtccggaacttgtgagattataaaaaattattaataataattttagtgtcaactatcatttgagggaaatttaagtattatatcccgaaattacgcaaattgtttaatttgtttattggaatagagagagtataaattgatgtagaagacaagaaacagaatttaagttgttaggctttgctttggaatttgattagagttatataattattattgtaacccactaaggccactagggtatatgtaacttatctatttttgtcatctacctacgtgagtatgacgtaagtctggtcatatataaaaacaatttacataaacacaatcacatatgtatgatttttttgtttaattcacatatgcatgttaatatagttttatcggagcaggagtagacttataaatagattgacaaaggaactcgtaaatggattcacatactcttgaaattgtgtatgtcttagtgttaatattattacattgtcttagaaacacatggttattacttcatagaatatctctgatttaaaagattgatgaaatatcatatcatagtatcataccaattgatcaagatcctctcgatcatcaaatgatttgtcggtttgttttggctaatcatatattataaattaataaataattaagagtcaaagaagtaattatattaaattaaacatgtgcagaagcaggtgagttttgccggagaaggtggacggga

SEQ ID NO: 40203 - DNA, 306 bp, Arabidopsis lyrata
  Intron number 3 from transcript 485883 (locus 485883) deri ved from phytozome v7.0 (chr-ID scaffold_5; pos 17153507 t o 17153812 reverse strand)
acctctcctcaacaaggtccatcttaattattatttttataataaaatgctatatatatgtcatatatgaatttttttttatgtggagatatgtctaatgctaatgttttcacttacaatttggaagaaaaacaaaaacaaaaacaatttgccatagataggagacattctaaggattaaaccttgatatgaacgaaatcgagagaccagtactttttgccattattcaaacttattagaaatcatttttcaaaaccaatattaacattatcatcaatgatgttttgacatgtgaaggaacaaaaa

SEQ ID NO: 40204 - DNA, 290 bp, Arabidopsis lyrata
  Intron number 2 from transcript 483289 (locus 483289) deri ved from phytozome v7.0 (chr-ID scaffold_4; pos 20559785 t o 20560074 reverse strand)
agaattcataaaccggctctggaaattttctgtaggtaatctctcgttttcttctgctgagtttaaattttgttcttttatattatacattgacagtgattattgaaatggttgagtttaatggtatgttttagttttggtgtgttctttatccttatgtttatggttttgtgtgttaaattgtttggttccatgtcatgctcattcgtctaatttttatataagataaggtttgattgtgttttcttttcaagcaggataacaaaggagtccattttttttgttaattg

SEQ ID NO: 40205 - DNA, 363 bp, Arabidopsis lyrata
  Intron number 1 from transcript 934986 (locus 934986) deri ved from phytozome v7.0 (chr-ID scaffold_4; pos 20249714 t o 20250076 reverse strand)
tccctccttctgcttcatcttcccataaatctcctgtatgcaataatcttatttcttgttcattactttgatctcaattatttgctgtagttttctcgattcatgttctttggtagagatttgattgtttctacagtaaaaaggaaccctgagaatttgttcccttatcttcactcatctgatttcatgtctctaatttgaaccaagtattactggtatttgtgggtttcttccatattgttctaaagacgaaagcatgattgtgttttgagccttgattttgttgggatgccaaaaattcatgctacttcatgctgttgattgaaaggtgctttactggctttctggcctcacctgcacgga

SEQ ID NO: 40206 - DNA, 509 bp, Arabidopsis lyrata
  Intron number 1 from transcript 487072 (locus 487072) deri ved from phytozome v7.0 (chr-ID scaffold_6; pos 813479 to 813987 reverse strand)
gggtacgtatctcctctcttagatctatccttcgtgttcctatctcatttctctcttttaccggtttattgatctgattcatttgttgtttccatgaattgtagaggattttatagagtctgctgtgttttttcttattgttggaaatggtttcattattcgaatatttacttatggtttttgattgggactgattctatcagcaattcgtcttcatttctggatatgtttgctacatggtttttatgtttgtatacactaaagagatatgagctaatctggagttctagtgtggtagaaaacttgtgatttagttatctcttaattgattatttatgttcttggtttttgaatctcactcttgatgaagtagtagagagaaatgttctatcttattgttaatacttggatgaattggcttattggtggtctgagtttcaactatagtttatcgaatgaagttctgaaacgttattttgtgatgaaatgttaacagtaagacacgtggt

SEQ ID NO: 40207 - DNA, 495 bp, Arabidopsis lyrata
  Intron number 1 from transcript 475086 (locus 475086) deri ved from phytozome v7.0 (chr-ID scaffold_2; pos 1606775 to 1607269 reverse strand)
ttgaacctcgtctcgctgaaattcctggtaatatataagtaaacttgatttcaattattattttgaagtattaaataaaggaaaatatttatattttatgttaaacatattctttttttttttatattaatcctcaaatttttgtgaaattttgttagatattgagaattttttttgttttttagttgatattttttaattcaaattgaaaattcttatacattaaattaaatttgaatggtcaaattatattatttacaaaaaagttgtttaatattaaacaatgaaaaaacaacattttcgttttagatgattaataatttcaaatgataaaattatatgttttggttaaaatgattgagtaaaaaaatctttgaagaaataaaaaagaggaattcagtattggaatttcatgaaacttaagactgaatgagaagtgtgactgtgattttttctttggaacttttaggtataagttcttggccagggaaagag

SEQ ID NO: 40208 - DNA, 455 bp, Arabidopsis lyrata
  Intron number 2 from transcript 489532 (locus 489532) deri ved from phytozome v7.0 (chr-ID scaffold_6; pos 12473136 t o 12473590 reverse strand)
ttttcttcttcgtcgacattgaagaatccattgttgtttacagagagaaaaaaaggaagcttttagtttcttatcaaaaagcaaaaactcttaggatactagtgaacacggttcatggttattatatagaatttgatttccatatttgatactaaaccaagagagagagaaattgagctgtgagttttatttccttttttcttaagagtatcttttcttcgttaaatgatgatcatttaatctaaccgttgggaaattccagtaattgtaataaaaattatttatttgttttttacattaaagaggaaatctaaattagatccgatttccattttactaaatatcaatctgaccgttgtacgtaattaacattttctatataattttactagtaatgaattaaggacagcaaaaacccctaagatgaggtaacttcagcatcaagaaaagcctac

SEQ ID NO: 40209 - DNA, 483 bp, Arabidopsis lyrata
  Intron number 3 from transcript 481248 (locus 481248) deri ved from phytozome v7.0 (chr-ID scaffold_4; pos 2206593 to 2207075)
gttggagtgatcttgacttttgtctcaaaaaaaaggtattttagttcatgcataataatttacattttcttgaaaagttcaagacattcagaaacatattggacccacaatttataaatatatgatagattcaacaattatttcatgtacttttcattaatcaatctgaattgtcttatttaattgtgatattttcaaattgcaagatccatataatttgttggaacttttaaaactttgggggtggtgaatctttgttggaaaaataaactaaaagttgggtcttcatgaaatgtatttgacattcgtcatgtgattatgtagaataatttggtcaagattcaatgtaagactgccttaataaaatatttaagaggtcaaacctcaaactaaatccaacctaaatcatattttgaaatagtacctaattaattttgtatttacttcttaatcacaaacttgtgtgtgtgcctctatatgcag

SEQ ID NO: 40210 - DNA, 839 bp, Arabidopsis lyrata
  Intron number 1 from transcript 312408 (locus 312408) deri ved from phytozome v7.0 (chr-ID scaffold_1; pos 5932670 to 5933508 reverse strand)
gaagaggaagtggctgcgaagaagcaagctcaagggtgatttgattgagaggatttaggtaaatttttcatggtttcttgttccatgggaatatcaaaatattggaatttgggagaaattgttctttaggagcagaggaaatttcgtttttagattcgtaacttatatgatcgatcatttttgtgtgcgaataagttgattgattgagatcatttgaatgattaagagaaaatttgctcttaaaggtcagtactttgttgatccccaagactgtttctgttgattcaatagataatttgctctaaaggttattactttgttgatacccatgaatgtttcagtgaagaaatcttgttttctttgtggtttgctaagctatttcttcatttgaatgagatttgttgcttctgaaacagaaaaggccagaccttttgttgtgatagcagcactttctagtttgtccaaagatcaagtttacttctttgttgttttactttgtgcttaatacactagcatttgtcttcccacttgtcattcattatcgatgacgttttgtttggtcgaagatgaaaatatttacaaatctcagttttgcctggtatgtgtgtcgtgtttctcatttatagggagatatgaaacatttgcagaacttcatctctgttatcagctttcatacatgaccatatgattgagctctaaaggtcattactttgttgaaacccatgaatgtttcagtggagaaatattgtcttggtttgctaagctatttcttcatttgaatgatatttgttgcttctgaatcagaaaagttcagaccttttgtagtgatagcttctggt

SEQ ID NO: 40211 - DNA, 551 bp, Arabidopsis lyrata
  Intron number 1 from transcript 343836 (locus 343836) deri ved from phytozome v7.0 (chr-ID scaffold_4; pos 1253975 to 1254525)
ttggaagccgccggttggagtgctcagaacttgagccgcttgccatcccttagcgtcttggatagccttgagaactgttccttcaggagagaagactctagcattgaagatttctttgtttctggtaagccacaaagtccagcagatccaagggaacaaaggaccacatgtgagacccacttgtggtaagtataaaaccttgtttccttgggagatccttgctttgattccttgaatgtccccagcagaacaggaggtgttcaatgctttctagagattgttgttgggatttaagttattaattatttatctaatatcttcacaaaaaaaagtattgactttttgactcaaaccataggtttactaagcttaaaaatgaaaattaaagtgtgttttatactttctttattctaataaaaaatacataacgagaagctaagctcatacattttttttgtataacatattttcgaaaacaaattccgaaaaacacacaaaataaattaaaatacatagggtatatatataccgagagcttgtggcgaaagaga

SEQ ID NO: 40212 - DNA, 402 bp, Arabidopsis lyrata
  Intron number 3 from transcript 887387 (locus 887387) deri ved from phytozome v7.0 (chr-ID scaffold_190; pos 11707 to 12108)
atcaaagctgcttacggtctaagcaaaatcagctagtaaggagatccatgtctccctcaagagttattttgggaaaatctaacatgcacttatggagatacctccaccccgccaagaatcgtttctttgtaaggctactcacaaacattgtatctatcgattacctttttgatttttttaaaaaattttttggtgtcaataattagaaatttgtcagcaagtggattaactgggaacatagccccagtttttcagaatctaacgcaaataaaagaattgtaagtattttatattcttgacttatcaaatcaagaatgatttgtcccgaagcgacgtgaacgccaacctttttgcatttcttttgcgtgcgtagggatttttctaataacagtttgactggaa

SEQ ID NO: 40213 - DNA, 179 bp, Arabidopsis lyrata
  Intron number 1 from transcript 476043 (locus 476043) deri ved from phytozome v7.0 (chr-ID scaffold_2; pos 13635763 t o 13635941 reverse strand)
ggttcgtatcttcttcatccgtttcattttcattgtttacgttttgattattgatacactatctatgtttaagtaattatttagaaaagtataaattttttgaatcctatttcaccttcgaaacatattttgtatatgactcagatttcgcatctttggaaacaacaactttagaagaa

SEQ ID NO: 40214 - DNA, 756 bp, Arabidopsis lyrata
  Intron number 1 from transcript 915258 (locus 915258) deri ved from phytozome v7.0 (chr-ID scaffold_8; pos 48245 to 4 9000 reverse strand)
aaacccttgccgcaggtaactgttcgtccagcgcaattagtctgtgagggtagttcgagggttaacgctgctgccggaaaatttaatggaaacctcttgtataggctttactttaagggtttggttagcgatgagaacgggaaggggaagatgacggacgtagtggctgggtttggggttgctatttgtgaccagagggataatttgttgtttgagatgaagggaccattgatggactatggcacgagtcgtcagggagcagagcttaaggcattgatccgaggattaaccgaagcattgaagttggggattaagcatattgttttcttttgcgattctttcccgattttccaatacgtaagtttccgattttcattgtttattcattgaatgtttaatatgaactactctagatttatgattccgactttgtttatgtatttctaaagatgatctggtttgttctctttgcaattcgtttgaactttttgctgattcctttgtcctggaatctaaaagtgtagtgtatattgtaaccattttctaagccactatcatatgtctttggtttgcatttatatagatctgactgcgctaatctttactagttaggagacagtagaccgtgacttctaaggttctatgcttgtgttttgagagatggtttaaattgcaatgagttatgcttctttacctagcttttcctgtcatatgtttgagaagattgtgttttacttgaatgtaggtcacgggaaa

SEQ ID NO: 40215 - DNA, 503 bp, Arabidopsis lyrata
  Intron number 2 from transcript 497297 (locus 497297) deri ved from phytozome v7.0 (chr-ID scaffold_166; pos 2299 to 2801 reverse strand)
gatcgtatcttatctcagtctgtgagttgttttatataacgcttcttaaaaaaaacagagcattttcagacaaaaagacaatttttttctgttctgttttgtctccattctcttaatttcgtcaatttgatcttattcgattcaattccattgaaatttgcaaatgggtcatcacaatttcatgagttaagcacgattttggtctaaagatcacgtttttttttctttcgcaattctcatgaatcataaaattttcagtgggttcaaccaaagtagaatttttcatgcgcaatgatttgtaattatatatatatatatatcttccttaataaaatcgatatgattttcatgggccctataacataatcacaaaataaaaagtttggatttttcttcaagtcaaaaagctaacaattccactgttctttctttgtcttcttcttaattcttatgattttgttattgcagcaagaagtgtcgccacgaacatctggtcggctttc

SEQ ID NO: 40216 - DNA, 748 bp, Arabidopsis lyrata
  Intron number 1 from transcript 924035 (locus 924035) deri ved from phytozome v7.0 (chr-ID scaffold_1; pos 29207319 t o 29208066)
tcatataacggctcctaacatcaccgactgtatttgtaagtctttatctatctcttgttatatgtagacatatagaatcttattcttaaagtttatttgttgttttaaagttttctgagactcattttttattagtgtgtataataaggatatatatatatatattgatttttttttttttagttttgagttttgaaagtcgattttttggagattacatactaggtataatccatggtacaatgtacggttttataataaatatgttgaagcattctacattttagctgttatactatttaaatgacagaagtttataatatgtataatgtagttttttttttttttttttttggttaatgatcatgatgtattcttatttatgaagcttttttgttatagtatgtacaatatacttcttcttttttagttttagtttttatctaattttgttatcacatattaggtaaaccatgtggtacagtgtacagttttatgatttagattatgaagtatatattcttcatttcagttgttataccatatggaaattaatttcttacaacaacaacaataattttcaaattcaattgatttgataaattaatgatatgtatttttcttacaacctacaaaatttttaattaattactgtgaaattttaaattgagttagttaactattttttttttttttttgattaattggaaaagcgattctgcatatacctcgaaactcaacattggct

SEQ ID NO: 40217 - DNA, 588 bp, Arabidopsis lyrata
  Intron number 2 from transcript 920173 (locus 920173) deri ved from phytozome v7.0 (chr-ID scaffold_1; pos 5416358 to 5416945)
attgccaattttggcacagaaatcttggaattaaggtatcttgctcgaaattgttttggtcgtctctgaactgataacttggatctttgattaatcttcctttctgtggttatcgggaatcttgctgccttgttcttatagtgatttcttattttctaaaagcagcaattcaatttccttatcaaatgcttagagttttagttctctctatattgaagaatgaccaagattttgcgtgtttgatgatgaccctaagatcatacaagtctctttgaatgctaagtattcaattttagttgagcatgtggtggctttagatcccttttttttaatcgaacatttctgtagcaattaagttctgcttctttttttcgctgtacttagatagcaaataaatagagaacttagtttgatgaatgcaatgtgatacagtttctcttcatttaagtgggtgtactacttagttcttgtgtctaaaattttggcatgttaataccattgtagacttcttcaatttagcaccaaaatcgtgtttattgattctattgctgatctcttaattgatttgtctatccaagtgccgtctac

SEQ ID NO: 40218 - DNA, 711 bp, Arabidopsis lyrata
  Intron number 1 from transcript 313033 (locus 313033) deri ved from phytozome v7.0 (chr-ID scaffold_1; pos 9227889 to 9228599)
gtcaggtatttttatttggtttttggataatcctactttatcacgtggtgttgtagttgttattttaatttgggaattagttcataaagattagctgtgaatcacgcacgagtctttcaattgtttaaagaaagaaataattaaattagttcttctgaaagcagatgcttcggtttaaaggcttttaatccggttcatcattttcttggattttaagatataaaaatgaaattagaaccaaatttaggtgaaactggttgcctaagataaaaattcttgctataaatctcaaaagttcgaacgtaaaaaatattttatagatttatcaaagtctttaataaacaaaattatttttttacaaatttacttggttgtcggttttgatccggtatggtatcgcatagtacattactacattacataacaacaagtcaacaacaacaacaacagttaaaagtgaggaccacaagttacacgtatgaataatatactaaatcaagtgctgtatgggtcccactttgtcttagttgatttgagtacgtgtacgtctcattcatttagtcagagcagtctatagtaattttcactatgatccctcttcttactgaactttcttacgtataccccaatagtttttgatctttacacacagtaaaccgtatttgaaattctccaggaattggattttccgggaggcaaagtcggttacac

SEQ ID NO: 40219 - DNA, 857 bp, Arabidopsis lyrata
  Intron number 1 from transcript 335330 (locus 335330) deri ved from phytozome v7.0 (chr-ID scaffold_1; pos 8936310 to 8937166 reverse strand)
cctgaaaccgcaaggtccgtccaaaaccttttattttattttttaccaatcacaaatcataaaggacgtaatgcacaaacaatgttcttgtctcactatttatttgctatttttcccaaataaaaaatcttgaaatcaactagatttaattatatcgttcctatagaattaaaattacattatttgtccttctgacgtacacgcagtttcctttgttctgtttatgtgaacgattctctagtttaggagcatatagtatgttatttcaacccataaaaataaaattttgtatgttatattgtttttcaagtaattgacatgaccgttccgatctcacacactgatacacacatacacatattataagattccttaaaagcaatattattagttttggtatatattactagctagatcttaatcttataattataggtatcaattattgaaagggttacaaattagtagttagcttgaaaggatcattgactttctgagggatagataccataattctgtggtatatactcttatccttacatggctacaccaatcatatatatttacttcttttttttttatcactacattttttttttattatattctttgatataatattgacacatacctcagctatcatactaccagctccagctaatcaatcaagttttatcttttcattacaacaaatttaaataatcctcacacgtatacgcttccagttattccaaaaaactaaagaagacagtcaataaaaaaaataacgatttaatttcgtaacacatatttatcaattaaaattgatattgatgcatgcagatacacagcacttgtggaaaacaatatcgtccaag

SEQ ID NO: 40220 - DNA, 364 bp, Arabidopsis lyrata
  Intron number 1 from transcript 949447 (locus 949447) deri ved from phytozome v7.0 (chr-ID scaffold_8; pos 13151429 t o 13151792 reverse strand)
tttcagacaccaatcgttgcctccgaggagccttggtatgctcatcttcttgttttttggctatacatattattttcgttactataaattctaatagtgtttgtttttttaaacgattgtatgttttggatgaatgaaagcaaccatgatgcatgaagaagattcaggtgatgtttcaattgatcttttatctttaatttatcgattttctaattttacaaaaatgttctcaccgagtagaatatacttttgagttttgagttaaatctttcacagtctgttgtggattagcaacgtttcaagccatattaactattgtgttgtggcagttcgaaagattcatataaattggactattgctaca

SEQ ID NO: 40221 - DNA, 418 bp, Arabidopsis lyrata
  Intron number 1 from transcript 473918 (locus 473918) deri ved from phytozome v7.0 (chr-ID scaffold_1; pos 24098178 t o 24098595)
atatcggcgagacaagcgctaagtaatattaatacattctttatttatttatttttattgtattccaaagatcaaagagagatgttccataaacatgttttggaataaattcaactaagttatattttaaaacttaaacaagaaaagttaaattttggcattttctacaagtattaattttttttaaaaaatgttttttttgtgttgacattttatttgtgaataaatggtttgcaccacaaagagtaataaatatcatctattgtatattacttacttactattgaatttatattttcttatgagatattaaactcatttcactaaaaagtatatactttgaatcttgttcttctttgtattcgaagtgtttctcactatctattatatctgcagttcaactcgatttgcgagacag

SEQ ID NO: 40222 - DNA, 302 bp, Arabidopsis lyrata
  Intron number 3 from transcript 475666 (locus 475666) deri ved from phytozome v7.0 (chr-ID scaffold_2; pos 9874951 to 9875252)
cattattcaaagaaaggcttctttaatttactcacaggtaaaactttcttattctgttatcaacaataaagattgaacaacttctcaacattatttctttctttatttttctcacttattttcatatttgattacaataacagataatataatatctccaaaatcacaattgatttcataatatctttttttcttccttataacttctacctccaaaaactaaattcaaaaaccctaatttttttcaattcaatggcggctttgtgtagggagagggaaaaaagaaaaaattgaaaaactcc

SEQ ID NO: 40223 - DNA, 470 bp, Arabidopsis lyrata
  Intron number 2 from transcript 470297 (locus 470297) deri ved from phytozome v7.0 (chr-ID scaffold_1; pos 928762 to 929231)
catcaacagatcccttcgtatgttatctcttcctcttttcgtatctctatgcttcgatttatcctaatttggtgttctatctggtggcgatgtatctgttttgtgtgttgttgaatctctccgttaattttgtctagtgtgttcgatttcccgtgattaataggttttttctagaggaactatagattgatgtttatgaattttgtgtattctggatcaattagtgtgagtttagagattaattcctggtaggtgaaggtgagttatgttcaattctaggggaaatcgaaaagctctacaactacttccattaggttttagaattaagcatgttgtttccactatgagtattttactgaaaatcaaagctagaaacttcaaatttgcagcttttggttttggctacacaaagctcctttaccaatatgactgttgttggttacttacatctgtgcagggtaatacaagac

SEQ ID NO: 40224 - DNA, 335 bp, Arabidopsis lyrata
  Intron number 2 from transcript 488725 (locus 488725) deri ved from phytozome v7.0 (chr-ID scaffold_6; pos 7676131 to 7676465)
tggatcatccactcttaaagcatcacaagattcaggtaatgctgaccacgcaactttttcttttatttattactaacataaaacaaatagtttagtttgttgatcaaaaaaaaaaaaaaactttattaaataatttaacacttttttaggtagcttccaaatgtaaatttatgaaatttttggtgaattggatgtgacagattacatataagctcattgttttttttaatactttttgaatagtacaaaaagtgtcgttttgattatgatacaaagccatttttacgatgagaagaaattgattatgataaataatgcagaaagcaccgaagaaa

SEQ ID NO: 40225 - DNA, 555 bp, Arabidopsis lyrata
  Intron number 2 from transcript 470234 (locus 470234) deri ved from phytozome v7.0 (chr-ID scaffold_1; pos 741494 to 742048)
gggtatgtgaattcacttcctgtctctcctgcgttttccatttcacactcaagcttcacatgaagcagtttatacagcttagttattcggattgtgggaaacatggcttcaatctatagtttgattaggatttgtttagattgatgttttgagaatctgattgctattgcgaatagtttcaaaagagaaacatgccactcctatcttaggttactctttgagttgacataactctccattgatccgtttaaggttttaggatattacatttttttggctttacatgttttctttagagagtaggtagtgaattcttggacctgagttaagtaggactgttttgattgatgcttttgggaatccaatttcagttaagaatagtttcaacgatcttcaacgaatattaagtcttaaaatctctcttgttgaagtattgattggcttcacgatttcaagaaatgaatatttaatggtgtgatggaacattatttttctggttctgtgaatattcatgtggtaacatcatcttacaatttgtttgtggtttttgtagat

SEQ ID NO: 40226 - DNA, 580 bp, Arabidopsis lyrata
  Intron number 2 from transcript 887931 (locus 887931) deri ved from phytozome v7.0 (chr-ID scaffold_283; pos 818 to 1 397)
tcatttctcaggcaggtttcacttctttttttggctctcttattctattttattttttgagatatcaaagattaatcagattcaacgaactaaatcataagtatgttgaaaatattatatgagttgaaaatgaaatttaatggtcggtgcgagaagatgggtggatggagagtaaagcaaagatgcttaaagaataaagattgcatccaactgacgactttttcatgatttttaattagtattccattagtaattagtagggctttttgagttattctagattgttaatcacactgataatcatggaaacttgaaggccaaggtaaagcgtctatcttcttcttcttttttagctttagcgtcaatatcttcttaacctttaattctttctgactttctctttttctcattctgatacttaactaaaaaaccacacctactagtcaaattcttgttacaaaatatagtttccttgatacttaattaataagaaatgtggactatatattattgatcaacaaaaatcacttttaactattattatcaatcaataagtggctcatatgactttatcaaacag

SEQ ID NO: 40227 - DNA, 603 bp, Arabidopsis lyrata
  Intron number 1 from transcript 900885 (locus 900885) deri ved from phytozome v7.0 (chr-ID scaffold_4; pos 14541381 t o 14541983 reverse strand)
atcgtctcagaggcgtgtctctctacgccggagtaccgttaagaaaacgacgtcatttggctttgtttttggaaattgagagaagagtgaaacgacgtcgttttcttaacggatcatgggtaatcatacgggtaatcctaatcgcggtacagtaaacgcggatttgtggttaaacccggtttaatggccggttcaattggaggcgtatttttcaagctgaatccgaaagtacgtggtgtttgtttaagaaaattgatagttgttggtggttttttaagagcaaaaaagtatagggggaaaccttgagtttgcgaatagttaagggctgaaaaatcagtcaaccgtcatttttatgatattcacattcctatcaaaaaaaaaaaagaaatatatgcccataaataagtaagctaaaatattgtagcccaattagattatttagtttaagagcgattaaagacaagtcaaaatcactatttgctaagggaatagaccatctttatcaatgagttcttaagaaaatcttaagatgatcttagtaaatttttagtattattactaagaaccaaagttaagatttacctttttttggctcttaggtaa

SEQ ID NO: 40228 - DNA, 811 bp, Arabidopsis lyrata
  Intron number 2 from transcript 486325 (locus 486325) deri ved from phytozome v7.0 (chr-ID scaffold_5; pos 19002083 t o 19002893)
ggacaaaagccgatcaaaggctcgccttatcccaggtaaaactctttttaatttccggttttgtcctctctctctctgttttttttttgtcgttttaaccagcggcggctaagaaatgagaaaagcgtaggttagccttgacggtggttgggctaacgtacgcatcttgtaggagttttgttgaaaacggacgcgtttgatatcgcgttgctttcacgcgccagctccttaattcttgggggggggggggggagtttttaatgttgtaaacttgtaattaaggaacaatttagatgtgtcactcactaattgaattatttttttactatattaaaattttggataacctcggggaagtgtgaaacattaaagtagcggtagatcttgatttctaagaaaaagccacaaaagggtaatgcgcacaaaaaggaaaagtatatatatgatatatctacgtgattatagattaaggagtatatgatatatctacgtgattaacgtgccaatattatataatattgtctaaaagtttattcatttgatttgttggggttaattttaaaatttttattttaagaattatatatcaaagactaacaattactcatgtgtttcaaaattttgagctaagttttcaacttttatactaaaagtgtgtatattttatcataaaatgtactacttttgattatattttggtgttaattttgagtattttctaatgttgtttttgctaaaaaagtccactttatttgttttcgcaatcaaagttaatatttttgttgttgttattgaccaggggatactacag

SEQ ID NO: 40229 - DNA, 299 bp, Arabidopsis lyrata
  Intron number 3 from transcript 476699 (locus 476699) deri ved from phytozome v7.0 (chr-ID scaffold_2; pos 16733109 t o 16733407 reverse strand)
gctgctcttctcaggcacagattcttcacctctctcattttttattctcttttgatttaaagaaaaaaaatagtttaaaacttatggactgcttggatatacaagaaccactttaataatgttcatttgacttttcaacgtaaaagaaacgcataatagtatacgtagacaacattaaataccctttcaatttacttacaaaatagtgataatcatagtagtaacatactgtttatgtactgtacgtaaaatacaataattcaggattgagaaagtaagaataaacagaagagacggta

SEQ ID NO: 40230 - DNA, 763 bp, Arabidopsis lyrata
  Intron number 1 from transcript 913003 (locus 913003) deri ved from phytozome v7.0 (chr-ID scaffold_1; pos 14519100 t o 14519862)
agtcaccgccaaatctcctgacgcgccgtggcttagtttgtttaagggaacttctcgacccttaaccaaaaaaggaacagcctttacccttccttcgggggaagcctgtgtgaagattcccatctctgttattgaaaaaaaccagaaatcttgggattgtttcattttaggtcaattctactcagaaccgccggctcaaggcaccgttcacgcgattgttaatggtatttggagtcgttttcacagggacatctcggttaccaagatggagggtaatgcgtttctgtttcgggttccaaattcttcaacccggaatcggatcttcactcaaggtctctggcagattgaaggccaaactatgtttgtcgcgaaatggaagccaggatccattccgcagaagcctgagctctcttcagcccctgtgtggctagaactgaggaacatcccacttcaattcttcaatgaggatgggtttgaatttattgcagaattagttggcgaacctaaagggcttcatccatcaactgcaaacatgacaaacttagaagtggctaaagttttcactcttatagacccaaggaagccgctgccggaggctgtcaatgtccagttcccttcgggagaaataagtcgtgttcttgtgtctagcccatggatgccgcctatttgctcgttctgtaaggaagtgggtcataatttgaagcgctgcaaatctacttgtcactcagctgctgcgtgtccgcgtgccaaagctaaacccaaa

SEQ ID NO: 40231 - DNA, 319 bp, Arabidopsis lyrata
  Intron number 2 from transcript 482508 (locus 482508) deri ved from phytozome v7.0 (chr-ID scaffold_4; pos 16826022 t o 16826340 reverse strand)
attctcatctacacatctgggcttctcctcaagaggtcgtgctcttcacactttgtttattcgaatccgtgctaattttgttttgctagtttacattctcgtgaagtcgggttatacattaagatctccaattgtggaaaatttggatcactagtttgagcaattaagcaaatgccatttttgatgtagatattctttggaactataattgattctactaagatgattatgactgatcttgttgcgtaagtgatctgatggatccttaatatgtgttttttcaggcagaaacttatccttattttccaggccaagaacc

SEQ ID NO: 40232 - DNA, 794 bp, Arabidopsis lyrata
  Intron number 1 from transcript 935637 (locus 935637) deri ved from phytozome v7.0 (chr-ID scaffold_4; pos 22620668 t o 22621461 reverse strand)
ttttgaccaactcattttttctcatactctaaagggctaaaatgttaatgcgtttctttacatgaagatggtcgttgattatgttttgactgattcatacatttttgagttttgacatattctgccaaatcataccacacgaatacaaacatattttaatgtaatggatgccaacctgctcattcgcttataataatgttaaactaaaagttatgttaaaaaaaatatctattcgtttatataaaaaaaaaataatgttctgattaagaaaatacgcatttatgttataaaaaatatacgatgaaagtgttttatcttcttatttatattaagagaattgtgacaatatatttagactataatcaaaattcatataactaattctatcttcacaactctatatatattttattagctaagtgaaaaaattattacataaattagtggagtagtcgcaaaaatggaccgttaaccactgggataaatacacttcccctacctgataggctgatacacattaaattagtattttaatcataaaattagacagttaaaatacaatgaggcccaaatgagatatgggcctaattgagatataagctcgagctgaaaccttctgatttagaaggagggttcgatgatccttctactggtaagtaatttgtagcacaaacggaaaatttggtctaagatttgagtttccgttaaaacccgtgattatgccggcgacgagtcacgacgcgatctcaccggtcacagatccgatcgataatttgcctctccggcaaatcaga

SEQ ID NO: 40233 - DNA, 678 bp, Arabidopsis lyrata
  Intron number 1 from transcript 897888 (locus 897888) deri ved from phytozome v7.0 (chr-ID scaffold_5; pos 14905349 t o 14906026)
aaccaacagctttggtagcattgagtggtcgggtaaacacttggttcgaagccccgtggctctaacctggacttagtatttagtggtaatgaaactagagggactaatgaaagaaggtgtaacagatattgtaatgccctctattaagtgttttaaattttaagctttgaaataattttgtcgctgttagaacatctccaatggtatatcttagcaacatcttaacacaaattttagcattaaaagcaattatatttaatgaaaccaacaaatatttgctaagatatgtatcttatttaagatgtttaagatgtttttcttaagtttagaagcgcgtgtcgcgatttgagtggaaaaaataaaaaacaaaaccaaaaaaaaattcactctcctgtgattttttcccgacattatttccatctctctctcttgatctctctggacacctttgcgacaaaaatgaggagattcgaaatctgttcgattccggtggagatatcggtgaattttctccatcgtaagtacccatatctctgattttggttttccgattgggatgtttcggatcttgctaaagtctgggtttttttcgattttggggattagggttttggttgatcttgtgatctcgagaggaagaagtctctgaaccgccttgtcgtcgatgaggcttcaacg

SEQ ID NO: 40234 - DNA, 210 bp, Arabidopsis lyrata
  Intron number 1 from transcript 489571 (locus 489571) deri ved from phytozome v7.0 (chr-ID scaffold_6; pos 12780399 t o 12780608 reverse strand)
agttcagtaattttgtccatttgttttctttatttgattacactttttgttctgtgaattgggttttcttctgtttttgtgatcattatgaaggaacaaccattgaattcgattcaaagttgcaatttttgtgtgtctattggaacattaagggagcataaggctaaaaatgatgtctctgttgttactgttttttcagctgtttgccta

SEQ ID NO: 40235 - DNA, 798 bp, Arabidopsis lyrata
  Intron number 1 from transcript 916472 (locus 916472) deri ved from phytozome v7.0 (chr-ID scaffold_8; pos 12719987 t o 12720784)
tttgaacctctggtatgttttgcatcaataatcatgcaagaaaaatgtgaatctcatttgacgtagaaattttacaactttttgaccattgggtatcggccaaggaaatttcacattcatataacatattagcaaaacagaaaataatttaaatcttttatatatgtgacaagcctttcacttttatttgacatactttgttttcaatttctttggaaaaatggattaaagttaatatacatttatatttaaccgaaggaatttagccaaatagaatcattgttccatatctgtgtatcttaatcttcctttttttttttttgaaaacgaatcttctttttaagagtttggtaatgtaaactttttttttttgaataaaatgttgaattatattcaaaagaaaaaataactttttacatcagttgtttttgaatattatgaaatttgaatcaatgagaaaactagtaaacagagatttggtttataagcagagattttctaatgccgggaagcgaaccaggcttgtaagccattctcgtatcggcggtaatgtaaccttttattaattgcaattcaatgatgctcttcttaatataatagggaatatatgtttgtttgtatttttttaagggagactcacaaaaatgcccttttttcaataccccttttcaaaaatgccccctccctaatagcttccctgaaattgaccattttactcttaatgaggttttgacctaaaagacaaaattgttccccaaacaagcacgaaccaaaaatctcggcggctctcatcacttt

SEQ ID NO: 40236 - DNA, 756 bp, Arabidopsis lyrata
  Intron number 2 from transcript 495726 (locus 495726) deri ved from phytozome v7.0 (chr-ID scaffold_8; pos 17465349 t o 17466104 reverse strand)
ctcgataccaaggttcgattatatacttccatgttttgcgtttttgtttccaatttcatcttctttgactcggattcgactgtgatctggaattctagggtttctagatttttttaattttggtatttgattggtttattctattttttgatctgcaacactgacgcgtctattttattttcctatgtgtgaaatgttttttcatgcctcttttgtattttcatctatctttggtaaacggtttttttttttgtctgtttttgctatttctatgttaaggcgatattaatgttaactctgcttatgaataacgcttaccaacctcactctcatgatgttttaccttctgggaattactaaatttattataaataaatgaatctagatctgtgagactctctggttgagaagaccaaatgtataaaatgatgttagcacgtagaaagtggtgaagaatatgttaatacaaatttgatagatgattttagaaacttgtaattgtggagaatgtcattagtgtgtctatgattatggttttctggttagagaatgtcattagtgtgggaagtaaatgttctaaccaaatttcaattgatactgttaacttgattagtttttcaattgaagatttcttctgtcaacttctatcttgtgtatgtaaattgttgcagatcatttgatttttgattatgctaatggagggttgtttcttttatcttgtaaagggtccagaaatccgaaccgggttcttgaaag

SEQ ID NO: 40237 - DNA, 409 bp, Arabidopsis lyrata
  Intron number 1 from transcript 896503 (locus 896503) deri ved from phytozome v7.0 (chr-ID scaffold_5; pos 2817091 to 2817499)
gtcacctcgttgaggccaaggtaaatcttatatcctctttcactggctctctgctcatctggttactgaaacgatgaagattttgatttgttttttaggcttctgttttaaaaaaattgagctttgatatgtttagtaatttgtttgctctttgcaactctgtttatggcgtgtctgtttagtaattgaactcttttagtggaaatctgcttttctagtttctgagttgttgaagtgttgtgtgatttcattttcttggtctttgcaattctagttagggttttgtctgtttgacaatttgaactttgtcatgtctaccttattcttattaccataactcgtatgagagataaaccttatctattgatacacaggtggttcttgacaagttttctggtcgctcccgtgg

SEQ ID NO: 40238 - DNA, 995 bp, Arabidopsis lyrata
  Intron number 1 from transcript 937631 (locus 937631) deri ved from phytozome v7.0 (chr-ID scaffold_5; pos 13921865 t o 13922859 reverse strand)
tgtggacagcttccgtaactacaacttgggacaaggtgcaccctttagcatattaggttcaattaccattttcattaaaaagtactttatgatcatgcagtatttcttctcaaagtgttttttggcttcctgcaaagatttacatattgttatgtcggaaaatgtgataggtggcactcctttaatccatttaaatattaaaatgccttgtgatatcttgtgtttatgtcatataagaagaattgattacttttaagtgataaacgttgaggtttagtaacataattttatagctaaagcatgcaaaacaaatttatccctatcagttgtgggctacttatgtgattaaagctgtttggtattattattatttgcctcttgtttctttgatttcttttttaacacggagtgaattttgttggtcaggtttattggctttcgattgattatcttgctgttaccagatcagcagtagtgagccatccctttccttctgaaatattagaccaagtttagatagaggctctaaattaccaagtttagatagaaatttggcagtctaagcctcggaggatcctgatttgtcttatcatgatatggtaattgtgtataagaaatgcatgttatccattggggattattgggctagataattattgtactcaggctcctccatagttttcatcttcttaaccaaataactaatatgcattgtggtttattgattattgactaatgagttgtaaatcatcgtcatatatgaaacttccattggatgcaatttaaaaaaaattgtaaagtcggtggtctctacgtaggaaaaggggattgcaaataagagtttttttggtatggtttcatgcaatagagaagatggttttgtgtttgtccaaacaaaaaaagagaagatgatattgtttgtgtggatttataagctttccttttcttcgtggttaacagttgctgaatcacgtcgaggtacttgtgtctgcagt

SEQ ID NO: 40239 - DNA, 840 bp, Arabidopsis lyrata
  Intron number 1 from transcript 946940 (locus 946940) deri ved from phytozome v7.0 (chr-ID scaffold_7; pos 14062584 t o 14063423)
gcaagagtaagcaatttctcttcttactcgtttttagatctgctcttttgactatgtatatagtaggatctgcttttgtatctgagaaaattcaaaatctgggctctagttcgtgaatcttgttgaatcatagcttagtgaggtttgaagaagaaaaagaatagaatgttagacagtgaaaagaataagtatggatcttgcttgctttgatggagttgaatttgaatttgatagattagatatctctggttagattttgtttatgattggtcaataactcttcgacattgctaggttttcttcttttactcatctctttcactaattttggaactttggttttctaaaggtctttcttttattgctcattaattgggttgtcctgaagttgcgaagttgcgaagttaggttggtctctttggtagttggtggttggttatttaaacacatgattctaaagtcttggaaccaaggaaatcttactaggtgctttcttttgattgttgtcattccattgactcaacgaatgaactcatgtggtcaatgtttgtataaggaatttcatgttttaagttacacaattcttttgacttacaaatttagcatctttatacgattgattgaagtagagtttggttgttctttattagtggtgtcaattagtactaactcttaaagaaagttatttcctttttttctgttccccttgactctctctgcttggtttatatgagatgcattgcaatttgagtcacttacagagacaattcacctctcttttgttttttccctcactgattgaaagttacaatatttttgttgcttcattgagcaggttta

SEQ ID NO: 40240 - DNA, 565 bp, Arabidopsis lyrata
  Intron number 1 from transcript 490743 (locus 490743) deri ved from phytozome v7.0 (chr-ID scaffold_7; pos 679465 to 680029)
ttgttgtcgccaagaacgagacgtccctataaattgtaagttgttttgtttctctaaattcagaagtcaacgattgttccacctaacaatcgactatttgatatttttattaacaagcttcattaatattattggagattttcttggatgaattattgattttcatgtaagtcgttatttcaagtttatgaatttcccactcatgttttagaagaactctgaatttttcttggatggctttggctcaaagaataagaaatataaagtttcgttattttcttgggagtcaaattcaagttttaagtttttttcgtgtgtggtcaaagacagtaacataaagtctttggtggctttgagcttttttgcgtatacgcgtgagactggtttaaacgttgtcaatagttgactaatctctattttcaattttttgggaaagttcgatgattctttcaaatttattgtttatatgaatccgttgttgtttaaacgttgaagatcaacttttttttgtttatcctctgtgattaaatctctttgtttgtttctccatcaatatatagtagca

SEQ ID NO: 40241 - DNA, 267 bp, Arabidopsis lyrata
  Intron number 1 from transcript 888385 (locus 888385) deri ved from phytozome v7.0 (chr-ID scaffold_7; pos 1681386 to 1681652 reverse strand)
aagataaagttagctcatttttgacttttctccttttgggttttatcttattcgattcagaatctgtatatactttagggttcttagcttggctctttagatttgtttaatcgattacttatctttgaatttagtagtcatcacaaaaaaatgtttaactgttttattgtctctggttctgaatcttacaaaactcaaaacttttcttttgttttatctgttttttgaacagaacaggaacgtttttgggtgtttcgatttcattga

SEQ ID NO: 40242 - DNA, 734 bp, Arabidopsis lyrata
  Intron number 1 from transcript 480185 (locus 480185) deri ved from phytozome v7.0 (chr-ID scaffold_3; pos 14149313 t o 14150046 reverse strand)
aacatcctctcggttcgttttcgatttaaccctaatcgatcaatcttgttgatgatccttctgtatctctctctcatcgtaggttttttttagcgagtaggtttaaaaatttctcaaaatctggttttgtctatttcaattgcttttgaatttgcatgaaattgatccttgattctgaattccgacgatttcaaatttgattgcgtgtactaattctaagaagccgcaaaattatatgttgatgatgatttgattcacttgatttgatcgccgagtctgtgtatagtttctttgagtcgtgtgcataatctttgattgaaacatgttttgtttttcgtgtagcttttgttttgatgatgcaaatacattataatctttgttccaagtgaagaagaatattgatgttgaagttactaagtttcacttgtctctgttgattttgtggtctgagtctgtgttgttcacggggcgtagaatcgctatttcagtcgcttgagtagtagtgtacataatctttgattgaaacatgttctgatttttttctgctttatattagtctctgttcaagtggaggagaatcataactcgtttctcttgatattgtcaccgactctgtattgtttacgttgttttagagattgaaatacattgatgtgttggaatttatggatcgtgtttttttttttgtgtatgttacagaaaagaggcaagctgaagcagctcgtatcagggag

SEQ ID NO: 40243 - DNA, 519 bp, Arabidopsis lyrata
  Intron number 1 from transcript 895326 (locus 895326) deri ved from phytozome v7.0 (chr-ID scaffold_6; pos 21218878 t o 21219396)
gaaactctaccaggagactgggagcttgatatcaggtcaaactttgattcttatactcaattctactttaaattttgttggatattttaagtacatttgtttctgcttttgtcattttgttggatattgtttcttctttttgctacaagatagtttctttgtttaagtcgaaaatgatttttctgcaacacctacctcgtttatgaatggcttcttttttactagttgagttgaaaacttactaataaagttattgaaggagtcaaaagtattgttactactataaatctattggccaaaattgatttatcaatcacgttaagatttactcgcttctcttttttttctggttaaaagatttacatacgtccttattgactaaaccatcgcattcatatgttcttacctcttatctctctctttctctgtacctcaaaaatgtgtctgaataatctcttgtcaatactctgttttgtccttgcagcaagcttctgcagcgtgtctgcacaattctgcggg

SEQ ID NO: 40244 - DNA, 444 bp, Arabidopsis lyrata
  Intron number 4 from transcript 494276 (locus 494276) deri ved from phytozome v7.0 (chr-ID scaffold_8; pos 568916 to 569359)
acaaaggcaggtaagatatatttttttccatttctagttttaagtgactactggtgtcaaattgttatcttctttcctagaaattcctgtcttatacattatatggtaaggacctatagtccgctgcttcatcatgctactaaatgagtttcctgcctcttttgaggtcaacgagactttaatatatgttagctctgtgtatctttaatatatagataagtttatgcttgtgaaaattattggtggttagagattctttaagataatagttttgagttggagcttgtttggtaatgataatttttctggcttatttcaggttgggtcatgaccttttatttttctaatatatttggcgacatgctagtccattaatgtctttagctggttactttctggccatctgcagagttggagcaagtgcaacaagacccagattttgta

SEQ ID NO: 40245 - DNA, 402 bp, Arabidopsis lyrata
  Intron number 1 from transcript 934416 (locus 934416) deri ved from phytozome v7.0 (chr-ID scaffold_4; pos 18039020 t o 18039421)
tccaagcttatcttgattcatctaactggcaacaggttagtgctttactattccatatatacacttcacacacaaacattcttcttggttagcaattacatgttctaaatttgtaatcaaactcaaaaagagaaatcttaattcaaagcaagaaaaacaggtggcacaaaaaaaaaaacttcttcctttgcaattagcatgatccaatttttgaatcaaattcaaaaagagtactaataataattcaaagcaagaaaaagaaaagacacaaaaagttcttcttgcttaacatgttcttgaatattcttgtttaatttcaataattcctgatccttttttttttttttttttgtaactttatatataggctcctccaagcaattataatcaggacggcgtagg

SEQ ID NO: 40246 - DNA, 450 bp, Arabidopsis lyrata
  Intron number 2 from transcript 473537 (locus 473537) deri ved from phytozome v7.0 (chr-ID scaffold_1; pos 15759327 t o 15759776)
gaaacaacaacaggtttaattttgcatttatttcctatgtattaatgtgattttttctatctatgttttttttttttgatataactgtaaatatcattagaaaatgaaaagcttagggtttatacaagataagacctatagaatttgaaaccttgccaaaaaagaaaaccttgccaaaaaagaataaaaacaaggcatcaatcaaatttgaaaacacaagagtgagatcatctaatccaaagttgcattaagtttccaaaatgcttcctttgtcttctagccgagataatgtttctgatctctctatcaatcatcttgaaagtggtgtggtgaggtaaaacactgttgttgtgaaggacattatttatatctatgtgttacacaaattcatagtaatttgtattaatatgtgtaggttgctttcgcttgcgagggctaattaccgacctt

SEQ ID NO: 40247 - DNA, 769 bp, Arabidopsis lyrata
  Intron number 1 from transcript 920492 (locus 920492) deri ved from phytozome v7.0 (chr-ID scaffold_1; pos 6699755 to 6700523)
atcgcctcctattcaatataaataccttgctcgtattcaattttagatcataactaacccttgtatttttgttcttttttttcaaacttttttttgcttctacctaattttaatttttctttttattgtagggtggatgtatggaggggacgatgtgaactggtgtatggaaaatttggacctaattcaatgaataaacaggtgatcatagtttatatgtacaaatttgatttttttttttgtatttatggtttcactattttcaccactaatcaatttttataatcaaaaagtttggtttcaacttttgagaaggtaatcatcgatggtttggtatgtttctttttgttgtaaaaagatgaggtacctcccgattttgttgaggtacatgttcttattattttcaaatatgacttttcttagaagaaacactcaacttttgataacacagttgccacaaagtcagaaagatgacttattacagggatgaatcttcagaggaggctaatttttgtcgttaatacaatttaagtattcttctctttagattagggataacaaacttggctgttaaattcaggaattacttttcgttgccaatctctctccccaaactaaaatattacatatatggaagtagtaacttaaagtttttggtatcgaggtcattctaaggcactgagattcggactttggtatgtataggattcgttttccatgcactaagatttaattattgtttaatttattggtttttaggtttctttcc

SEQ ID NO: 40248 - DNA, 750 bp, Arabidopsis lyrata
  Intron number 2 from transcript 479637 (locus 479637) deri ved from phytozome v7.0 (chr-ID scaffold_3; pos 9353454 to 9354203)
ttcattcttctcccttggattgctctgaacaaaaggtacccatttgacctcaattttaagtttttatttttttccgtggaagtgagagatctttgtatgtatgatataggaagtgggctctagatgatatgtagacttgttgaattggagggtttttagttggaagcagttatttgcgggatttggaattgttctgtctatttgttctttgcttaaaggttgggacttaggacttacgagcgtgaaagaaggagactttttctcaattcgatctgattgatgccatgtagattctgtgtttctctcgttaacgagaagctacaatgaatttttgctgctggatttggataattattgttagggtttaaggtgtttgactgttgttagttgttgttactcgagcttagattattgtcatctactcttgttataaaagaagctttaaaagaccactttaagttctggaaactaagaatcatacttcatatcttaagagcttgtttgtagggaaagaatttattgcagtagaattttgactatccagtaactgttaatgaggttcctttcccttaggtggagatagtttctttgtattgcaaactcaactatgtgatactatatggaccgttttgagtttcttcaacctttcttgtctcgacaatctagctttccgtttctatgaacattctagtcttaattaatattatgttcctttgaatgttatcggtaacaaattgaagaataaagacc

SEQ ID NO: 40249 - DNA, 742 bp, Arabidopsis lyrata
  Intron number 1 from transcript 490031 (locus 490031) deri ved from phytozome v7.0 (chr-ID scaffold_6; pos 21868859 t o 21869600)
actttaaatctcaggttcctcttcacaagattcccgtaagtctcttcttcttcttcttcctctctctgtctctttgactttctgcatttgtttacgctttagaattaggtttaatatcaagctcttgaggtttttggagaattgtcttaatttccgatttatctcttatgggttttaggagaaatctttctgtgagtgtgtagttcgatcataattgggtttatgcagctgaaattcatatgatttgggttaatttttgattgaaccctcttctttgtcaaatttgttagtattgacatttggtttcttgtttaagagctagtttttagtttagtgatagtgtctctccgttttgatcttttatcttctgcagattcctctagggttacctttgatttgatctatgagtagactgctacacagttagtgaattgtttaggtttctctggttaagtaaaggaaggtttttgagattcttgttctgtatgataggttaagaaggttatttatcaagcagctaaaacagctatttaatggttctataaatttgtcgttttatcggattttgttgcttctagttgggaaaattgtaatttgttaagctgtgtagatgtatttcctttgtttcaagcatcagaatgaacgatttcattatttatggtatttggttttttgggaatgtgattatgttagtgaataaacaatctttatatgcaactcaactgcagattgggacaaagca

SEQ ID NO: 40250 - DNA, 598 bp, Arabidopsis lyrata
  Intron number 1 from transcript 942663 (locus 942663) deri ved from phytozome v7.0 (chr-ID scaffold_6; pos 18878501 t o 18879098 reverse strand)
ttcggtgctcgtcggttttgcagtgaaacggcgcttctccttgaaaccaatgacgaagctcttggttaactaactccgccagagggattacttcgagaagcacaaattcaatgactcttcttcttctttgccttcatactcctttcaaactggtaatctatctcaattggttactttagggtttttagttttcttaaaaaaatttggaaattggaagcttaaaaaccaaaaggtactcttaattatgaaagattgtgtatgagcagggaatgtgttttggtttctcatgtaatgcctcaattgagtttttctggatccaaagattcttaattgtgttatggaacgtgtttaacataagctcactgcgttttctcttttgaattttcttctctttgcgtttgattttttgaatcagaatgttggtttagtgttaagaggtttttcctttcatatgatttcctgatggaaatatgtgaagggaaccgcatacactaaagagaaagttgtacatgttgtatttggagtcaagcatttgaaattctgtttgtgtcttctctcttcagattcttgggtttcgttgtccttatttgctgcagct

SEQ ID NO: 40251 - DNA, 519 bp, Arabidopsis lyrata
  Intron number 4 from transcript 473278 (locus 473278) deri ved from phytozome v7.0 (chr-ID scaffold_1; pos 13700690 t o 13701208 reverse strand)
gctacaagtttagtctactcggaaccggttcctcacccggggagtacacattccatggtagaaaacatctctcaactaccaaaaaccaaacttcatttcttgaaactcgctgtaaaaagaaatgttttatcacacatctcttgattattattactaatgagtttcgtcgattgttaaaatccaaatctttgattgccttgcctttgaagctaattcgagtttgctaattggttttactatatgttttgtttcatttcttgcaactctcttactctctgtaaaaaagaaatgtttttttattacacctctcctggttattgctaatgcttattgcatcgttgtagtgtaattaaccttagaccttctagttgataatttgtaggtttaactacttcttggcaccattaatatcacctttctgcattttcagacgatatagaagtaacaaaactttgttttcttttgtgtgtgtgtatgtattcttaaaactgaaggcacctggacaatatccatatccag

SEQ ID NO: 40252 - DNA, 682 bp, Arabidopsis lyrata
  Intron number 4 from transcript 470555 (locus 470555) deri ved from phytozome v7.0 (chr-ID scaffold_1; pos 1970829 to 1971510 reverse strand)
tggttagtgggcaatctatctctgtaaattgatgggcttttgatttgtactccctacgtttcataagtcgttttggagaaaaaattttgtttcataatataagtcgttttcaagtttctatgcactttatatattactttaatattttataattatttatattatgcagtctcttttatgattggttgaattttttaaaaatagatctttttaatctgcgtgtttaaaactaaaacgacttatattatgaaacggagggagtattaatcaatgaggtttcgtaaatgtaaaaaagattggtttagtttttaaaagtcacgtgaatttattgaacgagtgggtccacgatggaatgaatattgggtaataaattatgtatagaaagcgaagaaaaatggaaaaggtaacttggaaagaaaagtcttcttgctgctacaaacgagtactttggcttggcaagattccattaatctgtttcaccgaaaaggaaagaggaaagaaacgctatgtaatcaagccttttaaacggtgaatgaagatgggagactccatttcttttatgatattgggaaactcaatttctaaatcttcccggaacgatattccttctaattatattctgtggtctcttggataatgtctcgacttctctttggtctctccaaactctcttcccggaacg

SEQ ID NO: 40253 - DNA, 502 bp, Arabidopsis lyrata
  Intron number 1 from transcript 920096 (locus 920096) deri ved from phytozome v7.0 (chr-ID scaffold_1; pos 5116348 to 5116849 reverse strand)
gcatctgtgaggtttgattttttgtctatttttttaattataattatgataaaaccaaatcagtaggttcagagactttttcgatatttttcatgaattgtttttatttgtttattttgatttgattttgtctgggaaatttccggttttgcatgcggtgtgtttctctgtcttattttctagagaaaaattccaaggtttagagagatgaatctggtgttcttcttctaaaaataacacaaagacttttaccgaaaacgaaggcgaagattaggcttgcaactttttttttttttgttgaatctgagatttgtttacatttaatacaaaatatacaaatttaatttctcgagattctgcttctttttttttcctattgagattctgtatttgcctaatccctatacatttaactttatatcgcgaatttattaaaatttagatttattttatttgactacaatttcggatctttaatacacccttttttttttgcaggaat

SEQ ID NO: 40254 - DNA, 646 bp, Arabidopsis lyrata
  Intron number 3 from transcript 923473 (locus 923473) deri ved from phytozome v7.0 (chr-ID scaffold_1; pos 26248155 t o 26248800 reverse strand)
attgggcctgtccaatgtaagcattcctattaggttcgaaatagttagttcagtttcagaggatattgagcgtttggtgcttgattaaaacacattgcaatagatatttatttttcatcagtagcaaaagagaacattcagatggcatatggcgttgctggatataaaataatttgttggatgtatgtgaagtaatgtagcttgtatatcaatgtttttgatgatgtcagttgactctttacttagaaagaagtgatggcccgctctactgtgtcagtgtcactaaaaccggcccaaattatgtgtggaggcacattttttttcctccctttttgaatgttaattctaatttcgtaattttccttcagatggctgttaatctgaaaaatggaatgtgaaacgtgggtgggttgtagtcttgatctttctaggaagttatattggtgaagagttttaaatcaaatgcaagttatgctatgtgtcttctagtagcttaactaagaggctgctctgtgtgaatgcgggttcttatgaatgtacttttgttttgtcagaatatatgctttggtttcgttctttggtttttaatccaggagaaatccaaaagcaactttttctttttgttttaattctttcaggtgtggca

SEQ ID NO: 40255 - DNA, 444 bp, Arabidopsis lyrata
  Intron number 3 from transcript 479083 (locus 479083) deri ved from phytozome v7.0 (chr-ID scaffold_3; pos 6867230 to 6867673 reverse strand)
ggtaaggccatttaagctttattgctctctctcctctgtttatctgtagtgttacttactgttgcaaatgttcttgatttgtcaacattcttgtgtctctgaaattctaggtccatggtatattggtagttggtagtgttattaggtgccttatcttgtgtctgtcttccatgttttcgatcttgaagaactgttcataatgtgtctatggaattctaggtgcaccaagtacttaaattatgctaataatgatgctcaaatatcggcctttgattgtgattttacttttgggcattgtgaattctgactctttacatggataatatctggtagtgttattagttgcctgatcttgtgtttgtctcccatcttttcaatcttaagaactgatcataataactgctttcagattttctccaggtgatacaaatttggtactacggg

SEQ ID NO: 40256 - DNA, 455 bp, Arabidopsis lyrata
  Intron number 2 from transcript 351306 (locus 351306) deri ved from phytozome v7.0 (chr-ID scaffold_6; pos 9641068 to 9641522 reverse strand)
gtggaagtaagtatatatatatcataagggcaaattctcataaaaatgttttctgagattaatataaaattttgaatatgtgttatttaaaacctgtaaatagttttccttttccttaattgtttcgttttagttttatttaagtataataattttgatttaattattttgttgaagaaaagaagtctcaacctcaaaacttatttataagagaccactttagctttacaaaaaaactaaagaaacatttatgaaatggataccgaattaaaaggccgaaaatatgagcttgtctagcttggctcaagggccgaccctgcttgaacataattacaatatgaaatattgtatggagagtagcataacaatatacgatacgaaggtatatggaataatcatttgttttatgtttttctatggtattatgtgtttcatgggtacacagtgttagcggc

SEQ ID NO: 40257 - DNA, 477 bp, Arabidopsis lyrata
  Intron number 2 from transcript 946158 (locus 946158) deri ved from phytozome v7.0 (chr-ID scaffold_7; pos 9800342 to 9800818 reverse strand)
acgaagctgtagcaaggttacacgagcttggacaggtattcatcaatcaaaaacaatgttttaaaatttgcttagctttcacttcttctctgcgttcaagattgcactcttcaagctgtgttatcttgtcatttcttataatttataccttgttatggcatatgtcttcgaatgtttgttttcttgtttgaccaatatgattgataaacttagatagatggtgtccttgtctctcagggttgttcttaatttaatcaaatacttttaaaaaactcttttcttaagtttcttatacggaatccagctagtgttatcttaaaagtgaatgcttctttattttatatgaggaaattgggtagactagttaaataaaactcaggagatcatacttggttttactcattattaaaaatgaatatcataccgatacatatcttagtctttttggtttgattttcttgaatttgcaggtgagtg

SEQ ID NO: 40258 - DNA, 656 bp, Arabidopsis lyrata
  Intron number 1 from transcript 488576 (locus 488576) deri ved from phytozome v7.0 (chr-ID scaffold_6; pos 7044497 to 7045152 reverse strand)
ctctcaaatctcttgagattgtaagttttctccatctgattcgctcaatttcatttttgaatctgaacaattttggttatcgctcacactcgcatccttttcgttgttcttatcttcaaatgaagattaagttcctggatctgtagttgtttatggattcatttctatgattcgcatagaaatcgtgcttgttcgtttagtttaagttccggaaatgacgaagatctgtgaaatcgagcaagattgagaactcgtttttattttgaaaattttagatctcagatttgttgttgttgtcgatctctgccttattgaatcgtttacctcaatttttactctgacttgatcgggatcgctcgttattgatttgttgtggtgatcacttccttattcgtcgattaccagaggttgatgattagtcttagcttggtgaatttgattgatcctcataaatgtttagaaattgcgtttagatcaattttctgtgaaatcaagttggagtcgtgttttttgctcttgagttgtctatgtgtttgatcttgagtcattgcttgtggttacgtttaacgcaaagagactccatatttggtggtggctcttgtgcagggttaattgcatcactaaataatcgcaatgctttgtttctgtcaaggttg

SEQ ID NO: 40259 - DNA, 291 bp, Arabidopsis lyrata
  Intron number 1 from transcript 937697 (locus 937697) deri ved from phytozome v7.0 (chr-ID scaffold_5; pos 14302303 t o 14302593)
ctgttgggtaagtaattattatttttttcccagttttgttgaacaaggtctgtgtgaattgcgaaaactgaataatttatttaatccacgattagctacgagtactactgaaattgctaacaaactaactccagaagaatagggatataccaagtcaaactcaaaactaaagcaagtagataaacaaactcctctgccacgtgaccggaatgcacctcttcctttgcgaattgctaaaaactgaataatttgtttgtgttctaagaatcgaaactttttgttttaacaggg

SEQ ID NO: 40260 - DNA, 609 bp, Arabidopsis lyrata
  Intron number 4 from transcript 489727 (locus 489727) deri ved from phytozome v7.0 (chr-ID scaffold_6; pos 18073054 t o 18073662 reverse strand)
tcagagtcccattcatatcctcaacaatcctgcaggtacatgtcatcaatctcacatatacatacatacatacatcatagatacatacatatatgcacatgtaagaaatggttggagaaaacaaagtgtagtggtaaggtaggggttatgagggattgcataaattggcatgtttctttgggtcatggtaaattgttgtaacattcagatatcaaaaaaaaaaaaaaaatcttagtatgcataaatcttcaaatgttaattaagattataagataattaagataattgagatgcattattgttggaaaatatgtaagatacaaataggtgtgcatatttgttcttgttttccccattgtggaatccatccaaagatgggtggggcttatgtttggtttttttcttttcactcggcccaaagtactatcacaagaacttttggtgctgctcgtgaagatttatttgggaacattatcttcttcgatttcgttcttcaaaatcatcaattctctactcggattaattagtcttatcataaaggtagatgactaaaatgttgttaaatgactaaaacatcaaatatatgaaaaatatattatgttgaagcag

SEQ ID NO: 40261 - DNA, 938 bp, Arabidopsis lyrata
  Intron number 2 from transcript 496690 (locus 496690) deri ved from phytozome v7.0 (chr-ID scaffold_8; pos 21663898 t o 21664835)
tcaatatttttctggtggtagttctacttctaaaggtaaattttcttggtttttttttttttattttatttgccatctataaacacacttactctatatcgaatttaaaccacggtagcggcaataacattagtacaaaccatttgctccaaatctcggttgtgcatccacaaaacataaaactatttaacactttttgtttttagtttttaatttataagatcatatatatttgataaatgttttcagtgaataatatatgatgtaatatatacaacaatgtatgagtcacatcatatgtttgtaacacaaaatctaaatacagttgcacttttgttgtcctcacgcaatctacaaaacaacatgtcttatatcgaaaaaccaatgtatatgtttcttaaaacgacaaccaatgcatatatatcattttagttcaaatgtttcgtttttttttttcttttcaaaactatggtgaagtcagatatactttattatagtaacttaaatttcaataaaatggaagaatagaaaatggtaattagtgtaaagatgtaattaaatatccgaagtgttgacaaaaataaaaataataacgaaagtgtacttgattatcctaagacatatatatactttaggattgttataaaaggttggatatatatttaattaagaaaatgatgatgatgatatgccaaaagaatttatctccttccaattgcatcaagagtcgttttccacttcctttttttttttcctacttaattcattcctcttgtacccaatttgcctcttgtcaacatatctttctttattgtagacattaattctcgattcttttttcacatgtaaagaaaaagtgttaattcacgagtcaaaacaaaagtgtgaaattttatatgtttgtttgtttatttgcagtgagagaagcttcgagtaac

SEQ ID NO: 40262 - DNA, 261 bp, Arabidopsis lyrata
  Intron number 2 from transcript 483453 (locus 483453) deri ved from phytozome v7.0 (chr-ID scaffold_4; pos 21234577 t o 21234837 reverse strand)
ccatcctcattaaaaatcgaactggttagtatgcttgtcctactatagcttttttcgttactcttcttttgactttggttatcttctgtatctcatgctagtgcaaacgtttttccagtttattttcgtttgcttgcttttcatcctggatgtgctagggtgaaataacttcacaacaaactgctgaagacattaacaacgatctatttgtcttttcttatttgtcggggatgtttcaggtgccctgcagtaaggacaact

SEQ ID NO: 40263 - DNA, 382 bp, Arabidopsis lyrata
  Intron number 1 from transcript 948802 (locus 948802) deri ved from phytozome v7.0 (chr-ID scaffold_8; pos 4199723 to 4200104 reverse strand)
cccaggtattatagatatatatattatcttttagcatgtacaattagtatactcaaataggctttcaatttcataaaataagtactacacttctttttaagtacgaatattttggaattcctaaatttccgtacaaaaaaattaacacatcaaatatatggtttaactaaaaagttgcagaagatttacaaatattttgagacgattctgatatgtaatttatttctacgtatatatgcatgcatgcatgatagttgataatcagtcataaatcgatcatagaattatcataatgtagtgttttttaattttattttctataaacaaacaatgtagtaatttatatgttttgtgtatatgtatagattctgcaggagaaggg

SEQ ID NO: 40264 - DNA, 607 bp, Arabidopsis lyrata
  Intron number 1 from transcript 476896 (locus 476896) deri ved from phytozome v7.0 (chr-ID scaffold_2; pos 17587740 t o 17588346)
ctaaccctaacctcgactttcgccttgcaccggtgagttcttagctgctacatgcatatactctgattatattcacgtattcattcctctgcctctattagaccaatttttgtcttgtatcattccgggagctgaattgggatatttctccttgacattgagtttcgagttagggtttcaataaactaactcttgaaactgaaacaaaactaaagctgtatgtatagtgtgatttgattgtctagtctcggtcagtaatttgacttgcggtttagatatgtgatctggttacattgttgcaacatcgtgattatgccatcaattgtgatttatctagaaaggactttggttccgatagtagccatttttactgtacatgtatgagtactcgaagggttatgatgtactcttttaagtttaattcacatcttcttggtcaaaagaattggctagaccgcataatgatgatggtttcttttttttatttgaaggaaataggagctgtttgtggctttcttgtttatatttttcatatgcatacaatgtggatattgatcattgtctaatgatttagcgatataccgaatgcagggggcacaaacagaaa

SEQ ID NO: 40265 - DNA, 1012 bp, Arabidopsis lyrata
  Intron number 1 from transcript 945706 (locus 945706) deri ved from phytozome v7.0 (chr-ID scaffold_7; pos 7810262 to 7811273 reverse strand)
cagattctcggagtggtgaagctgaaaatattaaggtatatatgtatattatttatcaactaataacttataattaggtttagtacgatttttaagttttaatttcgacaaatgcgcatacgtaggtcaaacacaattttatgagtcttctcgtttaaacaataagtggggaaacccctcaagactgttccaatgattgtcaagttctttcctttagtagtctttcgtcgagggtaaattataaatcatgatataaatggaggaaaaaatacatggatggaacgagtactttataacgacaaataaaaataaaatgtgtagcaacagacaatgacaatgcaagttcttactccctcggtatttgaaaaaatgtcgtttcaactatttttgggtgaattaagaaagggcacagaattacaaaactaactttatgagaaacgattatttacaattatattttatattttttaaatcaattaagaaatggcacagaattttatgaaaatcgattcgtatctgtagttttggtaatttagactgattaattatgataaattaattgagggtaatttaggaaattttatgtaaaagttgttaaaatgacaactaattaaaaacacagaaaaaatgctagaacgacatttattcaaatacggagggaatagtaaattagaatgcaatttcaattttaaatatatttataaatacctcaataattgtggggtggtcatgacgagtgaatgttgacatgttgttgtccatcatagcattcttgtcgacaataatggtgattatgtcctttctgaccccaagagttttggagactgagtacatccatgatatttcctaatcatttattattgttaaacatccatgacattttaatgatttatcctaaacgataggagtattagctgtcttaatgatattataagtatagtaattaagtctgtatttctttgaatttttaaaaagccatgagacaaacatattaaagtgtgaggtggaacag

SEQ ID NO: 40266 - DNA, 1017 bp, Arabidopsis lyrata
  Intron number 1 from transcript 891601 (locus 891601) deri ved from phytozome v7.0 (chr-ID scaffold_7; pos 22033376 t o 22034392 reverse strand)
gaagcacaggtaaatatagaatgaaacagaggaagagaatcataagaagatcacactaaccgtctaatatgtatatatataaactatataagaaaagaaatggaaaaagaacccctcaagtattggtgtgtagtttcatcgagaaaaagatgctacgaaacttaatagacagtgcccaacaatttgtgaagcaaagaaccataagctgtcggagaaatagagttgaagataggatcagtgcattatattgccagaacgatttggtcgtgaggatcttgtcactggttccaacaaaggatgtagtggctaccatgattttatcgaaacgatggcggtctatatggacgatggtgccactacttgagtacagagagatcaaagatgttacccacaaaacaaaatttcttggcggtttacttggccgtttatttggtaaacgtaagcgaccacggtctatttggtggtttcttaacgagtcattgctactccacaaggcaccaatattagaaagattggatatagaactcggtcgatccacattgtcctgttgatgctaacgtgggaaagtggattacaaatgcggttgatcgcagggttcgtgaactagggttccacctcatgtggtctgcaggacctattaggttgcccaaaagcctttatacatgcgatacgctcaggcccggcccgccacagatttttaagaaacaaatgtattgggcctccagaatttttaaaatttttagtgtcaaacttaggcctcaaaattattagttattgcaaataatagacctcattttttctgaaattttcagatttagttttaacttttaaattttatctatttgttattgcaaaacgaggccccattttcctaaaattttacgatttggtctcaagttttagtttttttctataaaacccatcaaaaaaaatttgttttgtatggggcctcacatttcacagggccggcactggatacgcttgtgtatctccgtctttccaacaaggttttgttag

SEQ ID NO: 40267 - DNA, 847 bp, Arabidopsis lyrata
  Intron number 2 from transcript 919937 (locus 919937) deri ved from phytozome v7.0 (chr-ID scaffold_1; pos 4502795 to 4503641)
tcttgcttggtttcggtatcggtttcgctaatcaggtccgtcattaaacaccataattttaattacgatggtttagtttataaataaacataaatgtgtttctatcaaaattgatcttttataagtagaaaagaaaactaacaaaaataaaattatgttttcaatactatagaagttattaatgtattggaacttatatttataaccgttataaatgtgccttggttttgaaaaaaagttatggaccaagccaactactttcattgaacataatcataaaatagttaggtcaagttgactttaataatcaattttgcttttctacgacgacgatcattatattccacgttatgttatatgataatataattattgaatttgttattgatttgtttttctgctagtatccacaattccacatggtctgttcattagactgtgatgatgtctctttctctccatatccattgttctaattttatctttttgacttcaatccattgctttaattaaagatatatatcgtttttgacgtcatatcgtatataaacttccatgttccatcactcattgatgcggatctttagtttagaaaaaggtcattttcggatcgtattgagttataacctaatgacgtaattgaccctgtttatattccacatttacgtccatagccttacttgatcctaaataatcagaatcttcacttcacttataactgtatctacttaaataatcagagcctaaaaagtcagatttggacacgtatctacttagaactgctagttacgtaactaaccctagtcaatctctctatttacaggctgtgccactctacctctctgag

SEQ ID NO: 40268 - DNA, 797 bp, Arabidopsis lyrata
  Intron number 2 from transcript 941018 (locus 941018) deri ved from phytozome v7.0 (chr-ID scaffold_6; pos 6248615 to 6249411)
aagctcaaggtccttaaggtgtgtaattctatctctatttgaagatcttgtcttctatttctgattagatttgtctgctacgaatctgcaaaatacataatctctagttgattgatctcgaaaagggtattgatttttttaattttgttctatcatctgatcattgtgacattcgaattgttgtttacatgatattttgaaattggtggatacacaaattttatgatcagaaaaattcatgattttgatcatagttagagtgagagagcatagttttgtttgtatttacagtgctctcaagctatagatgggaattgcagattgctggtttgctttttttgttagtttgtttctgctagtacacggattatgcctgagttttgatcttataatccctattagattaacatatgctaattcttcaagtcgtcatcaaatttttaatgactgttgaaataatacccgctttgtggtgtgtctttctctggattttgcttctgaagttactagcttttttaagtttgtggtcgtgagtctcctctgttaagaacatctttgagtagccgagccagtgttgtgatgccttgagcaaaatctctggctcattagtcatgttgcgaacactaaaaaggtttacttggtaaatcttgttgtttgctgattctagttcctcaactgattctctctttgcaaaaccggaaatgcttaaaacttggatatctctatacatgaaatgttcttgaattttagcatatgctaagtaccgacaaattgcttttcacctgcagatcaaatcg

SEQ ID NO: 40269 - DNA, 876 bp, Arabidopsis lyrata
  Intron number 3 from transcript 495401 (locus 495401) deri ved from phytozome v7.0 (chr-ID scaffold_8; pos 15601357 t o 15602232)
ttgagaaccttgaagaccagcttgagtttttccatgtaagtcgcttttatctcgatttgattttgtgtgttttcgattccttgatatgaagcgaaattgagagacgagagtgtttgttgaattgggagattagcttgttatctcgtaggttttgtgctaattcctgaagatgattaagcgaaaccttcttctatatgactattcaagtccgtaaccgattgtatctgcttctgaagaagtagctcatgactaagccgatttgaggcaattttgggtaaaaattgattgaggtgtgtttagttagggtttaggtttactgataggcatttaggttctgaactgaatagtaattatcagaatcttatgaaaattctgagcaacaagggcagacttaattctgagcaaaattgtcaattgtttcatctatatggagtttatgtcaatagtttttccttcttttagaaatattatgatcatacaatgtagttctgagcattgtttatttcacactctttgttcatgaattgaaagcagggagatgaatctagattcaggtgttgtatatatgtgcatgaagaatgctatagtcttatgtaagataagaagaagtagagatagatgtgcagaatccatttcgcaacacattatagacgcatgtgtatttatcattgccttgtataatagaccaatgaagaaggatacacaagctattttgcatatataggagattgatttgttctttttctttgctactcatagagtgctggtcagtctcatatgtctcgtttaccaactgaacctgaaagacaatatgtaaaacttctttctctttgctctgcagactatacatacacagcaacgaacagagagagatct

SEQ ID NO: 40270 - DNA, 625 bp, Arabidopsis lyrata
  Intron number 1 from transcript 929390 (locus 929390) deri ved from phytozome v7.0 (chr-ID scaffold_3; pos 6635406 to 6636030)
tccgcctccgcctgaggacaccactcagcttgcaggttcgattcttcttgcccagattgatattttgtgatgcttcgtttgaatcctactttgtttggttggtctttgttgtacctgcttttcacttaaagtggtgtttttttgggtcgaaagattcaatttttatcggatagtttgatgtaactatagagtcattgagattaatacttggtattagctcgtgctgtaatcattattgtatcatgaaagaggaggatgattttatccaactaattgtgtccatgggactaaagttcaaaatcctgtgacatgattttgattaaggcaattatatatgattgcaaaatctgctccttatgagccaaaaaggcagccatttcatgtggatatctgttagattttctcttgagatgtgaaattgtgccggagttgtatgtttactggttctgcagttagtccatatgttaataactttggactttggtgatgattcatttagaacatagaagaataggctggaaatagaaaactctgcacttatactactaagtgaaaatgaacacttttgcttttgttttctgtgtggataggtcttgtgggagctgtaacaaggattcaagaccgc

SEQ ID NO: 40271 - DNA, 343 bp, Arabidopsis lyrata
  Intron number 4 from transcript 494154 (locus 494154) deri ved from phytozome v7.0 (chr-ID scaffold_7; pos 24192547 t o 24192889)
atccaatgttatagaaatccataataccaaataattttgtaaaaattggttgtctatatgtttaattttccatctagctttaagtcgtcaaaataatggtgtttaaacatttttcagcttgggtcaaatatgttaaaaatcgtttaggaaaagaaaaaaaataattagaaaaaacaaaaaatttaatgtttcttaatctgtgtgcaaaactctagaatgacactctttgtgaaacagaggaagtaatacagactaaaacattggtatttcttacaaactaatatgtaataatgtcacttgttggatagcaacgacataagctcagcgtctcaaccatccaagg

SEQ ID NO: 40272 - DNA, 901 bp, Arabidopsis lyrata
  Intron number 1 from transcript 489762 (locus 489762) deri ved from phytozome v7.0 (chr-ID scaffold_6; pos 18706435 t o 18707335)
ctttgtgtaatcaattgcctgatagacccgttacggttcgttctctctctcgcctctgtattttgcctcttatgcttgttaaagttagggtcttttttgtgattgtgttgtaaatttggacataacttagagtaatcttatagagagaaatggttagtcaatcaataataaaggcgaatacccttttagcggctctttaggggaaaatgtgagtctcgatgttgatgtgttagtgaaaacatgaattgtttttgctaggttcgtgtgttgtcttggattctttcaccagttttcatatctttttgtgaaactgttaaatctcgaatctattttagtgtttctccttatttgtcgaatctaattacaaaggcatagactttatttacacttgagttgctaatttgggcaatttagcagttgaatctatctttttgctgttgttatattgcgaaggcatagactttattgtgcaagtgtttacattttgtgataaactttgtatataagtcaatttttttcacctacatttatagataacagattttgccaagttcagttatgtacaagaatgagatgccattatgtagttaatacttgtttatttatccttttctggttgggagttatcgtggtaacaaatctattgtattgttgaaatttgttgatagtagtatgtgtgcacttttcttgaagtttgatttattctattttggtgtttctttgttatccatgtttgacgagttggtgttcttgtcaatgataaacattattgtatatgattgtttttttttttttttgagtattaacttcttcttttcagaataagtatttttgacaaagatgaagactattaaagtaaggccgatggataatcttgtatgtgttttttttttcagacaca

SEQ ID NO: 40273 - DNA, 784 bp, Arabidopsis lyrata
  Intron number 4 from transcript 495136 (locus 495136) deri ved from phytozome v7.0 (chr-ID scaffold_8; pos 14088790 t o 14089573 reverse strand)
aaaggtttgtatttttttttttgtaacttttctcatttaaatttttgttaaaatatttctgaattgggtacgatttttattgattccgaattttaattctgaatttgtgggactacacttaattgggacatcaagttttggactcttctatgtgtcataaattgattccaactctttttattttagttgaaagtgtgtgtactatgtagaggaccttttttaaacatagcaatttgaaaaggcatgtgtttagtgaatctttcatttaaaagaactctcattcaccaaattactgcttttataatcatatagttacaaatctttcttcttcacatatatttttgtttgttttgagtgtttcaagattacataaattatacgagttgtgttgaatcgagtctaactaaagtcaactactttagttttacttcacctattccccaagaatcccaaagttctaaacactttttgttttaattagggcttatatttcatatatcctgattttgtacttatctgaaactgcaatatataaatctgtatgccatgtactttttttcagggaagtgtggttagttatgttaggtagaaatttattggccaaaagattacattggtaactagagaattgaaattagtttcgttcatttataggagtggaaattagttacattttcatatagaaaattaagtcataaaatgttttttgttttttgttttttgttttttttgtttgtttatatatataggagtggagtctgtggaaccagattttaaagcatca

SEQ ID NO: 40274 - DNA, 714 bp, Arabidopsis lyrata
  Intron number 2 from transcript 493795 (locus 493795) deri ved from phytozome v7.0 (chr-ID scaffold_7; pos 21208414 t o 21209127)
gtcgaaccatttctgatatcgtgggtatgtacgtttattttagaggttatacgtacgtagagcgtagatcatttttttctgtggtatatgtgatttgactcctttttcgcattggattttttttttttacaatagaatctaaaacatagacatgactatgtttttcaacatgtaataataattagtagtattttattaattcagaaagttgaaagctacgtaattagatataaatgtgcatgatttagcggttagttacaataatatgaatttaattcgatctaattaagtatctaacagaacaagatccttgtacacacttgaagtcaactattgacaagttgactcttctttaagcatgtaaagtcataactgaattggattggaccaataaattagttaagagttataaaaaaacttgtaatgtaagagaagtcaaatgctaattccataaatgcaacattcatggagtttggtaaggagttctatttaattttaataatttagtaaaccattttgaattggtcctagatctcttcaatcactaaatgtttttcttagtttaagatgatgccactctgtgtttaattggtttacacaaaatatataaccattaatcatataatataagatagactaatatatggtttatttgaataaattaaaattaaaacattaggtgaagccttaggagcaaaatcagcaccacctcca

SEQ ID NO: 40275 - DNA, 474 bp, Arabidopsis lyrata
  Intron number 1 from transcript 488169 (locus 488169) deri ved from phytozome v7.0 (chr-ID scaffold_6; pos 5443526 to 5443999)
ctccctcagtttcgcttctccatcgattttcttaggtaattttggttactctgaggtctctatcgctttaaatctcgttgtttctctctgttcttcatttgattttattgatctgcctcacagtcttttatatcaccaaggtataatgatatagatttcgtttcgtgtcaatgatctcatggtttagatcgtgtgaatgttttgatacaatagatctgcttgtgtaaaactcagaaatgatccgccatttagttactgatgtacggacgtcgttaacctaaattttctgctttcatggtttagtttctgagtcgcatggtttcacattagattgatatgatgttactaggttttgtatagagcagctaatacatcatttcacaaatttaaaccaatccattgtttttcattaattttgtggttttttcacattatgtcttacactacaggttgtttacttttgtagaggttaaa

SEQ ID NO: 40276 - DNA, 1027 bp, Arabidopsis lyrata
  Intron number 1 from transcript 496454 (locus 496454) deri ved from phytozome v7.0 (chr-ID scaffold_8; pos 20655660 t o 20656686)
agtgacgtcatttggcctgcagctggttagtcatttattatttactaattactaattactaattcaagatcacgattttattagtattttttttttggcaaatattttgagatcataattcttttactaatgtcttctcgatcttcaaaattttgatgcactttggtttctcaatcagaagaactacaagtgattagggtaaaaaaaaaattaaagatggaaaaaaaaggaagagaggtgcacaaaaagaatataaaattagaaaattaatggacaattatataatattaatttctgactgaataaatgatgaatatcgacaaaatatggagagagtcagaaagagagaatgtgtctcttctaaggccaaatggtcattcatatgaaccaaaccgttcgagtttgaccaactcataccttgaactagtatttgactaaaaggtgtgattttcaggataaatgttaaacttagtgtaagaacgaagaattctaaataattttattaaaaatatatatcatctggaaaaagttttatggcataaatatatccaaagattaagtaattgttagttaaagtaaaatatttgaatcgtggcatgttgtatttgactatgtttgcaaattacctaaatgatgggaaatatgcatgtagtcaaactcatttgtttctatttttttcttcgtgagagaatcttagtttgcgtttagtcaaaccctatgctgacagagagcttatattatttattaattattcaaggtttatagctgacttcatccaattaatatgaaactatattcatgtgtgtgtcagctataaattcgttaattacccatctatagtttcaacttgatctgaatttcaccggaccatgttgtcatgatgtaatatttttggaattaaattttgttaaaggttttgtatcttattaataacttttggttagacccttaaccaaaaagtgagtttaataccatttgttttggtttcttaattaagtcttgtgtttgagtaggagcgtttgcggca

SEQ ID NO: 40277 - DNA, 660 bp, Arabidopsis lyrata
  Intron number 1 from transcript 891920 (locus 891920) deri ved from phytozome v7.0 (chr-ID scaffold_7; pos 24038586 t o 24039245 reverse strand)
caaatctccgacgatcgaggatcttcacatttcaggtatattcatacccaaagtttcgattaaaacttctctgctattgtgtgtggtttcttcttttgctaattttgattgcatagaagaaaaaaaaaaaaacgatgtttcttcttcttgctccgatggagtttcattgaaattacaacgaaatgtgtactgttgcttcgtttaatcgtctatatgaattggaaatcgcatttctgaagataatgcagtaacataattaggattgaatcactgatttgagtactcatattcctctagcttaagctttgagttcattgtgttttgattcaatactacgatgaagcagttattgtttcgggttttattatccgtcgttgttggaaatcgcattcctcggttttctttataatgcataaacatagttaagttgaatcactgatttgagacctcatattaagcatttagtttactatgttatgattcaatactaggttgaagcagtgattttagtcattaactttgagcacatttgtagtgttttttcgtttgtcgttgtttagccattggcttagaattgagtaatctgccacctaagttttgtgttttgaccctctttattttgcaggaatactcctttccagataatccaccttattggga

SEQ ID NO: 40278 - DNA, 712 bp, Arabidopsis lyrata
  Intron number 2 from transcript 495022 (locus 495022) deri ved from phytozome v7.0 (chr-ID scaffold_8; pos 13273751 t o 13274462 reverse strand)
gaagtagtcagatcctatttaggtcagtttatctatatatctttctttttgtgtgttcttggtcaatcactctgaagattaagttttatgacaactaatattaagtttcatgaacttctagttcaaactcgctctaaaaatacaacaaggttatatctcaatataatattcccgtgacatatatatacacatgctgttttgtagtaaatattatgtgaagtatgtcttaaaattgacatgttggattcttataatgccataccatgtgaaatgatcattcattctttcaacatcatagtctcttggagtcttctctttgtcctcaccacacttattattctcttccttttttttgaaaactatcaaaaataccctccccttaactttaacattaagaaattgtacaagaacaaaatgcgatcctgtggttcagacacgaaaaatctaagaactagcaaattttttgacaaagacagcttctaaaatttcaatatctgaatagtagtatctcttggaaaatgtcgtgttgtggtcgttaagatttcaactctcttgtataaaagcgtcaacttgacttcctgtgacagtttttgtttattagataattttattattttgtagaattgaatcactgatggtttatgtatataacaacgatgtcttatagatatattgatgttaaaaaataaacaggaggaagaaaagtgcaatt

SEQ ID NO: 40279 - DNA, 716 bp, Arabidopsis lyrata
  Intron number 1 from transcript 950662 (locus 950662) deri ved from phytozome v7.0 (chr-ID scaffold_8; pos 19034180 t o 19034895 reverse strand)
atctcgatcaagcttctgtctcgctacagcttcaggtaaacagagaattgaaacggttgctgcgtttgcaaagcgtttgctggttagacgctgctattttgcgttttctccggtttgcactttagtgcatctgctgaaagttttttttaataattaatcagaaattgcttaaaaaatttcgaaattctactcaatattttgtttagattaacttaagattaataaatatgttggttatcaataaaaaaagagtaataaatatggtaatatcacactttaatattttcaaatcgtttttttttttgtattgaatatttggtattgtataataattactcccctgttcttaattaatccattttgttcaaaaaaataattgttcaaattttttttgaaggcttatctgatttttttattaattaataataataaattttcaaaatttgaaaatgattgaatattattggtttagattgtagaaaattgttaataatttttatgtgtttctaatcaaattttgattttttataacatatgtgaaattttacttggttataaacttataatattttagtcaactgttgactaaataggcaagggctcatgattagtcaatggccagtgtctggattaaagttgaagaaacgaatttaactgacgagacttttccggaaatcgcagacgcagaacgcaagtggaagaccatttgacgtgat

SEQ ID NO: 40280 - DNA, 382 bp, Arabidopsis lyrata; identical to SEQ ID NO: 38954
  Intron number 2 from transcript 947108 (locus 947108) deri ved from phytozome v7.0 (chr-ID scaffold_7; pos 15236701 t o 15237082)

SEQ ID NO: 40281 - DNA, 345 bp, Arabidopsis lyrata
  Intron number 2 from transcript 497382 (locus 497382) deri ved from phytozome v7.0 (chr-ID scaffold_283; pos 5760 to 6104)
cgtggagtcctgatcactccagtatgtttctctcttccttgcctttttgttttttttttaataattatatgaggaggaggatctatagtttggctggtaagaaagatagatgagagaactgaattgcctttatgttgttctaatacatcttgctaatcaaatttcttcaaaatccctagaattcaggattttcgggtcaatgtttgttatgtctgtttgtcagtgtctcttcttaggaacagttggtatcttctgtactaagcctgtaaccatttatgtgctgtgacatttgctttgtttttcttcctagtggttgctctctgtcctaacaatactcaagttcat

SEQ ID NO: 40282 - DNA, 373 bp, Arabidopsis lyrata
  Intron number 2 from transcript 901522 (locus 901522) deri ved from phytozome v7.0 (chr-ID scaffold_4; pos 17441062 t o 17441434 reverse strand)
cggcaaactttgttgcttacaacattagctttaaggtagaaccatcttcaacaatcaaatattattttatgaaactcatttgtttaatgagttctaatagatactccctccgtttttgaatagttgtcgttttagagcttttttttgttttaaattagttgtcgttttaagataataatgtaatttatgtcaataactacccaaattaccctcattttattgaacacaaattatttgtaaataattacttgtcatttttatgaggttaatatagtcattgtataccttttcttactttgtccaaatacagttaaaacgacaacttttaaaaaacagagagagtacttttttttgttggattggaaaaaaattt

SEQ ID NO: 40283 - DNA, 612 bp, Arabidopsis lyrata
  Intron number 1 from transcript 907079 (locus 907079) deri ved from phytozome v7.0 (chr-ID scaffold_2; pos 945882 to 946493)
aaaggtgtctttaacccgaagaccaaacctactggccaaagaagaaaacgatcaaagtgggctctgaaagattttgtaatataaccctattataaagattctaaaaagataaaatattttcttagaatattacgatttcctataaattaaactaatggactttataaaaaattatcaacgtatttacactcaacacgagattattcaagagagttagttaacttcttcaagcaaataaaaatgactttctcaaagtcaaactatttttctaggaagtgttagtgattagatgtggttttctatatggttgatgtgctatggagattttgtatcgttttcgaaatatgggaactttttgtcatttgttttattccttatatcaattgtagtgatgatttcacttttcgagaattatgaatgtctgtgatagcaaaacaaagattttaaatgtcatattcaacgaccctgaaaaatatggcccaaacaaaaaaaatatttttagtgggtttttaaatctttggttaatctttttagcatttctggtttattttttcttaaatattttattagtttttgtagtaatgtatgtttttcatgtttggtagggagaaa

SEQ ID NO: 40284 - DNA, 418 bp, Arabidopsis lyrata
  Intron number 2 from transcript 930107 (locus 930107) deri ved from phytozome v7.0 (chr-ID scaffold_3; pos 9524216 to 9524633)
gagtttcgggtgagtttctaaccaatattgcagagtttgttaatgaatattattgtcctttcttgtatcaagttctcttctaactccttgtttgaaatttaaagttggctacttaggttcagtatatatttctcgggtcaaaatgttttgaccttagcttagttgcttactagcctatataagcatgagagatattcttcgttaattgtgtaaaccagcatgatgttgtatatagtgttttagtaacaaaccattggtagttgcagtttttttaagacgatatctgccttgcattcttcccagttatttctttttctatatattctcttcaagttccctctctcatttgcactttttccaatgaccattttttcttttaccagggaaaaaggtggctaggttcgcttcagttcgttca

SEQ ID NO: 40285 - DNA, 960 bp, Arabidopsis lyrata
  Intron number 1 from transcript 930881 (locus 930881) deri ved from phytozome v7.0 (chr-ID scaffold_3; pos 14238909 t o 14239868)
aggcgttgagttatctcatcatcttctgcgcagaggtgtaattcgaattgggcttaattgagttattgggccttttatgtcttttttaagcccaattaaaaatggaatgctctgtttagctgtttgagtttttaggttttaaaccttagggttaaactatatttctgtttggaaatctttcgcttctaatccgtttagcttctgcctctgtagatgtatgatttatgaagaactttctttcgaaaacctctctctgatttagcttctctttgtttctgatgcagagtaaggtttgggctttttacttgttaatcaagctactgttttatttacattatcattagttttcctttttatttgtataatacataagtgtaatacataacgttgcaaagagatcccaaattatctagccaataagatagctttttttttaaatccaatttttctatttttgttttaaaaatctcacctaattatccaatattatctcttaaatctcaccaaataacaaactagtatttccttttcaaaaatgaaaattctaacaattccaccaaaagtatcctaaaaatttacgtaactttctcaaaatccaaaatttcctaaattccaccaaatcttcccaaatctttaattcaatacaccccctaagtttaggaagattatgtcgatctctttgcttcgttataaataagttgtctctagagctttggtaagccaaagccagtcgatcgtcctctaagccaagaaccggtcttgtcaccagcttcttctagagatcttgtgtcacaagtttaacaaatgtgtcaaacaaagcttagagagactagaatagaaattgccaaatattctataaagagagctgctctaaggattcagcgtgaaaagcgtcgaatggatgatccagatgaagatattaatgctaagactaatttggctttaaagcatgttaaagac

SEQ ID NO: 40286 - DNA, 332 bp, Arabidopsis lyrata
  Intron number 1 from transcript 934945 (locus 934945) deri ved from phytozome v7.0 (chr-ID scaffold_4; pos 20103706 t o 20104037 reverse strand)
gtactctccttgttcccgctcaacctacggctcaggtctctcaatttctctgttttctttgtgattcaacggttgaacaaatgtgattcgaaaactatgaacattttgaggatcgatgtctgattctgagtaaggttaatcaatttgaaagcgattgatgcttaagtgtttgaattttgtttatgttggagatgtgtgagatgcttgaatctcgtgttatttatgatctctgcttgcccctagaagatttgaattggagttttctgtgtgtagattctaagttgtgttatggattctggttttgtagatatacaagaatattggtgagaagt

SEQ ID NO: 40287 - DNA, 737 bp, Arabidopsis lyrata
  Intron number 1 from transcript 490889 (locus 490889) deri ved from phytozome v7.0 (chr-ID scaffold_7; pos 1388455 to 1389191)
agcttcacggtttatctgtggaacgcccggctaacgtacgtaggtttatcttaaaataaaatattctattctaattcattgaaatgtttaaaccacacaaatttatatgatattttatacttgtatagtatatatgagaaaataactggaaaaaaaaaattcgactgccgttacataatcatatgttttcacgttgcattttttttgtttataatatgatttttatatattaatgactctcaaatttaaagtcaataaatagcttagactaagaatcatatagttaataaatattttaagaaaaataattacatatatgtaatacctgaattgataaatattatttgaattaaaatttataatgagttccaatttatataattaaattttttatttgaaggctttaatcttgttaagataacaacacgattagggataaatttgtcatatttatcattgatgttaattaaaaaaaattaatcgttgaattacctataaatattaattgcttgaaataaatttgctcgatctagtaaatggaacaaacagttcttcttctttccgttgctatcaatatcatcaatatcaaattctagaaagtacaattatatccttaatgcatcttagctttacttccgtttaaggataaaccagttaattaatatcaggccataacaaaagaacttcattttttttttctaggtggagttacgaccgttactaactggtcttaccct

SEQ ID NO: 40288 - DNA, 409 bp, Arabidopsis lyrata
  Intron number 2 from transcript 353664 (locus 353664) deri ved from phytozome v7.0 (chr-ID scaffold_7; pos 4255060 to 4255468)
acgacgttttggttttcagacacgacgggaaagttttccacgtcacaccttccggtcgcagtttctctcagatacatacatcttctagctacggtgactacgacaatgatgataacgatgatgatggaggcgatagtgatgatgaagatgataattatgatgatgatgatgagacagggggcgatgattcagatccgaagaaggaaacaagatttaaaggagagtctttttcatcggaaaactcttgttttctcggcgttacaccttccaacctacgcctaaatcgagtggttactactttgaatcaaactcttttagagttcttgttataagttatatatattctgaacattgaaattgtgttttgttcttttgtggcagagtttttcaaaacatttttcgagaacaa

SEQ ID NO: 40289 - DNA, 579 bp, Arabidopsis lyrata
  Intron number 1 from transcript 925797 (locus 925797) deri ved from phytozome v7.0 (chr-ID scaffold_2; pos 11088637 t o 11089215)
gcaccaagttcctttgagagctggtatgtgttatttaaacacaaagatatatatatatatatatatatatatatatatatatatatatatataatcactaatcattatttgactttttttaattgttttagttaatgaaaaaattattttttcatgctagtgtcgagtaaaagtgtttaacaaacaaaaaaaatggtcattaattaaaattaattatgctgttcatttttatgttggacttaaacgaataatttacataaaactggagataaaaaattagatactatttttatttacgttgcatatatagcttattcttcacaaccaaggaagaagctaacctctgtaaaatcgttaaactcttttactgggttgtccttgtgagtgagtgaactcactggaaatttctgtactaacgtgttggaacagtaaattatttctattggtgtgcttagattcttcaagataaaagataaaaaaatatagatggagacacaaaagctgtcttgattggtattattaatgtacattattggtttcgtagggctaaaccggtgcagaaagagttgtagactaaga

SEQ ID NO: 40290 - DNA, 254 bp, Arabidopsis lyrata
  Intron number 1 from transcript 486428 (locus 486428) deri ved from phytozome v7.0 (chr-ID scaffold_5; pos 19445013 t o 19445266)
cccttatcatctttgaattgcttctccttcgagtttccgaattgggtcgttaaaatttccaggctttagatttctggtaatctttttttgattagatcgccctatcgattggttcagtcccttcttctttcccaattcttcttgattggcttagcgtcgttgctatgattaaactttgaacatacctaaaagaaacgttttttttgttcttattgaattttctctttgatttgttgttgaagatcctggagttg

SEQ ID NO: 40291 - DNA, 314 bp, Arabidopsis lyrata
  Intron number 1 from transcript 313994 (locus 313994) deri ved from phytozome v7.0 (chr-ID scaffold_1; pos 16793668 t o 16793981)
ctcagccaatactgcccacagtaggtaccttctttctctctcttcttaacttctaccattgctctaagttttattatttgagaattaaataatctgacatttaaaaaaaaaacccacatagtaatttacttatattagtttgattacacttgaaaaataaaatctttaatatacaatttagtgcaactcttatgtatacttttgtttgatacaacttttaattaaccagtggaaaagaacaaaaaaaagaataatatatacattacattatatctttaattttaattatattaacaagttatttggttcggatt

SEQ ID NO: 40292 - DNA, 710 bp, Arabidopsis lyrata
  Intron number 1 from transcript 484732 (locus 484732) deri ved from phytozome v7.0 (chr-ID scaffold_5; pos 6776191 to 6776900)
atcctctgttacaacctcatcagtttcttaatcaggttcttttcttcttcttgattcttacattgctttgacttcaataatgatgtgtattgattagttttctttcttggcattaaatgaagaatcttgaattcttggttgctcaacttattttagtggttacaaagctatgtgagtcttttatagtatagtttctttaattcttgttggctcaactgattttagatgttgagtcttgaaacttcctgactttatttttgtttcattgattattgtcaatggtgtgaatgtggtgacaatgagattatattgttacatagaggtagacgatttcgatgtcgaggttgagagtattatcttaatcaaaattcaagcttgaaacactatcttcatgtgttgttgtttttcttgtggggcgaatcgaatcgatcattttgtgggctagaatgtcttaatgtgggaaatatagtcaaaattactgtcgaacgctctaatgtgtgttcgatttgcgggcctatctttcgtgtagagctgtccatgtatagtgtttttgacaatttgttcaccttaatcttgtatagatggttcaatttgtgtttcccctgacagccaaacaaataaacctcaccgtcctgcaaataggaaatgtttcattctttatgtggaagttaaattctttttattggtcttggaatagggtgtgaaggtag

SEQ ID NO: 40293 - DNA, 330 bp, Arabidopsis lyrata
  Intron number 1 from transcript 358511 (locus 358511) deri ved from phytozome v7.0 (chr-ID scaffold_8; pos 20799654 t o 20799983)
agactgaacttaaaggtactgactttttgatctggtaagctcattagagtcgatgaacttagaaactgcggattaaaacttgttcttttgagctgctgatgattttagcaaaacaaagtcagattttttaatcaattcgctgagtaatctattgaaacaagattggagctttaaggcaatggaatcgtgaaatgtgcagagtataaattgttggtctcttcttaagatgcatctaagtttttttttttttttttaccttgttggtaatctgagtaaagttttatcctttaaacaggttgttctctgagggaagtctctggtgaaaaaatc

SEQ ID NO: 40294 - DNA, 579 bp, Arabidopsis lyrata
  Intron number 2 from transcript 493425 (locus 493425) deri ved from phytozome v7.0 (chr-ID scaffold_7; pos 13699423 t o 13700001)
ctcctgtgtctcctcccgaatccgacgacattaaggttcaatttcttgacaaaatctgtgtttaatttcttactaaagcatgtatctgggtttttgagttttgttgttactctctatgtaaatgtttctaattttactgcgtcactgacaagtttgggtacaatgagggacagtgaaaataaaaaaagaatcttcattataagctttctctttatccaaccatacacagagatcatgtctttcttccactactgtttccgatgattattcatcatttcaaatcaatttaaaaatttgattatttattcagaaattattccttaaacccatattaacaaattgtttttttcactgaattaaataagtatttagtgacactttggtctaaagcaatctcctttacttgatttggttctgtctttttcttgttcatcactcttcttccaaagatttttccttttttagattttgcttcactcttttgtttatccatttctggcgaatcactgattttaaagttcaaatctttaatcttgaaatgcagcaattttgtagagcaaacaacaattcactgaacaa

SEQ ID NO: 40295 - DNA, 354 bp, Arabidopsis lyrata
  Intron number 1 from transcript 920008 (locus 920008) deri ved from phytozome v7.0 (chr-ID scaffold_1; pos 4745523 to 4745876 reverse strand)
aagaagaacaaagagattgaaacgaaaggtcggttcttttgtactccctagggttttaggtctttgtgaattttggtattctcattgtggctcataccttaaatatcagtttaaaagacgagacttgttaatgtgtgatttctgtgtgatgtgtgtttcatctaaacatggcttgatattggtttttgattgctgctaaattgtgtgaggttttggtttttctacgcgttgagctttatataatcggtaatggttgatttctagtgttcattgatgcagaagacggtacttttttttgtcactgtttaattttttgtaggggtagcttctgattcaggaacacctttaacttgc

SEQ ID NO: 40296 - DNA, 694 bp, Arabidopsis lyrata
  Intron number 2 from transcript 480731 (locus 480731) deri ved from phytozome v7.0 (chr-ID scaffold_3; pos 22690714 t o 22691407)
tcgactcgggaggagcagatcctctagatactaaggtatgatctttttaaaatgttactctaccttttaaggatgtgttttgaatgatttatccactgcttttgtgtcttgtattggaagtggaaaggccaatattgttgtagttgtaggttttttgtttactggagagaaaaggaaatttcttttttgagctattgtgaaactgttgctagtttgagttctatgttgaagatttctgtattgatacaagcatttactgaaccatggctaggggaattttgattttgatacctaagcaattagctttgtagatagataactcagtacttagaaaacaccatagctatgagttaaaaccgctgatttcttttggttacattgccatcattcacagtttatgttacatcggcctatatattttgtgaatgcgatcttgttttcttgaaagattatgatgtcttaagcaggtgaacaagttacaatgagctttgccttcgtagtgcatgcccgagcttgttctgaagccccttttgttgaaaattgattcgtgtacttaatcattgcgtagtcttaatagacatcataatcattcatctttgcatagattagcaatgagtgcagattatatagatcaacaattgaactctgttcttttgcagatttgggcagccgggtttactgctgctatactgaa

SEQ ID NO: 40297 - DNA, 440 bp, Arabidopsis lyrata
  Intron number 1 from transcript 324236 (locus 324236) deri ved from phytozome v7.0 (chr-ID scaffold_5; pos 18314163 t o 18314602)
ccctaggattcgtccccaggtaagctgctcgatatcgcgttaaaaagacttggaatttattcatctcgatttgattacgtccatgcccaatactctatttgttctactttcctgattactctcaaaataccagcttttgttttctagaaatgattcttcttgggacttgattgaattgcttctctgttttctctggctgagttggttgggaatgtatcttgtggtaaaaacaaaaaaagaaataacctttttgtttggtcttacatttcgtgacaaagttccggattgcttgaaacaatcatatccacctctttggttgtctctttttgctaagtatcctttgttgagctctcttctagagtttttgggactgatagtgtcaccacaagtggctaattcgcgtaaaaatggtgtgcagtcttttgtagttagaagcgttg

SEQ ID NO: 40298 - DNA, 616 bp, Arabidopsis lyrata
  Intron number 1 from transcript 900781 (locus 900781) deri ved from phytozome v7.0 (chr-ID scaffold_4; pos 13956019 t o 13956634 reverse strand)
ctggttaaaatctcactctctttttctttatgttctcttaaggattattccttgtttttaaataaaaatcataccaaaatatgagatggttctcttctttcaaaagcctaaatgataaagaagaaaaatacatttttgaacgacaataatatatattagtgcataatatttatatatttccctcgtttttttaagaatgttatgaaattacattttgcttgaatgtcattttaaatttcgtattttaagataattctatagtgagatatatcaaaatagagagatgggaaaagtaagatgtattagacatgtcatacatcttaattaatctgtataaattttttaaaacatcatctttttaaaaaaatataggtaataaaactacattattatgtaagatatatagttgtcgttcttagctataaaaacatatatgattctattagccgaaagacgctagggttcgttaactttgtaatgtgttaatttatttatgtatatatatagtaatacggattattaagtgaagtgctattgggattgatataaataacgtttatcgaattaatgtacattaataggtggcagaggttgggaacaagctggtaggttccat

SEQ ID NO: 40299 - DNA, 151 bp, Arabidopsis lyrata
  Intron number 1 from transcript 358221 (locus 358221) deri ved from phytozome v7.0 (chr-ID scaffold_8; pos 19383196 t o 19383346 reverse strand)
tcatcaaaatcttggctttactcaaggtatatatattgtccaattcgattttgataagtgtcttcttggggtttgttttgctttggttttgagatggttttaatgtgtgaatctcattttcttggctaggtttctgcagctatctcgtttg

SEQ ID NO: 40300 - DNA, 662 bp, Arabidopsis lyrata
  Intron number 1 from transcript 943069 (locus 943069) deri ved from phytozome v7.0 (chr-ID scaffold_6; pos 21557657 t o 21558318 reverse strand)
tggatatctatttccctcccacttgtgttcaacaggtaaaaagtccaatttcgattctctctgtttattacgtttttattgaagctattgcattgatatactctgtttctgttggaccatctttttgcgtttcgggacatagtttgatttcataaatcttcaaactttatgagattttaccaacagggtttcaaaatcttgagaactcatcgaggaaaatctcgttaatttagacatacgaatgcttcttgtgttttgtctcttctttattgtaatggcggcggagtttggtttatgatgaagacagaaaaaaaaagctcaatttttttttcatttaaaattcagaatcaagattctgattaaatttatcaaaatcgagatctctgagatttgaaagggtttttccaggtccttgatcctgagatttctcattaagtctcaattgcaaaaagttcaaaccttttttttattttacaatttttttggttctttttgagattgagtttacttttagttctagattcttgctaatctttttggttcttttttgagattgagtttactttctgatctttgaaactctggtggtttataattgctaaatattaattctcttgttggttaatgtattacttttggtatataggaagcattggaagctc

SEQ ID NO: 40301 - DNA, 415 bp, Arabidopsis lyrata
  Intron number 1 from transcript 947410 (locus 947410) deri ved from phytozome v7.0 (chr-ID scaffold_7; pos 20508524 t o 20508938 reverse strand)
gacatcactgacaaaatcattgctgaatacatgttcgtcttcttcttctgtttctttcataaaaatcactttttgattatgtatatgttctcttatcaagccttaatctaatgggttcgtgttgttttttcaacttttgactctgttttgttttgggatttgtatggattatagttttggttctgtgcctttggttgttcttagtcctttagagtcaattttgttttgtttattcttcagatctctgtttagttttctgataaatctattaggcttatgaatctgccaatgccaatactgcaaaactttttatcccctttgctctgttttgggctctgtttttattgaaatttctgaaatatattgtctcttgttggtgttctttaaataccaaatcagggttggtggttctgga

SEQ ID NO: 40302 - DNA, 957 bp, Arabidopsis lyrata
  Intron number 1 from transcript 902358 (locus 902358) deri ved from phytozome v7.0 (chr-ID scaffold_4; pos 21263043 t o 21263999)
ccggagttcaaatcaatctcagagccaagcaccaggttttgtcactatgttctctttctccttcttctctattgattctttgtccgtgttagttttgtaatttcttttttttttccaggaagaagattataactttgaagtctcatgaaagcttttccattgttgaaataatgacgtatttgtattcagcaattgagtatcgagttcatgaatattattagccatgcaaattttactcttgttgtgttataaagcattcgagtaatgagtattattgagtatttgagtattgagcattttttccctcctttttctcatttgagtatcaaattgttaggatattctttattgttaggatggacagcaagtctattttcttatccacggacacactaagctcaaaaagctgttgaaagtttactgcgactaccaatatttggatttcacctcaacccgttttcttgttcgatggggctcgttttcatggcgagcagactccagatgaggtatattacactcgcttgccattcccttttgcagttttctggttttctatttgtgtagttttcttaacccaagaatctccaattttacagcttggtatgaaagatggagatgagatcaatgccatgttccatccaactgaaattcaaagagcaaagatcaatctcaaggtcactgatcaggttttgtcactcttctctctttctccttctctgtccatttgtgtttattgtaatgttgtgttatatgcaaattataacttgaaagtttcatgaaagctttgcattgttaagcattgagtatcaagcaattttgtatcgaacatttgagtactgatcatttgttacaggaaaccttttcgctgttatgcaaactaatttgttcttatgttctcatttttccccctttttttgtatttgagtatcaattgtcaggtgttttttcattgttagt

SEQ ID NO: 40303 - DNA, 393 bp, Arabidopsis lyrata
  Intron number 4 from transcript 492457 (locus 492457) deri ved from phytozome v7.0 (chr-ID scaffold_7; pos 7772527 to 7772919 reverse strand)
atcgaatatctccggctgatttcacaacccaagtggtaagttatctttttgtttttgtggttgagtcacgaggcataaatgttccattccatacttaattgtgtttcctagacatcaaaactccaaatcagaagagtaaatactgtaccatatctacaattcacatataagaacctaatagctagaagcctagaaatataaaactttgtcgaggaatttactttttcacctaatgcaaaaagctgcgtagttgttaatgttttgattgataagtgacaggaactcgataggagggtaataaatgggaaagagaagtaaaaagttttgacctttggaaatgtagtaaatctttcttcttcttttttgtttggttttgatcgattagtcaattcg

SEQ ID NO: 40304 - DNA, 1003 bp, Arabidopsis lyrata
  Intron number 1 from transcript 489677 (locus 489677) deri ved from phytozome v7.0 (chr-ID scaffold_6; pos 14507753 t o 14508755)
catcaactagggttttcgtcggccggaatttccaggtgaactctctctcttcttcctccacttattcgtctctcttcagtttccgatatagtttcgatgttttcttgttcaaaaccctaactttatctcgtgagatacgattacgaattgattgaaattttgccctttttaacataggcgtatcatgaatctagaacaaaggcaatttagagtaatggcagagacgaaaccattgcttgtgtaggcgtagaatctctgtctcgagttaaagtgtggttttattgaacctttgctcgtttcttgtttgtcttggtgtgttttagttgtttgcaacttagaagatggaatctctgttttgggttgaaatgcagtttgaatgtttgattgagcctttgtcatccctaaataaagtttctttttttttaatctgtgttttgggtcactaccatattgttagaacctaagatcttatcagctgtttagaactaggaagatggcttgtgtgggattaaaatatatgtcacaagctaaaatgtagtttgattgaacctttgcaatacgcaaataaagtttgctttttgtttgaatctgtgtttttgttcggtattgatcttatcagctgtttggaagtaagaagatgcatagtggatgaccagaatctctgtctcaagttaatatgtgattcgatttatttgttacaatccataaataaaacttgctttttgttcgattttgtgtttgactcagaattgttagaatctatgatcttatcagctgtttggaactgggaatatggattgtgttggactataatctaatttattgaacctttgtgatctgtgaattgcactggggcgcattcattcgttaacgcgtatgttcttctcgactatttccagataaccaaggtcaaagactttgcgggtcaagaaatcgaacagtttgagaaagagaagacgatcgcttagctcttcagtccaaagaacaaaggcagtttagagtt

SEQ ID NO: 40305 - DNA, 459 bp, Arabidopsis lyrata
  Intron number 2 from transcript 908152 (locus 908152) deri ved from phytozome v7.0 (chr-ID scaffold_2; pos 11325153 t o 11325611 reverse strand)
ggacaaaaaaccatcaaaacctctccgcaccaaaggttagttaattacatacctagtaaaacagagccaatcctctgttcttacaaaaacaaagtgaatgtttcctctgttctatgaaagacatgtaaatagcagagctctcttttatttatttcaagtggcgataacttcaagtgcggtattttcaggtcgtactatatatgcagagccggccctagccacaagctagggaggcatgtgcttgtggccccagatgtagttattaatatatcggccctcttttttctaaaattctcttatagctcaactggttaaatgctggccagaaagaagtgcaaggttgagggttcgagtctcacacttgctgtaatgcttttaacaatttttttgagaagaaattaggcctctctttttttctaagcttgtggccttcaaaatgttagagccggctctgtatat

SEQ ID NO: 40306 - DNA, 212 bp, Arabidopsis lyrata
  Intron number 1 from transcript 908152 (locus 908152) deri ved from phytozome v7.0 (chr-ID scaffold_2; pos 11325689 t o 11325900 reverse strand)
ttccccagagaccatcaaagaagtaagtcaccaacgaaaagctaaatactcattgcatatgttatatacaaagttcatgagtttttaactcaaaatcaagtgaagtagcatttgttttttcttgttaatttacgtctcgtataatgtttgatatgcaattatgtcttctatatttttaatcattgcgctaatacatcattgtagaaaaaatt

SEQ ID NO: 40307 - DNA, 556 bp, Arabidopsis lyrata
  Intron number 1 from transcript 494823 (locus 494823) deri ved from phytozome v7.0 (chr-ID scaffold_8; pos 9785393 to 9785948)
aagattgtgtcactgtcgttaccggtaaaccacaggtacagttgtttttttccccagtttcgataatgttaaaagcagaggcttttgttctgtctgattaatctggactaatagaagattttttttattaggtgaaatttattctaactgattagctttttttttttttcttaatcggaattgtctctccctgagatctagatctcgcgacgtttttagaatcagtgatttttcagagtgtttattttatgcatgtttgaccaagtagctctgtttttagaattattgcatcattaaattatttccttaattgattggctcactagatcaattgtttttgttgctaattctgaacactgacctttttactggtcttccggcataaataagtctaaaagtttgtatattactcaatatgtgagaattggaattgttcatactagcttaattgttatttggaaaattttattgtataaatcaaacatttcttttaaaattgggtgttgtgaataatgatgcaggtacaaattggatcacattcttttacatttgatca

SEQ ID NO: 40308 - DNA, 444 bp, Arabidopsis lyrata
  Intron number 1 from transcript 315588 (locus 315588) deri ved from phytozome v7.0 (chr-ID scaffold_2; pos 9587133 to 9587576 reverse strand)
cttgcaggtatgactctagttcgtcttctttggttcttttcaatatgattaatcaacctgattgtaatatatgtttgcgtcttctctctgtgctgccttgtttgatcttatattctcgttttctgaccttttgcacttggctagattcttgaggatatctgtttctttttggtttattgtgcctaggaaacgggagagatcaatagaattgtctagggtctgttagtggcttagagcttctttgctctatatgttctctattgtatgattcgatagggttttttctctcatgaataaattttccgcacttgtgttcctttctgaatgcatctttcttgtctttggagtcttgaggttgtgccatttaatttcaaaatcttgagaatgttagatggcaataatatttaccttccttttttccttattataggtacctgacactag

SEQ ID NO: 40309 - DNA, 544 bp, Arabidopsis lyrata
  Intron number 2 from transcript 912352 (locus 912352) deri ved from phytozome v7.0 (chr-ID scaffold_1; pos 11091272 t o 11091815)
tggttatttttcatgtaagattttataaaataaaacactttcttacaaccatttgtgagatgtaaaacatagtactaaaaatatgttgttatggtgttgccatagagctacatgttgtgattatgattgctttttggtagtatagtaattatgaaacaatatgacttcagaatgacgatggtgatactcatttgaccaatgcgatgtatgttgtacatatggtgtacaattgtttttggataatacattagaaatcctcttggaataatgctgatggttgttggctaattagttgagaagaaacaaatgttttttttttttttttgaatttaatgttaaattatattcaaagaaaaaataaacgttttctacattttcatgcgaactttaattattgaaacaacttctaacaaagatctatttagtcttctcttgttgcaaaccaagtttggagcgcaaaattccctctgagaagaaacaattgttaattgattggttgttgacaataggccgttcaagctcgtttaagggagtcacttaaccg

SEQ ID NO: 40310 - DNA, 912 bp, Arabidopsis lyrata
  Intron number 2 from transcript 481668 (locus 481668) deri ved from phytozome v7.0 (chr-ID scaffold_4; pos 11766996 t o 11767907 reverse strand)
actactagtgatttcccttccgttaccgccttctggtaagatcgtcttttgtgctataagattttttatgaattcgattgacattttgacatgaatgcttcggtgttaagggtttttgtttatctatgatgaaatctgaacatatcagaatcaaatgtgatagcaacctatctttcttccaatatgttatagtactataaattggaatctgtttttttgttgtttttgaagatacaaataagcgtcaggtttgtggcttaatgtgataagctatgaagtttgtgagtctattaatatatataacgctgatcaaaagcaaactaacaccttgtgaaagaaagtgtatggggaattttaatacttgtgtccagtaatgtaatgtagctgccaatttttactgtatagacttcttttttcgatccgaaatatatcatggtaataaagatcattaaaactagatgagcggtctttgagaagttagtgttgataaaatggctatcatatcttttttttttttttttttttttgaacaaaaaaatggctatcatatcatgtttttcattcggtcactgttgtttaatttggttattaatcatgctttgcatcatggtgtctgctagtggttacttaggtaagtttgccttagtgacaggcactggtgtactttgtatgtagttatcctgttgtaaattctccagagtccagatgaatgaatctttgttgtagcattattaagctttggacataatgagatagttgaaccgattgtacggggtgggtagaatattgggttaaacctgtatgctttatgtgattaaaccaagtttggtgactgttagattttgctaaagatggcttattgtttttgcttcatcagctacctagttgcagctactggtctgcagagcttgt

SEQ ID NO: 40311 - DNA, 907 bp, Arabidopsis lyrata
  Intron number 2 from transcript 313543 (locus 313543) deri ved from phytozome v7.0 (chr-ID scaffold_1; pos 12566586 t o 12567492 reverse strand)
gctctctgtttcacgccgtggttggatccttggtactttactctcttctcattgcgctacatgcttagttgtttgctaattgtaatgcacaaacaaaaaaatgccacaagacaaagttcgataggtctcctgaattgaattgataccgagtttgatttgattgtttggtgtagtctttcgtgtgaatgttttagtggagagcttggtgagaagaagcctcttttgttaaagatgtaaatcatagtgatgattattggttagacaaatgtctgcattcttcagtttgttgcataatagtggtaatgatccagtgtcatatgcttgtggatctccccatattccggttgttgttgtgtgctagatttagagttgctctgttttacatagaaagttaaaacaagatcttaactttatttagtgtggtgaatgtggcttttttatgtgttcatgaattctgttcattctaaatttctctggcatctctcagttttctttatgtgggcattattgattgggaggtagctctattaggctttttctttcttgaacacaaattttgtggatcctgggttttgagtttctcgtgcaatcatgtcattttactttccttatgtctggatttgtcctagtactaaaatttttaggtctattccctttaagactttgacgttttgatgaacataactcattttttgacaaatctttttggcatctaatgtttcactagaatactccgcctttaactagttggattgtcaaggaaaacatactacccaaatataaaaatcctttagcagattctgttctgtggcatcttttttacatatctttacccaattaatccaatgtcatgaatccattgagaaaaaaattcaattttttgctttgtagggctagacgagactag

SEQ ID NO: 40312 - DNA, 288 bp, Arabidopsis lyrata
  Intron number 1 from transcript 934293 (locus 934293) deri ved from phytozome v7.0 (chr-ID scaffold_4; pos 17403047 t o 17403334 reverse strand)
cctctcctctctctgccaccgaaaaaatttggccggtaaatttaaaaagattcttcctttcttctgaatatgccatcgtcattaacttgagtcattttcatttagtcgttgattgatgttataatatattttgtttacgtaacaacgttaataaaaaagccacctttaacccaaaagcttggaagaatctttgaaaaagtggaattttgactttttttatttttgtttcttttgtatgaaattgtgtaagtaggatttgaagtttagctggaaacttgtgttggctac

SEQ ID NO: 40313 - DNA, 655 bp, Arabidopsis lyrata
  Intron number 3 from transcript 486857 (locus 486857) deri ved from phytozome v7.0 (chr-ID scaffold_5; pos 21192703 t o 21193357)
agattcttctcctctacttctctggctcaacggcggtacgtttccatcttccacacacacatacgtatacgtatatatacttcatttatcgtggtttgcatctatagttatgggtttataaaatgtaatgtatctaagtaagagtagaaagatgaacaagaatgttagtttgatcgatcgaggctgtctttttctccgtgtttattaatctatcatatgttatacgattttcagaattttaatagttgtgaggaccataccatatgcctaagcctgcttcttccttgtatatttttaattattattggcccgctcaacaatcgtagagtatattaaaaggaaaaaggacacggccccaatcgaaaactgagaaaagaaaaagaaaaatgatttgcctttttcaaaaatggcacatgctgaggatttctcggcgtgctttgttgcacagctctactgctcaattatttagccagccactacgtctacgtatctatctatactgatttctatatcatgtaatgtatattcaaattcatcacagacattaatagtaagctcagctctgtgaacacaaattcgagaatttgattacagaaaatgagtgcataatacattatatgcataatgtgtcttggaaataataaacaggaccggg

SEQ ID NO: 40314 - DNA, 579 bp, Arabidopsis lyrata
  Intron number 2 from transcript 928493 (locus 928493) deri ved from phytozome v7.0 (chr-ID scaffold_3; pos 3362510 to 3363088)
aaactaaggcgataattcaggagagacgggaaaaggtaaagaaagaaaaaacagagtaattgaatgacatttgctatttgtttcatcttcatcattttgatctctgtgtttttatgtgtttagaggaactctgttggaaaatctccagatattggtacggataatctctctagtgaaaaaaacacatcagagacggccttgctcaagtcagttggacagaacaatgaaacacactctctaattatctgacaagctttgtatcatgtcactgttgactacgtgtactcaaacataacttaaggaattggctttgctttttggttcaaatttatgatgtctgattgtaagagaacctgcttatgttaatgaacgaaatgatctgatgcttggcttctcgttaacattgtatatgatatgattgatggtgggcttatggttacattgtatcatgactgtattgtgtatgttcatgtattgctgaaacttatactctttttttcatcgtttcctacgaccttcctttagatatctggtcagttggttactgtttgtatgagctctatagtgggaaagtgtgat

SEQ ID NO: 40315 - DNA, 426 bp, Arabidopsis lyrata
  Intron number 2 from transcript 494868 (locus 494868) deri ved from phytozome v7.0 (chr-ID scaffold_8; pos 11306374 t o 11306799 reverse strand)
tatctcttctctctcagttttttgttctctgaggtaaaacaaaggatctttcattatcaagttctaaaacctcaaaaactagttctaaaaaccgatgctagagaaatcaatttcacttacgattgtgtttgatatataccgcatctacgtttcattaagttgataactatctatattttgcaaccaattttgtaatattcttcgttttttccaatttttgtttgactaatttactgggattttgataaataattagctttttttttttctgggttaaagtcaaattcagagcttgttactacctctgtattagtatgtttctgggtttttctgggttaaagtcaaattcaatgcttggattcatattttgatgatttatgaggtttttctctcaatacagattttatctggttgggttaaatattg

SEQ ID NO: 40316 - DNA, 421 bp, Arabidopsis lyrata
  Intron number 3 from transcript 318392 (locus 318392) deri ved from phytozome v7.0 (chr-ID scaffold_3; pos 6779000 to 6779420)
attcggtatgaaatctctttgccttcctatatgcttttgctttactatcagctttatcgccacacagtcttccggaaactgtttgttttgttattcatgtggtcaattcttagttatactttgatctaagtttttgtgatctcagaattttgatccatattccaagctcttggtttttctagcattagttattttcccaagactagaaagagtgctctgtagaacaatgtagatactagaagccctaggtttttctggttggctctgttttctgccgcattcaagcttagcaaaataagtgtgccttatgctctatttactctcgagtaagaattattaacattatcttcggctatggctataacctggttgtctatggtttctaggatatatccctgttattgagcacagaggaccatag

SEQ ID NO: 40317 - DNA, 481 bp, Arabidopsis lyrata
  Intron number 1 from transcript 477888 (locus 477888) deri ved from phytozome v7.0 (chr-ID scaffold_3; pos 2301362 to 2301842 reverse strand)
cctcacccttatcagaggagctgattctggagctggtactttcctctctgcttctgtcactagatctctacatgcctatctttttttacttttgtgagtttttcagatagcaaaaatataaaaaaagggtacaaaaatggtttcttttgctttcttcatttattattcacttcaactacattcttctcatcagcttgtttcctctatagtctctaccgtcccattcctgatttaacttgtgttttacgtttattgttatgtactcttcaagattactttgttttttttttcctgttttattgcttagaaatgtaaataaaacaaaattaatgctagttaagctcagataaacaaagttagaactagaagctgtgtatgttctgtgtcggtagaaacacaaaaagaaaaaagtttgaatttagatatgtttggacctttacatgtttgtgtaatagtgtgtttttgttcacagtttgtttgg

SEQ ID NO: 40318 - DNA, 574 bp, Arabidopsis lyrata
  Intron number 2 from transcript 951943 (locus 951943) deri ved from phytozome v7.0 (chr-ID scaffold_269; pos 3143 to 3716 reverse strand)
gctgctccacctgcggaggccgaatcgccggagatgtagcactctcgctagtcttacgttttcagtttttttttatgaaatttatttttgaaaactcaatctattgacggtgactatgattgtacactatctttggtgtttttttgtcaactttttatattagaatcaatttatgaagactaggtttttttcttttatatacttctatattaaattcatttttgtaatttgaaatttattaatttaaatataaaatattatatattttcccacataattaagtaattttgtgtcaaaaaacatttccgcgtaatcggttgctttttttactttcggaatttgatcaatttagtacgatatttgttgtgtgtatatgtatatactaaatttatataagaataggtaattatatgcctacgcaccgttaaaaactaaattgttgtattgtagtttaggtagtatagttaaaaactgcaaattagtttgtaagtgaccattacctccactagattgaaaatcctctgatacattaagatgagattatagtttgaaaaaatcttctagaaacatctct

SEQ ID NO: 40319 - DNA, 852 bp, Arabidopsis lyrata
  Intron number 1 from transcript 494484 (locus 494484) deri ved from phytozome v7.0 (chr-ID scaffold_8; pos 2781465 to 2782316)
agttcgaggaatttgaaatcaacgaaggtgaaattttgttattactactgcgttgcttcttctttgatttttgaaattgattcatcatcggttataaaatccatggatataagagcaaatttcattagcaactgatttggtgattaggttttggtatggaaggcttttatatgatggaattaggaattgttttggggcattgagccctctaaaattctatgatttctttgatttggtttctggattggttttgcttccgcactgtatcttgttccttttatcagattctgctttgcaagtttgttgagttatcagattttaccaatagtctctattgtctgaattcgggtagttcggatacgaaaacggatctgtttgatatatgtatatgacgatgaagctatggtctcataaacttgatggataatagagcagttttatcggcaaactattggtgattaggtttagcattaataggcaaggcttcatgagctaaaggtctaaaggttatggtggatttgtgaattctttgggggcattaagtagagtagcttggggagagttttacatttgaacttaggctatgattatatttattttggtttctggatttcttttgatcttgttccatgatcagattctgattttaacagatttggctttgcaagttagttgagtcttgagatttaacaaaatagttttattgaaagaactgataaagcttgtttttgttgtatgaattgtgtagttctgatgtgaaatggatgtcatttttacggtctaactaaatatcgatggatctttttgtgtttggcagattcgttggagaaagaggaagtgaaggaagttagc

SEQ ID NO: 40320 - DNA, 720 bp, Arabidopsis lyrata
  Intron number 1 from transcript 471213 (locus 471213) deri ved from phytozome v7.0 (chr-ID scaffold_1; pos 4280008 to 4280727 reverse strand)
caagattctaggtcgacccagatttaagagattcattcagtaagaacctctcccaaccaaaaatctatttgctttcttcgattctactgtttttgggtttttcctttcctcacctgtgctgggatttatttacattctccgtcactaaggagctcaattttagggttaacccataaagttttgaagatgaatctctctgtactgtttatgttccattgcttttatgtttctcttccaatgctcgggatctaatctgtgacttgatattttgggaatctgtggatttgtataacttgtagatagttttgcaaatgtgggtttcgtctcctcttctttgtctatcgattataacattttttctggtaaaatgtcatcttagggttttcttgattctatctggtatttgggtatttcttattattatacaagcggctcgattttcatatctcaactgtatatttgagtggatttatggctcttgaatgtttcttaagccaagatctagtaggcattaaaatttgcattacactgtagtcgtgttgcatttattaaaaatatgggtgctgcgaaatgatggggttttagctttgtcatgtttgatattcatggattgataatgccaagtataaagatgaatatttgttgcatttacgagaatttttgtatatagttgtttttcattagctgactaccaactgttcgatgaaatgtctcagccaa

SEQ ID NO: 40321 - DNA, 767 bp, Arabidopsis lyrata
  Intron number 1 from transcript 490165 (locus 490165) deri ved from phytozome v7.0 (chr-ID scaffold_6; pos 22832582 t o 22833348)
tgcttctctccttagtaaacttgctaaactctccggtaagttaatcattcctttggtttctggaaaacggattcacgtcatgatcttgtaaagcgattagggattttagttagataatttcgaattatttagtaggaacattttgttaggccaactaggaaaatttagatatgatgaatgattttttttttttttttttaagattttttgcagctttattgatattatgaaattaatttctttggaaattggacagatgtttattggccacaaaagtctggcatattgcgggaaagtattcattaaatttataaataaatatgggttaaattaatatgatttttattttcttatgatcattcatttttgcacgatcctgaaattatcgaatcggaatatttgatccgtttaaaagaaaattggatttagaagaagttatggcgatcactatcatataccataattcgaaattgtatcaaaatcatatgatcttttttgttttttttgtcaaccatgaattattggtttatttaaaaaaaaaaaaaaaaaaaaaaaaaaacatttttgctgttattttttttatattttgtcaaacttattgttggaaattgggcagatatttattggccacaagattttggaattttgcgggaaagtattcattcaatttatataaaaatatttgatttgggaaaaataatgatgattgttgcgttggaatatttggataaggtaaaagcaacataagcgtgaagtaccagctacca

SEQ ID NO: 40322 - DNA, 401 bp, Arabidopsis lyrata
  Intron number 2 from transcript 473382 (locus 473382) deri ved from phytozome v7.0 (chr-ID scaffold_1; pos 14500393 t o 14500793)
tttcttcacttttatacaaaaggtaagatttttcatctttcttcttttacaaaagatttattttgttctgttgctttaattggtggcttccttcagagacagctcattttttggtttcattctctttgaaatttcaatgaatttgcttaatctatcaacaatcatgatctgaaattttgctgcatgtattcttatcaaattcgatttggtagtggattcagaataatttaccagtttaggttttttttttctttttgttttcttctctataggctgcgttcaaagctgaattttttttaagtgggtttggttagatgttgaattatttttttcgtggacaattgatttgactatgaatttgtcaaaatgtcatttaaaaagtttttccattttaggtttca

SEQ ID NO: 40323 - DNA, 392 bp, Arabidopsis lyrata
  Intron number 1 from transcript 495793 (locus 495793) deri ved from phytozome v7.0 (chr-ID scaffold_8; pos 17857876 t o 17858267)
ttacttctctcttcaaggatctgtaatcggtgcgaatctgcgtattcttttgttcgggcataatcggtgagtcttagctcttcgtttgattttgatttcgtaagatctgatcggtcgttggtgtaatcactggattttttctcccgctaagttcacgagtaacctaatagattgaaattttttgatctattcgctagatttaactttggttttgtgtattgagttcgatctctgcgtaaagtagcatgtgttgatttatggatgttacattttggaagagtttacgaagacgtaattataaatgcatttggcgatttgtccaatgttgaatttgatgtttggtttgttatttcactcgaacttagctgtttaagttttttgtaattgtagga

SEQ ID NO: 40324 - DNA, 614 bp, Arabidopsis lyrata
  Intron number 1 from transcript 947367 (locus 947367) deri ved from phytozome v7.0 (chr-ID scaffold_7; pos 20104033 t o 20104646)
tgcgagttacgttgaggtgttcacctcacgctgaactaagaataacctgttatggcacatatatgaaactaacatttatcgttgtgtttctaatggacaggtagaaggcttggatttcttccgttacagctttgcggaggttcgaatggtagacggtacttactttaggcgccgcacatacaggcgtcacgaatggtatccagatactttcattgtccactacctcttccagtagagcattgaggtaaaaaaaacaaaacatctcgtttatttttttcttcatgttgagacaatgaatgatgtttcttgttgagacaatgaatcctttgtttatctttttcttcatgttgagacaatgaatgatgtttcttgttaatcttgattccataaatcatgtggaaagaaagtaaacctaaaaaacacaaactcaaatttaaccaaagctaagttggaagtaaatttgactaaatatatataagagctaagaaatagaagcgcagctaacaattataagagagatgagttgagatttgaaaaactctcttagacacgaatatcgagacaaccacaatttttcagatctccgacgccggtaaagcttttgcttgccggcg

SEQ ID NO: 40325 - DNA, 345 bp, Arabidopsis lyrata
  Intron number 4 from transcript 927340 (locus 927340) deri ved from phytozome v7.0 (chr-ID scaffold_2; pos 18539809 t o 18540153)
gaatatcagatcgaagaactagtgtaagtatcactatcttttcttttatggaagatgtatccgtgtagtttcctttttgaagttctcacttcacattgatatcgattttatgcaaaagtgaaaccttatcgatatatgttatcttcctttgctgccattttcaagattatttatacagcatatagctgtttcttttgtgagatcaaatgaaaattcaggactctttgcttttcatatatgttattatgtgttttcatgaagacttctcttttcctaaatcttatttgtaaggcaaccatctaaagtattgtatgatatatcaactacttgtaacagttgccacat

SEQ ID NO: 40326 - DNA, 571 bp, Arabidopsis lyrata
  Intron number 1 from transcript 487983 (locus 487983) deri ved from phytozome v7.0 (chr-ID scaffold_6; pos 4584255 to 4584825 reverse strand)
gtgaaggtcttggcctcgctaatatcaaccaattggtaactaattattcttctgcatactatgttgaattttcattctccttattacttgttgagcatgtcttggcgttttttattgatatgtatctcatattatgctgcgtactgaattatattgtccatccacttttgttttgttgaatattatattctttgcggtaggataacttgttctctgttcaccaacatatgtgctccaagtagcttttttgtcctcttttgtaacccttacacagatctcatcccaagacaaaaagctatggtatatttggccgctctcccttctgaagatcccctaacagaaatatgtttatcaatttcttttgttggtttctgttattgttgcaagcgtctttcgatggtgaatcaaacatgtgtctctatagatttacctttgcatcactttttggttgaaatattcgtttgaactttatgtgccattgtgcttatagctggtgcagggattagttagtaaattacacctgcttaaatactgatataacattattccaataggaagcaatcggtggaaa

SEQ ID NO: 40327 - DNA, 797 bp, Arabidopsis lyrata
  Intron number 1 from transcript 497058 (locus 497058) deri ved from phytozome v7.0 (chr-ID scaffold_9; pos 457490 to 458286 reverse strand)
atcttggtgttctcttgttccaaatccctattcaggtatagtgaatttcttctttggaacaattagggtttagtgaagagaaaagtttggaactttgattttggatagggaagacttttgtgttatgcttgcttaagaacattttagattgggtttgtggtggtttaagttttgatgatgaagaaagatgagactgttttttaggaattcgcttttttggtgacttcaatcaatcgttatcgtcgtaggttctaactttgaattggttgtttcattaactgtgattctgtggatgagatacgtggtttgaagaaagctgcgtttgatgggaatgttttttattttgagctttggatatttggatttagggattgtagttcatatcagctactggaatatgtttgctggctctgttgtgttccaccttgttatgagctgattgggatttatgagataaaagattcagatttgtagggtatatgtgtgttggtacagaaccattttagtgttttgtgtaagggtgctctctaaatgaaatttggatcattagccgtaacgtttcacatttttggaaaatggagaaagagagagtagatgctttactgacactgttttctatcagaaccaaccgaaagtttgtcaagagtcctagtttttaaatgcgttttgatatttgtatgacatgaacattaagtcattctctgctatattagtttccaagtaaagatttaaacatctgatgttttaatacatgggtaaaactgttttgctgcagggtaaagtgtcgtgcgaggtat

SEQ ID NO: 40328 - DNA, 500 bp, Arabidopsis lyrata
  Intron number 1 from transcript 484014 (locus 484014) deri ved from phytozome v7.0 (chr-ID scaffold_5; pos 86073 to 8 6572)
aatttcgattcaccgggagttcaggttctccatcttcttctcccttctttttctcgcccggggatctggcctaaccagcctagtgtgaacacactaacttacttttgagaaagaaattaccatttaccacacacatacactttttgagtaaaaaataagggtaaaaacaaaaaagaagctgttaagttaagttaatagattcctttacaccactagtcatgctctgtctgtccccactatgctttccttttcgcctttgcttctcctacacttttgatattttctaggatcatccacgtctatgccaccacctaaaagctattcttgaggtgtaaattacgaacaaacgacaccatcgccttcctttcactggtttattgatttaaagtactaataatttatcaacaacagttatataaagattcactctgcttgctaatatataagatttcacatgcattgcaggtatccgtgaattgcgggataggcattagtcccag

SEQ ID NO: 40329 - DNA, 290 bp, Arabidopsis lyrata
  Intron number 1 from transcript 473078 (locus 473078) deri ved from phytozome v7.0 (chr-ID scaffold_1; pos 12658285 t o 12658574 reverse strand)
gccgcctcatcattgatttcatcggtacgttaattgtgtccttggactttacttaaggtgtgagtaagtgtatgaaggtgaaaccaaaagacttattaaatttcatcacccctttctttgttacttggtaagcaagtttgattgtgtaaaacctgaaatcatctaaatacagaaaccattaagtgtggtgaagtctttattggttcctcaacttacagctctttcatgttcttttctttggttctgttctcacagctgaattcttgggtttaccgcttgtgcctcctttt

SEQ ID NO: 40330 - DNA, 207 bp, Arabidopsis lyrata; identical to SEQ ID NO: 40000
  Intron number 1 from transcript 336537 (locus 336537) deri ved from phytozome v7.0 (chr-ID scaffold_1; pos 16576274 t o 16576480)

SEQ ID NO: 40331 - DNA, 944 bp, Arabidopsis lyrata
  Intron number 1 from transcript 942933 (locus 942933) deri ved from phytozome v7.0 (chr-ID scaffold_6; pos 20703786 t o 20704729 reverse strand)
gtgagcgattctctcctgagctacatcgccgataggttctctctctcttctctctattcctttcgcaagctacgtttgaactgtttgtcatggaaatctccaaatgctgtttagagagatattacttttatttgatttcactgatctgtgaattagacacaaaatgtcccagtagtatatatattttgactgataagaaatctctgatatgtgtttgttcctttttctcctgaggattaattaggacaaagttttgataatttataatcgttgtttttttttttttgttaatcatgtgttaattaaactcagtttatcatgtctttttaatttccttttacctgatctggagatctgcaataaatggactttggatattcatttactcaaagttttcttttaggtactctacgtttggggtttgatatgcactgatatgaaggctaattttcatgccttaatagtcttttagagtaaatcgtttctattctcatgccttaacagtgttttaattagagtaaatgccttaatatgttagatatgaaggctaatttccatgctatgaagctgttataaatttataatagtcatttattgttctcacattattgttctagtcttgttttgtttcacaccgttattattatcatcatatataactttacttgtcatggttaaagaaagcaagtagttaggttattagcatatatatatatatatatatatatatatatatatatatatcattagcttataggactcctatgatagacgacttgcttataacatcattgtacagtttgatcttctaattaagccgcgccatggtctttattggatattcatttactgttgttactcttcttaattcttagtttgtgatttaactcttcacgtaattatttgcagatcaagtaatctgaaaagtcttggactttcaatct

SEQ ID NO: 40332 - DNA, 583 bp, Arabidopsis lyrata
  Intron number 2 from transcript 915655 (locus 915655) deri ved from phytozome v7.0 (chr-ID scaffold_8; pos 2698787 to 2699369 reverse strand)
gacttggagtactatcaacgaggcaccaaagtaatattctagtctctttttatatcattttagtctattttactttcaaaataaaattttaatggattctaaaaatcacttatttgtcatttttttttgtcaacaactttattggttacatatgtggtataatgtggttcggtaagaacttttcttgctagattatccactttaacatttgcatgacaagaaaccatagataacaaaaaaaaaaagagaatttttgcttatcaaatctgagaagtagtatgtcatttttctcatatgaaaaaataaataacagtttatgaaagctagaaatcgagatttaggcccttttaactaacatttatttatgtataatttacagaaataagttttgggttcgttcatctttttaagtaattacaaccatttatcaagttattgtgatcaaattcgtgaaactagttgcgatattttattctttataaaaatgtttatttatgattctggtcctttctatttctcatctatgtttgatttaattatgtttgcagctctgcggaaattgaaattgcgacgtcgaataaac

SEQ ID NO: 40333 - DNA, 862 bp, Arabidopsis lyrata
  Intron number 1 from transcript 336733 (locus 336733) deri ved from phytozome v7.0 (chr-ID scaffold_1; pos 22089871 t o 22090732)
ggtgctgcgtgcgagcaatcgaggaactgagcaaggtaaatgttggcggattcatgatttcggaggatgatgctggtctcttccacgaatttgtatctactattaattacactttcgtagagtgaacttctctagagtgatccaatgatgttgatgaccacgccaaattcatcaacatttgagaagtaataagtgcgatgaattttgattgggtggcttagggggaattccaaaagctaaagtttgggcgaggggagtctcttgagtgacctattatatactatgtgtcaatgagacgtggataattgtaagtggtttttaagagtgatgtggcatcttgcaaaatctctgcttacgtggcttcctctaaaatgcttttgattgtgctgatgtggatatattgagaggcctcaatgaacaccttttattagtaagagatgttgccagaactaagagttgattcgtattattaacactgctcatgccgcatgtatgtaatttaatttagatcactttttagctttgttttgaattattttggaatatgagttctacataacgtgagtttattttgtaagttcctttttttttcttatattgtggagtgtgatcaagctgcttttggagaagtgaattagttcaatatgattcatgtttcctatgatcacgatattcttcatcactccatctacaaacttataaaaaaaacaattgtaagtacacgattagattgtttgtgtgtgtgcttgatttagtgtttgtagatatttgttttgtaagcaatattttttttaattaaaatttaaaacaagtactaaacccaaactttatttgttaggattttccggtttaattgagagtc

SEQ ID NO: 40334 - DNA, 782 bp, Arabidopsis lyrata
  Intron number 1 from transcript 893569 (locus 893569) deri ved from phytozome v7.0 (chr-ID scaffold_6; pos 6743851 to 6744632 reverse strand)
aaagtacatatttataagcacacacatttatatcataatcgcattctaatgatccttccctttttcttcaatttcttctcaaagtttttaatcttttttattcttcttgttgttgtgattctaggagcaactccaaagtcggttcttgagctcatggatgtaaaagacttaactttagctcatgtgaagagccatttgcaggtaaaatctacactctacttgaaattaaattgaacaaaagaaagtagaatcaatctttatttgttaattttggtttattttcatcttcttaatttcttcccctcttaggagtctagttgagttcgttctttttttttttttttttgtgcacaagttagttcttttaccaatcaagattctataagtagggatatttcatagttttcatcaccatcatatcactctctctactcctttgcgttgcacaaaaacagctgaatcaagaaacaagatttttatgtacgtatatatcatcagggcaatgaatagagctccaattctaatgtgctacttttattttcttgttttgtctttgctttaagtttagtcatattttggaagagatggcacaattgccaagaatattgaagcagttgaatgaatttaaagagagaaaagagagagtagttatagctttaagtgactgtaacctttcagagaattattaaacaattgagaattgagatgatgttatttggattatcattctttttttcttttttaaactaggaagaggggacaaaagtagtcatcattactca

SEQ ID NO: 40335 - DNA, 688 bp, Arabidopsis lyrata
  Intron number 2 from transcript 479023 (locus 479023) deri ved from phytozome v7.0 (chr-ID scaffold_3; pos 6609912 to 6610599)
gcttcatgtaagtttctctacctgtctcctgttgtcttaattgttccagcttcttgggatcgtcgtacacgagactgggtttttgctcccacattcaaatttgaatttttttcttctcttagaatcatattcatcgaaaagttgaaactttggtgattctgtttattgagtgatatagatactaagaaagggacttaattttgaacaattaggttgattttggtatataattagagatctaaagttgaagaatttctcttcagtcttcgtatcaatggagataagattaaagttacttcctttaatattgactttgcgaagctaatctaatttgatacatggtttatcaccattgccatgagtttggcattgataaattatttccgaaatctgtattgcttaatacgaatttctcgacaatattacttaatctctcactgttgagtatacatgagttaattcttagatattatattttgaatttacttaaaacctgctggagctatcttggatttagtgtataagacttgcttatgtacaacttaaaaaagtgagtgatcatattgatgatttagtgcagatttttgtctttctttttgactcgtcttgttttcgctgattttcctcaattgagacctatgcgtatgtttcaggtagcctaggagttcctaaaattaaaatctcagca

SEQ ID NO: 40336 - DNA, 718 bp, Arabidopsis lyrata
  Intron number 2 from transcript 890556 (locus 890556) deri ved from phytozome v7.0 (chr-ID scaffold_7; pos 11907351 t o 11908068 reverse strand)
cgcgtccccttctcgtcttcgtattctaaacagacgtaggtgtgctttctctttcactcttttgtgtttctttcttcggatctgctaaaacactcacagctttaggtatcttcacgtttgttgtaggcttagtctaaaatcacaattagaatcagttgttgattgctttacatggatgtattagaatgatccaaaattgggcagtattgtaacaagtttggtgtgttgagcagtaaccatcattttattttgccctgaaattaaaaacataagcttggtgtgtaggatatcaaataaccatgggttttaagcttgaagtctactaaaaattgaataagttagagaagtgaattattagcattgttctctaatccttactatttgggaatgttgaagagatgtaaaatgatatgtatgtttccagtgaaaatagaccgaaagcttttattgaaaatgttagtttgccctgtcaatgctttgtagatactgaatgctttagtgtactttgtctgtttggatcgagttcaggtggggaatccatggttgatagatgatcaaaaattatagttgctcctcttcgttaaagcttgtttaggctaatattggaaggtgatccttttgtgctagtcaagtaaccaaggagtttatcatcctcaccgattgattggtactataatctgatatctttacttttttcaggaacaaagttttgatatag

SEQ ID NO: 40337 - DNA, 642 bp, Arabidopsis lyrata
  Intron number 3 from transcript 493120 (locus 493120) deri ved from phytozome v7.0 (chr-ID scaffold_7; pos 11403442 t o 11404083)
gaagcaaggaccttgctaccactgtggagttacaagtgagtgtctccgatttctatttcatgatgagaaaatttgtatgaatatgaatatttctgggtgagatgctcttttttttttctgggaaaatgatttgattacatgtttttatatgctttttgtgtagctaattgttataatgattgaagtgatacagcaaagacttcctggagtcaagaatatcaatgaacattttggaattatgttcctttaacaatatatatatttgtttctgttgaatgatcttaagaacaacactttgtctctgtttgtgagtttcttgtgttgttgttgttcttagtatgattggaattaatggattaggcaacaaagacatgatcttgggatctgaatttgtgtttataattgataattgtagtagaaaggagctaaattttgttctggttgatgcttaaagactttaagatgtttggtatttgagatcattattcttctgattgatttggagtttgaatttgcattattaactcacattttaagtgttgtctgatgaagaactcttatgttgtcttgacttcaaagctccaattgcaaatttgtgacattttgattcttccattgacacagacacacctttgtggcgaa

SEQ ID NO: 40338 - DNA, 773 bp, Arabidopsis lyrata
  Intron number 1 from transcript 933239 (locus 933239) deri ved from phytozome v7.0 (chr-ID scaffold_4; pos 12239167 t o 12239939)
ctgtatcaaacttcgctcatcgtaaccgcattcaggtttgctcattagactttttgactgtttcttgccgttctgttacttgtctctgtgacattgaatatgttatctttaagtaactattccgaaataagcaaaaattaacctttgctatattgtccgaaaccactgtcagatacacttacaggctactgaattaccaatatattcttaaagactgaagaggccccaaccttcctaattctattttgcactatttgtgtagttggaataagatacatgaacaacaattagcattagttctagatacagttttgagcctgttgtcgtagacgaacaatgactgagagataagtagtcacattattttctaacatgattaatgaaattcataaacagatggataatgtaaacatacttgaggttgagggagtttacgattgttactcttttcttcctgtataccttccattcccaatttggtcattttatactgtttgtttgaagagaaaaattctaacttgacgtttgtgtcataggagttgattgatatgcttagcaattcttagttgtttctttatatttccttctgttatatatttgcttatcagtactggtcagtttaaggtggcacattggttgtttgaaggttctagaaggagttgagagttggatctatatctcaactctatatcttgggtttgtggctgacatagcttgaaatcataattttaaattgcttttgcaggcattgctaagggggagattcttgcgaa

SEQ ID NO: 40339 - DNA, 991 bp, Arabidopsis lyrata
  Intron number 2 from transcript 331733 (locus 331733) deri ved from phytozome v7.0 (chr-ID scaffold_8; pos 16097574 t o 16098564 reverse strand)
aaggtatggttttgaccctttctaggtagtaaaacttgattctcttttagggatttctgtgtactaagcttgattatcactttgctattgttgaatgacactttgatgttggcctgtttggcctactttatcgtatggtatttcctttgctgattgtgcattttgtgtttctctcaaactttttgcaatattggtttttcatcgaagtgttgagcagcacttacggatttcaagttatactgttttctgttaagaaggatttttcttagagcacatggttatgacccaaataggttaagagctcgtccctcttttctagtggtagtttggcctgcctcccattttagcggtgatctttttctggattggcaactacgttgtttgctaatgattgttggattacaatccaaaaaaagtgcagaacaggcggctttctttggggaaacgcttgcgaaaactcggttacaaggtaaaacttgtccaatttgagcaataatcccctcgttggatgcgtcaagtgggtttcttcgacccatagaatatccactaagttgcactggttgaaatggattcagtcaagtgttagaacttagaacaaacacaatgggctcagaaaaatgaactgataggtagcgcgtattgatgtttacacagacactcttgaaaatggaggtttggttgtaacttctctttacttattaaagaatcaccttagtatatcaaaaagatttcttgggttcagttgatcagtgaggttgcatgatcaatgcttgtaatgtgtaaacttatatatgatttgcatgtatgttaagacaatctctttttccttcagtaagttgtgtttcgacaagttgtatgtggtcatgtcaaattgacttgctttgtttgtatgatttcccttttcgttttatagatgtccaatctctaataacattgagatagtgacgttatcaataagtttcatagcattaccttgttgtggtgaaggcat

SEQ ID NO: 40340 - DNA, 491 bp, Arabidopsis lyrata
  Intron number 3 from transcript 491750 (locus 491750) deri ved from phytozome v7.0 (chr-ID scaffold_7; pos 5015316 to 5015806)
atctggttccgttgtaaatttcaggttccaattctttcacattgtttctcgttgattccgattttgtaatttgttttgtttgggcgatgcgaatgcgaatgcgattagttaggaagagattggaatgtgtttccgataatcgaaattgaaactgaacggagctggaatgtctcgatttcgtttcgtttgatctcgttctgctctggtattttccgggaaatctgatgattttccgagaaaatggtttcaaatcccgaataattgcgtggaaacactgtaacgtttctttcgaattggctttaggacctgtgaagctggtttgacttttcctcggtttcgtggagagctagaatttagttgttggactaaatcttcaaaatttcattcttggattgaacattcattcttgtttctatttctgtaacttgttccaggttttgattgattctaattcaccagacgaagttagcttttgttcacctagattaggc

SEQ ID NO: 40341 - DNA, 683 bp, Arabidopsis lyrata
  Intron number 1 from transcript 943606 (locus 943606) deri ved from phytozome v7.0 (chr-ID scaffold_6; pos 24382245 t o 24382927 reverse strand)
tggtacctaattcatttactataccttccatgaattaatcgttcatagcatacagttgattaataattgtgaaatatgatagattgcatgaaaaaaaaaaaatctggccacataaccaattaagatgctaatattcgtatttggcattgcaaacagatattttgttttaacttttacaagccgtaaagcccgtaacgtgataattttcattctaattttaaaagtttcaacacggccaaaaagtgatagttatcaccttgcacgaaaaccatagtagtcatcaaataagtcaatcatagacaatcacttatttgattatgtatagccacatacacattacattacatctctttatatgataaaattaaattttttttatttaaaaccatcagatccgtcacgtgaacggttgctccgagatttggagtctttcgaaagtaaaaacattaatattataataaaaaccacaatgtaaaacagtaataaaatggactctaaaagagtgtttactcttattaagtagacaaaacaagacaaaaacttacatctacttatcttcttctcctcctcctccttctttacagtcttcactcttcaccaaacccttaataaatcctctggttctcgtatatatacacacacacttatacatacatacatacttatatctatagactatagcc

SEQ ID NO: 40342 - DNA, 365 bp, Arabidopsis lyrata
  Intron number 4 from transcript 359447 (locus 359447) deri ved from phytozome v7.0 (chr-ID scaffold_242; pos 11377 to 11741 reverse strand)
tgccttccttctttagccagagttacttcagccatgtcctcttcttctaggctatggtaaagtcttctctttatcaaagtttagcttcaaatgcaattttccggctttatcttcctctgatgtccgacctatctaacaccggaaaaaaaacacagcattgaaaatgttgagaacattgggattcattactaccaaacgctgagattgtggaggaagaatttcttggagagacaaaagtaagatcaaaattaaaaacctttcctctgttttgtctttggactttgtatgtatgtttgtgctcatgtccccaaaaaactattacttgtgcagacaaatcatcgatcttggattcgacgataaattca

SEQ ID NO: 40343 - DNA, 412 bp, Arabidopsis lyrata
  Intron number 1 from transcript 330900 (locus 330900) deri ved from phytozome v7.0 (chr-ID scaffold_8; pos 2794017 to 2794428)
ggcttttcttctctccctcttgttgtccttctcttgtaagtaaataagatttttttgatttgggatttcacaaaatggtgaagtggttccaagattttgcataatttaaccaattacccaaatttgtgtgtaattgttagtattttcgtgaattttttttgccagttggagttaaattgaagctttttttattttgcttaatctatgtttcctttatattcgtatatgtaaataatccttctaattaaaccaatttttgaaaacatagagtatactaatttgacatcactgtttttcttgaaatgaaatgcagatcaaagtaaaataatcgatgcaaaggaagacaacggaagtcctactaatccgtccccttcaatgatagatttagaagaaggaaatacaaaaacaatcg

SEQ ID NO: 40344 - DNA, 339 bp, Arabidopsis lyrata
  Intron number 1 from transcript 897216 (locus 897216) deri ved from phytozome v7.0 (chr-ID scaffold_5; pos 11107318 t o 11107656)
ggaagactattgctgagctaaaggcctctctcgaggtatctctatcatagatttaatatttgttgtcttttattattttcatcttagttaactaatttagttgaatccttaatcttttctaaggttgaaaagatcaagctcatctgtaccattttgtcaattgacttggactggtcgtggtattattttgcccacatcaaatgtaacaaaaaagttctcaaaagcaaaaaacttcttagctctggtgccaagaagataatttggatgtgtgacaaatgtaatacaaacgtatcctctgttgaagcaaggtaattgttgctatcctattttgtatctgcc

SEQ ID NO: 40345 - DNA, 472 bp, Arabidopsis lyrata
  Intron number 1 from transcript 472916 (locus 472916) deri ved from phytozome v7.0 (chr-ID scaffold_1; pos 11917760 t o 11918231)
tctcatcgtttccaaatcttctgatcagttgaaaggtacttccctctcaatttgagacttgtttctctctttggatgtcttgatgtttgaatttcttccgctctcgatcgatttgattgcgtatacacaaatgtaatcgtttggtttctggatctgaattccatataatgcggcagccatgtatagctttgaattttgacctgcttagggttctacgatttcaatctatctttatcaatcttgttatgtccgctttagatgcattagcaacttcatgtttggatttaatcgattctatactttggtatctggaaagaagaaccaatgatttgttcgtgcctctaactcgagcactagtggttttctgaatttgtatctgtttgatttctctgatttccttcacctattgactgccttgtttttgtttttttctgcagaattggcctcagataacagcattcccttgtctccg

SEQ ID NO: 40346 - DNA, 532 bp, Arabidopsis lyrata
  Intron number 2 from transcript 492335 (locus 492335) deri ved from phytozome v7.0 (chr-ID scaffold_7; pos 7316341 to 7316872 reverse strand)
tcgttcctcacacacgcctcttctttctcttatccgtaagttttctctatctctctgtacccttttgcccaaatttgtgcttgtgatttcgcattgatcggttatgctagatctgattttggtttagtcgtttggaggctctctttgaatcactagactcgtagttttactgatttgtaattcaaaaaaatcccgagtcttttgacgaatcccgtgcccattacacgattgctttcgttttgggtcaattttgttttattgcttgtgtcaacctttttgcaagtttctttctgtgtgaaaaatgattccttttgaaacatgcgattgttaatgtctttgaggttctaatatctggaataacatttgggtataatcgtagtattacatcaaagctagcttggatgatgtatgtttcttcagcttctaaccccattaactagctttgcttcattagcttttcatctcggtttctagcttatgattcctttgtttgttattgttcagattcttgtcctttctcagctcaacgaga

SEQ ID NO: 40347 - DNA, 424 bp, Arabidopsis lyrata
  Intron number 3 from transcript 486254 (locus 486254) deri ved from phytozome v7.0 (chr-ID scaffold_5; pos 18684917 t o 18685340)
ccacgcctgtattttgcttccacggtatatatctcttcttttgatgaatcaactctttttttctattgcaaagttcgaaattttgtaacatcttatttagactttgtgttcttctttcttaatgtttttgactttgtttatgctttggtctggtggatatagttactatgctaatagtttcagtttcacattgtgtttcttgtttacattgaaaactgtgtggctactaagaaagctagattgattgtttaatgggatctgcatatttgatagtgacttctttgtttcccttctcgaatttttatcaaaacaacttgtgaacatatgcttataggtaattggctatttgcttctctttccccgcagaataatatagatcacacggtgagtcggagacggagtacatattgttcaccgcaagtga

SEQ ID NO: 40348 - DNA, 753 bp, Arabidopsis lyrata
  Intron number 1 from transcript 496019 (locus 496019) deri ved from phytozome v7.0 (chr-ID scaffold_8; pos 18889281 t o 18890033)
ctcagttaatcctaggaatcacaggtaatcacttttgactaatataatttgttcttttgattaagtatgatgtgtttaaagtgtttgtttctcttaacatgggtttattgataaaatttggattcataaaaggggacaagaattttctatatgatttggtttggattaaggcatgatgactttatgggatcactttctcgtccaatcaaaagagagatttacaaaaaaagatacttgaataattaccacttaataatggctactttcttagaaggtatagaaaggataaaatttatgtttaaacaaatttaaactacataatccatttttgtttctgaagtttataaatgattaagaatagaaaagctatctatacatatttcaaaaggggaaaagaagaaatgtgataaacgatatgatgcaaaattaactttggattaaaaaaaaaaatgaaaaatgaaagaggacgaccatgtgcaataaaagaaagttgtggaaagacccaaaacctttttctcgagggcccaaaatcgaggtaaagcttttttacgagtcacttggattacaatttttttaaaaaagtcaggggtcaaaactgataaggggtaattcagtaattacgtatcagttcttattgctcttcttctccccacactgatagaataatcagaaattcatcattcagtggcgttgagttggtttctctttgattgtgcagcaaaaagaagaagattgatcgagagagcttagaaa

SEQ ID NO: 40349 - DNA, 460 bp, Arabidopsis lyrata
  Intron number 1 from transcript 928390 (locus 928390) deri ved from phytozome v7.0 (chr-ID scaffold_3; pos 3033876 to 3034335)
gcagtaagttggaaaactcttttgtatctaacaaaactgtgttatctctccctctcgtttgttatcatctcaaatctttatatcaaaaaatgtttatgatgaaaccatcagagtttgtcgggattttagcttatcgatcagaatttgcccgttcttttcccaatgaatgtttaaataagttgtttgatcagatcagaacagagatctgggtctttgtttcatatcagttgactttcgtatatattcttcttctgaattcaatctgttaaagtatgtgatgggaagctagagctagttcccatagttctgattagggtttgtatacatgtcgatgtcttgtaccccaagtttgatatttcaagttgtctaagctcagaacccttttgagtctttaaccattttcaatgttgaatgattgattgcagaaccgtccacacgttccaaagtttggggactggaa

SEQ ID NO: 40350 - DNA, 562 bp, Arabidopsis lyrata
  Intron number 3 from transcript 491666 (locus 491666) deri ved from phytozome v7.0 (chr-ID scaffold_7; pos 4595801 to 4596362)
tttacttctccagcgatcaaactctgcatcacgtaaagattcttcctttgatattctgtgtcattgtttattctaattttaaagtagtagacatgcaacataagtgctttccattaacgaatgtcatttttgttgtgtgctcatataaaatgctgattgcaatttgtagtagtgctaaatggtaactttcacccgccatgtgatgtttagtttggatttttttttatctttctgtttttttaactttggttaatggatacttcaatttctgtagacatgctttatgccccacctactttgaaatcacgtgattttctacggaaattaaggaagaagtttatgcctggatttgtttattttggcataaatcttgcaacgttcttataacctgccccaactatttgatgtttctctcactttagttttctgtagattttctttgcgctcacctaactttccaactaacatgatttttttcaacgggtttaagaaaaaaaaggctggtcttttgtcaaataaaacttattatttgtatttggtggtgtctacttgcaggatttga

SEQ ID NO: 40351 - DNA, 546 bp, Arabidopsis lyrata
  Intron number 2 from transcript 477121 (locus 477121) deri ved from phytozome v7.0 (chr-ID scaffold_2; pos 18713465 t o 18714010 reverse strand)
cggcgtctgatcattctaaggtcagagacgacgttttgccttttttttttatcgatgtcatgttggatatgtttagcttcgtttctgattctctcgtgtttctgttcgatttgattttgcttttagcttgagtcgtgctttgatctgcttgaatttcgtctttactcgcctttggttactttgaagaagatgtttgatagtgataaatattttctttagttccgttctgagtttcttagcgtaagctggtgacgcaatcagcggagcttctgtgactctctctgtttatcgaagtatgaatcaggcttatcaatcctatttttgtcttcgttcttgcgttttcgtatgttgtctcgtttaacgatgaaattgcttgaggtttgaaaatcttatttgttggtcttttagaacgtctaatggcatacatttggacttgtttgttttgatatttgagttcttccacaagaaaacaatcgtaattattatcttttgtctcaaattctcaggtgtcctcaagtcttggatttagtcgcaacctgaaaccat

SEQ ID NO: 40352 - DNA, 898 bp, Arabidopsis lyrata
  Intron number 4 from transcript 944499 (locus 944499) deri ved from phytozome v7.0 (chr-ID scaffold_7; pos 2933789 to 2934686 reverse strand)
gactgtacctggactctgcagactaaaactgggaggtaataactttggctttacttgttttggctcctttgcactaagtatataatgttttgtaatcgatagttgcatggtgcatattggtctaacctattttcgtgatggccttgctcattatcagtggaacttttgatgtggtttgtaccatatagagcttgaatatatagtttcgccagttgcgtggctatgttcgtgtgctctatgcctctatgctttctattgagtgaatttctagttcttgccatttacttacattgctgacatggttttgttcactgatcagagacattatgtgtgtttcttgtcatctttggtgttaatgcaaactgcttgaattcaaagaacctgcacttcttttcattattaatctgtgaagtacttgttctttcattcctaatattatatgtggaaaaacaattatgacgaggagctctgaatgttctgtttctacattgaccacactcacaattgatgtagcattcagattgggttttctctggaacttatgaaagacaactagacagtttgagatatatggagcttctattgtttgttgttaccttgcctcaaaaaagagaaataaagtttcgtttaaacattgtagcatcaaattagcttaaaactggtctctgaggtataccatttttgttttgatataaagttataggtatgcaaaatcaacgagtttttcaatccatggctgtgttttgttttctcaagttcctgaaaagtcggttacaatatgcaaagattcttgtagcttgttaaaaatattagtttttttataattataaaccttctgaaaatgcatcaacctttctgtcttgcagattcgctggagaagtaagacttatactgcatt

SEQ ID NO: 40353 - DNA, 899 bp, Arabidopsis lyrata
  Intron number 2 from transcript 893821 (locus 893821) deri ved from phytozome v7.0 (chr-ID scaffold_6; pos 7960741 to 7961639 reverse strand)
gaaagtcttctccgagtttggacaagttaccagtgagtctatctgtgtctctctctcagccttcttccaataggatgattcaaatacaagcagcaccatgaatatagtcaatagcctaatttgaacctcattgtttaacttggactgttaaatcctcaacgaggatgaagcttagggagagaatttgttatgtgaatcaatggtttctcttcaacctcttgagtcttcactgtgataagcaatggtgtcagtgcttccattgtttccactcagtgatatcaaaagctcctattcttattcggactatagctcagagatgttctatacgaatagctgaactgttttggtgaggcttttgttaccatgagttgtggtccgaatcaaaaaccaagataagaggatggaagatatgtgcttttgatatcacaaagtcgtgaggagcagaagcagcaaatggaagctctgaaacgaataaacaagtcctcatgagcttaagagaagccattgatttgctgaaaacttggctgcttttatttgttatattctcgtctttaaaaaatgagagaattgtggattactacaacttcatgtattcatttggctaaaacgcccatgagctcccttgtttcatagtattcatggtggaatcagtggctagatattatttgttgtttcttagcgtttttcttttcctttcatataactgtaaaacatactaggtcgattatattaagcaaatttttttaattataacagcattaagagtatcaataggttagcttgattaaggaatttgcgaatcacagtcagtcagaaaccagtacaatcttattttcttactgtggagcactacttttttggcagtaaaaatcatcataaacgaaaggactcggcagtct

SEQ ID NO: 40354 - DNA, 572 bp, Arabidopsis lyrata
  Intron number 1 from transcript 941792 (locus 941792) deri ved from phytozome v7.0 (chr-ID scaffold_6; pos 9601304 to 9601875 reverse strand)
actttcgcatccctcttctattttcgtttctaaacgtaagttctctgttacaaattgataaacgtagtttactgtttgtaatgcccggctagtagaaacataacctaagactagtgggcatacaggttttgttgagtagaaactagaaatttggactaatttattaaattgaattctgggttttgtcttccgtcgcagcaaagagtttttttcctaattgctttttttttttttttttttcattacagagctcgtgtccatgaaattgtcattattttggtctcttaaagtataattcttaataattttgttttatgattgcttttatagaatcatgttttcagtatcctctataattcagaatttctggcattacctttgcttttttataagttttagataaaacttgttttagagcacactaatttgatggataagagctttctttattctcttcgtgttgctttgattttgtatctgagtttctttgtattgatctcgtgtgggtgttaattatttcaataatgggatttgcaggttttgttaccagaacctctgctgctgtttctcct

SEQ ID NO: 40355 - DNA, 420 bp, Arabidopsis lyrata
  Intron number 1 from transcript 947066 (locus 947066) deri ved from phytozome v7.0 (chr-ID scaffold_7; pos 14820050 t o 14820469 reverse strand)
gcgttaggttctcttctttgccttttcccctaaacgtttgacttttagcttttgttctcggcatatccctagatttgaagctatgtgactgattagcttcttccattttgctttttcttttaaatgaggattagatccttacttatctctttaagaattattcgttttacattgagaatcttccaaagtgttttgaagaagaataaacttaatcagcccttgcatttaactaaatcatatcttgtttattatgtatcattctctgaattcacttcttcctattagggaactggaaataacttctcattagattctgactcttttgggcatatgttcaatctaactgttgtttgtagtgatatgtttctaatttgacaattcttgtttgaatgttgtatttttaagcttcttatttagtaa

SEQ ID NO: 40356 - DNA, 574 bp, Arabidopsis lyrata
  Intron number 2 from transcript 477513 (locus 477513) deri ved from phytozome v7.0 (chr-ID scaffold_3; pos 724148 to 724721 reverse strand)
tacactcagtatctatctcctctgcttctatgactctctaggtttcaaaatctctgattgtatatagctagaacttaattgatttgattgttgcgattgatcatagagccgaatcgatgaatcaatggcgttgcgatgtcgaatacttaggttttcgattgatcataggaaggaagaattttatgtcttatgtttataccttcttcaattggatacctgtttttttttttccttctgatttttgtgttagttcttcctcaatagtgtgtagaattttcaagttctgaaacatatatagttcggattcggtggcgtatacaaatgattagctgagatattggttcgtctttgcattttcattgtatactagccgggaagtcgcatagaattcctaatgaatgtttagtttctgatggttttgatctttgagactgttcaaagtttccttggctaattggctttcaatcttctcaatgagattcttctgcacatgtggttcatttagattccatagtgaatgttttaaatccatgaacaaaaagatgctctcttttaccttatgcaggtgtggtcc

SEQ ID NO: 40357 - DNA, 768 bp, Arabidopsis lyrata
  Intron number 1 from transcript 475148 (locus 475148) deri ved from phytozome v7.0 (chr-ID scaffold_2; pos 2189410 to 2190177 reverse strand)
aaaacgttaaccagttttgtagttgttattgatatatcatggattttaccgtttttaactatgatataggtattgtttttagagtctttttgttatttgtagagtcttttctagtattttcaggtttatgtacgttcgggactaatttggagattatggatcactttggagcaaaaccgagaagttatgctgcaagagcaatccggagaccaaaatacgtgtaggtgtcgatcgacaccacccctagtgtcggtcgacaccaatatcagacgacaattcgatttcacgtctttttgaagttatgaagatttgcagaatcgccctagaacttttccctattttcaaagaagtctctacacgtttttaagaacatataaatagattcttagggttttgtttttagacatctctgagatctctgaatatcctattctattgtattatttggtgcttgaaccctttgggagataattggagagagctcccctctagagaagatttcttaaactcttttacttcttctcttgaatttatgtatgctttctattcataacatgttgtttgtttcaatctccatgtctgagtagtttgcttgttagaattagggattctcattagggatttagatgaattagtagatcgataacatgttaggataatatcattagagttcttcatctttgattgttcttaatgctaattctagagtaattaactagaatttgatcataagataataggtagattcgagaggtcatctattactgg

SEQ ID NO: 40358 - DNA, 284 bp, Arabidopsis lyrata
  Intron number 1 from transcript 923134 (locus 923134) deri ved from phytozome v7.0 (chr-ID scaffold_1; pos 24421212 t o 24421495)
taaaccgggactcgtatttcaggtgccccacaaaaataagttttttcttcttacaataataaaaattaaatgttggacattatttatttttggaccctcctacactcgcttctaatcaaagtcatccataataatctaaaaaatccatccataaatttttataattcactataataataataattaaaaggtacgaagtttatgttcaaattatattcatttgatagtatgtaaaaaaaaaatcaattttattttttgggattgtgaagttggacggagtgttg

SEQ ID NO: 40359 - DNA, 579 bp, Arabidopsis lyrata
  Intron number 1 from transcript 479217 (locus 479217) deri ved from phytozome v7.0 (chr-ID scaffold_3; pos 7435050 to 7435628)
atcttttgagattctctaattctcgtttttggaaaaggtaattttgctatcttcttcttaccaactcgcttaaatttctctctttttgggtctttccttttatgtccgtatttatcgggaaattttgttcctagggttcgatttcatgccgattggattgtattaacggatttttgggagtttattgatagttttttcagtttgaaatccattttacgggttacgatcgttgacttgtgatagtctaggtcaccaaatgtatcatttataagtgtctcgattttgatcgaattatgcttttgtaatgaaatttcatcatcatgtagaagaaggattttactcttctgatgcaaaaaattgttttttatgaaaaatcctgtttccgtttgattctgcttaaaccctataattagaaacttttcgtcgaggctttgtctgagcattagtttgctccatttcatttggggaaaaaattagctacttctaaattttcgtatgtaaagtcttgttctgtaacaccattactgacgttttgcgatatgaatattctgatacagtttcgtgtgttagagaagcgta

SEQ ID NO: 40360 - DNA, 564 bp, Arabidopsis lyrata
  Intron number 1 from transcript 484683 (locus 484683) deri ved from phytozome v7.0 (chr-ID scaffold_5; pos 5499296 to 5499859 reverse strand)
aatctgacttcccaagaatttcttcagattacatcgtaattttctttttttcacatatatcaacgattcttctctcgctctctctctctctctatctatcaatcagattctccttgtttctgcgtatttcttcgctctttgtttgaacaatttctctgggtttttgatttctgggatctgctccaagagggttttcgaaattaacaagctttatcgggtaaaattgactttttcatgttcgtaaagtttatcaatttcgtcttctaaactcaagttttcaaaaaatcagacaatatttcctttgatttgtcttagctttgtaagtctgtggtttggttttagactaaaaccacaattataaagtagtttatgtcggtggttcttgtcaggtttcttacacaagctattggttggtttagattagatttatagttaaagagaaaccaatcccacattagatgaaatgaaattgagttgaagaatggtttaattccatagtgtttactgatattcttgtatagagaagcttcttaatgactttgatgttgaattgggacacaggaa

SEQ ID NO: 40361 - DNA, 423 bp, Arabidopsis lyrata
  Intron number 1 from transcript 332081 (locus 332081) deri ved from phytozome v7.0 (chr-ID scaffold_8; pos 18378249 t o 18378671 reverse strand)
gagaattgcatgtacgaactctcttttcttgagtttagatcaagtttcagttttctgggtctggtttagttgtctctctggatctgagaatgtaattttctttgcttaaagtttgatcaggtctcagagctacttggggaaaaggattcacttttttttttcttttaaataatagaaagaagaaacttttaagtttaattgcttccttaacaaacataaagcttattaaaaaaaatttgtgtagttagttatgcaaatctcaattactcttaaactgatccaaagagtgtttgtttctagtcttaagcatagttttaggatgataagcttgctttatttgatctttaagatcatttggttttgtgttagcttccagtaacgtgtgtgttgctacttggttgattacactaggaaaccgaagct

SEQ ID NO: 40362 - DNA, 345 bp, Arabidopsis lyrata
  Intron number 2 from transcript 945676 (locus 945676) deri ved from phytozome v7.0 (chr-ID scaffold_7; pos 7682339 to 7682683 reverse strand)
tgccattaagatctctcgtgaagttgatccaaaaggtgccagattcttccttccttatatgtttgatatagttgcttttctgaatttactttgttctttcttttgtgagatataattcattgtgatgacatagtaattatggttttatttctatggagcattatatctatgattgagttgtggaagttgtggaagtttctattcttgtaattagctgtggaagttgtttaaactaaaatgatgttatccaatgactaggaataagactccgtttatgtttgattttggttgcaggttctgtttggctgcgaatgtgattataggttactcttgctggatttagga

SEQ ID NO: 40363 - DNA, 834 bp, Arabidopsis lyrata
  Intron number 1 from transcript 904265 (locus 904265) deri ved from phytozome v7.0 (chr-ID scaffold_3; pos 5528972 to 5529805 reverse strand)
cagcaacaaggtaccacggaaaataagatctgggaattatttagttaataaatgagccactattgaagtcacatgggcattgtgataagttttggagacaaagtttgcatgatatggctaactaggcagaatattagctggatataacactactcctttgacacaataatctcttcaacgattcagtttcataaaaggtgtttcattcatgaatctgttacgcactagaaacatgatgcctcttgtgtcagagatcttctaagacaaagactgcctttgtgtttggtcttcgcatcgagaggagcatcatacgtatcagcagtttttactaaattcaagggactcagaacaggggagaggtcaagcagaggaacatgaaactgatcaagggatatctattttacttccgaacataaagcactttattttattttggcccaatgaaaaccttgtcacaaaatgggcctatgacaaatttggagccctaatttcaagattcgtatctttgttaaacctttacatgttttattacatacaaagaaagtaatcagatacgattatagaacaacattattgttctttactttgtgctaaccaaatcaagacctcacagtcacagtctcacagacatagtattgttaaggacttagcttttcttcaagcatagtaaagccgaagatatcatcttctttacctatagaaggagaataacaatattatctatttatatgaggtggtgatttgattatagtctatagattaagttagaaatcccatctttgtcaattactttttatagtgtatttcccatctgatcaccctagacacatattt

SEQ ID NO: 40364 - DNA, 597 bp, Arabidopsis lyrata
  Intron number 1 from transcript 943181 (locus 943181) deri ved from phytozome v7.0 (chr-ID scaffold_6; pos 22214472 t o 22215068)
caaagcagaccaaggtaaagataattgaaaagaatgggtaatcaaatacatgagtttcgagtatgactattgagcattactatatttatgttaaacttgttgatgtgttccacataagaatttatgtggtagtctctcaagattaaaggatagatcaagcaagaaggagctatcaaaggcttatcatggtcatggattttggagcgggtactccaatctcatttgcattatgtcttcttctttttttagttaaaggttaagaaaaatgaataagaaaaaaatatctgaaaagataaggtttactgaaaacagttttctttgaaaaatctaaatgaaaatgtaaaacaaacttgacttatagagcttaggatcagggatgtctagcatttcacaaaaaattttaatggtttcttgcaatgggagttttgtcttcctgtctattaacaaaagttttgttacaaaactggccgaacttttagatataagtacttatgacctattccatgtatgctataattatgtttcatgttagtgtgctcatatatgttttgtgggttttacatatggttttacagggactaagagatttatcgattg

SEQ ID NO: 40365 - DNA, 677 bp, Arabidopsis lyrata
  Intron number 2 from transcript 926260 (locus 926260) deri ved from phytozome v7.0 (chr-ID scaffold_2; pos 13880055 t o 13880731)
tcccgttaccggcaagcgtattcagggtgtaagtattcttctgattcataccctctctgattcgatttggtacttgttgagcttaaagttgtctcctttgtttgattttggattgacccattgtatttgtttgatgcaaatgtagtagtttaggttgatttgtttgtgcttattgacggtcttgtgctggttagatgaattcaacatcagtagataactttatcataagctaaatttagtgccgctttgtctctttcaagttttctctaatgactaatgagtcttctttaatcttggtggcagaaatgttaaatcatcttggaaacttttcactatgtgtagatatgtttgttttgcaatcttgatggtagcaattgtattagtttggattttgtattgtattgattgtttcttgtgcttattgacggtcttgtgctggttaagatgaatccacatcagtacataactttatcataagctaaatttagtgccgccttgtcttttcaagttttctccttttgtatgtaaggaatcacttttatacttggtggcagaaatcttaaataatcttgcaaatcatagtttggtagatgtagttgtgtctgcctattccttcataatctaatctctttggttgtttagatccctcacttgaggccatctgagtacaagaggtc

SEQ ID NO: 40366 - DNA, 411 bp, Arabidopsis lyrata
  Intron number 1 from transcript 946985 (locus 946985) deri ved from phytozome v7.0 (chr-ID scaffold_7; pos 14292742 t o 14293152)
gattctcaggaccactgcaactctccaggttcttccctaatcattatcaatgtctttagggttttcttcttttactctcaattttccatctttcttcctctaatcttgtcacattctcgggtctagtttggttttgactgtgtgttaatctcttgtcgcataagaattatttcttcatatgaattcttttcttttgtgtaacttttctagcaataatggtttcttccttttgtcttttaatgtctattttattaaatgttttcttcggattacgactggtttcgctttctgattttttaattttttttaagactttagagaagtcttttgtagaaaaactatcaattttgggaagatgggcactgatgatttttgtgaacccttatgatataggaggaggtaagagttgtc

SEQ ID NO: 40367 - DNA, 334 bp, Arabidopsis lyrata
  Intron number 4 from transcript 497286 (locus 497286) deri ved from phytozome v7.0 (chr-ID scaffold_142; pos 11739 to 12072)
gttacaaatttgacaggtcagtgcctcttcctagagtctccttatgaattacaatgacatttgcttgttatgtctttttgattttgatatgccatcattttacttctattaaactagataatcatgtgatggcatcttagcccaaattgaaaaagcgttcactttaatggggttttgtgacaaagttgattgatgtatctctctctatttccgattaagagtcaatcacatctccttttgagaagtagacctactaatatccatctgcatagaagaaagatttgattttttttttctctgtttttctttatttagcataaacaccgtatactat

SEQ ID NO: 40368 - DNA, 509 bp, Arabidopsis lyrata
  Intron number 2 from transcript 490604 (locus 490604) deri ved from phytozome v7.0 (chr-ID scaffold_7; pos 97801 to 9 8309)
cacaacgatcttgacgagccctttctcttatcttggtaagtcctcttcccccttctttaccactttcttttattcattagtttccacttttcttaaccaatttttaccgcccattcattaatatttaggttaaaccgtattatctcaatctgtttttttttttttttttctttgaatgttatatatttcttctttatatggatttgaaagacaatgcatatatttacaccccctaaaaaactgcgtatggataattaacgaccttgtatcaccaagtcccgtttcacttgacttatattataagaaagattggagtttggtataattggcatgatgaagccaacttgcatgctctagtgccgtttcttcacaatcttgttagctattattggtggacacgtcacgttttcatgttgatttatataatatcaatatcaatgaattaacaaaatacaaaatgcatggttaatgaaggaacggagtgcaactgaggaagaattcttaccaag

SEQ ID NO: 40369 - DNA, 1016 bp, Arabidopsis lyrata
  Intron number 1 from transcript 908088 (locus 908088) deri ved from phytozome v7.0 (chr-ID scaffold_2; pos 10672207 t o 10673222)
ctttgaactttgtgggcaacatagctggagtacacgtccaagactggtttgtgtttaatacagtttatctttcttctgatagaatagaattgaaatcattaagggaatgttttttatgaacgggtattagaatttcttgttgaatgaattatgcatattggagatagatgtaggggtgggctttgcggtttttcggtttagttttatggttttacaaaaactgaaaccatatataaaccgtatgtgattcggtttggttacggtttggttttcatgatttttcggttttataaaaattaaataaaaatttggtttcggtttggttctgatttttatagattattccatgtttttacaaaaaaaaatatataagtttgatgcataaataaaagtaaacgtagtataaaatataaaatatcaataattataaattactcaaagatctataattataagcctaataaagaaaaaatttaatgatactattattaatcacaataaaaaccagacgatataactacacataattatccttaattttaatcaaaaaccaaaaaaacattcgcttttacggtttctgaccaaacgaaatctaaaccgaaaacataataaaagtaacaagcaaatgaattttcaagctaaatcataaccaaatcaaatcatttatttcagtttggttcgtttcttgggttacgatatttttgcctacccctaaataaatttctaaaactacatgaaaattccataaaaatacacaaacaaattataaataccttaaataaattttttcttcacttatccttacacatacttttaaattgtatccatttaacatccaaaagttgatggccgaaagtaacatgttatcgataaaatagttggtgaatagaggaatgttatctttatggaatttcttttctcatgattgtttcttagggacgacgaagcaaaaatgatcgagaagattgcaaccgatgtctcaaataaactgaatgctacagagtcgaaggattttg

SEQ ID NO: 40370 - DNA, 464 bp, Arabidopsis lyrata
  Intron number 1 from transcript 470961 (locus 470961) deri ved from phytozome v7.0 (chr-ID scaffold_1; pos 3370630 to 3371093)
gctgcgctgtgagatttcatcacctctcttttgcttttctttcattttatttttccggtgattttggatttcaccaatcatcatcttaattaacatgcctcagattggacttttttctgataaaacctcgatagcttttttcgtctcaaaattgttatttgattatatgtgattttgagtgatatctacttatatactctttccgtttcaaaatataaggcgctttgaagaaatttttttgtttcacaatataagtcgttttcaagtttctatgcaaattatatattactttaatattttatgattatttttattatacagtcttttttatgattggttgaacttttaaaaagtagatttttttaatcggtgtgtttttagctaaaacgctttatattttgaaacggatagagtatcattttattattgtggcctaattttgacatcaatatcataattggaag

SEQ ID NO: 40371 - DNA, 197 bp, Arabidopsis lyrata
  Intron number 2 from transcript 912936 (locus 912936) deri ved from phytozome v7.0 (chr-ID scaffold_1; pos 14014744 t o 14014940)
cttacgagggcctagattccacagaatcttccagggtaatttaatgtacaagtgtcttgtaatagagtagagttgttataaccattttgcaaatgtttttgtatagtttcttttctatgtctataatcaaatcatctgttttttttttttttttgggtatcatgcaggattcacgcctaagaggcctttttagccag

SEQ ID NO: 40372 - DNA, 344 bp, Arabidopsis lyrata
  Intron number 2 from transcript 488569 (locus 488569) deri ved from phytozome v7.0 (chr-ID scaffold_6; pos 6997696 to 6998039)
agggtaatctcatcttctctcgtgctgttattctggaaaatcacgatcatttcctggatttttcttgattcggatctcgtgtaatttgatctttgatttgttttggtttttttagtcatagcttttatcgccaatgtctgatctcttttatgttttggaattttggatttggaaaatacttgaaaactcaatcttgtgtagaccaatgccaaattgatggttgattcttctctattactaatcatagatttgttgtgagctgtggcatgaggaacaaaattgaagaaatgatttttgaatgttactttttttggttttcaattttgtgatgatgacaggtcgtt

SEQ ID NO: 40373 - DNA, 366 bp, Arabidopsis lyrata
  Intron number 3 from transcript 488569 (locus 488569) deri ved from phytozome v7.0 (chr-ID scaffold_6; pos 6998090 to 6998455)
tattggagaagttttgtctactgttcccaccattggtaagctgtgtgctttttctttttttttgctcatttcttaacaactttgcggaattcttgtgttattgtcatagctgttgtgattattcttgttctcagaagctaataagtagtgggattcatttcttgttttggaacgagatttagattgatctttgttgaaagctgttagattcattctattaacatcttacaaaaaacaaaagatttgattgcggagaggtgggatcagaattgtatatacttggaatatctatcttctccttcagttgaatctcatgttgcttggattatgtttgctgataatttaaactttgttacgcaggattca

SEQ ID NO: 40374 - DNA, 686 bp, Arabidopsis lyrata
  Intron number 1 from transcript 357111 (locus 357111) deri ved from phytozome v7.0 (chr-ID scaffold_8; pos 12264568 t o 12265253 reverse strand)
tgattcgagttgattgtcaggtactaatcaacgctctctacttagcaacaaattccaaaactgcgtgtgtgatattcaatgcttataagattgggagacaacccactcgccttacaaataaaaaacaactaacgcaagttatttatttatttttttcttcatggacatttaattttaatatactttttcatcaatctcaaatatatacaaaagcagtacaagagaattaacttaatacaaataatatagtgtgagctacatgaaatcttcttttgcaataacaaaaacaaaaccatataagcacccaagaaagaaatgaaatgagattaaaaataaaagaggaacatcatttacctcacaagaatttggtgaattccgcctctcctctgaaatctttaaccaccattttgtacacttcaatgaataaattcggaaagattctgtcaaagatttcaaggaaattaagcctaggaataagctgacatataaaaccatttcaacattaggagaaaatctatctactacttctatattttgaataatataacacaaccctacaaacctgcacgttacacatgttacatctaaaactgataaggttacacatgttagaaacgcccttcataatctaagaaacacccaaggggaatctcaaaaaaatcctcagagaactgaggagtctccac

SEQ ID NO: 40375 - DNA, 551 bp, Arabidopsis lyrata
  Intron number 2 from transcript 353573 (locus 353573) deri ved from phytozome v7.0 (chr-ID scaffold_7; pos 3767768 to 3768318 reverse strand)
attcaggtgagtaattaagttttgaactgtaactctttctatttatttgttttcttttctattttagtgacaattttgcgtagcctagtgcgggcattttttgtaatttatttataaatttatatctctagtatagcccacggaatcatattgtattagccaactttctaaaaaaaccgtgttaatgtggaaactggtaaggacaaaagaacttgtttttaaatgttactttgttgagtttttttttggccttaaagaatgttttcttgttcacggtaacagaaaaaagttaatttttgtttgtagcattttctatttatgcttccgtaaaccaattttcttttgctcgtcgccgtcatgattccataaaccatgtttccgagttactcgtttcttactttcttctgtttcttaataatattcatcagtctttattgtcaagagcttaaacaaataataaatctaaatacatgaattgataaagtcatacgcacatatatatacctaatatttgtgtgttgtcttttcttattgttaaaaaaatgaagata

SEQ ID NO: 40376 - DNA, 550 bp, Arabidopsis lyrata
  Intron number 2 from transcript 489056 (locus 489056) deri ved from phytozome v7.0 (chr-ID scaffold_6; pos 9181437 to 9181986)
tcttcttcttgcttggctccgtcgttctcgctccggtaatccaccatttcgtcggaatctcccgaataataattaccttattctgttttcagatttgattcccactattctcgactggattttgactttcttagttctttctactctttttttaatctcagatcaatctcttttcgatgttttagttcatagatgtcacatagtttcatatcttctagggttctactggtttttggaagtaaaaactatgatttgcttatactctgttctaatctcctggagatttcaatttcttccatacaattggctgtttcttagttttatgaatcatctgagtgacttggtttgagttctatatgactctaaagaacttatggttgatgaactctattgttaagctttacttggttagtttggtcgattttgagtagaagaatttgacttaaatcttctccttgtatccaaattctggagtaatttaatttatacaagcttcaattgtgatatcatcacaggaagaatagaatttatcagacgatttggatacaag

SEQ ID NO: 40377 - DNA, 502 bp, Arabidopsis lyrata
  Intron number 1 from transcript 480827 (locus 480827) deri ved from phytozome v7.0 (chr-ID scaffold_3; pos 23511556 t o 23512057 reverse strand)
gtcgtaatattcctgacattatcggttagtccctgatttggtttatctctttgccaatattgttttggataaaattgttaatataaactacgaaaaagaaaagttttttaatttaagaaaatactagcacaatgttttctttgccttgtttgaacttttgaatgtaggtacgtatattatttgttttttgctagtgtatcaaatgaataaatgaagaatggaagaaattaaagttttggtaaacatatgaactaagttataaagaaaaataacagtcataaaatgctacttaaattattataatcattttactaaatagaatatctttagcggccaaaatcatttgtatattagtgtatcgcagaataagttttccaaaatttgtgaatgttacgttcctgttaaagaattacgaatacagtacatgaaaactgtgtataactaatttataactataatatgtaatgagtttgaataatttttctttatttcagctgaacaa

SEQ ID NO: 40378 - DNA, 309 bp, Arabidopsis lyrata
  Intron number 5 from transcript 488066 (locus 488066) deri ved from phytozome v7.0 (chr-ID scaffold_6; pos 4961874 to 4962182 reverse strand)
actcctgttgaactacctccagtaagaatctgctctctctctctctcttggtgttttgagttttaactttatgattaaccttttttcatacaattatcaatatttgacattgaacctgaaaattgggcttagtaatgaatgtcctatttcctgtaacatcaagttatttggttaactgagaatcattccccagtaaggtgaattacatctgggtgtcctatagagatgattgaccttggtactagaacatgaacccacctgtttcttctttcaggcagagaagggagctcctacaattccgtctaagtc

SEQ ID NO: 40379 - DNA, 655 bp, Arabidopsis lyrata
  Intron number 3 from transcript 488066 (locus 488066) deri ved from phytozome v7.0 (chr-ID scaffold_6; pos 4962642 to 4963296 reverse strand)
cgtagctaacgagatctggcttctcgaagaaacgtgtatgttggttgttttgattctttctctcaccaatttgaatctcagattttggttttgtttttgggctttgtcttgttttgttttcgaattccaattccctccccaatttcgaatatctcttctgctggaagcttttttaatcgagtctaatcttttttttagtgattactttgcttttctgatcattgttttttgttagttattcctcaattgaacaattggatgaaactatcttgttgactagatccaaaatgtgtagacttggtatctgatttttactatacaaactgtcgacaatactcaagtcattcatttctagggttttgtttctgatgctagtttcattactttgagcttggagcatgtatatgtagcagaaaagttgagaattgatagcatataatgctaaattacatagttttagttcttagttttgcttagacttcattagttttggtcactatgcaatatgagctggcgattagttatagttatttgtattttttgtgctaccaaattgttagtttaggcagtgttgaagctgaatttgctttgtgttgtagtattattttcttatcactcaatgcttctgtgattcttttccttgtgtaggatacat

SEQ ID NO: 40380 - DNA, 583 bp, Arabidopsis lyrata
  Intron number 2 from transcript 890434 (locus 890434) deri ved from phytozome v7.0 (chr-ID scaffold_7; pos 11310363 t o 11310945)
aataaacaggtgatcttatagtttatatgtacaaatttgattttttttttttttttgtatttatggtttcactattttcaccactaatcaatttttataatcaaaaagtttggtttcaacttttgagaaggtaatcatcgatggtttggtatgtttctttttgttgtaaaaagatgaggtacctcccgattttgttgaggtacatgttcttattattttcaaatatgtctttttcagaagaaacactccacttttgataacacagttgccacaaagtcagaaagatgacttatttcagggatgaatcttcagaggaggctaatttttgtcgttaatacaatttaagtattcctctctttagattcgggataacaaacttggctgttaaattcaggaattactcttcgttgccaatctctctccccaaactaaaatattacatatatggaagtagtaacttaaagtttttggtatcgaggtcattctaaggcactgagattcggactttggtatgtataggattcgttttctatgcactaagatttaattattgtttaatttattggtttttaggttcctttcc

SEQ ID NO: 40381 - DNA, 637 bp, Arabidopsis lyrata
  Intron number 2 from transcript 915018 (locus 915018) deri ved from phytozome v7.0 (chr-ID scaffold_1; pos 33080639 t o 33081275 reverse strand)
agtttaagattgttgaaggtcacaagatctaaccagttccttctggcattctcagtatgaagcatggtcttaaagtcaccgttagtacttagtaagaagatatgattcttcttcttgcttggcttctacggtaactattaataagtgatgcttagtatccattaggtgttgcgttttggtgttgtttacattttccttttcttcattttatattttagataatacagggttttgggatttccttttaatcatttggatttgattccacgatttccaaattgaattcgtaatttggatttatttagatacttttaaattttatggagattaatttaaattgatttgagataattttgtagaataacaatttacaaatcttagtgatgattactagagattaaaaaaaaaaggaaattgtaaaaacaaaaaggagattaagaaaaaaacaatggaaattgtaaaaacaaaaaggaaagcgccgactagagtttagttataaaataacaacaacacaagatcacttgtcaacattcaacacaacacaaagatcacttcctctctacctctgtctcttgttcgatttcatacctttgtctgctaattccaaaaacaataatgtttccagaaatcaccatcg

SEQ ID NO: 40382 - DNA, 476 bp, Arabidopsis lyrata
  Intron number 1 from transcript 344308 (locus 344308) deri ved from phytozome v7.0 (chr-ID scaffold_4; pos 6354605 to 6355080)
tgtttggggaagagggactaagccacaactgccgagtctttattttctttttttgaatgaatatataatttattcactaaaaaactgtgtttacatcaagtgcaacgtttctgagagtagagtaaagagtttaaagttcatggacttctaatatacacttaagatcgagttgaaaaccatgatataagaagatcttcatatcttcgattgcccgagttttaatttgaagaagagagagtcggttgcggatggtcttatcgatgagtctttaaaattgttgaaaatgaaaaaacattatctcaaatttttggtcctttgtttatgaaagttattgggtcatcttgagttttcccagtggtggaaataattttgattcggttaactgagtttttgggttattgttatttccaacaatatgtgagtttggaaccgggtgatgaggcataaaacctttggctaaagctctaatccagggg

SEQ ID NO: 40383 - DNA, 549 bp, Arabidopsis lyrata
  Intron number 2 from transcript 344308 (locus 344308) deri ved from phytozome v7.0 (chr-ID scaffold_4; pos 6355094 to 6355642)
ctcctacaacaaggttattttttcttaaaatggtgccctcttgaaaaataagtcaacaagagaaggtctataattagactggtggtcaaagaaagagaaattgttttgagattttaatcaaacatatttatctattagtaatttaattaaacaagaaaaaatacgaaagaccctattagaagagaaaagaaaaagagaatctcaatgatcacatgagcacaaaagttattgaaaaatatttaaaaacttggcttgaaatcgaatggatagaaaaatcttaaactcatgtgagagagattcaaaccttaaaaaaactctcccttctctcttaaacaaaagtagccgccgctttgtttttccggttccggtggcttccacagcaccggagccgaataaactctgtttcttgttttgttttatctattttctttagtacatccatgttttccttccaacggaatcagatctagttttccagatctatgttttaaaacttaatttttttcatccttaggttcttgctttttgcctcttttgtctccgccattc

SEQ ID NO: 40384 - DNA, 608 bp, Arabidopsis lyrata
  Intron number 2 from transcript 488423 (locus 488423) deri ved from phytozome v7.0 (chr-ID scaffold_6; pos 6441492 to 6442099)
caaaatcgaaaacccgtttagttcttcatcaaaaggtatagtctttgttccgattcatctgattttttttggtttttttgtttttgtttttgtttttcttatgtgaagcactggacaatgggttctgattgactctgatcagtgcaatctcaaaatgtaaatgttgttttctttgttttctggtaaaatttctctgcttcttgccctgtttaagcaacttggggttttgtttttaacttttaatgatctcaagtgggttattttttttttattatatgtttctctgttttattgcgtttgttagggatttgcctaaattaggtttcaacttacaatcgcttagttgcttgcatttcactttgaccaatttttacccctttttttttcttcccaaatgaagccttgagttttctttttgaccaaacacacaaatttgtactgagttaggtgaatgtttgattttgatgtctcttgctctgtttaatagtttcttatagtcaatgctgaaaaactcctaaacattttagtgggttgtgatgagttttggattgtaactggttaaaactccaaacagtgatcagattattctaccggtgaaatttgagaga

SEQ ID NO: 40385 - DNA, 364 bp, Arabidopsis lyrata
  Intron number 1 from transcript 946460 (locus 946460) deri ved from phytozome v7.0 (chr-ID scaffold_7; pos 11381562 t o 11381925 reverse strand)
cgaagaccctgttaagcttgcctctgagacagcttgtaagtttacttgctcaataagtttaaacctcctctagtttaatttcaatctcagagatgaatcatcagtcagatcatattccacccttctctattcactaatatatgggtttggatttaattagttttgttcattatgtttcttgtctgcatcaataactgtcaagaaggatgtttgtcaccatgctttatattgatattcaaaaaacttttgtagtggataaatttctttgtttgttcctggttcttcttttgtttgatctcgtagtgtcgcttgtttttttctctttccagttagtgtgagtgaggttgaagcattgtttgagctg

SEQ ID NO: 40386 - DNA, 583 bp, Arabidopsis lyrata
  Intron number 1 from transcript 485431 (locus 485431) deri ved from phytozome v7.0 (chr-ID scaffold_5; pos 15376597 t o 15377179 reverse strand)
tcttttctcaaattcatcgcttctttcgctgccatgtgagtttttcaaaactccatctctaattttgcttctcgtcaatttgttttgattttcttgtgggttcttctataattcgacgaattggtaatttttgtgattcgtacatgtcgaattcgtagaagctgattttggggtcaattgaaactgcgaaaaaattcgagatcggatattagtgattatgcaggtgaatctctgattgatcattatcaactgatttttactctgttgttattgacacagtaatccaagaaaattcaatcctactgttagcagaatttaaaagtgattaatttaggcttaatttctgtttatttctgttaacttgtggacatttgcaataatcctactgtatctagtatctctgattggttgaatttttaaacttatgtaattggtcagtgaccacaatccacaaacatgaaaaagggcgttacttctgctgcaatttatagaactgttctggtcattcatggtttccttaacgtttttgttttggtattttgatgcagctacttgttaatattggatcgtaccaattggaaaa

SEQ ID NO: 40387 - DNA, 720 bp, Arabidopsis lyrata
  Intron number 4 from transcript 936794 (locus 936794) deri ved from phytozome v7.0 (chr-ID scaffold_5; pos 6347122 to 6347841 reverse strand)
gatacagattcaaagccagaggtataaatgttacttcttttttcaatttgcttcagttggatttgtgatccgtgtaactgtctataggtaagctttttacttacctctctatttgacgttttcagcaactaatttgcatatccacgaagctttttttttcttcataatttagggatatattgtgttagtgtgtaaacatttatctaaatttgcatatacacgaagtaattcatatatatttgcatatactagatttgacaatcaatctttgttttttcacaatctctgatttttgaagtgacttggatactgagaatttttgtaactatgctcttccttttcatgtcaggatccttcactcgctaaatcatccaaacatactcaagttctatgattggttagacttactagctaatatccacgacatgttttcttgcaggccaattactctcactcttctttgaaaaaacgcagcttcttgtgttctctgtgaagtatgttcttcatggtaattcatggtctctagttaagttgtgttcgcttttttttttgtctcagatttagctgtagtaggcagtggtaagaaactttgctgctccaaataccttttctagcttatccattccctgcttttttagattttgtttattcattctatgaagagaatgcttgacgtgatgcggagcaacaagcatctcaaattcggattgcaaacttgga

SEQ ID NO: 40388 - DNA, 468 bp, Arabidopsis lyrata
  Intron number 3 from transcript 490836 (locus 490836) deri ved from phytozome v7.0 (chr-ID scaffold_7; pos 1070570 to 1071037)
gaaccatctccgtatcgtgtaagccaaatgattttgtatatatatataaatatatctacatacaattattctttacattctctgtctaattattaaaaggaataatgtaagatatagttgatcagtagtgacaaaataaacaataattttgtactataagattcgtttaactattcttgtcttttgatattgtcacgagagacatgattggctttcatattttgtcggcccacgggccatgtattaagagaatgaaagagacagcatatatatttgttttggaggcattcataatttgaacttgtaaggtcccatattttttataatctattagccatagttaatttgtaagaaaaaaagacaaatataatgatcaaagatacggttctatttgtaataatatatgtagaattaatatccattttctaatcgtctaaatatgtgtggtgtgtaggttctacgtagaca

SEQ ID NO: 40389 - DNA, 1049 bp, Arabidopsis lyrata
  Intron number 2 from transcript 478195 (locus 478195) deri ved from phytozome v7.0 (chr-ID scaffold_3; pos 3520953 to 3522001)
gttaaattggtttttgaagccaagtgtggagattctccctctctatatctatatatacatttttgaatgacttttagcaaataaatcctagagttggaccttatttacggatgaatgccattggcattaattatttaaatttgaaaaatattacttaaagatattaccaatacgatttcgagaatcataaattcatatcttccttaattttctgagtcattaatgtgataatctttaggaaatatttctctgtaaaaaaaaaaaatccacattaatgaaggcattaaaatcgacactaacaattaaattatttagatgttcaattattttaagattcttatatcttatttgatatttttttttaatatctcattctttgattactgcgtttagaatttattggttgttacctattttttggtgaaatttattggttgttacttaataagtaattatggtgcgtttattttagttaatatctaatttaaaggatttgttttcttttattattaataaatgaataacatgtatagaaataaaagattttttttgcgactccataataaaaatattaaactcttattttctacatttcttacacataatatcctcttattcaataacaaaaaatatatattacatatttttaaaaatatttttaatatttaaattatataaaaaaattttaatattaatattatttcaactctatacaaatttaatatatatgtatatatatcttatgggaaccatttaaaagaaatttttaaattgacttgcattatatagcttttaaataaaaatattattaaaaagaaaaataactaaataatgtttaatttcacgggacgggtaatatgatgggacgggtttgggttgatatttataaaagatcgtataccatgggtgaaatcctaaaattaacaatcaaaataatctatcaaacaaattacattttgatttttttaagaaaatatagccccgcggtgtaccgcgggttaaaatctagtgtgagacatttttttattcttaaaattgtgtccggtttg

SEQ ID NO: 40390 - DNA, 766 bp, Arabidopsis lyrata
  Intron number 1 from transcript 913041 (locus 913041) deri ved from phytozome v7.0 (chr-ID scaffold_1; pos 14750037 t o 14750802)
taaaccagatccggttattttgcgaagcccattatcgaacaaagtcaagaaagagaattattgtttgatggttcggtcacaatgggtgctgctccgtcaccgagacacttgccaattccaactttttgcgtgtctttagctaaagaagacttgagtgaaaaaaataaaataaagacttgagtgagaagaagacagaatcttgtaagagtttttgttaaccaatttacctatttgattcagactaagtatgcccaactcacaatatctctataaccattagattttttttttttttttctggtaagtgtttcacttttatgctttgaatggaagaaacgtatcagtacatgcatatcaagcatatttgatggattacgcagatcaagcgaatcaaacatatcaaacttaagaagggtagatatatgtttatatagagaaaaactaaaaaggtgatttaaatagaataaacaactaaaatattatgtaaacaaatttcaaaaaggtattttcattttaaatctgatattaatatatacatttgcattttgaaaaaaagtatgcccactgactggcgtccttaacaacgtgtggtcaaacttcagatctcctcgcaccacccgaacagagacacgaatgcatcagataggggaaaaaaccactcctccgctgccggagatgaagacttgctcactcacgctttgcaaaagcaactccaagacctgcaatcatagctaaaacccaacaaacctgtcacgcgaaaccgaat

SEQ ID NO: 40391 - DNA, 775 bp, Arabidopsis lyrata
  Intron number 3 from transcript 321517 (locus 321517) deri ved from phytozome v7.0 (chr-ID scaffold_4; pos 18469333 t o 18470107 reverse strand)
gagtcaggctgtgaagaggtatgctgctcacaaaattcacttctctctttattccctttctggcgaaattaattatttgatggcactagagtgatatccttacctggtagtagaattgtagatagacattatgaaccatcttctctgaggagttacattacatgtcctcaaacatttcctcctttttatcatgctaggatagaatttcagaggttaggtgatatagctgcatctaatcattgcaagtgtacctattgcatttgattgtttagctataataagtttgtatatcactgagtgtagaagtttggttctagctaatagagttgtagtaatcgtgttcctaaaattggaaccgtttgatattcgtttggacgcagtgttattgtgttatgtaactgatgttgtagtttggaagcagaatgcctgtctctcacatagtatccatatgacatataagtcttgtatgtagtccatgactacttatatcaataagcattggtatgtaactgaaatggtaatttgaaatcagaaatccttgtctcccatttactaattgtatattcaacaaattattttctgttgtatctgtgagatccctttactgtaatttgagtagattgcaaaaaaaaaacacctcttgagtggcatttgctcttcattgtctgattacaagatgggattgagagtatggttgtgtgattacgcaatctaattaatgaaaagatgtatgattgaaggtaactctggaggcagaagtgagtaacaaaggagc

SEQ ID NO: 40392 - DNA, 524 bp, Arabidopsis lyrata
  Intron number 1 from transcript 899660 (locus 899660) deri ved from phytozome v7.0 (chr-ID scaffold_4; pos 1864412 to 1864935 reverse strand)
aaaacatcttaattggtaatatatttttctttttatttttagttattattctttgcatattttaataatagatattcatcaaaaaccaaatattaatttcttaattttgtagatgtacttggacaggttgttagtttcaatgagatgaaaactcatgatgttaacaacaaaatcacaaagaaacttgatcttgaactcagagacacaaagtaatttcatatggctttaccctattataatatatcttatgttatttgtacttacaattatctcacaacttattttcttatatagtgatgaacggctgaaatgtactctttgggggagatttgctgaggcaatgtggaatgcatgtcaaaatgcaggcactgagagggtgattgccttacttcgtcttgctaagatcaattcattcaaaggtataaaacgtttttgataaaacatttttgggatttttaaaggcagatcacagaatatatttatactaatagtactcattttgttaggtgaaagatcagtttcaa

SEQ ID NO: 40393 - DNA, 784 bp, Arabidopsis lyrata
  Intron number 4 from transcript 493292 (locus 493292) deri ved from phytozome v7.0 (chr-ID scaffold_7; pos 12555515 t o 12556298 reverse strand)
tgctacttggcattgcattgtcggtcgcaactttggttagttctctcttcgcttcatttctccttaagtcggcattgttttgatactagtgctcagttaagggatattgattactggtagctgaatctagttttgaacataactattcttctttgctgttgcttctgtcaatctgtctttgattctcgtctgtttaatagtgagtgagatgcttctgtcaatccgtctttgattctcgtcttgttaagactttgagtgagatcaatggtttgcttgcttttctgtcttaactagatttattttggaaagattgttcttcttcttgcatttgaatggtttttttacccttagcgttggagaaagtttagattgggtttgttctcagtgacatgaaagtttggaattgcaaatgacagagatcttggtaccaccaagctagggtttaatcctctgaagcaagtaagtatgtaagtctataggaagtttcgatctagctttagtcggaatatatttgccttgttcgaatctttgtatgttttagtcttttgtgctttcttgaacaattacgtttacctgcatttagtataaaatttgctgtcctgtaagcatcatgtggtaccacctcccttaacctcacagttaccaaatgtattcatgtgcttaaggcgatacatcaacaaacaagtgatataccgtactggctttttattattgtctgtggaatctgattgacattctcgtttgatacttattcgacgatattactctattcctgcaggttctt

SEQ ID NO: 40394 - DNA, 327 bp, Arabidopsis lyrata
  Intron number 2 from transcript 897299 (locus 897299) deri ved from phytozome v7.0 (chr-ID scaffold_5; pos 11761507 t o 11761833 reverse strand)
ggagttgaaaaaccaggctaacgaagcttttaaaggtgtgtaattttatcgaaaacattaacgaaatcttgtggaatcagtttatttcaactcttttagtgaggtactctatctatttgctttaaattaagaacagcttgctctttttttgtttgtagccataattgcttgttaattcatgtgtagacaggctcttctgaataaggtaatcacccaagaaggtcttccacttccattttgattttgattttgattgttcttgtcttttgtttactagtatttctttagtgaaaaattgttgggttttaagtgcagatttggagttta

SEQ ID NO: 40395 - DNA, 880 bp, Arabidopsis lyrata
  Intron number 1 from transcript 931766 (locus 931766) deri ved from phytozome v7.0 (chr-ID scaffold_3; pos 22941062 t o 22941941 reverse strand)
gcttgtgtatcaagcaaaaacatgtattttctagggcttttttttacccacaatattgacatattaatctctgaattgcactccttaatttcggtaaattgcaaaatttgttggttattgatttgttttgcttataatcacatccaaatcgaaaaaaagtcgagactaaaaccaattctactaacctcaaccgaaacatgtcactatgcgtctatgaccatgtcccacgaagggacttgccgttgttaagctttttaataaaaagaaaatccaaaaaaattataatatataaattaaaaataagaattattaacgttacgaacaaccatgcattgatcgcgttgatctcgatcaagtatccaacaagttataatttataatttacaaattttgaatccttcactgaaaacttaagaaaacggtaaaaccaaaacgtgaaatgcttgtttttggttagggaagatgtgaaatgttgatgataaccagggaggttgtcatatttctcctcttcatccggtttggtctttctattcccggttcaaattgtttttctattaacccgtttatcggtttacgtatggttgtgaatattgtgataagtttcacactttcacatagtctggctcacttcattccaaaccaaacctcaatttaaacggtctggatataaaccatatatattccaatcaatttcgaattacaaaccgatttttcgaactcagaccgaaccaatatgataatgatcccacgacgtgcgtagccgttgatttcgttttcaagactccaagtaaaaacaagtttataaataacaagaatcatagatcatccattaatcaaaatgtaagctcaaaccatttttctgtatcttgtaatcgttttt

SEQ ID NO: 40396 - DNA, 981 bp, Arabidopsis lyrata
  Intron number 1 from transcript 950423 (locus 950423) deri ved from phytozome v7.0 (chr-ID scaffold_8; pos 18069840 t o 18070820)
ggatatcgtgctgaggaggttctcggaggaaattggttagttgtttttgttatcttggagattagcgttctaattgatacgagggattttgatttttgcttattggctcacgtatctgctttaccgaattttggctgcttggtggagtttgattaagaaaggatcgtgtagtttgagtttaggtgaggaacgtagagttgtttaccaatcgattttcgttggaattcatgtttaatattatctgtgaatttagagatgaagttgcttctgagaacgctactattcattgatcacttgatttggagattttggtggaatacaaacgaatagatgtcttgattgataatcataggtgaggtcgcggaatttcagataatctttggactcagtggactatttgtgtgtccatcaatcttaagtgcgtaagcaattcagtgattgtgatgtttttatattaatggagctttcatggctgttgttgagctgtttcagctgctacgtgtgttaagcaaacttaaacgtgtatatatatatgtgtctaccgagataaatcgagctatccctgtgtagtttctcggggtgtgtagcgaacacataaaactctttagaatgttgatgtgtagtgaaccagtgactagttggttcatttgaaaggttaagtccattgcgtttcgctgtgtgttcgtttaccatgggggaactgctagtagcttccttttcttttctcagtattgctaagcttagatcttacagggaggagctgatcaattcaaaatagttgttactgttgaacagaatcaaactctggctatgttataacctatgcttgtttggttattttggttttgttttcagtctctacatgcacggccaaagtttttgtctattgcttttgcgcatcagtaagttggagataaattttgtttttggtcttatattgtttctaaattgatttctcggattttgcagccgcttcttgca

SEQ ID NO: 40397 - DNA, 649 bp, Arabidopsis lyrata
  Intron number 1 from transcript 490346 (locus 490346) deri ved from phytozome v7.0 (chr-ID scaffold_6; pos 23824446 t o 23825094 reverse strand)
tccggtgcgttttcttcgttcgtttttcctctgattttgtttcatcttttgtttttttccttctgttcgtttccaaggaagagtttaggggaagctttgtgacaattcttttctctctaattgaattcaatagcaattgtgtattgcgtcttgagctaattccccctttaggactgtgattttcttagttatatgagtccgttacagagagacaaggagtcgtaaaaagaatcaaattgcttcgttttctgatttggattccgagagagagagagagttcacgtcccattgaatgttgagagctactttagttattgttcttgttttgtgtatgtgtgcgagggaaaaaaaatccacttagctgattactttcttgtgtttgttgggtcagtgagaaaatgtaggaaagttagaatcttgagctgattaggttatagagtagttctttaagtaagttcatgtgccaactaaacacttcctacctttcttgttgaggaccacagttttctattactggttaaggaacctatttcttgtaaaaaattattttcttttgaattcatgcatctacttttatttaccctttttgcttggttctgttttgggtttattgaaattgattatgtgtgtacaatgcagtgtctgtgga

SEQ ID NO: 40398 - DNA, 532 bp, Arabidopsis lyrata
  Intron number 6 from transcript 484543 (locus 484543) deri ved from phytozome v7.0 (chr-ID scaffold_5; pos 3899345 to 3899876 reverse strand)
ttgaagtactgtacccttcttttcttttcgtatttattttcttcttacttagtttgtgcaattttctgtttgtccttacgtcataacccaatctcttaccttcacttcatggaaaatgtggtaactttcgttgaagcaaagttttttaaaaatggatttttttttttctttcttcaaacaaagtagtattgggagagtagcatttgtaattctatttttcgtagtcattgcaaatagtgtagctacgtgtaattccgaatcagaaaaggtccacaagtccaggggacaaatcaattggaaaggggaggtggaaacaggaaaatgctgtaaatttctttcagtatggattctggtctagagttgattcttaactatcaaaatttgcacttataaatatcttgttgttttaccttggtattatccagagtatgttgcatttcttgttgatgttactgtgttgtgctattcctcaacttatagttttgttgactgtccaggttcgaggtgctttagaaactcttcttggcgctct

SEQ ID NO: 40399 - DNA, 479 bp, Arabidopsis lyrata
  Intron number 3 from transcript 483652 (locus 483652) deri ved from phytozome v7.0 (chr-ID scaffold_4; pos 22014177 t o 22014655)
gaaggatcagggagaaataccctgatcgaattcctgtaagttcttttttttttttttttggggttgatttgatctgattttgttctgttcttgtaaggttttcttatggttatagatttgtgttctgcgtgtgtttcaatgtatgctgtattcaatttcacgaacaagaacatgaatctttgtaattagtttcgtagtttagttagtctttgttttgttttttgaccttttttgttctgttctgttcttgtaaagttttcgtatgtttttgtacatgtgtttgtgtgtatgctgaattcaattgcacgaacaagatcatgaatcttcgtaatgaatattcctagtttaggttacagaacattagcttcgttgtttgagaatccaatactgtgttttttgtattcaagatttagatcatttatcttacattgtgtttggtcgcaggtgattgtggaaaaggctgagaaaagtgaagtccc

SEQ ID NO: 40400 - DNA, 779 bp, Arabidopsis lyrata
  Intron number 1 from transcript 895173 (locus 895173) deri ved from phytozome v7.0 (chr-ID scaffold_6; pos 20267807 t o 20268585)
cgagtggaacaaatcacttgaattggctagaaaaggtgttcaaacaaaaaaaaattggctagaaaaatacatcactcctaattgaggaaatatttgtaatttaaatgcaatgtaacaaatggtatccacgagtggaacaaaaagttgaaaagaggagaatatgaaagtacagtagaatgaaatatattttttgtaatgatatttcacttgaatttggtaaaaaaaaaaaaaaaaaaaaacttcattcttttttgtcaaacttcattcttatgattgaaattcaaagtatctacaaagaaaagagtattaatgatccaaaagagagtttttaactaggtttctttgttgttagtatcggaaaaccccgaactaaaatatagacttatctccgaaatatgtgaaattcttgccattgaagataaatattcacaatagaaaaccatgattaaaatcggaataagaccattggaacattggttttcctacttcaagataagtcttccaaatattggaccagcttatgattttaaaccgatttttgtttgatcatattttaaactgttacacaaattatgtagtgataaaacattgcatccaacattttgaacatattgattgaggttcatgcttgattccacttaacttaaacctttgcaaatgtgaattactcatatatactatataaaaaaactgcatccaacagtttgaacaaagaaaaacaaatattgtttgaggttcatgattgattccactcaactaaacctttgcagatataaaca

SEQ ID NO: 40401 - DNA, 507 bp, Arabidopsis lyrata
  Intron number 3 from transcript 327423 (locus 327423) deri ved from phytozome v7.0 (chr-ID scaffold_6; pos 22604938 t o 22605444 reverse strand)
accttctacttcttttttcacttcttcttccactggtaagttattttttcttttacattttacggtttgtttttttttagtcgcttgtgattacccacttaataggttgataaatatatatatagataatatcgctgttttgtatatttataaacagattgaaaaaatagaagatttgtagatcctcatttcacataagagatggaatttgtttataaatttgtaacttaaaatcaaaatgatgcaagatgtgaagattttacaataagaagttgtatttattatgatttgtgagttttttttttttttaactttttgtatagtagtccatttatatatatatgtttgtttaaattgaggtttattaatccatttatttttctcaaataaaaatagtttgtacatctaatgtcttctctaaagtaaagttatagaatacactaattccattatattatttttataaatgtagattttgatcaaggatcgagtcaacgaacaatatca

SEQ ID NO: 40402 - DNA, 688 bp, Arabidopsis lyrata
  Intron number 2 from transcript 472704 (locus 472704) deri ved from phytozome v7.0 (chr-ID scaffold_1; pos 10992131 t o 10992818 reverse strand)
tcatccctgaactccgccgccgccgttctgacaaggtatatatacacttcaaaataacaaaatttaatctatatatctttcttgcatatacatacatacttattttgtatacttgtataacttagcctgcacatggacttagaaagttacaatgaattggaaccatatatgcatggtgaaatccaacggcgtgtagtttaaagacatgtggcttacaattaactatacgtagataaagtaacattaattcacagcctcatttatgcatatatcttgtttgttctttgaatgtttttttgcaattaaattttacaagttggtggtgtgggactcagtttgttcccttcctacttccacgtaccttaactacatgtctcctcattactcttctctacctatattctcaccataattctatatatagctgaggaatatgattaataaatagtggccgtttatactgttgtgcacattgaagtggtaatcatgagaaaaaaaactaaaattctgttgaaaagtttgaagatatatgaaattgttacaaagaaagaaagaaagcagaagcacatgttgtcacgtactctttgtaaggatctaaatgatcgttttcttgtactttaaactaatgattaaatgtttaaattattggacaggtgtcagcatctaaagtactacaagagacttgcaa

SEQ ID NO: 40403 - DNA, 944 bp, Arabidopsis lyrata
  Intron number 4 from transcript 484593 (locus 484593) deri ved from phytozome v7.0 (chr-ID scaffold_5; pos 4316273 to 4317216)
cctgctcttacctttatcctcgccgttatcttcaggtttttgttacttttactaattactaattatatataaattgttttgctgatttaagatttttttcattcagattaatacagaatattctagtcaacaagtcgaaattgtaaacattccggcttaattaattttaataattataatatgttctttagatcaattacgtcaaacttccccaatgatttttttcaattcgacaaattatgtttttcttagatcatgttagttttcacttcactatagttttgtaaccaattcttttccactagctgtcttacctaatatagaatatttgttcacccctatatcccacaactaatgtctcatcctcttatttacagtaaattaggtaaacaatgttaggtaaataataaatgtcagaagagtaccaataaaagattgggtgaaatttaactttatcaaatatatatatacaaatataatcatttggatcattttaagatatactaatattcaacaagctaaatagtaactataactctaagataataagatcacactattaaacaaatctaaattcatttgatttgttgtatttcgtgtagctgataaagacttttaagtaattaggtaaataatctatatatatggtaaatgcgttttaattgttcttctttctttctttcattctttcattctttctttctttcaatgcatatatttattcaggtttttggcatctatatttatggtaattgatatgaagataagtttgttactatcgcactattgcactattgcacaatcttgtggtccatatctaacaaggctgtttgcatgaacagaataaatgcgtcttaatttgtgtttcataactttcattgattatttcttggccttctttggaataaaacgtaacacaataaattccattttgtgaataaaga

SEQ ID NO: 40404 - DNA, 408 bp, Arabidopsis lyrata
  Intron number 2 from transcript 493202 (locus 493202) deri ved from phytozome v7.0 (chr-ID scaffold_7; pos 11872149 t o 11872556 reverse strand)
gttttagtatcgcagaaggttgaaagcaaacaaaaaaacgattattcacatagaatccaaattttcaattttcaattttcaatttttagttcgaagtttcgaaaatgaattatataatgttggttttcaaccgggccttgtggcctagtggtaaaggggtcacaactgtgacttccgccaccagggttcgaggcatggccactggcaggtttacataggggaattgccagcctcgtgggattagtccttgggcctaaaaagcttttgggagacccgcggttattcaaaaaaaaaaaaaaaaaaatgttggttttcagttctgactctatattctagttttgaactttaagaaaagaaaaaaaaaattataataaactaattacagctgttaatattgcaatcttgcag

SEQ ID NO: 40405 - DNA, 710 bp, Arabidopsis lyrata
  Intron number 1 from transcript 935081 (locus 935081) deri ved from phytozome v7.0 (chr-ID scaffold_4; pos 20610000 t o 20610709)
ggtatcgaacagaggttttgtcaacagtgcagcaggttcttttattcttcccagttctaccctttagttctattgtttatttacatgttttgccattgccggagatattcgagtccggccaaggctttccttgttccactgttgtgaatcaaatctaaaggctttagctttttgtgattgtcagtgtcgtatgcttttttggctttaacgtctttttattttcattttaaaaactttacagcttagttttgtaacctggtcttatgtttgttggactcgttgggcttatttttgggaacatgtttacgtgtacttgtagatgcttctcttttatttatttttgattttgtctttctaaaaatctataatccaaggagatatgaaatgaatggacaagaagaaagccattgccctcattatctttgcttctttaggtcatatcattattgagggggacaaaaaaagtgtaccatagcatcattgacgtgatcattgaggaactctgctacatcacaagtgtgtggttttagattctaattcaaaactgatgacgaaagcttataatgagttatagaatgtatagaaacggtggttaacttggagaggtcctatgtttggaatgttctgttatgttgcttttctttgaagttaactcaatctgaatgaatcacataggtttcatcagcttccggagtttgacctagagaaaa

SEQ ID NO: 40406 - DNA, 639 bp, Arabidopsis lyrata
  Intron number 1 from transcript 949864 (locus 949864) deri ved from phytozome v7.0 (chr-ID scaffold_8; pos 15392201 t o 15392839)
tttgtcactcaaggagtagctcaaacgcaaacaccgccaacggttcctggacttttcccacctggcttacccattgatcttgtaaaatgttggtcgtctctcttcaatgttgaaggatgtgtgctcgaaatctccaaatcaattttctccggaaaatttgaaaatgtcgaagccgcatgttgcaaggcgttttcgaccttagatgctaactgttggccacaaatgtttccgttgaatccgttcttccctcctctcctcaaggatagctgcgctcgccttgtcccaactccccctacacacaactaagaacaagaatgatcgttgatatacacttttaatttagtcgttagcttcaaagtctaagttctaatgttagtttttgttggcaaaatgtgaactcatcatatctttggagagctctatctatgtaggttttctcaataaagtaattttttttccaatattcattcaaaattttcctaacttataactcttatatacacggccgtccagatacacacatatatgtatcatgttgaactaaaccctatagtcatgccgtgtcagtgaattaaagtcaaaaccctaaattgttctctgcaagttggagaagaagtataagaaacctgatcaacggtt

SEQ ID NO: 40407 - DNA, 915 bp, Arabidopsis lyrata
  Intron number 1 from transcript 472180 (locus 472180) deri ved from phytozome v7.0 (chr-ID scaffold_1; pos 8312075 to 8312989)
agagcttcaaagatctcggcgtcactatactctacgtacgtaataatcctctcttctcgtcatgtcatgcttgtttcttattcaaatcttatcttctcaaacactctacccaatctggaaaggttaagctccaattcatcttactaagcatttatcatttatgcctttatggaagcttattcaatctctagtaagttgttgacttgagttttaattagtctattaatggttttggatgaatttcttaaaaatgttatgaaaagaaactgtatacttctaagttttgacagaaatatatataatttagttgttggaattattagcaaattgttttttcttatcttctgaaatatctcgaaatcataaaaaaaaacccagaatttatgggtctttttcttcctctaataagtataggatttaggtggtgttatttaatgatgaattttaatagaattgaaatctaacactaatctagtgttattcaactaatgattctaaatctaattttaaaatctggtgttatcggatcttatactttattatattttaatattttagtgttattcaactaaaatttaaaatacttcattaaaattatgttattcaaaattaaaagacttgtaaattttttgtatattaaatcatttgaaatgaaactctctttggagtttcatgaataaattattaaaatcaaaatccaaaatatactgagattttgaaatccacgattcttaaaaacaatatcagaaaacaaatctaaatatttaaaatttgactttaactccatgactcaataacaataaattttaggttttttttttttttcttctgtgaaaaatattttgtttttgtttttccaaatcatcacttgaataatggtagattcttctgattaatgatgacagggaagtttaa

SEQ ID NO: 40408 - DNA, 812 bp, Arabidopsis lyrata
  Intron number 1 from transcript 484517 (locus 484517) deri ved from phytozome v7.0 (chr-ID scaffold_5; pos 3624277 to 3625088)
ctgatccttcgaggtaaaacaatatctttccctttgcattgcctatgaaatttaagggaaatgttgattcttgtttaggtagtgaaactagtgaaagagccaagaatttgttagaaaagaatgtgtgtgtgttcctgcctgcctgaaaatctaagctttaatgtcaactttatttgtgcaatacaatgtccgttatgatctttgttctatgatctactagtggaaggacttgattaattatagtattgtttcttggtactgaactactgatgctaagttcaccttaatagtcaataggtccttatcatgtcttgaaatttgtcaaaagatacttgctttctcacgggacttctgttgctacgtctcctcttacccattgatatgaaatgtggatttgtttcgtcttcattaatttctggtcttagtacatgctagatatgtaaattcaatcctttggattccaggaatcttcttggattggattataaagcttgtttgtttgatgaaaaaaccatctgcttaggattcagtttcctgaaaatgtgcttggtatgttgtcaactgtggttcatatgcatgtcacaccaaaagtcttttttttttttccattctttaatgatcactgctgtcacgtagttcaaggagtttgctttcaataagtgttctgcttttgattcttaagaacacttaaggataacgaaattagatcccagcggagtatgagataaattttgtagatcgttgctttcatgtgattcaggtgaccaaaaatcttactgagttctgtgacttctcgaaatttgaaacttcag

SEQ ID NO: 40409 - DNA, 629 bp, Arabidopsis lyrata
  Intron number 2 from transcript 490026 (locus 490026) deri ved from phytozome v7.0 (chr-ID scaffold_6; pos 21765394 t o 21766022)
ggatcggactgagtcggattgtctcggtttgcaaggtgagttaactcggtttgttaaatatcttcttttttcgtactttggttgactttttatgcttacgtgttgactttttcgtttatattgtatcgtcgtgtttcgcagttggtgaaaatcaattaatgccgattttattagtaaggaacgattttttgtttttatgctcaaattttacgaatttgttgttaatcaagaaaaaaacatagggtttagttttacattttcatattaaaatgatgttttgagacttttgacatagaactatagaaggagcattgatttttgtatctcgcaaaacatcaatttatttgagttatatattatttgatgattaattataaacgcttaaactttaaaccaagaatcttactgtttttattatttttatatatactgagaatcgtactattttaaaatgagagaatatatatatacagaaaataagaatgttttttgggataaaaaattagaaaaataaatgaaatgtggagacgcggggtatcgatccccatacctctcgcatgctaagcgagcgctctaccatctgagctacatccccaatttgtatgattgtagagtcaagaggatcaaga

SEQ ID NO: 40410 - DNA, 628 bp, Arabidopsis lyrata
  Intron number 1 from transcript 487854 (locus 487854) deri ved from phytozome v7.0 (chr-ID scaffold_6; pos 4099698 to 4100325)
agttggtttatttcccattaataaaattttctttcttccaatttgatgattaaggtatatatgtatataaattaaataccaagaaaacatatcgctgccttgttctatgatgcctaattaacctttttaaaactaatttcgtatttgatgaatgacagctactagttcttccctttgagctcatgtgttttgtatatggtgatttcagtttgggctttgttagattgggtctaaccaaatttaggttaaacaatcctaaatgtgcaacatgctatatagtatctttctcgtttaatatttgcagtgacctcaactgtgatgatgcatgatatatatgtatataatatatataccaagaaaacatatccctgcttgttctatgatgcctaattaacctttttaaaactaatttcgtatttgatgaatgacagctactagttcttccctttgagctcatgtgttttgtatatggtgatttcagtttgggctttgttagattgggtctaaccaaatttaggttaaataatcctaaatgcaacatgctatagtatctttctcttttaatatttgcagtgacctcaagattaactgtttgaatgtttttcttttttgcaggaagtatcataca

SEQ ID NO: 40411 - DNA, 567 bp, Arabidopsis lyrata
  Intron number 3 from transcript 487854 (locus 487854) deri ved from phytozome v7.0 (chr-ID scaffold_6; pos 4100594 to 4101160)
tgcttcatctagactttgttggacaaacacttctggttacatgcacctttaattataaacacgtaactaagtacgagctagattacctattgtccttgagcaacttggtttgtaggaaatacgcattatatacacattcctctatagtttttcttctttttgcgtttagtgagagtttattcgtgttataattcctcttcatctgttttccttgttgcttatggccatatattttactaaatgatagatgctattattgtatccaaacttcaaagtgatataattgtatagagctcttggatgtcggcatattattccattgttagcatccatatatgtctttcactgtcttgagctgtaaaacgatgtccacgacaaaagaagttcagccacctaaaatgacatttagtggttgatagttaacaaaaataccgcttaagaccacacgatttaggtcatataatatatgactgactttataaattaatggtagacattcttattctcttttaaatatatttgtcatgttctcgaggtttcttgtgacgatgcttttttctctagcag

SEQ ID NO: 40412 - DNA, 738 bp, Arabidopsis lyrata
  Intron number 1 from transcript 916174 (locus 916174) deri ved from phytozome v7.0 (chr-ID scaffold_8; pos 7436388 to 7437125)
ggtttgtgacttggtccgtgatggccgaaaacgacgtcgtggtgttaggttatgaaatagacctcaaagatttcctcttgagattggatgctcggggagtcaatgacttctgagatgcggctatgaaacgccacggtgaagagacggaggatgattgaaatttaacagaggcattgaggccggcgagagtgactgagaagtgagaagaaggctaacatattagagtttatcatccatctctcaattctccaatcagagaagatgtagcagagatgacaattttgaaatcataaaccatggcatataccatacatgattgatacttagcagttgttgatgattgatgatgacttctcgaagaaccccacattttcttactggcattgttatccttaggtaagtcactctcatgagcattaaggctgtgcatatgtgggttcttgattgctagataataactttgctgcattccagcactcttccaccttttgtttaactaaatacataataattgtaggtactaggtagcctagaaacatcaaagccctaatagcagacgtttgtatccatactatatatttgttgattttatttttctaagtcatttaacttccaaatttttggtgaccttgttcgtcatctggactcttgtaaattaaactcaagacttgaatttggatcatgtattgtctgattttagtatcatgtataggatcatagtgtttttgaactgcagat

SEQ ID NO: 40413 - DNA, 898 bp, Arabidopsis lyrata
  Intron number 1 from transcript 949205 (locus 949205) deri ved from phytozome v7.0 (chr-ID scaffold_8; pos 11218010 t o 11218907)
ggagaagtaaaaaaagattcaaggatcttatctagatgtcatatgaagaacaaaataactttatacatgcatttagctgagtaagtttttttacttattttttatatttatttatttgtttatgccatatattttcctcacaaacatattatagatttgcacatattcatagtggaaagatatggagataatatcaaaattcaacaatatttcgatcattgcatccactgatttataagttgtatatatacatgtatttgcttataatagagataatattttttggaaaaaatatcgaaaaatgcgcgaactttcaaatttgggacgaaaaaaacatgaactttcgaaatgtcatttaaatcataaagtttaggttgactttttgacaaaatagtgaagtttagtttgacttgggcatttcgggcatgccgttaaatttccgttaaccagaagatcacggtgttaaatttccgttagaactctccgttgaatcaaaacgacgacgttttgaaactctgaaacgacgtcgtttcattagaaaataagatggaaaaactgcatccaccaagaatcgaacagctgacctactggactaatgagaggcgctcaaccgttgcgctacgataacattttggtattgtaccaaaccgaacatatatatactaacaaataactatgtacaattaattaaaactatatacaattaattaacactaaaaaaactaaaaaaaatacttccaaacatacacaaatattaaatatacttactataaatatatatattttgaaattttaaatactaattttatatataaagatttcttctttatttggaaaattattttttcctaaattataaaaaaaacaaaactgaaacttatataatatagaaaattaa

SEQ ID NO: 40414 - DNA, 297 bp, Arabidopsis lyrata
  Intron number 3 from transcript 330390 (locus 330390) deri ved from phytozome v7.0 (chr-ID scaffold_7; pos 21631366 t o 21631662)
cattgccgagatttgaggtttcagagttagaacaggtttgtctatttattaatatatattttttctctgtttaaaaatataatgtatcaaaagaaaataattgctagagtggttttggattgccacatttaatttagtttgattgaattcaatctcatggataagttcaatatagtttagcattatagtaaaatcttctatacattaataaacactatactaatccaaattcggatatcgatgcagggggatatgattccagttatacagtctcttaaggcacttaaagctagtttc

SEQ ID NO: 40415 - DNA, 560 bp, Arabidopsis lyrata
  Intron number 3 from transcript 472815 (locus 472815) deri ved from phytozome v7.0 (chr-ID scaffold_1; pos 11537378 t o 11537937)
accatcgtctccgactatctcgagaaaatcatcaggttttttttttttttttaatgaaccttctatctcctaatcctcgttatttgattttccctttttccaatttgaagttagggtttcgttcgaatcaggccttaatttcaattgattagatcaaaccttgagttattattactgtgtttatgtattgatgttctgtgtttcaatcacttaacctgacttatggttcctacattcgtgttgattctgttttaggatatactttttgatacaaagcatccataaagcaatgaatttgtaaattctcacttctctcacgtagaatgtgtattaagatgtgattacagagtatttagtatagtgttctataatcgcctgtataatttttaagtaatcgttggtggctattcttaatatccactaaacaaactctgccagcaagattttcatattattgtatttcaaaagctggagattttcatattattgtctgttaaaattacatcatttgttaatgcattctttgcatttgtccaggtctttctgtggcagtgagttaa

SEQ ID NO: 40416 - DNA, 1007 bp, Arabidopsis lyrata
  Intron number 1 from transcript 915359 (locus 915359) deri ved from phytozome v7.0 (chr-ID scaffold_8; pos 565799 to 566805 reverse strand)
ggaaagacaaaaacgagtggcatcaggtagacaaaaaaataagaagaagaccgagagtttttgggacccatgcttgtattaatgccacgtgtcagataaagataaggtggaagctggggcttaaatgtctacgtgttatatccacagctactcgctacggtattccgtatacatacgcgtccaggtattttttatactttctataaataatttgtaaatatttgtcgtattttatctttttatgcatgtacggttactgatttattttgttttttaattcaaggaatttggatgacagacataggggatgttattggtttgagatttagaaagatttttagtgacttaataataaaagattttaaaagattgttaaaaagttttagggggtgttattggtttgagatttagaaagacttttagtgacttgataataaagaattttaaaagattgttaaaaagttttatattatcttgatgatttattttccaaaatcttgtaaagtcttcaaaacttttttccataatcttgtatactcttgatgacttttccaaacttttcctacaaaatatttccaaaatcttgtccaactttaacgagaagtaagagcaagctacctgttcctgaaggtatatacttatgcattacacagaaaattgttacctctcttttgttaatataactattaatatcattgctatcatatatgaatttcaggaaaatattatctagttgattgtggatttgcaaatcgacgcatttttttagctccgttcagaggtacaaagtatcatctacaagactttagaggtcaaggttgtgatcctagtaatcaaaatgagttattcaacttgcgtcatgcatctttgagaaatgtgatcgagagaatttttggtatcttcaaatctcgctttttgattttcaaatcagcaccgccttttccttttaaggtacaagcataacttgtattagcttgtgctggattacataactttcttcgtagaga

SEQ ID NO: 40417 - DNA, 431 bp, Arabidopsis lyrata
  Intron number 1 from transcript 487122 (locus 487122) deri ved from phytozome v7.0 (chr-ID scaffold_6; pos 1007185 to 1007615)
tcaggtcaaacattaatcgatttgtttcgtcggttttagtcataatctgattctctaccaaattttagttcgaatcaatcccgattattggtcttaggtttgattttactcttttatgtagtactgatgtaggttttaggagattcctttacttaataattcatggggatcaattaattattaacaagtggaatctcaatattttctaaaactggaattttgtagaatctctcaatcgaaaaaacaacttttaggggtctcatgagcttgtaacaaagcttttgtggttaggtgggttgaggaatgaagaaagaaacagacttttttgtaattcttgactaggttctgatacagagttatagctacaaaatctagacttttttgaaggtaatgtatgtaacacattggagtacttggttgtttttgaaggg

SEQ ID NO: 40418 - DNA, 599 bp, Arabidopsis lyrata
  Intron number 2 from transcript 487122 (locus 487122) deri ved from phytozome v7.0 (chr-ID scaffold_6; pos 1007718 to 1008316)
aagacacacttgtcttccattgtgctttgagccaggtgtttgtttttatacactcttttcactttcccacaatatcttatattttcttcttgtttgatttcatatgatggaacacatgatatagcactgttttgcgatgattgaatgataactggttttggtggaagatttgttgattcatgttaaataggttagataagcggcatcaatatggtattcgtagaaggatatctatatgttctacagtatgtcctcgtgtagtgactttcatatgtcaaaagttgatttaaggttgcaaatttcaactgttttcgatatggtattcttatttgtccatctattcttatgtatgccatgaagtaggagcttccgttatattcttaaaagaaagaacatcgattagctagcactccaaatcatcaatctcagtcctttatcaacctttgatttgagctagttctcatttctttgttctgtccaaagtcctaccataaataaatcaatagattttttcactcgaaaatgaagtgattgcttaagccttgaagccaattcttaatgcaggttcgtggtccaacttgtgcaagaaggctcgtgaa

SEQ ID NO: 40419 - DNA, 366 bp, Arabidopsis lyrata
  Intron number 1 from transcript 487587 (locus 487587) deri ved from phytozome v7.0 (chr-ID scaffold_6; pos 2932605 to 2932970 reverse strand)
gccgttgctctcatgtaggtggttcattaagtgaaattttaaaaaactatagatttttttttttcatgaaaattaaaacttgtttaattctctttttctattttgtctatctttgattcttttcacatattacctcatttatttttaagtagtgtacactgtacaccttaatgttcttattaattctttaatgttttgtcttctaacttattagttgtctattccatcacaacacatattttaactatttttgaaacatcattagaaaaactgtcaacgtgattaataagaagtggtacaaatttgtttttaatacataattaaccttaatttgtatgcacttgtgaatatatatgtagacgtagg

SEQ ID NO: 40420 - DNA, 859 bp, Arabidopsis lyrata
  Intron number 1 from transcript 889995 (locus 889995) deri ved from phytozome v7.0 (chr-ID scaffold_7; pos 9047393 to 9048251)
taaaggtttggagaatgtacaaattaatgaatggaattggtatcttaattaggacaatctaacgatggcggattagaaaaattattatttagggtttacgtatcttttgtgggctgtgaatgttttttataaaagtctgggcctgaaaacttttctagagtcttgatagctttggtcccaacccaatctatcaattatcaaagctagtagaagacaatcaatgttttcttgatttaccaatggaataaggggtccaaaaagctaggaaatcattaaaacacaataaagtaaaaagcttccatgaattatttaacattataaattaccataatttttttttaaaattttggattccgcctttataaaaattaagatactcgatacaataataaaaagttgtataaaatatatggtttctactaatagcataaatacataatttttaaatttatacaaatagttaagatcacttattgatatatatctgtaaaaaaaagattgatatatgattctaatgttgtttgtcttttcttatatcgttacattatttctcaaattttttttacttcattacacattttgtagtgctatgttgttttcaaattgtccaaacaatagtaaatagttttagacgctctaattatttttcacttaaataatataagagactattaatatatatagtttacaaagattgagattactaatcatcatagtaaatttatgaatgtcagttttagaacaaattttgtgcaaacgagttttatttgtctagtgttagagtccaaatacaacacaaataattgtcttttttttttttttaggtattcccttctcaaaaccgaactccttggctcta

SEQ ID NO: 40421 - DNA, 296 bp, Arabidopsis lyrata
  Intron number 2 from transcript 473529 (locus 473529) deri ved from phytozome v7.0 (chr-ID scaffold_1; pos 15609500 t o 15609795 reverse strand)
caaaacgttcctgaagaccaaaaccaagtatgtttttttctttctatatcaaaactaattatgttactccaaacaaaaaaaattgccatgagtattacattaaaaaccaagaaataaaaaaattattactatatgttctgtctcattttctaaaattgccatgagtattaaaggatttggtgattgtggaaatatttaaacatgattacgtatcagtgatgcaatatggtcattattactattctgaaatttagcttcttcttctgatcattggtcaaactctttataggtcatag

SEQ ID NO: 40422 - DNA, 308 bp, Arabidopsis lyrata
  Intron number 1 from transcript 933547 (locus 933547) deri ved from phytozome v7.0 (chr-ID scaffold_4; pos 14207119 t o 14207426 reverse strand)
tctggtcttctcgctgatctctgttatcgttgcgggtatctctcaatctctctaatttcgtattcaatacaccaaatttgttcgattcttgactaaagtctcgatcttttcgtgaccctgttcttatcttcttgattctctgttctttactctgttctggtttttttgactacgtagatggtttcttagtgccaatcttgactcttttaatctataaataggaaaaaaattatgtgaatttggtacataaaaggaaaaaaatcgatgttttgattggtcgttgtaatgattgtgttatagatctgcgt

SEQ ID NO: 40423 - DNA, 497 bp, Arabidopsis lyrata
  Intron number 5 from transcript 495328 (locus 495328) deri ved from phytozome v7.0 (chr-ID scaffold_8; pos 15216531 t o 15217027 reverse strand)
ataaaggacttgttcctggtctctgcttcggtgccgtaagtctttttctctctttctctttttcgacaatatccaaaactcaaaaagaaaaagataaaaagttattaaaaaaacagagagaagcaatagtaaattggtatttgacttctgaaaatattaagctaatttttttaattaagtcaccgaaaccgaaagtatgaaattcggtgggttttattttcaccgtcccacaaaagtgtaaacgtgtgtgagttgggtgagatttagtaccgtccaaccataaaagattcggcacttaaactacatgaaactttactaaacgagtattattccgtataatttaataggagtgagcataaagaacctaaccaaaatgaaattattcagtccaaatcgagttcaaatttaattatattcgaaatggttttggagcttgcaatttttcttagcggactggtttgtatatggaccagggactgggaataacggtttttgga

SEQ ID NO: 40424 - DNA, 637 bp, Arabidopsis lyrata
  Intron number 4 from transcript 345604 (locus 345604) deri ved from phytozome v7.0 (chr-ID scaffold_4; pos 18582441 t o 18583077 reverse strand)
gtgatcaactcaacagcatacaatttggtttggcggtaagttgttaccaaacttaaatagcaaaagttgtacttcatagttcatccacattctttcaattttacaaaaagaacttaataagacaatatatatatatatatatatactttcataaaataaataatgttaaaatctcatattgaaagtttaaagggaccaatattactatataagatacatgggtcaatctactcactgcgaattaattttgagttgaatgccaaaaaaaattaacttacaaacatatataattattaaaaatacaatatactcaataaaatttactttaaaactatataataactattcattaatacgaaaggataactaatttatggtggtttagtggttagaaaactcatcttgaaatatcgagggactaaaatttgaatattctcgtacaagtgctgatgcatttgacaagaaaaaatattatcattccacatgctcagatccctttgttatcaaaaaaaaaaatatacacacataaagattaatgtttttttcaaacaaacatgttattaatttaatacttatattcaaatatatctcaagtgtttttatgaattttatttaatacaggtacatccaagattat

SEQ ID NO: 40425 - DNA, 733 bp, Arabidopsis lyrata
  Intron number 2 from transcript 489849 (locus 489849) deri ved from phytozome v7.0 (chr-ID scaffold_6; pos 19925339 t o 19926071)
agactctttacgattacttgttgaatcctaaaaaggtatttgattgctctttattattccttaaatggattttaatcatagtttctggtgaaaaatgaggttcttgatgattgttcattaagctaattcgtggatttatactcttttgattatagagattaatctgttgatgaatcaattaggagtctaatatcatcttagtattgttctgttgatctacaaacccaatttgtttgtctcgaaaatgtgtcatttgctttcatttgcatgttcaagaatatcaagacattagcaacatttcttttggttatcatctttactctgaatcatcataagattgtccagaaattgttgttgaggtaatacttgagtccttccttcactcttgtgtgtcgtttctttattgagctgatttgaggaattgtccacgaatcttatgattcatctctcactctttaagctttgtgtgcatcatctcaacagtgttccattttattctattgcatgttcaagaatatcaagatagttgccacattgtttttagttaccatgtatagtatgaatcataagattgtctgtcaagaaattgttgtttggctaatactgattcctcctctcttcacacttatgggttggttgtttcttattgagcttttatgaagagattagatttcaatttgattgaattggtgtggatttactttgcttgttacagtacattcctggaacgaaa

SEQ ID NO: 40426 - DNA, 532 bp, Arabidopsis lyrata
  Intron number 2 from transcript 471892 (locus 471892) deri ved from phytozome v7.0 (chr-ID scaffold_1; pos 7074074 to 7074605 reverse strand)
ctctacaagtccggatttcagacctgggaatacaggtttggttttgcgctacatttgaatgtctatgtttttttctataatccgcattggtgatgttactactgagctagagacgcaattttagctcgagtgagcatgtactttgagctgtgattctatatttatgtatcggtgactactcattctcaacattttcaatttgaaatcagaaatgtgaagttgggatttggtttagtggaacttcgattcaatggaatggttcttaggttatcgagcttagttttagagtgtgtccttttttttaaagagaacacaagtgaggctgggttcttcctgcttcttagtatctgatgatttgaatctctattttagtttttgcttctatattgttgatgcatgttctctgtgtattcatgtttttaacttgagtttttatatgaaacataatcatgagattgcttactttttttttttttttgtgtgtgtgtgttttgcagttccaactttgctcttcggtcgtacttatacattc

SEQ ID NO: 40427 - DNA, 387 bp, Arabidopsis lyrata
  Intron number 3 from transcript 482630 (locus 482630) deri ved from phytozome v7.0 (chr-ID scaffold_4; pos 17364030 t o 17364416)
taattgctccattgaaatagcatttcacaggttagattactgcatttagatatgattcagatttatggaaatttgttggaatttttgtgtgcttattcttgaattctccttgtctttcaatcttcatgttcgttatgtccttatgtagttatgttaatgaatttgtttaatgtgattcaatttgtctgaatgtcctaaatctggagataaatttgtttaatccgtttctttgtttggtaatggttttgattatcgaaaagaagatttttttcttgaagatgtaaagagagattatgaatcaaatgattgatttcttcttgtgtttgtttaaaaaagtatttgtaaattggttttgtagattgatgggtggtgattaaagacttcaat

SEQ ID NO: 40428 - DNA, 395 bp, Arabidopsis lyrata
  Intron number 2 from transcript 486435 (locus 486435) deri ved from phytozome v7.0 (chr-ID scaffold_5; pos 19479418 t o 19479812)
atttcttattttcttgtctaagttatcttctagagtagatgttttcaggtaaagatttttctcggtatagtcttaaggaaaattttccaaacaaaatcgttaataataccaaaatctgcataagtaaatttctatctgatataatcagtttacctaatttgggttagaaagatggagttcgatataagatatcttaaaagttaaaaaactttcctttttcatgaaagctcaacaacttcaaaatctttcttttctggctgtttcctcttgtctttgattgttcgacttctttggaattagttttgttttgtttgaactcttttgtctgaaactgctgtttcaatttgtaatatgttgcagaagtttttgtggttgaagctgttcctccttggtaa

SEQ ID NO: 40429 - DNA, 540 bp, Arabidopsis lyrata
  Intron number 1 from transcript 480522 (locus 480522) deri ved from phytozome v7.0 (chr-ID scaffold_3; pos 21007553 t o 21008092)
tattaggaacgtccttgaattggacgttataactggtacgcatcttctaaaaactttgatgcattagaaaaaaatactatttctttagtattttttggtaccatatgtttaatgttttatagttgtgcttaactttttgcaccacacgcaatggaatcttcgaaacacaaaatgcgtaacgcatctatatgttttttttgtacatattatatgttgttcatggaacttttgtggtatctccaaagaaataaagtaattatatacacatttataaatgtaattaaagactataatttatctctttaatttatacaattggtagcgtgttaatttgggattttcgtaatgtacatgcatgacgcatgcatatagagccttttggtttcttagatttttttgtgctattttaaatttttaatcgtgtggtatatttctaaaataggaaaatttcagattttttctttaaacttacacttttttaattattattgttattatggattttgaaaatataatttcagggaaaggggaagtgttgac

SEQ ID NO: 40430 - DNA, 798 bp, Arabidopsis lyrata
  Intron number 1 from transcript 911526 (locus 911526) deri ved from phytozome v7.0 (chr-ID scaffold_1; pos 7192961 to 7193758)
ttgacgttgtgaaaggaccttcttcgagtaaggtaaagaaagggtctccgtttctgcttgaatctggtgaactttgtgttcagctccctaatgaagtcatcactcgtaaccacaaaagatgagaatctttcattattggtcaattcaatggtaaccttccctctgggggtgctcttcatgctatcttcaacggaatttggagtaatcggtaccgtgatatcactgtttcccgtttaggtgcaaagtcagtccttatcagaattccttgccctgcgactcgaaaacccgttcttagtcaagggatttggcacattgagggacaaagtatgtttgttgctgaatgggaacctggccttaatcctgaaatgccagaacttacagaagctcctgtttggttggaattccgtggagttccccctcatttcttttctgaagaaggtttcgaacacgtcgctggtatgcttggccatcccctcttctgccatccatctactgtcaacatgactaacttggaagtgggtaaggtctttactattattgaccctactaagcctctccttgaagctgtgaatgtccagtttgagtctggaaaaatccatagggtggatgtctcttgcccttggctccctccgatttgctctcattgcaaccaagttggtcacaacatccgccggtgtcccactgcacccatcacttgtctggattgtaagtcttcttcccactcttcagaaaattgtcccaggaaaaaaaaatcctctggacacgcaaagagcaaaggcaaatctcagtggattactg

SEQ ID NO: 40431 - DNA, 785 bp, Arabidopsis lyrata
  Intron number 1 from transcript 928873 (locus 928873) deri ved from phytozome v7.0 (chr-ID scaffold_3; pos 4641108 to 4641892 reverse strand)
ttaccctaatattcaccaagagtattcacactgtaaaatttaaactctttatttcctcttttgttttttctttctctcttatctatatgtcagatttatactctttttctgtttttaagagatatttgtccttttttcacaaaaagagatgtttcgtaattttattgcatatttacatgttatttcaaaaaactaaagcagattattattttagattttctgcctattttatatggaatttaactagaacattcatcgttaatgaaaaggaaggaatgtatattcattttcttcaataactcctagattattataattgattaatttctatctaagttttttttggttacgttttaaaagcaaaacataagaatttttaaaggttagggcaagaacttggaaagctcaaccattttagttagcgggtggaatatctttcttataaaagcatttgagttatctaaaactatatgacaattattttggttgcgtgagtatgcatataaaataacaacctgaaataacattttgtcttttattttttttgtcattcttattatttaattttggacccgacaatttcaataatcttctccaagttgtacctaatccgttacatgcgcgtgaggagaaccgtccaatccacttagactaacgtgctctttatttcttccttttaattcattttaaaaaaacacaatttaactaaaagatgcatgcgcacgtgtcgtgacggtgaaaaaattgtaggcgccgtcgctgatcaggctcagtcgataccaccg

SEQ ID NO: 40432 - DNA, 509 bp, Arabidopsis lyrata
  Intron number 1 from transcript 926433 (locus 926433) deri ved from phytozome v7.0 (chr-ID scaffold_2; pos 14699690 t o 14700198)
gtgagattcaagaaccgtttagtcttagttttcaggtaacttcttctactataataatgtcacacttttacttgtttttttactactactctgtttatggttgttcttgtcgaatctttagtaactttgtatcttcgttttttgagatcaatctagatggacttgaaatgctactgtttttagctttacttctatggaatttgctaaatttaaccgcctagtagcatgtatgcagagtagtgcttcatgtcttagaaaaaaagtcaatttctttaggtcacaataacatgaaaaattagagggtaacatttcgttagatttatgtatttattttgatattatgtgtttggactctttgtttaagaaatgctagctattaaatttaaagtactcaaatgaacttaggcaagactctgtatgtatatgtatacgttttaggattgttcttattggttttgtgaaaccaaattgcaggggaattctatccactctggatctatatcgttcgg

SEQ ID NO: 40433 - DNA, 1004 bp, Arabidopsis lyrata
  Intron number 1 from transcript 338829 (locus 338829) deri ved from phytozome v7.0 (chr-ID scaffold_2; pos 10810742 t o 10811745 reverse strand)
ctggtgtggttgcctaggaactctttcattgtgaggtagtctcaatccactataagaggaaccgcttatcgttgtctcgctttgctgctttggtttgctttgtgtaaggccttcagtcatggttttgatttggtaggtatggattttgtgttagattccagatttaatttgttgagtctcttgttttagttataatttattctctgtttgtttctcgctggcttagtttctgggagttaaagtttcactgtttgtttctcgctggcttagtttctgggggttaaagttccgccggcctttgtattccgacaacgtattccacccttgttatataatcattcagacaaaaatcctctttatttaaactttaaaggcatgtataaatttctttatctacctatttgcaaaaccacctaattatcatgctatgcggtatttgataagtgtaacccacaaacatgaaaatgcttaatggacaaaatacccatagtttaggtacatgagtgatgtttgggtaagaaatatgttacgaaagaaagttaaaataaaacaaaaagtaataatttattttgaatcatgtctatttcttaagtacacaaaaagggttagtaacaaatactgtgatttatctctttatcaaaaatgaaaaaaaaaacatattgtgatttcttacatttgcaaatgatgtctaataaaatataattaatttattatatcttcggcttgttttttacttcatatatgtttttttaaaaattcaagtttggatactcttttgtttatgttacaaaaaaaaagcaagataacttttatgtgtaaaccaacaatataaatttcattgtggatctggtagtgcataatcttgatttaagcaaaaaccattagtaataaaaataatttacaaaatatatcacgcggcatagcggactaaaccaccaaactaaacggaacaatcattgttagttacaggattcaatcgaatctaagaatatctaggagggtaa

SEQ ID NO: 40434 - DNA, 523 bp, Arabidopsis lyrata
  Intron number 1 from transcript 947129 (locus 947129) deri ved from phytozome v7.0 (chr-ID scaffold_7; pos 17765068 t o 17765590)
ccgacgccaccgtcctcggctctcctctcaaaacggtcagcttttagttttctctgttagatctcgcctttaagtaaagtttctgtatggaccatttgaatttgcgttagtgatatctggagatttcttttgtttaagtaagattagtttacatatgaacacagatgactctgtctcaacaagtgatcaaattcttccaaaacaagaacaaatggactgataaagctttgtcagaagctatctacttgacccacattggctatgatgattattgggttttatagttttggttgattggtttctagagcttgtgcttttgctgcatcttctgttacaatttctctttcgtttttcatattgaatcttcttgttgctgcatcttctgttagtgtgtaagctgctgttcttctctttgtttggtttatagttagttttcgttttggtttcttttattgactctaagactgaatttggtttctttaaacaacctgacagagtcaaaatgaatggttgctgatagcag

SEQ ID NO: 40435 - DNA, 536 bp, Arabidopsis lyrata
  Intron number 1 from transcript 896909 (locus 896909) deri ved from phytozome v7.0 (chr-ID scaffold_5; pos 5794587 to 5795122 reverse strand)
agattttggagattcatacaggtttaaataatcgtataagaaaatcacaagaaagagtgagtttgacaataacaaaagaatgtagattgaaatagaatagaaatataaaataaaaataaagataatcaaacataataaacatcttctatatattaaaagagtcattgatgcttatgtgtcaagctcacaaatattttcgacatttttacttttatttatttaattatactatctttcctatcaaacacttttctttcctaataatacatattttaatctattataaacaataagaccttcaagggagtttggtatcacaacaacttgtgtggcaacatcatatggaggcgcggtaggccctaatccacctattccacaatgaggacaacctgagtctaggcagtgacttgttttgtctggtggttagctgcagatcttagatcttagagggctatcgcaggttacagagtcgggatgcttgcggtttcgcatccaccggaccggatcgaaagtttttttgttctgcaggtttgaag

SEQ ID NO: 40436 - DNA, 782 bp, Arabidopsis lyrata
  Intron number 1 from transcript 933675 (locus 933675) deri ved from phytozome v7.0 (chr-ID scaffold_4; pos 14822980 t o 14823761 reverse strand)
cccgtatgactctctttctctctctctctttctcccagaatttggttggacccgtctctgtactatactcttgtgcttgttagtgtgcgttctaatgattctttctgattttgagatgaaaaagttacttcttttagtgtttttgtgaggcaatttgggtttatttggttgacattggctacctttgagggttttatcttgttctctctgcttccattattctacatacattgcaaatttattgtgtgtgtcaagcttgtgttctttggaaaattggagctttttctacttctgataagctttttatcctcctcccattatgttctttcctcatttaggcctaatcgtgtgtgataaatcagcaatggaagatactattttagttacttttgagtttatatagtacttgatgattgcaaaaaggttcgtgctttttacaatgacatgtgtgaattgctagttttttcctttggaactctggcttaattctgtttggatgatcatataatcatttggttagctttaaacttaaacttttgatagttgtttgatgtctttatgccgccaatcctgtgatcactatcagctttgttattcatgagcttttattcttgttgttttctcaaatggcagtggtcattcgtctcttgttcttttcacttaggagttccttcttcctgctgcttaacttcaccatgttaattatatgttgctttagctccagttgacatgaagttctcctgactgacgtatcctctctctactttttttttcttacacag

SEQ ID NO: 40437 - DNA, 416 bp, Arabidopsis lyrata
  Intron number 1 from transcript 479559 (locus 479559) deri ved from phytozome v7.0 (chr-ID scaffold_3; pos 8882029 to 8882444)
gagataagaggagcaaggatcgtttagggtttcaggtacagctttgctctttggaaaatgagacatttcttctggatttgtaggattcgcattgtgataataaaagcaatcaaaagattatacgattgctgattttgctttagctttgaatcaaaagtatgatagcatttggattggtttagctggttgttttaatagtaatctgaaatagaaatgattgttgattcgagggatcttcacacagttcataactgtttgctcatgtctcttgaatctgtacactctgtttcttgtgtcatggatataaattagttggttttagttattttctcagagtagaaaagaaatttctctttatattctttgatgtttttttcccaggaaactgctggtcctgctggacacttgggtcctct

SEQ ID NO: 40438 - DNA, 313 bp, Arabidopsis lyrata
  Intron number 2 from transcript 477445 (locus 477445) deri ved from phytozome v7.0 (chr-ID scaffold_3; pos 475094 to 475406)
tcaagctcaagaccgtacaaactttggagctctaggtaagaaacaatacatgtttttttttccttctactctccggataagaattaagtcaattgaagaaaacaagctaaattaaattaaaccctagtttttctcttttagacaatttctactttatttcaaaatttctggataattaactcgtttaaaaaggattcgaaaattcaaaactaaattgtttaagaaattgttgttgtccttatgttttctgttaatggatttacttttggttcttctttttgtagtagatataaagatctcgagtataagcatt

SEQ ID NO: 40439 - DNA, 617 bp, Arabidopsis lyrata
  Intron number 1 from transcript 931095 (locus 931095) deri ved from phytozome v7.0 (chr-ID scaffold_3; pos 18281353 t o 18281969 reverse strand)
ccaggtaaattcttattactcaattatctttgatcatttgaagagcaatggatttaacattttcttttcatacattataaaaaatattttcatcgaatgtcttacataaacacacatatatatatatatataacttgggttgtatacagtggcggagccaggatttttgtttataggggtcatatatattattatttttatttaattacatattaatattaaataatatatttatcttgatttatgatattttatagaaatatatgtcaaaacaattttgtgaaaaaggacaaaaaaaaaaagatatccgatgatacaaagaaaaaaaatcaatatgtaaaaaaactattagagaattgtaatcattttttaggaaaaaacaaaacaaacatagaaagaaaattaatgttgaatgaaaaattaaatatgaatggggtcaaagacataaaattatggcatgacataggggtcaactaagaaattttgtaccaaaatatctaaaatcattagataatttaccttataatttcaaaactttaaaatgttatggggtcaactgaccccctccctcttaattggctccgcccctggttgtataattgcagtgatccagcaat

SEQ ID NO: 40440 - DNA, 570 bp, Arabidopsis lyrata
  Intron number 2 from transcript 936920 (locus 936920) deri ved from phytozome v7.0 (chr-ID scaffold_5; pos 9899166 to 9899735 reverse strand)
accctttccgcattcgacaggtaagtctagcttttctatagagtttccctccctttggttattcaatacttggtttaatagctgttgaaacttattactagtgtatatttatttggttgcaacatgagctgaattcatttgacaacaggaagcagtattttgacatgggtcacttggttaacgcattcaaataagttccttttgaaccctttttgttgaattagtttttgttcctttcacctttatcccgtcgctgcaattgttcattattgtttctttttaacaggttctctaaatacttgattgatcaatacttctttataatgtgtgccttggagttgccgaattaatatccttttgtaatgttacattttctgagtatacctgattgatcaattcttcttaattggcttttgttttctcattttctcacaaccatttttagtcggttgtgtaagtggtttggctacttctttcttaaggattatgtcattgattttgttagcaggctctgttttttttctcccaagtttaggaggatcaagaaacagcagttcgtctagcgaaaac

SEQ ID NO: 40441 - DNA, 537 bp, Arabidopsis lyrata
  Intron number 2 from transcript 939566 (locus 939566) deri ved from phytozome v7.0 (chr-ID scaffold_6; pos 422936 to 423472 reverse strand)
tctctgaggacgactttcaacttctctgcgaatacgtacgccttcttcttcttcttctttgttcttttgcttgctttttcttttgggaagattaatgcatctacaaaacccaattcttaactcactctattgaggctttagagcttgatttgtggcactttactttgaatctggtctctctagctactttaatgtttcctttgtcatttttggtttacggattttaggatttttttcaatagagaatttattgactttggtgtatggagatgtagtttcttatacgtgtgctttgtggtgtgaatggtgcttgtgtacaggttggtgaagataagtttgaagacacatgagagtttttcgtgagagaagaagacatcatgttatggtcaagtctaaatggacaatggctgcctctccgttctccttcaacaatgatttcttctctgttctaaccatatcctgatttgatttttgctctctcttatgtgtcgaactcgtttcatcgacgtagtaacacagtcacttaggaaaaagaca

SEQ ID NO: 40442 - DNA, 745 bp, Arabidopsis lyrata
  Intron number 1 from transcript 938128 (locus 938128) deri ved from phytozome v7.0 (chr-ID scaffold_5; pos 16105131 t o 16105875)
tgaccgtgccttgcagtgcgtggaacgagaatagggtaaacgccaaattggttgattctttttgacttttccaattttgttaatgctttatcgttggtagaatcatcgatttctttattctcttttttgtagagtaatgattgtaccatcggcgaaagtcaatatgtgtttatgtaatttctttttgtttaatttgctatggattatgatgtataaaccatatgtatcgtgcgaaaatgaatcttgatttctctttcaattattatgatttgtttcttttgatttattgttaacgaggatttctatattatttattgttaactatttttgctgaatttaacgttttgtcatgctgcgactcttattgttcttctgcgtccacgattaagaattctttttttattggttttgcttattcatttctttagtatcgtcatatgattttatttattgtttatgctatatctgtaaagtcaatgttcttcattctctgagttttatgttactatttgttaggtttaatgtaacgaatcattcattacgcacgtgaatcttattttgtttaacaatttgaagattgtttttcctaaaaaaatgtgatctttctactctccccgattgcaagaaattaatatccttttgttttctttatgatcattgtttttgaaatttaacgattctttttattctgtacaatcaactaagtggtcattttttgggttgctgcagtcctctcagattctcg

SEQ ID NO: 40443 - DNA, 713 bp, Arabidopsis lyrata
  Intron number 2 from transcript 938128 (locus 938128) deri ved from phytozome v7.0 (chr-ID scaffold_5; pos 16105913 t o 16106625)
gaggattcagataattctcaagccagcctggccaggttagttttttattttattttaatttatataacagccaaattagtattcttttgaaaatatctataatttttaacttcgttgatagacttgttattttttcaaacaaaatgaaatttgtaaatattacaatgctataaatttggtaactctcaattatctatgatcggatgttactcttctcactgattcatttatgaaacgctaagatctgtctcatgtttgcctcctctataaatatatctattttaaatctcttagtactaatcgtttatctaaattttaaattctcaattttctcttaaaagtattcgtgtagattagtaatttagagtgttttaatctttgaaaatgggctatctgaattttgtttttaaatgccttttgtttttttttttcagtggagaattttgacttttgccgattccattgggcctctgatcgttttgaagaattactggaacctgcagaagaagaaccgagatttttgcttccaaggcagaggaaaggctttgtagttttcttcaacaatcttgaagactctacacgtgcacgaaattgtataaaaaggtactgaaaggtgatatatagatatagcttatagtgtaaatggtctgatataatttttttttgcaaataggctagtggatcctgcaccaacaggagttattgaagagcaa

SEQ ID NO: 40444 - DNA, 748 bp, Arabidopsis lyrata
  Intron number 1 from transcript 943614 (locus 943614) deri ved from phytozome v7.0 (chr-ID scaffold_6; pos 24412940 t o 24413687 reverse strand)
gaaaccgtcgtgggtaagcttctctgagacattctactatcgtgtttcactcttcgcatttcgtttttgctttctttgttgtgtgtgttgagattccatgactgcttgttttcatcgtctctgcttctagtttctaaattttgttctttttcaaatagtgcgtaccttgatctgaggttttattaaccctacttgtttcttgccttactcgtgcgtttgatctgaggtttttgtgatatcatcatctcttcctcggttttagaatgtacggagcttctctgttaaccaaaatatagggtttgggaagaaaagtcagagtcttttttcctcattcccgattggaaattgagaatcttgaaatttttctttgttgaagtcataaagcttgagtttttgggaaaatcttttgggttttccttttagggtattattatgttcgtgacagcaactagggttttttggagttgttttgaaatgggttttgtgttgtggaaccgtttgtgaatgtggattggtgcatcaaaactctgtcagtacaagagatccatatttcaggagcctgtggtgtacacacagacagagatcgcttggcaaaatatatgcaaacttaactaatacatatgaatagcatttgctctttttatatctggttgatcaaaaagttattgaattttcagtgatggagtatctgtatttatagcagattcatatttcatcttctgttttttttttttttcttacaggtttt

SEQ ID NO: 40445 - DNA, 397 bp, Arabidopsis lyrata
  Intron number 1 from transcript 476935 (locus 476935) deri ved from phytozome v7.0 (chr-ID scaffold_2; pos 17769690 t o 17770086)
cttgcaagccgctttcaaacgccatcgcccactcagtactctctcccactctcttctctctttctgggtcgaaatctctaattctgggaagtttaatttgactaatttagggtttctttgggtttttagcatttctctcatagtctcatctcttttgacgatttagggttttttgggaaagttaagttccgtctacgctttttataatggtttactgagtttgtgatgtgggtaatatgataagcttgttaaaccttttgattattaatacgaactcacaattgtgaagacgctatttgttcttaaattttagctgtttttttggtatgttaaactcttcacttgagagtgagttgcaatggatctcttatagctctgttttttttttccaggtaaa

SEQ ID NO: 40446 - DNA, 586 bp, Arabidopsis lyrata
  Intron number 1 from transcript 471939 (locus 471939) deri ved from phytozome v7.0 (chr-ID scaffold_1; pos 7262734 to 7263319)
tgcgacggtcgcgacggtgacggcaaatccagtgagtgagctcttttcatcttcgttgcatttagtggattccctaaaactttagataattttggtttgttcttagcattgggcttgttctaattatcagatcttcttgttttgagttttttttttttttttttttttttttctctgtgcatttcggagcagaagacgaattgtaatgtcaaaaatttttaccagcgtctgtgataagagtcgggtttttctcaaggatttggtgacaagctgttttttatggccgtctgcaattgtgattaccttatcgattttttagcttacaaggtgtttgttgaaatgcttcaacgggaaattttcttagtccccaccctcagtggtttctgtttataatgcgtcaacttctgatatagctaaactttcaaagacattaccttttatacatttctggggtgtggttctgatcattgaggttttgtgtgtgtgatttggtgattaacattgaaaattggagctttaattcctaacagtcattgttttatatcttttttcttagttttcatctgggaaagcagctacagaagac

SEQ ID NO: 40447 - DNA, 578 bp, Arabidopsis lyrata
  Intron number 2 from transcript 942310 (locus 942310) deri ved from phytozome v7.0 (chr-ID scaffold_6; pos 12623186 t o 12623763 reverse strand)
aaaaccagtgtcagaatcatccacgctaggtaaaattttcttatcttagtgctcctaaatgtttcttttgattttggtatatagacgttcttagatgatagaagttatcaatggcttaagctatatagatcattcaattgaagaacctggttcttatctccttttaatgaacatcaaagcaacttagttatgtgttctcatataacaacattttgcttaaccacaaacaattacgttaaagaacactaatggtagagaaagcatgagccttcaattagggggtactctaattcttttccttagattctttaagtgaattaaaatcgcttgttcgtgttgttcttcattgtattagctgggccttattgctagacaaatcaattggtaacaacagctaatcgtatgcgtgttttgtgcttaaatacatgtacttggggtgttggatatgtaacacaaatgtgaccattacagttctaaaattttcatagattggttctttactatatgtatgatgatctctcaattcttcttatttgacatttggtatctcacagatttttatcatattgtcaggttgc

SEQ ID NO: 40448 - DNA, 629 bp, Arabidopsis lyrata
  Intron number 3 from transcript 495313 (locus 495313) deri ved from phytozome v7.0 (chr-ID scaffold_8; pos 15127240 t o 15127868 reverse strand)
ccgccgagtctcgagttcagccgtcgtctgttcaggtaacttcttcttctaattcttccgatattgaaaatgtgtttttcttcagatcagtaattgttagatcgtgattccgagatttgtagcttttgtttgattgctgtgaaaatttgatctatacttagttttgaatttcgcgattttggtgttttgatttagattagacttacgaaactgatgtgattttgattttgaatttcgcgattttggtgtttcgatttaagagttacgattctagatcagagctaagatttatgcaatttggtgagcttagttctggattacacaatttggttctcaaaaaggtaaaaaagatgagtcgtttgctttttcaatctcattgtggattggctttacaagtcataatagcattcatgattataaaggtttaaagtgttttttaatttcagttcatgtttagtaattatagtataaatttctccaaaagtgaactataaacgtttaggtaactttatttcgaaagctttttactttgagaaagttttgttgaaacagtactctttatcttttgtctctctaaaggggatcaagatgagtctaattatgtgtatttaaattgtatagaagggaag

SEQ ID NO: 40449 - DNA, 276 bp, Arabidopsis lyrata
  Intron number 1 from transcript 923721 (locus 923721) deri ved from phytozome v7.0 (chr-ID scaffold_1; pos 27723690 t o 27723965)
ggacagttaacactttcaaaaatcgacactttcaggtcaattaatctctaattttctctctttcattttgataaagtttggatttttcactcttgggttgatgaaatttcttctcaaattccaaatattgctcaattcaatcagatttttgcagaatggtacttggggtttaaccatgaattcagatgattctgtttttgatttgtctcttttatgttttgaaacacaatttgattttgattatgtgttttgtttagagcagacaaatagtttaca

SEQ ID NO: 40450 - DNA, 859 bp, Arabidopsis lyrata
  Intron number 1 from transcript 930428 (locus 930428) deri ved from phytozome v7.0 (chr-ID scaffold_3; pos 11073372 t o 11074230 reverse strand)
tccaagttgaggtaacaaaatctttgtcgaaaaattaagtaagcttgtctggatttgataaatgatttcccttgcttgaaaactcagaaagaccagttaactatcactttttagttcaacattatgcaatatgtctatgtagtcgagagtaagctcattttttgatgtttctactagactcttgctgacacatatatgaagatgttgacatacactgaggttcctgtcatagatttctcaaacttatcaaaacctttaacttgccataaaataatatattaagggttatggcacatatatgtctggaaactggtttcactctttttggctttacaagttttctattcttggatttggttccttatttgcattcgctggatttcttacgtgagcaaaatatctagtaaaagagatttattacatttacattttcgtgtgaagtagaggtatgtttcaggcttcgttgtttttaagattgatgattttgtctgctcccaatctttagatgtttcttgctttttttccgggccaaaatttgaattgtgattactttttcttgtagtagtgggtgctcaaacgaaataagctttagtttgtttcattttaaagattggatgcaataaaagaaaaacatcttcagctttttatttatttagttcttccccattccctcactgtgctttaatttgagtgtttcatgcttgtgtgcaatgactcttgtactatcaaacttttgatgctgtttctgttttgctgtccatgtatcttattcttataaatgtagtttattgtctaactgcctcttcactttataaattcactaggtgttcataaaaactgttgttaaaagcgacaaatt

SEQ ID NO: 40451 - DNA, 629 bp, Arabidopsis lyrata
  Intron number 1 from transcript 936861 (locus 936861) deri ved from phytozome v7.0 (chr-ID scaffold_5; pos 9272318 to 9272946)
tcttcctcgaccagcggattgtccaacagtaagttctgtctctgcctctctcccttgaaatttgtttgtaaattcctgattatactacatctgatagatctgtagtattaaatctagcgggtctaatcaagtactgtaatttattggattcaatccttttttctttaacgattttcagtcgtttttttgttatgaaatctagtcgatctgataatcatttgattaatttttgttgatataatcatatctgaagtttcaagtcgtgtctaatttatataacctgtcatagagtaatcaatcggatatctgaacagctttttttgttttcgttactgtaaaatcttgtagcggctgagactggcgtcttctgggacctggatgattgcccaatccctgatgatcagactcctgcttcggtctgtgctaatatcaaatcggctctcaagactgcgggttatgttggtcgggtttcaatcgttgcttattcacttaccaagcagacctcagtcgacttcgaatccgcccaaatcaagcttgagcaacctggttaagtcctaaaattctctctttttcttttctcccatcttatctgatctctccccgcccatttactgtttcaggagattata

SEQ ID NO: 40452 - DNA, 941 bp, Arabidopsis lyrata
  Intron number 1 from transcript 891043 (locus 891043) deri ved from phytozome v7.0 (chr-ID scaffold_7; pos 15119735 t o 15120675 reverse strand)
gatctgcttgagcgtaagggccttttgacacaaaggtaattccttgctataacttttttgtttgttactgtttttttaggaaagggacaaacatatacactgattgttgttaatttgttgcatgggtttagaatacacaagagtttaagtcgggtgaagttgggcgttagaaagaaagcttttgctataaagctttcaatcaaacattagaaagaagagtcgggtaattggttccgtttattgtgatcaaacattgtgctgtttggtttcttgcaatacatttgctcatattgtgatcaaacattcattttgttttgtttgtcttaatttttttaaataaagatttatatcagatatagttgtttgaaaccatttaacttttattgatttcgttgttagacaaaggaagcaaagaaaagttaaaagaattcactagccccaatggattacgatgttgatatggttagccaaatgatgcagaaatcgatttgatccattaacttttgttcctgtatatatatatatatatatatatatatatttcttaatatatatatatatatatatatttcttttttttttttttttttgacatcatatatatttcttaatatatatatatatatatatttcttcggtgaacatatatatatatatatatatataacaaaacatatcaggttctatagtcatcctagaaagacacgaatgtagccgcctaaacttctctgactcattgttgaagatcgatgaagcagatccgaaggcgagaatggtggtaatgatgatctcattttactagcacatgtacgagaagaaggaatcaatacaggcaagacactattaattttgatcaaatatctgataaacctgtctcaaaacatttaacttttatttatttgtcagatctagaccaagcaagcaaacaaaagctaaaagaa

SEQ ID NO: 40453 - DNA, 917 bp, Arabidopsis lyrata
  Intron number 1 from transcript 489030 (locus 489030) deri ved from phytozome v7.0 (chr-ID scaffold_6; pos 9033488 to 9034404 reverse strand)
gtggtatgtttctttcacagatctttgcgtttttttccccgatgatttctcgtgtttacttgtgttgagttgttgaatttgtttgacagatttatgataattcgtgtttgtttcacttgaattcttgaacgatcgatctagcttttggcatattcgataacgattcatgactcgtcccgtatttcgctagtcaatgctaatcgtagatatgaacaatcgaatcgagaccatttttttttttttgtcaaactgttctcgtgatgtagcaatgaaatggtttatgaaatttatccatatgttgagagtttgagtagtatattgaaggataattgttgaaaatggattgatgttgtagatttttctatgtctttaagtaaaactaaatatcattcgtagtagtttgattataccaaaaagcaaagagatattcggaatatattgctctgattggtgaaaaacttgcaaaattatgttgtgttgcttcattcttaaatggaacgaagtggctagggttttgattctggcttttgataccatgtaaagagatctggaaaagaatattgtctcttgatttgctagtacaatacacataaggaaatatggagtatttcttttaccctgacactttaggtagacttggaatagtgtttatttctagtgtttataaatgaagtttcttttgttaacttagtagagcttctttcaaataagaaatcattctctttttactttccagattgaaataagaaatgcaatgacttttgtttgttttgctttttcctttgggatcttgacatgatacgtatttggttcgtttaacttaatcgtctcaaaacatatatggaactgctgtatgaacccggactgtggatataataagtctgtctataaagcttatacctgaatctggttgcagg

SEQ ID NO: 40454 - DNA, 808 bp, Arabidopsis lyrata
  Intron number 1 from transcript 894413 (locus 894413) deri ved from phytozome v7.0 (chr-ID scaffold_6; pos 11112641 t o 11113448)
tttttttttttttaacaaaaagaaaatatctggtgagtcaagctcatggtgagcattttagataatataattgaagggggagaaggagaaagaggcaggagaaggaagttccagaaatgaaacagaagtggaagcaaattggaaagaaaaacaaaataaaaattggaaagaaaagccaagaaaaacaatacaagaaaaggtaaattatattattttgaagcaaatcagatccaaatcaataagattcgaaactgaaacgacaccagtaaggtaaaagagtgaacaccaagaataaaaagcaaaagaatcacagatccaagaatttgtatcttctagaacttctataaaactccatatatagcttgttagtggatatttgagtttagtcataataattaatatgcttgttaagtttatacattacgagtgtgtcttgtcttaaaagtagtttttatgttacgaatcataagtgaagagttacaactcttattgtttgtgtttttttggtcaagttctgtttcacgtctataacatgaaacttgactcgaaagaaatcaaggaagtgtaatgttggtggtgatgatgatgattaagactcgttaccagggaacgattctgcgagagagagcgcgttgaaatcaggaaatcttctatattatcttgagaaaactgggaaagatttcaagattacaatgattgtatttgcttatgataatgaatgggagaatcttcttgattttttcaatatttgcttggatttcatcgatgtgtagagaaaggtgttttagttcattgttttgcagtacaa

SEQ ID NO: 40455 - DNA, 173 bp, Arabidopsis lyrata
  Intron number 1 from transcript 334636 (locus 334636) deri ved from phytozome v7.0 (chr-ID scaffold_1; pos 5595147 to 5595319)
gctcctaaatcggataacacagaaggtataatctctgaaaaaaattcttcaagttctctttgttcttcttcgattattgttacccgatctgttttttttttttttttcttcgtcctcattttgatttctctcttatttacttgtttctgcagctatcgtactcaactttgtaa

SEQ ID NO: 40456 - DNA, 781 bp, Arabidopsis lyrata
  Intron number 2 from transcript 490960 (locus 490960) deri ved from phytozome v7.0 (chr-ID scaffold_7; pos 1706479 to 1707259)
acgtcgttgtcgacaagtgccgactcgaatctgaggtatttcttcttttttctgtttcaattactttttgttttgctgttttcgtttcttgttcaaatttttatttttaattataaatataatatatacgggtagggaatggttttaagtttcttcatgatcgatttgatccatgcttgagataatgataactaaagggatatattaaacaactttttccaatccaaaatttacatctacatagataataaaagaaactgctatatacataattaactataggaaacatgaagcggctatttttcaaactaattaataatagtaattataattttcgtccgaacttcgtttttttgtttaccttgttgctatactaattaaattgcattgtaaaagttaagtataataggtaatttagactttatacattcttttggtaattaattttttggcataaatgaaagtgagctcaaggctcgaagaaattaaaaaattcaaaatgagacagaaagtgaagttgagaaccaaaaaaaaagtgatatcgaacagtatactgccaccttattacacaacataatacactttatatggtccgtacaatgttcttattttcttaatagtggattgtctttgtcaatgggctcaattctacagtaggcccactgactaaaaatcccccaatttaagtgtaatcagatgcttgcatcggtggttaagctacgtaatgattaattttacaatttttttcctcgtcaggttattcagctcaaagaacaactct

SEQ ID NO: 40457 - DNA, 865 bp, Arabidopsis lyrata
  Intron number 1 from transcript 923264 (locus 923264) deri ved from phytozome v7.0 (chr-ID scaffold_1; pos 25097842 t o 25098706 reverse strand)
ttgttcaggctcaagatcagaaaggtattagatactattatcttttaaactttcaaattaagaaacctctgcttgtgttttcataattttttttttttttttcccttattctcattgattccttgttttattaggattcttttttttttggttgaatattgtattaggattcatcactttggattgtggtctgttacctgatgggtcttcatataccaatccatctactggattaacattcacttcggattctagtttcatcgagagtggacagaacggtcgagtcagtaaggattcagagcgaaacttcgaaaaggcttttgtaactctgagatactttccaaatggagaacggaactgttataacctgaaggtcacaaaaggaacaaattacttgattagagcatctttcttatatggaaattacgatggtcgtaatactctcccaaactttgatctatttattggccctaataagttgacaacggtgaattttaatgcaaccggaggtggtgtgttcgtggagatgattcacatgtcttggtcaagcactttggatatttgtcttgttaagacaggaacaactacgccgatgatatcaaccttggagctacgaccattaagaagtgatacttacattagtgccgctgggagctccttgaacctctattttagaggatatcttaacgattcaaggaccgtattacggtaagtaaactttaatttgtgaaagggatgccatagagtaggaagagaaatataatgaggaaagataaaaaaaaataatttgaatctttctttgatgccaaacacctttgaggttttttctatatatgtctaatacaagatagttataggtaccccg

SEQ ID NO: 40458 - DNA, 481 bp, Arabidopsis lyrata
  Intron number 1 from transcript 470455 (locus 470455) deri ved from phytozome v7.0 (chr-ID scaffold_1; pos 1589597 to 1590077)
tgctctattgccacaggtgaaaaatttcagattttttcatgttcacttctttctttgaagatctagggttttgatttgatgtgatttaactgttaggttttctgaaattgaagagtttatctcaaattctcctgtactatgttgtgtgcgcatttaatgtgcttttagtacaaattgctgtttcaatttataaaatttacaattttgaatcaacttatgttgtagcctttttgctgtataagtggatctgttggtttctgttttgttttcatatgattctgtgattcctcggtgctgatttttgggatctgcattttgctttctttgtgatatgggatttgacgatctctatacatgcacaaaatattttgaaaaatgggcgtcttttgcattgatcttagggccactagcttcttgattgagatatgtttatgaagaatgtttcctttttttgtgaattggatcatttattacaggccgg

SEQ ID NO: 40459 - DNA, 448 bp, Arabidopsis lyrata
  Intron number 1 from transcript 485901 (locus 485901) deri ved from phytozome v7.0 (chr-ID scaffold_5; pos 17228897 t o 17229344 reverse strand)
ccaccaaattttctgctgatactttccccattaaggtaatcattcctctatcctctatttttcttatgtagcaaactttctctttctatcatgaagtttggtttctccttagaattttttttggatcttgaatgcttctgatctgtttattttggatctttaaatatatacacttcaccggaaatgccattgtttcaattccaatatcttttttaaggagataaaacaagttctgtgatttaaaaatctctgttttgttgccttatagatgaagatttgttaatgaatttaaacacaatgtgttgaaaaaggaaaatatcttttttcttttgaaatgagtttggttggtgtatatggtttggatctttcgttcataatgtgttgttttctgagaaatctggtatgttttgttttcttgaatcctctagggttttccacaagctggttg

SEQ ID NO: 40460 - DNA, 618 bp, Arabidopsis lyrata
  Intron number 2 from transcript 487814 (locus 487814) deri ved from phytozome v7.0 (chr-ID scaffold_6; pos 3914347 to 3914964 reverse strand)
tcaatctgtctaagaaacgtggtcagctcaaacaggtaccataaaatttggttaaatcctatcaatttttgtggtttaagctcttaaggattatggactcttggtttgggataatttgaaggatttgtttaagttggagattttgtttgagtttttggtgatttcttccacatttgacttctgaattgcataggcctagtttttggtaaccctaatcttggaaagagattaaggacataagcacaaattcaggaggattcgactttgtgttggatacaagcttcttttagttggattttgtcctgtgattataggttgcttttacgattcctctctatgattttgatagattcactgttgactgaaataataatgctaaattgggtccttgcagatagtgatggttgtgttttgttcagtttattacttaacttagtttcattttcagtatttcgttggtttacttttgctttgcgtgttttcttggtctaatttcttgatacagaattagcttaactttttcttgtacagaattatagttcaaagtaaacgattcaaagtggaaagtcaacatcagtgattttttgtgaacttctccacttgcaggctgtgcaatcc

SEQ ID NO: 40461 - DNA, 605 bp, Arabidopsis lyrata
  Intron number 1 from transcript 926538 (locus 926538) deri ved from phytozome v7.0 (chr-ID scaffold_2; pos 15057619 t o 15058223)
tcattcactgtggcttgcttctgctaatttggaaggtttgtggttggttactcaattgctcagcttttctcgtttctcatttactttctcgattcttttttttatttggaggttaatcgctattttagtgtctgcattttgaattcgaaaatggttttgatgattttatgttctgaaattttttgttcattgttttctattgtgagaaggagatgttgttgttttttggtatgttttagatttagtggctactactgtgaatacactgttttgcttttcttgttcagatcactataccacgtttcttctttttcgtaccagctttgtaaattgaaaaggcttgttcttttggttgaaaagctgggtttttgatctctcttagcgattcgttgatcgcgtctgtaacagcttgaagcttatattgtttgtggtggttcttgataatatgtacagttattgatctaaacattctctggatgaccatttgttttctaatgtatattgaatttgtttcattattagtctccaatttcagagagacctgtttggtttgttcttttggaaattagacattttgatgctaattgtggttcttgttacaggtg

SEQ ID NO: 40462 - DNA, 536 bp, Arabidopsis lyrata
  Intron number 2 from transcript 483024 (locus 483024) deri ved from phytozome v7.0 (chr-ID scaffold_4; pos 19402090 t o 19402625)
cgaaatccctgacactgctcatcaaattagcagcggttcgttttctcttttccaattgttgtttgttttttttcaatctggtttcgatgagaatgtgtttgctttagatgtgtgaaaaaagttttgttttttaatattacggtttcttatctgtgggattgtctgtcgcccaatttcaatttctttaatacttttttgatttaaatatgtaaatattaaaccatgaagaagaaattagaatcccgttagcttctaatgtagttttgaaataagtagtgttttttcgccaatgatgactctgactacttaaaaatgttgactttgatgattttgacgatgacccttgttgtctttattgatcctggaatttgataattcgatatggagttcaagtttcttgatgggttcttctccctctgactctcaaaaagttttacaaccataagattgggaaattttgttcaatctctgctttctataaaccgagagaacattttgggaagcttatagtatgttttgtggaaatgtacagattc

SEQ ID NO: 40463 - DNA, 465 bp, Arabidopsis lyrata
  Intron number 4 from transcript 933069 (locus 933069) deri ved from phytozome v7.0 (chr-ID scaffold_4; pos 10855441 t o 10855905)
atattcagattgttcacaaagaagatcttgatcttgtaagtcagtaaaccattactccttttactagttgcaagtgctcacttcctcattctgcgacttttgttaacctacctgttgatttctttctttctttctttctataccgaggactcatatcaattacatttgctacaactttacttattttcctcttcttgcaactcaaaactgatcttgcttccatgtgctgaaatcatctatctagcctgccagtaactcaaaaaacttttgctagtaaatgtttaaagtgtttaatgcttcttcttttgtggcagcattatgcaagatatgaacgttttcagtacctcttatttagttgtcacttttgctaactttttcgttgacctaccataccaatttgagtttcttgatttcttatgttcatgagcagaaaaatcatctatctggcctgcaaaaaaaatatct

SEQ ID NO: 40464 - DNA, 764 bp, Arabidopsis lyrata
  Intron number 3 from transcript 486659 (locus 486659) deri ved from phytozome v7.0 (chr-ID scaffold_5; pos 20432955 t o 20433718)
ctacaaaggcttcaagttcgcgggaaggtgagattcgattagatgtttttttttttttttttttttgttggtatttgttcctctgctcattagatatactttttgattttattacaatattatttttcggagtttctgttcatgtgggggttttgttcttcttctaattttattttaattatattactgttcttttactcatcatatcgggcaatttatcctgaatctggagttgatgaagtcactaaactctgttccatgttcttgaaatcaatgatttcgtttttttgaaaatcaaagcttcttgttctttgcacatgttttgttgttccataaatggcaaaaagattctggaattaggttttatttacttcacatgtactgcagttttgttctttatctgggatttgtttaagtttttagtttttgtgtaactttttttttaatgaaatagtatttttgttagttagattctgtagagtgtgcttaattgggatctgaaaccttattaaacaatgtttgagtgactcacttttcatccttattgattaattaaactaatcactgttgaaaatgctttcactttatactatactcttctttttagcttgctatatattttattgctttgattgtttattagttgacttgagctactagtattgaactattagtgtgtagagaaactatggccatcgactaaatgattttcttttgttattcagattactgtttggtagaaaattttgatacgaattgagcaa

SEQ ID NO: 40465 - DNA, 244 bp, Arabidopsis lyrata
  Intron number 2 from transcript 483471 (locus 483471) deri ved from phytozome v7.0 (chr-ID scaffold_4; pos 21316109 t o 21316352 reverse strand)
gatctaaaagtaagttcattatagtactatagtgacaaaaaaatcaaaatcattcccaacggcgtttacatttgcgttcaatatttgaaaatcaatggttacatgcaaagttttgtgtttgcatctaaaataatcaatattttggcactgcaatgtttttttttttcttttgaagatctatagctaatagattttatttctacataaaggtttttgtgacaaagaagaaatatcaaacgagagg

SEQ ID NO: 40466 - DNA, 819 bp, Arabidopsis lyrata
  Intron number 2 from transcript 485810 (locus 485810) deri ved from phytozome v7.0 (chr-ID scaffold_5; pos 16877219 t o 16878037 reverse strand)
tttctcttggcggcgatttcagtatccaggtacgaatcgcgatatcctgatttcgtgtttttaggatatgcaattgaagattcttgagttgcattcaacatttcgattgtgtaaagcctttttgtttttggaagtttaggcaaaattagggtttcgaatttatggttcttttagttgctgggtttaggctgaagtgataaacttttgaatggttatttacgttttttgaagagtaaggtacaattagatcgattcaagaagaattgagatcagtaatggtgtgaattttgcagcctttactctgggttaaaactcatttgttgttgaagcctagcttcattgtgcgaacattgttatgctgataaatagagtaatttgagagaacttctcttatctagggactcatggttttcgatatctagctattagtgaggttctgtatcttcagttatcatcttttgtttcttggatagctttaaaccgagttggttgataaattgatatttgataaggttgctacacaagtcagttttgattgcaagttttatgtattgagattcaaaggtatagaaaaagcaacacacttattgcactgaatagtgatttacattacatttttagacatctaaaattaaagctattttaacggattatgttgaagttggatgcggataaaacattgcaaacagaggggtttatgcgaccggtgtagcattttaatctttcaaagttgatctaggcttgcatattgttttccctaagaaagcttttgtgtgattgacaggtcttgcaaaaagctttggaagtgtgggatctaca

SEQ ID NO: 40467 - DNA, 525 bp, Arabidopsis lyrata
  Intron number 1 from transcript 341612 (locus 341612) deri ved from phytozome v7.0 (chr-ID scaffold_3; pos 6215642 to 6216166)
ggtgacctcagcgatctctctccgtctcagttcaggttatatacatgaaaccctagttagctactttgtctactaatcacagctcgtactcttctaatgatattgtgtttaatttatgattaagtatctcttaacgttgtaaattgattgtagtaatatcaaaaattataatctgtttgccaaaaattatacaatttcacacatacagctagagatatcaaagagattaattttgaatagaggttgcttatttggttatttttcttactaaatacaatatgttttataaagtgcaaaaaacattttgagggataacaacagattcgagagattaaaaacacattttgttcatagatgatcgttgatatagttttccagtttttttgtaattattttactttgttatttagtatttctttttttccaatatgtgtaagcatatatatggactaacttaatggattttgactacttaaaaatttaatattagggttaaatttgtcaaaggcaggacggtgagtgagc

SEQ ID NO: 40468 - DNA, 1012 bp, Arabidopsis lyrata
  Intron number 1 from transcript 950977 (locus 950977) deri ved from phytozome v7.0 (chr-ID scaffold_8; pos 20331814 t o 20332825 reverse strand)
gagattctgatcctctttacaagtaaaagtcttctcctttctccttttcttagatcgattttttccaattcaggactcttctctggtctattcatatctgagataacgttggagaagtaaaaatacaaacttttctatcttaattagctttctagacattataaatgcgtggctagcttttgatttactgtgagagtcgaccgttagattcattgattgcacaacttggcagttatttcaattgttaaattctgtgtttagctttaatcatctttctgttttaggatacaagttcagatttttcttgtaaggtatggattgagtttcacagttttggtggaaatttagagccacaaactatggagtgattaggaggtggtggggaagactcaagtgtgagcttagaactttccaaataaatttctttagagtttgtgtggtgagagttgagacacgttagagatgagatctttgtgtgtgtttccacaagcccttcattatcagtgtagtagggtcattgcttttgttggaaagattataaaggcgaaaaactagatagggacttgtgctgcaagtggttttgaggagtttggtgttcctttttttgttgggtggaagcatgtctttctctctgttgtttgctttgtagtaggccatctacacagcttaatctgtcttaagcctaattagaacatggtaagaaaagaaaaagatcagaaattggtttcaaggcactcttactacaatacaattgagctagaccggttgatgttgcctaaaagacggggtttgttgtaataaggtcttttggttgttgtaggttaatgctaaatatattggcaatggtttagttggatggtagtgactaagatcactctgtctgctgataacctttgttaaagttttgttgttagtgtattctcggttgcgatcaataggctgttctatcccttctggctttttctcagtttaagaacagactagtgttaatatgctaattggtttccaggtc

SEQ ID NO: 40469 - DNA, 565 bp, Arabidopsis lyrata
  Intron number 5 from transcript 891941 (locus 891941) deri ved from phytozome v7.0 (chr-ID scaffold_7; pos 24182464 t o 24183028 reverse strand)
ggtaagtaatgtttctgaataaggaagtgatcaatgtgggttcttttggttttggagaagtttaggcaaggaaccatatatgaagtctaaaagcaagtacgggtaatgtctctgaatagtgaagtgatcaatataggttcttttggtttagggaatgaatcaatgaacaagaattgttctttgcttataaagttactataaggcaaggaaacatatatgaaatcaaaattttcaaatctccagcaatcttttcttccgagtgattggaattagaaatgttgaattttttttttaatttctaaacttaatcctcacactcttgaggaagggagatgttatcttgaaggacacaaaagttcaagatccaaggtttttcgataatgaagaatagaaacgaattcaaatagtataaagcatttttatttataggaagcacatcacactgtgaagaaagtaatgcatcttcatcatttatgatttctaatcagaattagaataatataacaatttcttgtgcttttctgaaaaggcctataacttcttttgttatgtgccagattgaaga

SEQ ID NO: 40470 - DNA, 362 bp, Arabidopsis lyrata
  Intron number 1 from transcript 477706 (locus 477706) deri ved from phytozome v7.0 (chr-ID scaffold_3; pos 1539437 to 1539798 reverse strand)
ttcctgccgtctacgcttacccacagtaccagcaggttagttggatttgaaaatatcaggagtttgattcgtagcgttgtgtatttgagattctgggttcgaattagggtttgcgaaatctctgtgctttgattttaggggtttaatgttgtttttggtattgaagtttctcgttaggattgtgtaatgcttgtcacttatggatctcacatgttttacagctaaagatttgttctttggatttgattttacttgttttgtgaattttctgccaagtttaggtataaggtagaaagttggtatcttcattgttgtttgattcggttgtatatattggcaggcacatcaattgtttcagagag

SEQ ID NO: 40471 - DNA, 959 bp, Arabidopsis lyrata
  Intron number 1 from transcript 494458 (locus 494458) deri ved from phytozome v7.0 (chr-ID scaffold_8; pos 2122511 to 2123469)
tcatcactaacgttatctctttgccttatattctggtaaaataatttctcaacattttctttgtctctgtttgctttaatcttgaatcaatttgtaaaaaccaaatcagaaacttcgaagttgaaaactgtattcaatttctttagctttatacgtaatttattaactaatgtagtttaaattactttattgctttaatgattatataatccattcattaaatattaatgtgttacattttactttaatgttgtttataactttaatgatacatttattcttttatacataattacatataattagttgtagttaaattagagaaatgtttcaagtttataggtagtttagttctacatattattaaaatttgtatttttgtgatataaatagtttcttttggttactaatactgaaatcaagatttggaggtttggaagaagagtcggtgaatggttgactggttggtctcacgtgtttttctttggcttggttctgctttgtcttggtttgatgactatctcgagaatctttattgtttctttgtgatcggatcttcgttttgtgtgtgtataaatactttctctttgtcgccaattcatttaaatagtgttttttcttgcagaaaatggcagttgggtttctttctgaattattctttttgatgagtagctatttgaggatctttgttatgtggtaaatataatattgaattttcagatagaaaatgttatgtctatatgatattatttgaattatctttcatatgactatatgagcttagtcgattagtatcttggggaggaatgattaattttcttggatagaagattgtgatcaaatacaacattttgttagggatttttttctataattcttggttctttcaaaactgccattggcttaccgaacttgcgactaaagtatgaattttgttgatgtttgtggcaggtatttct

SEQ ID NO: 40472 - DNA, 813 bp, Arabidopsis lyrata
  Intron number 1 from transcript 944546 (locus 944546) deri ved from phytozome v7.0 (chr-ID scaffold_7; pos 3134343 to 3135155)
agtttcttgcagcccaagcttgaacttcttgctaggtaatcaataacaaacccaaaatgcttccttgattgtaaagtttgatttttcactacaaagtttccaaatttgttgaataatctttgtttggtcattcttttttttcctgagagacgactgttcctttgttggcgtttaaacgtaaccgacaaattcttttctactttcaaaaagatctttaggactttgacattttcttccagatttggttcttgtttccttactcttgttttggtacctattattggtttgcctgattttattgaggaccattgccacttgccatgtcttgtcatctgccatgtttttgtccttagtcgactcctttgcttagacttaggcttacactagtatagtatacttgtggtatcaggaatatttgtaaacacctttgtttctatgggaatattccttgtataatccttttggattagtctcgattgaggtttgactttggcttttaaacaataaaatacttgatgttttgccttttctgtgacttggaaatcttcttcagccacatgggtatttttgttaaaacaatcactggttctacttaatatgtcatgttctagaatgtctctaatagctcagagagaacatttcttactgggtttagtttgacgtctggtctctgttttgcttctttctaatcaacccatagctttcattctttttcttcttccagcagtgttttgaagaaaatgctaacactactactttttgtgtctgtctatttcagaagaaaaggcattttctttgtcgccatcgatttga

SEQ ID NO: 40473 - DNA, 669 bp, Arabidopsis lyrata
  Intron number 1 from transcript 948398 (locus 948398) deri ved from phytozome v7.0 (chr-ID scaffold_8; pos 1473301 to 1473969)
aaggcggaggttagtggaatcgattctcatttaacctttaaattcgctctccgttcgtctgaatttcgtagagtttgttcgttcatgttcacagaatttggactacgatttatactttgtgttgtaacgttgtgatttttgaagagatttcgaaagatttcttagtttttagatgttaatgtgtactaatcttgcaaattttatgattcttggagtgattttgaacgaaatctcattttagggacttgctaatcttgcttggtaatttcgttaagattgaaaatgttgaagcggattcaccacatttgtgtcttttagttccgattagcagagaattagaatgtttgatcagagaaagttgttaccaatggtgggattgaaatggccatttactaatattgaaatttttttctatgaacagtagacaatagcatctgatttttctgttctgccttctactgcttttgttgtcttgatgaatttgaaattgtgatgattttctgaagtagatggctttgcctttagtattggtgttactgaaagaactgttttaggattggtgcttgtttatattgtatcattctcttatgagttttgtttgtgaatttgtatgtttgacacagtgaaaaggaagaaaatcaggaaacctaaaccgtgggcacatactga

SEQ ID NO: 40474 - DNA, 173 bp, Arabidopsis lyrata
  Intron number 1 from transcript 919605 (locus 919605) deri ved from phytozome v7.0 (chr-ID scaffold_1; pos 3235222 to 3235394 reverse strand)
gcgccgagtatgtaaatttcttcttttttagtaattggtttcttctaagattgagaatcacattaggtcatatgtattttggtgggttcatgtaacttatgtcttttgagtaagtttaatggaaaaagtagttaagaaagacttgtttgattcgtgaacaggagcagaaagag

SEQ ID NO: 40475 - DNA, 183 bp, Arabidopsis lyrata
  Intron number 3 from transcript 903398 (locus 903398) deri ved from phytozome v7.0 (chr-ID scaffold_3; pos 2096734 to 2096916 reverse strand)
aggttgttgacatcatagatacgtttaggcttcaggtagaattcaaagacctttttaatcttcttttctttgagcataagaaacacaagacacaatattttagataagtttgagattaacttttgggtatttatatatgttctggcaggagcaaccatcgtttgacaagaaacaatttgtgat

SEQ ID NO: 40476 - DNA, 436 bp, Arabidopsis lyrata
  Intron number 2 from transcript 903400 (locus 903400) deri ved from phytozome v7.0 (chr-ID scaffold_3; pos 2103406 to 2103841)
aaaaccagtgtcaagatcatccacgccaggtgaattttccaatctaaaggatttttaaaacttttccttttgtttttgtttattgatttgattgtaaagtattgagtctcttttgcatttcgaaacattttccttagacatttagttaagccaatatagagcatcatcatctctatgtctcaaaagcatgtacatttctctgttcttgcctcgaagctatagttgttatcgggtagctgcacccagctcagatgtgaatctctatcttgaagaagcatgacttttggttatggttcatgtatgaaccacggatttcccaactgactcaattagcaaagcattaaaaccgatgtctgttctttatactttttcacagcattttttttgtcgttcttcctaccgaacacatttctcactgagtttcttcttaggttgc

SEQ ID NO: 40477 - DNA, 928 bp, Arabidopsis lyrata
  Intron number 1 from transcript 913131 (locus 913131) deri ved from phytozome v7.0 (chr-ID scaffold_1; pos 15279292 t o 15280219)
gtatcttggtgagtttcctataacgatcttggtaatggtatacttcatttagaacaattttccatttttattcaatctaattaatcccttgattactatgttatttaaaattttagtaatatgtacatttgattaatgtattatgaatttttaataagtttgaagaatactaaattggcgttttttgttttagtactatatagatttacagttttgtaaatttggattgttgaataattaaaaaaaaattttaattaattttcaacaccaatgtttcgttttttaatatatagaggatatataatcctagaatattatggattaggaaagagctttagcatgtttgacttagttttgcttgatttaatacactgaaaataattaattatgttcagtttaggtggttttgtgaaaaaatacacttgagttgtttaattttgctgtgagcctgtgatcaactagttagttttgggagaaattatattgctcctattaattttaaatatttcaactatttaattagaccgcttaaaatatatatatagagaaccaaatttgaaccgaaattgcttttaggaattaaacccatcagactaaaaaacgtttaaccaactcaatttaaatttagttcagtttataatatatggttttggaatatatctggaatatatgttatttcatgaaactacaatgcaaccgtctcaacattggttataagggccggctcaaaaaatttaaggaccctgagctgaaaaaaaaattagtccttatttctcatgcttttcaaaaaaaaaaaattttggaccctaattttagtaaatttagttatgataaaagacacaaaattacaaggaccctgtgcatgagcaccaatgacacatgtatagagccgggcctggttataactattgttctaatgcagttaggt

SEQ ID NO: 40478 - DNA, 498 bp, Arabidopsis lyrata
  Intron number 2 from transcript 490829 (locus 490829) deri ved from phytozome v7.0 (chr-ID scaffold_7; pos 1049942 to 1050439)
gaggagcgtcagaagattcagcttcaatctatcaggtccttataactacttcacatatgtagattattatttatacgttaatgaaataatttatctcgaattaaggaagattattgcgttttcgtgtccgatcattttcatggaaaagaagaaaaaaaaaatcaggagttttgttttctttttcaagaattgtcttttagctagaaatctttttttttaaatgagttttggtattagtattaaatatttctgacgtgatatatgtacattaaacttgaaaattttcaataactctttcttcctttaattcggcaatataatttgtttttgtttatttttggattagaaatttaatgacaaattaatgcgctttagtgactattaccagaaaataataatttaatgtacatgacacgtggcataaaatgacacgtggaaactaattttgataatgatgaaacagtgcatcgttagcttcgttaacgagagactcaggac

SEQ ID NO: 40479 - DNA, 736 bp, Arabidopsis lyrata
  Intron number 2 from transcript 486031 (locus 486031) deri ved from phytozome v7.0 (chr-ID scaffold_5; pos 17713811 t o 17714546)
gaaagctcctagtcttcaaaatcgacatcgaatccgtaggttcactttgaattttcttattttattaacttttagccgttacatgagcattattagcattaaaaaataaaaatataggccgtatcaaaattgcttattttcaaatctaggattagttatatatttttatatctaaagatatgtttttctaccactaatacagatcagactcggtcagaaatagcatgtgactttagatattatatatagtcaacgtctttttacactttttttttttggtaccaatggttcttatagtttgtatgcaagtaggttggaaaatgactagtcaattgagaaggtttgatttttcactcacaaaaaaaagaagaggaaattgtatttcgattaacactatcttatgtatagaaaacactttgattcaaacctaattagatagtgacgaataaatagtattaattacttatataataagaataagaataacaaatcacattttcttccccaaatgaaaaagtgaaacggatgtttccgagtgggaaccgtgtgggatgaataatgatggacgattgctttatataatcttcttattttatttttctttaaattaagtttttataagatactattaaagtagacatgacaacgtcactaacacctaagacatggctcatgattttaatcgaagtgtgcatgactaatatatattccaatttgcaggtttcagcttgtaaaa

SEQ ID NO: 40480 - DNA, 616 bp, Arabidopsis lyrata
  Intron number 1 from transcript 312638 (locus 312638) deri ved from phytozome v7.0 (chr-ID scaffold_1; pos 6977854 to 6978469)
agcctttcatctcacaaaagtcatctaaatcattggtgagaatgtctctatctttcctcttttgattttcttatttcaacaagttcaaatatgtgttttagttttctcatttggagacttatggttttagggtaaactgctttagttaaatatctccatggagctaagaacttattaggtcctttgattgttagcttcaaattagcaaaaaccagtaagctctcatttgcttgttgtgtatcagatccacttttttttgcttattaatgggttttgctctgtttcggtaaaagatgtaactttcttaattgaatcactcaactaaatcttcttgaatcttgggctcgttgttaaagatatatgcatctggtagatttgatcaaagtagctaaagcccttagattccaaaagttatagaccttactgaaacttgctaggatttagaatgaaattatgtgtgttgttctttctagctgctgaaaccaaacatttatttgggactgaaaaatagcaagactctaagagtcccttgtttctctaggttgctgcaattgtctcctgagagttgttttgttttttaggcaattcccttgggattcgaggaacacttccctgc

SEQ ID NO: 40481 - DNA, 444 bp, Arabidopsis lyrata
  Intron number 1 from transcript 888531 (locus 888531) deri ved from phytozome v7.0 (chr-ID scaffold_7; pos 2363229 to 2363672 reverse strand)
agattgttgttacacagtaaaaaaaaatatgattgttgcaacggtaatgtaactttttcttaccttaatcaatttcctttttttttttggcaaaacatgaaaaaaggaaatatcagaaactagtgggtctaggaaaaaggaaataaccaaagtttcctttttgtttttttttggttcttttggaacctttgcttataaatactcatatcttcttcttcgttgagaaatcaaaaaacaaaaaatcaatctttcatcttcttcttcttctttcttttgagacctgcaatttctcttgtcgatcaaagctctgcgagactgatcactgatgttctttcgatctctcgtgacaacatcttcaatcaatcgagttcaatttttagttcgtgtctccctaataaatatctcagccaccgaaacgctttcaccggaggattctttcgacgg

SEQ ID NO: 40482 - DNA, 773 bp, Arabidopsis lyrata
  Intron number 2 from transcript 906244 (locus 906244) deri ved from phytozome v7.0 (chr-ID scaffold_3; pos 19601110 t o 19601882 reverse strand)
tgtctgttaaaacagtcgtggatttggtgaagcaattaaactcaaggtttgacaccattgatacaagcatcaaagaagtgtcttcaaatatggagaaggtgattggagatagagtagaagcgaggatggatgaaaagtttgaatatatggagaaggagttgaaacagatgaaagagcgtctgaatgcaattgagcaaggggtagggaaatctggtgaaaatgctgaggaaaactcagccttcaaacaaacagaacctcccgaaaagccgacgcaagtcgaccttttgcggaatcaaaaagaaaaagcaacaccaaaaggtccagcgaaacctccacaaaaccaatcttttactagtcctctggtaagctaacagtgccagacatatgtataaatacattgcggctgagttattattatcttaataaccttgtagctgagttttcattatcttgatcacataatggctgagttatcattatattaatcaccttacggctgagttatcattatattacggctgattatcattatcttaatcacattatggctgagttattattatattaatcacctaacggcggagttatctttatcttatggctgagttatcggtatatttatgcaggcgaaggatactgtcgatgttgagaaggacattggtattgctggtgtcagtaagaatctggaaaaggaatttgataatgtcattgatggcaaatctgctattgatttcatagatacgttacctaataatattaggaaattacgctcc

SEQ ID NO: 40483 - DNA, 637 bp, Arabidopsis lyrata
  Intron number 2 from transcript 471796 (locus 471796) deri ved from phytozome v7.0 (chr-ID scaffold_1; pos 6752851 to 6753487 reverse strand)
tcgtagaaggtgtgcttggatcacacctaaagctggtaagaatccatttttcatctatttcatactgcgagagcgtttgactttagatgtattcaaaatgtatgaaacgagcaagaatgtcagtgtgaatgtgagattgagtttgacctgattttatgaatcagtgaagagacgatgaagttcttctctagctagttgaatcaaatggtactgatttgagacaaggagctagtgtcttttgtttgatctaattatgtgcttctgtatgtggatgctgaagtaactcaatggtcaacaaaatgctacaattgctctatactttgttcagtgatcatttgctatgttgcataacctatgtagtagcttgtcctgaggttctcttatagatatttaacttctcagtgtccatgaaatctagctgaaggatgttttgattagctgatagatccacttcgtttatgattttagtataaaccaagcagagttttctggattttctatgcgaatgagcataaatgtttccatgccaagaggcactatccattattctttgttgctctctcatgtttcatatctttctctgctgtaaatcgactaataatgtggtgtgtttttccttcttgtaaagacccgtgct

SEQ ID NO: 40484 - DNA, 1038 bp, Arabidopsis lyrata
  Intron number 1 from transcript 911866 (locus 911866) deri ved from phytozome v7.0 (chr-ID scaffold_1; pos 8676517 to 8677554 reverse strand)
accctagctgccacctcatcatctttaacgtgttttctttaacgtcttcgattcaactttactcagattagtaaaagtattttctaactggttccacatacaaatgactcctccttactcaatcagcactagctagagccaatagaatcggactaccaaagctgattaagaccaaagaatagttggatttgagttttaaacttgtgtgctactagtaaaccactaattgtatattcctagtatagtaaaataataattctgaatggttccacatagacaagactcaagagtcctccttactcaatcagaaaaaagctatagagcaaaaaaagtaaattgtatcacatagacacggctcctatttggaggagagagtatgatggtgacagaaaacaacaaaagacaattctaaatggttccacatagacatcagtcctccttacttaattagaaatgctgaaactctcggtgtcttccatattacttagtatggcaagtttatactactagaagccactttattcgtggttttacatacatgaatctgtaaaagtaaatagcatcacatagacacgttcctggttgttagtgaatggaggagagagtttgtatgatggtgacacaaaacagcaaaagctatatccaaaaatagataaagaagctctcaagcgcgttggggtacttacgttggaagaagttgacaagtaaaggataaagcatagcacagttgaatcatctctcggctataaaaatagagacggggtcacaactcaaaatcacaacaagcacaacagagcaagagattcaaatagcaaaaaaaacttatatattctttcaaaaacaaaaatggggatcgtagcattccaatggggagagggtgagaacatactgacgctgcttcagaacagagagaactggcaatcaaggcaagtttaaaattcattcgacgtcttaggttataatttgtgcatcagacattgttgatgaacctttttttgtatgggtgattaataggtcaataagagcggcggattggga

SEQ ID NO: 40485 - DNA, 630 bp, Arabidopsis lyrata
  Intron number 3 from transcript 487522 (locus 487522) deri ved from phytozome v7.0 (chr-ID scaffold_6; pos 2680661 to 2681290 reverse strand)
tttactctattgaggttggtacttcttacattctccatctatctatccactcatcgcgaagcactcctgtttgtaagtctcagagagtttggagggatattggttttcaattgacagagaaagcttcaaacttcgcctgaggattggctgttttgtttctgtgataggcattggaaatgtagtgaatgcataagaacaacaagagattaggggtctttgaccagttgcttgttttgtgagccttttggctttgggacaagtatgagatctctttaacaaattttcaatatacatttggctctttctttgagtttgatcttaggtttttcattgcaatccttgattcaaggataattaagaaagttacgcttctcgatcttaccagtttggtgttatatttgggtctcgtttgatataaacttttttggtgttttttctttgtgttcgttccattattctgtcatcgatctcaacctccacctccagggaatatgcattagcttgcaacaatgtgtcatgcaaatccgcatctttttgagatgggcttcttgatctaattctattggctttttctttatgggagtttttctgaagaatagcttttcttgttacttttgcagcctgcagtat

SEQ ID NO: 40486 - DNA, 569 bp, Arabidopsis lyrata
  Intron number 1 from transcript 492146 (locus 492146) deri ved from phytozome v7.0 (chr-ID scaffold_7; pos 6586017 to 6586585)
aagaaggaggtgaggtttttactctacgattttctgattccatctttatcggattgattcagcttgtttgctgttaacttgaatccagattccaagtgtattgcttgattctcatgagtttaggtctgattgtttccaataatttaagtcaccgaaatgagcaaaaagcacttgcgttctctgattcagcttactttaagtatctgtttaagatcttaatgagtcataaaaactcttgtcttgcctggtgactcttgggatctctgtatgggtcaaataaggcaaagtttctattttcgccacgattcttttatggctaacaacataatcacttgtctattggcttcaagacgggatcttagaacttgcacctccgttttttgagctatgacagtggtgaaaacttaagtggaaatggtgtctctaatcagttgctgcttttcggatagtcttatgatgaggccttatgccctggcttcttgtgatttctgcatcagtcatgactgtctttcgctttgtgcctcatgtcttctttttttggccattgttttgtagactcgactcacaat

SEQ ID NO: 40487 - DNA, 776 bp, Arabidopsis lyrata
  Intron number 1 from transcript 924390 (locus 924390) deri ved from phytozome v7.0 (chr-ID scaffold_1; pos 32859297 t o 32860072)
accgcctcctattcaatataaatatcttgctcgtattcaatttcagatcataactaacccttgttttttttgttcttttttttcaaacttttttttgcttctacctaattttaatttttctttttattgtagggtggatgtatggaggggacgatgtgaactggtgtatggaaaatttggacctaattcaatgaataaacaggtgatcttatagtttatatgtacaaatttgattttttttttttttttgtatttatggtttcactattttcaccactaatcaatttttataatcaaaaagtttggtttcaacttttgagaaggtaatcatcgatggtttgatatgtttctttttgttgtaaaaagatgaggtacctcccgattttattgaggtacatgttcttattattttcaaatatgtctttttcagaagaaacactcaacttttgataacacagttgccacaaagtcagaaagatgacttatttcagggatgaatcttcagaggaggctaatttttgtcgttaatacaatttaagtattcctctcttaagattagggataacaaacttgtctgttaaattcaggaattactctttgttgccaatctctctctccaaactaaaatattacatatatggaagtagtaacttaaagtttttggtatcgaggtcattctaaggcactgagattcggactttggtatgtataggattcgttttccatgcactaatatttaattattgtttaatttattggtttttaggtttctttcc

SEQ ID NO: 40488 - DNA, 357 bp, Arabidopsis lyrata
  Intron number 1 from transcript 912808 (locus 912808) deri ved from phytozome v7.0 (chr-ID scaffold_1; pos 13224376 t o 13224732 reverse strand)
ggccgtatgtctgggcccatattagacgtttcaagcctcgtgtctcctcctcattattatttgtttttctttacgttttaattatcacaagtaaattaaagtgttaaagtccaatttatcacactgtttaagaaaagacaaaacaaatgtttcttttcacacagctagctaatttcaaaacaatcttcaacgtgaacatttggcgtttccgaagactttgtttaaccaaatgccaatgtacatcgagttttgtcacattaatccaaaaatatttttggtaacaatttaaatttactgtaaccttttttttatgttactgcaggtttggttattaacggcgacttcgaaacatcaccg

SEQ ID NO: 40489 - DNA, 679 bp, Arabidopsis lyrata
  Intron number 1 from transcript 929218 (locus 929218) deri ved from phytozome v7.0 (chr-ID scaffold_3; pos 5986058 to 5986736 reverse strand)
gttcgaaacttcccaacgctaaagcacttgacaatgttagtcaataattagttgagatttcataattttcatttttgttttgtttgttactaagctatctttcatagtaattatgagttatatgagatcaaattattttaatgcgtaggaggaagagatcagggagaggattagtaaagggagtgaagacaaagaacacaaaagaagagaggttgagaaaaaagttgaaggctctcggagaggatctaacggcgaagatgcatcttccgaccggtgatgatggtcatggtttttatttcctgcttaatctctataattttacaatacgcattctagtaatctttttttttttttggtatgaaaagggagtctagctcccatttattaaaaaaaaaaaaaaaaaaaaacaaactacgagcgaactcgccttgggcgcgcagacccaataacgtcgtcgctaagtagcgcaacaacagcatccggaacaacaatacaagttgtttgcctattggttttcattcttgcattctagtaatctttgtttcttcgaatcttattttggctaagtttactacgatttttctaattatgtggtctcgaataaaagaaaaatataatatatgcatttatcgtgacttaaaaagcccaaagagtaaaggcccattaagtctggcttatc

SEQ ID NO: 40490 - DNA, 652 bp, Arabidopsis lyrata
  Intron number 1 from transcript 492258 (locus 492258) deri ved from phytozome v7.0 (chr-ID scaffold_7; pos 7036298 to 7036949 reverse strand)
tcggtcttggcggtatattccacagcgctattcaggtactccactgcttcgatcttcttctatattctatgaatcttcatgtgtagatgtattgatgatgtctcagcttggtttttgtctactttgagtagatttggtttgtgtttatgtggaaatgaagaacttgacggcatgatacttttgttttgatctgtgaggctctagtttattggtttatggtcctagaggtctggagctgacgttctcttttgcttctctccactcaggatcttgtgtttcctagtaaatttggtaacttttcatatgataatgattgcgatatatattgacaaagtgctctctggagacttgttaaattcaatgatggcttacgtttacttcattgatctttgacctgggcaaatataattgcaattaccactttcccatttggtggagttagaaattacgtctgtgccaacaaaactaccagctcttgactttaggttttcaattagtgctaatcattctatgttcttaggtctgtatgtgtatgtaatctcatttgattattcttgttcatggttttgttattttctagtatcttttagatgactattgattcgcagggaagagtaattgaagggcatatcttatgaatatgtgcaggtat

SEQ ID NO: 40491 - DNA, 1031 bp, Arabidopsis lyrata
  Intron number 1 from transcript 914878 (locus 914878) deri ved from phytozome v7.0 (chr-ID scaffold_1; pos 31466013 t o 31467043 reverse strand)
ttccgatatcaaccttcgccgtgagcatcgttccggtgagaaattgtcgtcaagatacatcaaacgaaatttctggttatcaccgaatccaaacgaaactccatgataatctaacagcttaaggaaatcagaatatgcatcggaagattcttcgattctttaatctaaaacgtcatctccaaatagatttatgcaaactcatattttcaatggaaacaagcaggagaataataattttaagtaacagagcacctaaaattttccaccaaaccagatccatggatattattgaaagaaaaacaacaacaaaactaaagagatcggaagacgaaacccgatctacggcggggtgaaaacgcaaagccggccaacgtcgctagatgagtcgatcgctgccagacataagccaaccatctccataaacgattgagaagatgctggacatgggtagtcaccggaaaaatccggccgactaaagcaagaaaagtttcagctttctctctctaaatgatgcgagagagagaagagagagaaaagcgagtgagcatgtcttatatctccccgttaaaaacagaataaaaattgtatttaattttaaatcgaaaatgccggaagttacaatattaccctagccaaaatactaaaactacacattaaacctgggttttatccacccaaccaaactgattttggatctaacccaaaaacccacgaaccctaactcctctcaacgagccaacttctctcacgaccattttctctccgttttctgcgttttcgttttctctcctctttccacgacgtggattctcattcaattcgtcttcaatagttaagaaattcaaaagagacaaccgttatctccacgatttctcgatttcaacttcatatatctctcgatttctttgccaattctctccctttaaatctccgttttatcttcgagaaatccttgttgtcgattatggctgggagaaagaggaagaggggaacgtatgctccggatcgatgaaaagaagtaagggaagaag

SEQ ID NO: 40492 - DNA, 438 bp, Arabidopsis lyrata
  Intron number 1 from transcript 317260 (locus 317260) deri ved from phytozome v7.0 (chr-ID scaffold_3; pos 1253097 to 1253534)
aacgacctcttaaaggtttgtcttatcttttccttcaaacatttctatgtttttctttggaccttaacgtgatcacagcgatttctgctctaatccaagcaatgtttccatgcatctttattaatttctgtctaaattttgaaattagaaacgcggaatcttagggtttaatttgcttgtgtgacaagatttctccgaaatgacgtttctttagtttgacatttaatccgagaaaacccatgatgaagattgctcctgtgagattcaaaaatcgtttatagaagaaaaatgatcaaataaatgtggaggtttatgttggatttagtgggataaatcaaaagatcaaacgttgtgaagcttataaagtttctaagatgatgtgacagatgttttgattggacagggttcgttagagttctccagggatcgctctaatag

SEQ ID NO: 40493 - DNA, 568 bp, Arabidopsis lyrata
  Intron number 1 from transcript 940115 (locus 940115) deri ved from phytozome v7.0 (chr-ID scaffold_6; pos 2538506 to 2539073 reverse strand)
tcacttacctaattggctccctgagaacagtaagggtctttattttatctcttaaaacaaaaatgggcataagatgactataattttctcgtacctaaagggtgtgcttatatacgtgtacactacacacaaaataaaagaaaataagtctgattttatttagaacaacatctgaaatttttaaaccaaaaaaacaaaaaaaacctctgaaatttattagaatccttaatttggcttacatgtttttttcttacgattctaagaatattaatatttttctggatatatattgtctaatttggcttaaatgtgtcgataggatgttgaaatcattttccaaaaatgttttgactgatttgtgacaagaaagaagaaccaggctttaaaatattatttaatccaagaaaaaaatatcaattgtggatgtctttgattaacaaacaagaatacctaacttttctcatatatcagaattagtttaaatatccgctcaagattccctggttatcaaagaatcaaccaaaaaacagtaagataaaccaaattttcaggtccacaaggaggacaa

SEQ ID NO: 40494 - DNA, 695 bp, Arabidopsis lyrata
  Intron number 2 from transcript 940781 (locus 940781) deri ved from phytozome v7.0 (chr-ID scaffold_6; pos 5280288 to 5280982)
gtgtctacaaaggaaggcttgacagcaccggtcaggtatttttttgttttgtttgattttaaggaaattacatcacatatctgtctctaacattgttgttattgaattttagtgggagattttgcttcatatactctaatcagtgtcattttaggatgtttttgtttcataaggagttttgtttatacgtttcgaatgctaaattttgaagagaattccaattttatagttttaaatgtagttttgaaagaaagaagaaagtgttgtcttggtaaatgacaagacatacgcttgaaattttttcttaattcatgtgaaaaattcaagaatgctctttgtgaagtgaagtgaagtgagtggagcgtaagatcttgatgttctcttagctttcaacatttttcttgaatgatgaatttgataggaaatgaatgtgcaagatgctgctcgccatcctccagttgtacaaggctatattacagtgttaaatatatgactgacttttttaaatatgttgacatgaattttgcatacttggtgaacaattttacattttttgtttttactcttggtcttttgcccgtgtgtgttacagatcagttgtttagcttgatgatcttgcattacattgatgttgtacctctgatctatttttcttaatcattctcaggttgttgctgttaaacaactggacagga

SEQ ID NO: 40495 - DNA, 611 bp, Arabidopsis lyrata
  Intron number 4 from transcript 921527 (locus 921527) deri ved from phytozome v7.0 (chr-ID scaffold_1; pos 10935102 t o 10935712 reverse strand)
gattgacttcaagcaacttgccaagtatatatttactttccaatataatcgtatatctttaattgataaactgaaaaataattcattcttttcgttttagtaaaatgttatgtggatctacactttttgccaaccggtactagaaactattaactttttcaaaatttgttcgtaatatgttttagtctatgggaaattatccatcaaaagctaacacctaattgtaaatacattaatttatttgtaagtaaaaaaaaaaaaaaaaaactcttacacgaactatactatatactatacaatactggtacatatattttacaaacaaattattattaaataagattttgggtgataggtttgatggtattaaggacaagtacaaaaaatggtagtttctaaattctaacaatgctttgagaaaatgatagatcaacttttaaacaaaaaaaagtgatagatgaacaatagtttttctaaaaaatattataataagaagaagaagtaagaattgagtttgaattgttttttttttaactaattattttaatggttagagctaatttagtttggaattgtatgtatgaacgatgaagagaaagcgaaattgcggc

SEQ ID NO: 40496 - DNA, 778 bp, Arabidopsis lyrata
  Intron number 3 from transcript 931501 (locus 931501) deri ved from phytozome v7.0 (chr-ID scaffold_3; pos 21410181 t o 21410958 reverse strand)
gggacctataccaggtaactaaaacaaaaactgcataaatgtccctactggatttaactctgtaaacaaagatcagtataagatcacttttgtttagttgtgttggtagtataattttccttcgccttgttatttgttctctttctttagaattctctggaaatttttatccgctgtgtatcagaaactcatcagaagtgttagtttactagatatattcgactgagttgggtggttgcagtcctcatcagggtgtagttaaaagggaattgaagttgtgcttccgggttgtaatatttggctgatttgcagtgtgaagattcttcacatagattaatactactggtgtctttggtgttctttggctttcacaattgtattgtcatgtaaataatattgaaacagtgtcacaattatggaggagattttaaaaaacattaaaaccattcacatcacgaaagaccagaaaagagaaaaatgacacttgatcgttgactgtgaatttgtgaaacatttcatgaatctggtagtttcaataaggctgcataaacatttcaattggttaccttaaactatactcatcagtgttgttctatttagccctggattatatgaagcttacatagttgagcttttgcacatcaaggtttagtagctgctagttagggatgctattatcttatagcaagcatgttttgaatctgagtcgttttcaatcaataaatggttctgtcatttttcagcttgcgggtgttgtagcggttgaaattactggtgg

SEQ ID NO: 40497 - DNA, 653 bp, Arabidopsis lyrata
  Intron number 2 from transcript 915660 (locus 915660) deri ved from phytozome v7.0 (chr-ID scaffold_8; pos 2750861 to 2751513 reverse strand)
agcgaggcacaaaagtaagagcatttctcactgttaattcagaccatctatgatatcttgatgaaactacagagagcttcatgaatagcatgtctgatgaataatttaatcatcaaatgataggttaagataattatctaagtaatgggatttccaaaaattttaaataaatcattaaaaactggttttaattgattatgaggtttcatttttataagtctattattaatacgttgtatattacttttcaaaaacgtgaagatttgagaaatgttctaaatgacagaaatagcaaaatcatgtttttaaaacaaaaaaaaaattgtaaaaaatgtctagtattttttttccttcattattgctttgccatttataatagaaaagtctacatttccttcttaaggataaattaaaaaaatctgacatttgcatgaaaaagaaaaatatatatagtgaagccaaaaaatgtaagttactagctatgtgttattttctcagctactatccattattttcctagtgaactaatctatgttcaaaattcaaataaaaggaacaaacctccgagcttgtgtttccttagaactttctcattttgatgcttggatttatgttcagtgaggaagccgttgaaatttactggccaaacaaca

SEQ ID NO: 40498 - DNA, 478 bp, Arabidopsis lyrata
  Intron number 1 from transcript 914863 (locus 914863) deri ved from phytozome v7.0 (chr-ID scaffold_1; pos 31368327 t o 31368804)
gcaagggtacgtaatttgtggtttaggttaagggtttttggacttttaccatatattttgatttaaaagaaaatgaaaaataaaattaaaaaataggggtggcaaatacgattagttttatggagaaagtggcattctagccattgtttctactgagagtgactttataggtacgctgaatttgatttctactcgatgtgctttttttttttttttaacaatttttttggaccatttcttgatttatgcgtgtcatccttctgcagggccatgctaatcttctctgtatggttccaattttatcagatgtacccgaagggactactcgatgtgctttgcatatggggaaggctttaactcatgtgtatggaattatttttatgtgaaagtagggaacgtacaaagcataataaattggtttactgtttcttcatacaataaagttagtttagtttagtggttgcaaagtccagcggcg

SEQ ID NO: 40499 - DNA, 853 bp, Arabidopsis lyrata
  Intron number 1 from transcript 945248 (locus 945248) deri ved from phytozome v7.0 (chr-ID scaffold_7; pos 5982723 to 5983575 reverse strand)
aagtttgtcttttgatttcaatttcaattccttttttcttgtcactgcattgattatctgcttctgggtttcttgcctttgcttgatctttgatgaaattaagtcacttttctcttccttgttgtgttaatgaagaaaattggagtgtgaaggagatggtaaacactaattagtggatattaagggcaaagttttgtgctttgagtgattttcttgagaaattttgtggtaactggaaacttgatgcgatctttttgctgagctcactcacatctgttttggcttttaaaaattgggtctttctgggcagatgaagagacggaatcttctgctactgattgatgatgcttgatagaacaaaaaaaaaactcaacttgatttttggttttgagagacagtgaatataaaggagacatttttatgtgtttgtgatgatgggaatgaccattttctctttattcaagctggagtgagaactaaaatagcgtatcatacacgattgacaacaaacgtttgtgtttttagactaccagattccgtgtctttaagacttttgtttgtttttttcagttattcttttgctctgattggggtttgtcgattcatagtgtcattatcttacattcattctctactatcactgtaacaaagaagaaaaattccctttcctcttaccctttttgaacgaattcattttaaagagatctctgtgtgtgtgtataaaaccaaagaatctcactgtttcttagtcaagttttgagttgtgatcttgtagtttgtggttttggttctctcttgttatgttttgctcatttttcttataatttgtgaagcagaacaatcttgttgaggc

SEQ ID NO: 40500 - DNA, 718 bp, Arabidopsis lyrata
  Intron number 1 from transcript 887974 (locus 887974) deri ved from phytozome v7.0 (chr-ID scaffold_945; pos 513 to 1 230)
cacagtaggtgtcaaggtaacttaatcgtctcaaatgttctccaaatggttagggaactgaagtttaaactcttttactttctcactttctccaaattgttttattgattctataaatttttctctgtaatgtgttttattgattgttacttgtattgtaagacattgtttttcaacaatttgaattttttttctcttaaccattggagtagaaattagttaagatcttgtctaatttttcttaacctagaaaaagtgaacttttaatttaaaaaaaggttaagatccaagattaagatccaattggatcttaaccattggagatgctcttagatggttccatttatgtggatcttagacagtgtttctattcctatggaccttgacatttagtactattgtaagatcctttgccctctcctatttttcaaactttactggatcaatgttttgtgtagatcgagacatgcacttattggctaggcccatagagtcatcaccagaaacaagcgaggataaagaaagtttcttgctatactacaccaaacatcttcataaacatgatgagtaggtttcagtttcattacattccacttcgtggattttgtttttgtccaattcgtttcatgaaataatttgtcggacaagttgtgtgactttcacttaaaaaaacatactttcagcagaatcttcgttatagaagcaacaacgaagattc

SEQ ID NO: 40501 - DNA, 530 bp, Arabidopsis lyrata
  Intron number 2 from transcript 936558 (locus 936558) deri ved from phytozome v7.0 (chr-ID scaffold_5; pos 4162474 to 4163003 reverse strand)
ttccccttgacaatatcattcctttttatccactggtaagttttcttacatttttctttctcctaacttttaaaattgcgccataaaaaattaggtactatacataaattttggttgtgcatatataataaatatacatcagacaaaatcattttcaaaggaaataaaaggatgagaacatttttttaataatgaataaaaagagaagattgtaaactatttcatggtggtccaatggttgaaagactcatcataaggctagagaggactagagtttgagtctttccaaagaaaatgacaagaatattcgatgttccacagggtctatagattagtttgagtttcggttcgagatctctctgtcatgaataaaacgtagtagaaaattaggaatgatgtgttcgacaaggaaaaaacacaatatcgacgaatgtatctatcacttgtgtctttttgttttggggtcaaccacttgtgctttctattccacttcagttgaatacagttttcaagagcgagttcctagaccg

SEQ ID NO: 40502 - DNA, 807 bp, Arabidopsis lyrata
  Intron number 1 from transcript 936558 (locus 936558) deri ved from phytozome v7.0 (chr-ID scaffold_5; pos 4163100 to 4163906 reverse strand)
acctactttgcgggccatcgattactctgactgcggtttgctactaactctgttcttcgtcttgttactttgttcttgagtcgctttttgatatcaaagtaatattaggagttgaaaggttcatacaacttttccacaatctcattttttgtttacttggtttttggatagtaactttgctagtgttaaaaatcggttatgtaaattagtgagtgaggactaggaacaatataaacagaacatcggtggatgcatcaaatttttaggatcgggttggacaataattggttggttttgggattgtaagttggattctctagaaccgatccctagctaggcctctagggatcaaatatggcggtggaatattttaagcgtaaacccttgaagtgatctcgatcggtgtagagactctagaaccgatccctagctaccctagggttgactctaggaataaagctaaaaactgaattctagagctatcacaatctttcatgtttatgtatctttgcctttatataatcatataaaatggttttagttgtgtgtttacttgtaatgaaatttgtattctttcacttttaagtcttaaggccttaaactttgcggcttgtttaggtgatcgaagttcacctgttcaagatatccggttcaacaagtactaaatcgactcccttcaatcttaagatacttcgctaattttctttatttttcttcaagattttcaatcttagtttagtttccggtcttatttttggttaaaatcttttttctgaccaggtaaaaatatcactggaggagtttttt

SEQ ID NO: 40503 - DNA, 483 bp, Arabidopsis lyrata
  Intron number 2 from transcript 479428 (locus 479428) deri ved from phytozome v7.0 (chr-ID scaffold_3; pos 8235085 to 8235567 reverse strand)
cttatctccactcttgcttttctcacacaggcgaggtattatcttgttttttagctttcccttcattggtactctgttttggatttagattattcctgaaattgttaaaaattcatcctttttttttgcaaatctttgacatgttcttgtgttttgattcattgttaaaccaagttgctttttttttttaaaattacttaattagattagattagatccaatggattattgaatttgcgtagaaacaaatagggtaatggagaagagcactgacctgaaaaggacaggacaagttcagatttcgttaggcaaaaaagtactcttgtaccttgccacgtttagttaaacttttctggtatgaaagagaataattgcataagattttcacttttcaagaatgttctgttttggtctttctctgaagtttcttgtttttggtgatgagcaggtttcttctgtgaaagttatacgtaacaagctcac

SEQ ID NO: 40504 - DNA, 417 bp, Arabidopsis lyrata
  Intron number 4 from transcript 935522 (locus 935522) deri ved from phytozome v7.0 (chr-ID scaffold_4; pos 22207186 t o 22207602 reverse strand)
agagaggtaagtaagattacgtttcttcataatcttgatagtgtatcaccatagccacacatgatcattgatacattctagagtttctgtgtttctctgccacatctcttagtcacacatgtagctaccaatcattcagagttttatcgacaatgtttctataatatcttgaacatgtcttttgcttattgactgatgacaactcatcttcccatggttattgatttttgaaacttgagagaccacatcgttatagctagtcactacagaatgtattaatttgattgaatggttgctttcagattcaattgttatggcttctacttgttttctctgtgatgtttgcattcaagaacccatgagaagagtctgatcttgtggttgtttttttgttaattggtaaaggttgggcagact

SEQ ID NO: 40505 - DNA, 412 bp, Arabidopsis lyrata
  Intron number 1 from transcript 327611 (locus 327611) deri ved from phytozome v7.0 (chr-ID scaffold_6; pos 24070827 t o 24071238 reverse strand)
caagtaagcgactctatcttcccctctgctctttgactctctctgacttgcggatttttgttgtttcttcatgtaatttagctagatatacaaaacacactcgcattttgtaagaatcttgcgttgaagatattacgaaattgcagactgattttgatttacttacggatgattgctctggagattcaagttcaatacttttttatcaacggtagctttagatagtcaaatttgatgtttttaactgttcatgacaaattcttgacaaggctgttttgtttttgtatgattttatcattcctgttcaaattcaagctatgaattttatttttcttaaaaagttgtgttttttttagtcaagaaggttcttttagtgtttgaatctttgttttgtggagattttagagtaaag

SEQ ID NO: 40506 - DNA, 430 bp, Arabidopsis lyrata
  Intron number 1 from transcript 483513 (locus 483513) deri ved from phytozome v7.0 (chr-ID scaffold_4; pos 21448354 t o 21448783 reverse strand)
tcaaggtacatctctctgtttcttcctaattaatcacccttcaataataaaaggattgattttttttttcctggggaacactttggcaatttgttgaattgggcgtatttgccatctatggaacagaacaatttatgtgattgattgtggaatgatgttgaaattgataggatttgtggttccttatatccttgattttggtttccttttttctgtgcatctaacaatgatagatagaatctgattgtttctaagtgggcatttgaaatctgtgcagctaactatcagtagcaatcaaacttaacatttccttgttggttttggcttgtaggctagtgtttcaatccttgattatgttggtttttactaattcactgatttttttgagtttaactgtatgttgttacaggcacaacaaggagaagttgct

SEQ ID NO: 40507 - DNA, 820 bp, Arabidopsis lyrata
  Intron number 3 from transcript 471904 (locus 471904) deri ved from phytozome v7.0 (chr-ID scaffold_1; pos 7133310 to 7134129 reverse strand)
ttcttaatcctgcttttcgtatcgataatttgaaggtatgtttttcttttaccaaaaaaaaaggtaatgaatatggcatgctcattttgactctaataattatattttgtgttcttataattgattttttaactctgacataatttgaactttgtggacgtcattttcgtctcattctttagattttggtcagtttcattttctcttctactacttttttttcgaaaagaaagtcagataagtaacgtcttttcacttgtttcgtagctgagagatttaaacaataattatatataaaaaaatcacatattaacgattttttaaaaaattaatttcttttcaagataaacagaaaaaaattaaatgaagtctcttagacaaaaaatatattactctacccgaaaggaagaaaaataaaaataaataaggtatttaaagaaaaaagacaaacagagaaaaaaaaaaaaaaaaaagtccccaaagaactaaagaatccacgccacgccaccaagtcaccaactataaaagtctaaaagcgaaaaaacagaaaaggccaaaaagacacattacaaaaaggtgaaatcgaatttttcaaatcaagaatttataatactactactttatttcgacaaaaagaatttatcatttcattatcagtgtactagaaacctcacatttgcagtgcactcattatcattaacaaaaacattatgagcaaataattagcaataaatcatttatttacttttgaaatggtataataatatttaccaaaaaatgaacagagcatactaccagcattcaactcgagttgcaaaga

SEQ ID NO: 40508 - DNA, 535 bp, Arabidopsis lyrata
  Intron number 2 from transcript 471904 (locus 471904) deri ved from phytozome v7.0 (chr-ID scaffold_1; pos 7134297 to 7134831 reverse strand)
ccttttctccaccacactgttctaaaacgtatgattccagcaacctaaacttaattatcaattgttttaattagcggtttatgttattacttgaaagaaatgtgaatctaacaagaaccggccagttatatatttgataaatcttgggttagattcataacgattatttctaattttgactaggagtaggtcatcttcttcatcatgactttttaatcattttcaaagtatttatatgaagaaaaaaaagagttaattgtgtatacagattagaatgatacacattttcataattaagatctaaatctgatatcctttgctttcctggtttcgtctaaatctagttcacatgcataaaaataaaatgaaaacactcttagcggatcataacaaaacaactttgtctgatatatatatatatatatatagattattgttgtactgtatgtgctttgttttgtttcatttggttatttaaagtaacaaatggtaataattaattagtatatgtttaaacagggaagaagtgtttcac

SEQ ID NO: 40509 - DNA, 639 bp, Arabidopsis lyrata
  Intron number 2 from transcript 897957 (locus 897957) deri ved from phytozome v7.0 (chr-ID scaffold_5; pos 15258600 t o 15259238)
tgccatcaaaaggctatcaccaaactcaaggcaaggtctgttagaattcgtaagttattattttacatccagaggtctggggttcgagtcccagatacttcgatttattaataaatttgcacagattattggaggcaaatgtgcaggagttctccagcgatgtacaattatagccgttcgccagggttctacgcagaaagagaagtgttcatcaagaacatgaagaagaaggtgaaggaggtgagcatgaagaagaagatgaacgagatgtcgtctgtcgtggatctaataagggtcggaaggaattgtccgttgtagaatcgtctatgtacccgttctcataatttgcaataaataataaatccagacgattaaaaaaaaggaagaatgaataaaattgaggtaaaattcacattagattttaaatggatttgaaagtacaaaaataaaaggatttaaatctatgggtaaaccatgttattttaaaatttatatgtctcatttcaaaatcaatgagcaatggaaatttttgagaattgcccattttgatgtgtttttttcaaatgtcccttttagatatccattttcaaaaatatctctcataaaatatgaaaagtttaagttttataaggtttataa

SEQ ID NO: 40510 - DNA, 330 bp, Arabidopsis lyrata
  Intron number 2 from transcript 944565 (locus 944565) deri ved from phytozome v7.0 (chr-ID scaffold_7; pos 3194339 to 3194668 reverse strand)
ctgaaggtaaaagtaagaaaactatatgttggaggacagttctcaactacatatgatgaaattgttcttggaaaaagtgtagagtttcaaatcttcagatgctagtgtggtagatcagcaatgacttaatttctattttaatcctttgaatatgttttcagaaagtgtctataaagaagggaattgtggctatatgagttactgctgaagttcgattttagcgatctccatttccttgatcttttttttttctgtttttcatctagtttggctaaactaattttggtttatgcagtcccagcaaaagaagaaccgtcaaggtgtgaactc

SEQ ID NO: 40511 - DNA, 724 bp, Arabidopsis lyrata
  Intron number 1 from transcript 918814 (locus 918814) deri ved from phytozome v7.0 (chr-ID scaffold_1; pos 308947 to 309670)
aaggtccatccccctctctctctctctctctctttacacgtatgcaagatttgatttctaggattataatttctataagaaaaaatgggttttgattcttgtttcatcttgaatccgaaagtaacaagcctttttctgtttttattcgttattaatgaatctctctgaatttattcccttctgcattacttcatgtgtgtgtttattacatgtgattttgcttcttttggagttttttttaaaaaaatctcactttttaacttattctgatctataactgcaacgaaattcttctttctttttttttttctttgttttttgtagagataccgttttttcctttactataaataattaacaaaattaaatcacaaattgaatgatgatcatgctctgcttttgcaaaactctgtttctttactatgttcacacaaatacacatatgcatgtcacataacatatcagtcatttttttagtatcttctataaagattgcaaatctcttctttttttcgttgttgttcctctggactctgtgttgctcttggtgattcaattgcttttttctaggttgcatgttctgcaaaattcctgagaggaaaaccagaaaaacaaaagattatatcatctttgtgtccacatcactttaaatttatatcactaaatctaatttgtttatcttttgtaataattttgcagaaaattgtgttaaagctggatttgc

SEQ ID NO: 40512 - DNA, 849 bp, Arabidopsis lyrata
  Intron number 1 from transcript 909804 (locus 909804) deri ved from phytozome v7.0 (chr-ID scaffold_1; pos 226648 to 227496)
ttcatcttccattttcgttgaccacttcctgtaagtctttttttttttttttttatatacatacattattatgtacgttcagttttgcaaattttgtttttttgaattttgtttctttggggctgccggagatactttgataaggggaagtagcttgtttatggacgattcaattatagaacaagtcacgttcaaccgaacgaaatgatcaatttaattattttaaaaatttacttgaattctgacacgtcttagatgattgatgatattctggctgatgctgatttttcaatgtgttaatacaataatacgtatctgaaaatacatttttaaaaagacgcatattcatgcgcatatatcaaaacactaatcatcatcatgtgtcagaattttaaatatatattgttcttaccaacaaatttatagagatttgaaacataaatttctctagaacagaattacacatgatgccaagatattcataatataatcaacatcctgatttttaaaattagatttacaataaaattgaaaccaaatttggtttcaactctacctacttccgaaacaaattatgtttttgggcatatacggctactactatacctatttgtagttaagtcacacatcatagtagttaagtcaccttcttttttctaagtttggattttcttctagtgcgcagttaaaaaatacataacatgtttcagggcgattgcaattgcacttatatgctaagaactagccttgaatgattgcagatgttaggactggaatttttactcttgtttaaaaatggtctatttctttgtgcattttcagcaagtaggtttgaacaaagtgagatcg

SEQ ID NO: 40513 - DNA, 1055 bp, Arabidopsis lyrata
  Intron number 2 from transcript 493145 (locus 493145) deri ved from phytozome v7.0 (chr-ID scaffold_7; pos 11561203 t o 11562257)
cttttctctttacttttcttgtgagttcactctttttgctttcctcctgtttgttttaaacttggctttttttctgcttgcttttgatttatggctatagtggttacttaaattgaagccaaagcgctccaatgtgcataataagtagctgatccaattatagatagatcttaggagctgattgattgctcattgctgctatgaaactctctatctgtttggtacctttgataggccttatgacatttctggcttgagactagtttatttggttaagtggaaactagagtactcctcaagtctttgtttttccggtgcattagttgcataatgtgctcagggctgtaagattatatctttgggtcgtaacaagtaggagacaacttatattggctgagtgacacagaggaatgttagagttttgagttttagtgtataattatgagtacttggttgatgtaggcacatgatttcaccatcaccatgtgaacccttgcatctttatcaagtacgaaccttttttcatagctccaatagttcaatgaaatcggggaattaaggactgggtaactaatgtggggctgaaatcatgtagaacttagaggttggaaacatagtaaacataatgtcaagttgcatcacagctgctcattgtatttcctgcttttgtttttcgtaagtgaatgccggtttctgcaagttagcttgtgggctttgtgtattagagtgtcacacagtaacgtagtaatctgtaaaatgctctttgtccagatggagtcgatggcacgtgagatgtgtttgcagtttgttttgaaggtgggttctgtgaacaatgatccctgacaagttagacttgggacaagttattttagatgagattttattgtctagtttaaaggtagcattgctttgttattaaagtatattcattaagccatttgcatccatcttttgtttcttcacctcaatcagtgccctaatctaatcgtggtgatcttttatgttttgttgttctagagtttggcctttcagttccaaggtgactcaaaaaccgt

SEQ ID NO: 40514 - DNA, 314 bp, Arabidopsis lyrata
  Intron number 1 from transcript 906509 (locus 906509) deri ved from phytozome v7.0 (chr-ID scaffold_3; pos 21588865 t o 21589178 reverse strand)
aaggtgatataactaatatttgatttcttttgttgttgttggtgtggttcttcttttgcgcaagtagctttagttcttattacaagtcggcttttattggttatgttcatagaagaagtttgatcatttgttagacaattattatttttgaatttggattatcatgttttccttttcattgattatgagttttttcttctttgtgcttccttatcgcttcattgtcaatcaatggtagaagagtttcttcatttatctttactttgtgattgttatatgactgtaggagttttctccagctgcgggaaggtacc

SEQ ID NO: 40515 - DNA, 785 bp, Arabidopsis lyrata
  Intron number 3 from transcript 321537 (locus 321537) deri ved from phytozome v7.0 (chr-ID scaffold_4; pos 18645176 t o 18645960)
cctaaaccgggcttcggatctagtcgctctttccggtaattttttcatgttgcttcaatttatatcatctaagataactagataagtgttgttgatctagctagatacgattcattttacatattgatagctatctaattacaagttgattcagaaatttattattttattagaaaatgatcaacttcaattatttatatttagtttatactttcttagttcttacaaatgatttggttggctttgataaagttctatactgaaatattaatttgttaaaataaactgaatggacttatattgatcaaataaaccacaacaaaaatatcatttgaatttttttgattgcatagttttctccttatttagatatatatatatataacttgtatttttgatttttaatatatagtatataaaaacaacattgaagacctaatttctacaaatatatttataataatatttggtaaactgaaatgggttcacttatttttcaacaaggtttcaatttcgaatcttagtacaagttatttagtatttagaaggtgtttttgaggcatatgaattagttaacatgaggtaagaaaacccattttcttgattttgaaaaaaaaagacttgtaaaaaaacatctcaaataaatatctactaccacgtgattttgaattataaaagaacttggtaaaatgaaaaaaacatgactcatctttaaataaaacatacactgtatctaatccttcatttgtcaaaatggtaggtggtcacacatttggaagagcaca

SEQ ID NO: 40516 - DNA, 622 bp, Arabidopsis lyrata
  Intron number 2 from transcript 495042 (locus 495042) deri ved from phytozome v7.0 (chr-ID scaffold_8; pos 13519849 t o 13520470 reverse strand)
ttctatcaacgagaaggttttttttttctctttaatcatttcgtgttgtttttctttgatctgctgttatctctagtgagaattttctaggtctgagtctgtgtggacttcttcgtacatttgggattatatcgcagtgttcttgttttgttgcatttggtggtagctgtagtgaattgtaattttagctcgagaagatgatgatatactcattgcttgtatgtatgttcttgtgatctgctggaatttgaaggcagttttgtgaattatcattatgtaaaactgttactcttaagaaatgctgataggtttagtacccattttataagcttttagcttgtcaaatgatggtcagtgtaatacagaatgtagctcatgtgaatgtgcacgaatgattatgtcttgtattagaaacaattcaatcccggtattgggcataaagggtgtcaagtctgtttagtccctttctgtgagggtgtgacagagctgagggaaaagttggtttaggccttgtctagttactatttgattttgttaacagagagtgttggattacttggctggacatgtgatattgggatgatgacatgtttctgttctgttcacaggatataaagcagtt

SEQ ID NO: 40517 - DNA, 926 bp, Arabidopsis lyrata
  Intron number 1 from transcript 481703 (locus 481703) deri ved from phytozome v7.0 (chr-ID scaffold_4; pos 12079648 t o 12080573)
gccattttggtgctcaaggtaatttactaattatcctcttattcttctttaattttacatattttaactcatttaaatatttaattgtttcctattttatttcaaatttttacgaaaacatctttttttgggtcttggtcaacgtctataattattttgaaatgcaagatagatttggagaaaaataataattggtgagcatttcattgcatgtttagttgtttactgatccaatattcgaatattctgttagtattggtggattactttatcatttagacagcttggacataagttttttttttttctgtatggtttatgtttcttattgtattttggaaacatttattgtttacaaaaaaaaacattttattgtttacaaaataaaaaaaaatacacattatatgattttaaatatatatatgttacatgaaatcagattatattatcagaaaaaagtaacatgatatcatatcacactattttaccaaatatcttattatattattatttcataaaattatataatttctcttcgaattcataaacgtattaatgattctctttttttcttatttataattttactaccataatcatatacattcaaaaaaaaattcaaatgaaattatttatttaaaataataagcgttacaatttgccgtccaaaaaggaaaaaaagtaaacgtaacgatataaatatggggaaaataataataatagagtagggactttacttttgtcatgtaatgatgcatgtgaataatgtcaggggtccaataaattcactttctttaacttttattttattcctttttctaatttacaaaactcatccttcagtttctctaattatctaaatctcccccataactttatttttttactcagaaacccgccgcgatctaatcgactacattcccgga

SEQ ID NO: 40518 - DNA, 467 bp, Arabidopsis lyrata
  Intron number 1 from transcript 474105 (locus 474105) deri ved from phytozome v7.0 (chr-ID scaffold_1; pos 25844360 t o 25844826 reverse strand)
gcttcaggtttctctttttcgattttcctctgttttcttctctcttaaagcttcatttttaatccttttcttgcctaaatcaggataagattatgaatgttgaattttttgagcttctgggttttgcaaattttgttgctttcttagactatattttgagttccgatggaaattcgcataatttaggttcattagttgcttacatgcaaatactctgtttgtgaatggaaaccagatcttgagaaaccataaaaattcaagctttgtttttttttttcaagctattgtggttagaaagttaaaaagcttgaaacttgtggaccaatctttataggttttgaagcaagtcttcgttgtgtaaataaacttaaaatgggttcttctttctttcagtttcagacactaatgctgcattgtcatgtgtgtttgcagattgtccattagatttcagtgcatcaaatttcact

SEQ ID NO: 40519 - DNA, 421 bp, Arabidopsis lyrata
  Intron number 1 from transcript 925648 (locus 925648) deri ved from phytozome v7.0 (chr-ID scaffold_2; pos 9752485 to 9752905 reverse strand)
gttacaattgccctgaaggtgcaacggtatgtccgtatgtgtcaagtcttaaattatcaatttatgcatgtcttttcttttcttttttgttcaatttaaattttagataagagcgtaataatggacaacactaacaaaactactaggctacatatcctaatcatttatgcatttgcgtttagtttgcaaattgttttgcagaaaaaaaaaaaattgcacttaagaaaatatatatgttatttttttttttaattaaatagtatgacgcggaccgccgtcctttcatctaatatatgttatattttagtttgcaaagaaatactctattataaatgtatgaaacacacaagaactgcataatagcaaataaacaatcaaaatttaacattggttattatataaaatgtagacattgagattc

SEQ ID NO: 40520 - DNA, 738 bp, Arabidopsis lyrata
  Intron number 1 from transcript 952004 (locus 952004) deri ved from phytozome v7.0 (chr-ID scaffold_293; pos 8939 to 9676)
gaaggaacagaaaccagtgtgtggttccattctctgcacaaatgacatgttccgaggaatataaaaggctatgactattgggcctataataggccaataatgggctggatgggctgataatgggccggattggccgataatgggcctttatttatgagcagaaagcttcttctcaaaatttcgacggtctaccggaaaacatggctgccaatttctggaattcgtctcactactaaacattcttttcaactttacccattaaaactgattcgtcttctccttcaactcaacttttagtttctatttcttttggtttttgcgtttgtacgaagcagtaaacaacttttggctcatgatcttgataaagaacgtggaattccaattgatgattacaagttcatcaagtttcatatgtctaatcgtacgaaaactttttcttctaaattctttaaatttttctgcttaaattagcaaatttgttgtctttagcaactgctttactttagcaaatttgttgttgtttcagatataatgaattttcaagattctccatgaattggatttaagcttttttaaaaaaaaagttgacttccttctacacaaatgaaacaataatctaatgattagtctccattatttgactagattccattagtttcatcaattcacattcatggtcttcttcttgttgttcgtgtttcagatatatcgaaactggcacaacacataaagattagg

SEQ ID NO: 40521 - DNA, 578 bp, Arabidopsis lyrata; identical to SEQ ID NO: 38798
  Intron number 3 from transcript 496402 (locus 496402) deri ved from phytozome v7.0 (chr-ID scaffold_8; pos 20401393 t o 20401970)

SEQ ID NO: 40522 - DNA, 486 bp, Arabidopsis lyrata
  Intron number 1 from transcript 482372 (locus 482372) deri ved from phytozome v7.0 (chr-ID scaffold_4; pos 16260382 t o 16260867 reverse strand)
ctttgaagtaaccataaataaataaatatcctctggtaaatcttttgcctcaatatcattttttccagcaagtctctttcggtctcattgcttctggttctgggtaatgctttgatattattagatgatgttttggtggaacaaagttattcgattggatccgtttttaaatttaaactcttttttagagtagtaagatccgagtgtttttgtatatgcttcagaggtaactctttagtttggtccatatctagatctgtaacttcgtgttgtttcttgctctgttcaagtttagaagattgggtatataagctaacgaatttaatctcttgtgttgaccaaaaaaaaaaaatcttttgtgcctgaaattgtttgaataacgagatcctttgtgagagaatttgactgattttagtttaaacttaacatttctactggttttattgcgccagtttcatgtcttctttgtgattggttttcaggtgg

SEQ ID NO: 40523 - DNA, 521 bp, Arabidopsis lyrata
  Intron number 1 from transcript 937784 (locus 937784) deri ved from phytozome v7.0 (chr-ID scaffold_5; pos 14655156 t o 14655676)
aagagatctttccttgtaagtcttttcctcttctttttctttggacatcacttagtcacttccaatgctctgtctctcaaatctggtcatatcggtgtctttaagatctgaaaatctggttacaggttgaggataattttcctagaattcactcttcttactgtttaagatttcatctttcttcctgatttgatgtttgttagcttatagaggtgaaatgtgcctctcacctaactgtgcttcttccagtgaatttaatgtgtgttgtcagagtttcataatgcttgagacttgagagaacatcataggatcacaatgttcaacaataggttgaggatttttctagaaacaaaaaatgttcacactgttaagatttcacttttcttcttgattttgctcattgcctagtttcagagatgaaatgtagctctcacttaaatgtggctccaatgtttgatttgtgtaatcacagtttcatagaagcttgagacttgagaaatgttggtttttgcagctcttgt

SEQ ID NO: 40524 - DNA, 612 bp, Arabidopsis lyrata
  Intron number 1 from transcript 471510 (locus 471510) deri ved from phytozome v7.0 (chr-ID scaffold_1; pos 5663050 to 5663661 reverse strand)
ttatacaaaggcgtgggaagcatactgggtattatatattacttgtcatctcaatattttcactgtttgctttaggatttaagaattgttactgtcaacatttttacagttctgaaatgtttacttctgaaaaacaaatatatacgctttttgtggctttagctttgattataacattgagggtctttattagaaagtgacttacagactaatatattgaaatgaatgcactacagaagaaatgaattttttgtcataaattgtttatgcaaaattgtgcttacgattatttttatgtcacaaaatgtataaaataggtaggttgcaatatacgtgttgatgttgactttttgttgcaataagaatttcaattttaaagatcgactggttttagtcttttagagacaatgacttgcgcaaaatttgtagtaactattgattttgctatattggtgtttgcatatatgatatggtaggcctaaactattgacaacttgtaagtttcattcagacattttgatattgtgattactattaactatataggttttgtttaattgtgaatttgtgattataggaaagcatctgcaagtgcaaaagaggaggagagag

SEQ ID NO: 40525 - DNA, 455 bp, Arabidopsis lyrata
  Intron number 1 from transcript 951872 (locus 951872) deri ved from phytozome v7.0 (chr-ID scaffold_22; pos 39707 to 40161)
ttgctcgtttttgggctcacttcgttgacggaaaggtaaacaaacgagttaaaaatataaattttaattagtggaattttattataaatgttgaatttaaattgaatgaagaatcctgaaataagaatttaatatctttttaagttttaacttttgagggacaattattgacaataatggaaatatgaactatccctttcttttgcttgatgaaaaagaaaaatgaaacaaaaatgatacgattagtgtaattatgtcaattttaagagattgaaactctgtaacatagtgtgtagtttgattaacgttggcatgcttccgccaaaataatcgctaatttttctaaaacttttattaagagagtgtttattcgcatatatttttaattttttttttactactaaataaatagtctatatgttaacgattattggaacagctgtttgaatcgatcg

SEQ ID NO: 40526 - DNA, 587 bp, Arabidopsis lyrata
  Intron number 3 from transcript 494640 (locus 494640) deri ved from phytozome v7.0 (chr-ID scaffold_8; pos 4146967 to 4147553 reverse strand)
gctttgatcaagaaattgcgcaaagcggtaaaaacccttattctttcatcactaattagatctttgtaaaaacccttattctttcatcactaattagatctttgttgaaacatatatacacaattgtcaaattactgttttttattttattttccttaaaatcaaattactgatttttagtttggcttatgtgacgattgctgcattggtttttttttttaatggctaatagactcattgttatcatcagcctattttcgcatgataatgttaagtttgtattccatctctatgcatatatatatattcattcttccctatgtaattttgtgtttgatcttggctaggaaatggctttaatagtaaagattatgactttagattactcaaatctcttgtgtgacgattatgacgttgtgtctttagtttataattcatacctcatttttgtgctaatccgtgtaatccatctattataattttgtgtttgtcctttgcaaccaaatagttttaaagaccaaaagagtaaataatttttgtgtgtttgagcagaaaatagaggcaccagctggtgagaagccagcagc

SEQ ID NO: 40527 - DNA, 386 bp, Arabidopsis lyrata
  Intron number 3 from transcript 476466 (locus 476466) deri ved from phytozome v7.0 (chr-ID scaffold_2; pos 15784135 t o 15784520 reverse strand)
gttgcaaaggttagcgcatcgccctctccactgttacttacttaatcttcttttgagcaatctttttgttcacaacttgtatgcgagagattacctgtgtttgtatctttgagttcgattggtcttttgtgcagtataccatagtgatttgattagtgttgtttgtatgctatgtgttattgattcgattaagctcttgcttctttgtttgattgttttggtatagctagtgaagttgtatagatagatatctttgttagcattattggttgttgatgtgtgtgaagtgattcttgtgtttgattctgttttgggacgcgacttttctgataacatgccccggcagggataacggccctgtcaccttttctggttattgcatatag

SEQ ID NO: 40528 - DNA, 638 bp, Arabidopsis lyrata
  Intron number 1 from transcript 928405 (locus 928405) deri ved from phytozome v7.0 (chr-ID scaffold_3; pos 3083354 to 3083991 reverse strand)
aggcttctctccacaggtcccttaaacctttgcttatctaatctctcacaattcaaaaatccgtaaacattatttgaattggatacatacaaagatttctgtgtaaatcattacttacatacgcttatccaatctctcacaaatcagaaccacataagcttgcaaagtcagattatatgagttgtctgattcgtgtgttatagtagtttgatggtgtttatggtgatcgaagaatcatactaatgatatggctgatttgaaacaagaaaagtctgtagttatgatcttctggtgcttcctcatgctctgccttgtgaagcaagttttgttttagtgctcgataagggctggtttcacctaatcaagcttttgcctttacattcagtgttgttttagttcgttaactagtttcagtatgatttattcatctgtgttagtttcttgcctgtgttaactctctgagtccacttattgtcctgtttatgcagctcgttgttaagtttaaattgcagctcaggtcattttatactctgtttgtgaacattttcccacctgttttctgctcttttacgaacactaacaccctgattccatggttggcagaaggatagctcaactcaaggaacgttactgcaaaa

SEQ ID NO: 40529 - DNA, 464 bp, Arabidopsis lyrata
  Intron number 2 from transcript 494461 (locus 494461) deri ved from phytozome v7.0 (chr-ID scaffold_8; pos 2448607 to 2449070)
agattgaaagtgtaagttattttttcacctcatttagattcccttctgtgcatttttcatgtaattgattcaagttggcttggtagttcttgacattatagttcgtccaacccgtcccatcatcattgtggacagataatagttacccctttacatataggttttgtataattggaatttgatgtgctgctgatggttttaggcatacctttgtactgatattagttctagcatgttccaactgaaagtcgtaaaagttgtgtttatttctttctttgacatgaatacaaggaagagaaagttattagtggtgaagacattactgccatacagtctgagtttttctccttgtagtcatgtttctgcattgtttcaaagctttgaatttttgcttctcttggaaagtggctgatatagttttccaaccagtccccaggttacaatagctacagcgataatcttct

SEQ ID NO: 40530 - DNA, 387 bp, Arabidopsis lyrata
  Intron number 3 from transcript 494461 (locus 494461) deri ved from phytozome v7.0 (chr-ID scaffold_8; pos 2449110 to 2449496)
acagaagggtgagtttattgttttacacctgaacaagttgaatgcttataaaaaatatgaatttagtctgtgttgtttgaaccactatgctgtagtctggctagcgtagaattcaaggtatcgaaatgtcttggctccttgttattcttttatatattttggctccatctccttgccatttttcttggtagttctagagagctcaatactctaatttcactgatagttttgctgtcactttgatataggttttttctttttacttattctacgtaggattaatgaattgtgattgttggtactgatttattcttctagagcggagaaaatacttagatctttactgagccctctcttcatgctgtttccacagactattgcaactgt

SEQ ID NO: 40531 - DNA, 578 bp, Arabidopsis lyrata
  Intron number 1 from transcript 894928 (locus 894928) deri ved from phytozome v7.0 (chr-ID scaffold_6; pos 18109674 t o 18110251 reverse strand)
agctttttgcaaccaaaactcgaaggtttagctaggtttgtgattctgattttgataaccctaatttttctttggtgctttcatgcatattgttaataagagttttgatgatggcttcgtgttccgaattctcaatttttaaattagttttcataagaatattctcttcactatttaattgttttatcgtttgatttttcctttggaatctttgacctttattctttgttaaaatggtttatatgttgtttctgtgcaattttcctctgagtttacatgttcttcaatgtcgctttcacgttgttcggctaaaatggatttatgtaaaagtatgtgtatgtagtagcttcattgatctctgaatttagtaatttattgtggaagactaagtcatgtagcctagtggtttgtgctagtgttgtataaacaccgggtcaaatccacataatgcatgttgttgacgaaaaattaaataataaaatgtttagttactgtgtctctttagtcgctactgttttgagaagtttgtttgtttttgtgcaggaataaggggatattatttgtggcaatagatcaga

SEQ ID NO: 40532 - DNA, 136 bp, Arabidopsis lyrata
  Intron number 5 from transcript 496939 (locus 496939) deri ved from phytozome v7.0 (chr-ID scaffold_8; pos 22691542 t o 22691677 reverse strand)
gaactgccaagtgttgcagctgtgaaagattagaggtactaatatttgatcgagtttagtaataacatacatatatagaagaaaagccttgtggttttttgacttgttaattatttgcagcctaggggaacgaact

SEQ ID NO: 40533 - DNA, 457 bp, Arabidopsis lyrata
  Intron number 2 from transcript 928475 (locus 928475) deri ved from phytozome v7.0 (chr-ID scaffold_3; pos 3303984 to 3304440 reverse strand)
gaacttacgaggcgattagatacagggtaagcttatttctgagtcaccttgtaaaattgggtttttgtaaaaataaaaatctttcttgttgaaaacatacatacgcactcttggatatggcttgtgcaattgaatacacacttgcacagctccagtcttatgtttgtttgccttcactttgagcatactaatttgactcatgcatctatttcattgttttgggcaattttaagcaattgttactgttaaacgctcaagttatcattgctcttgttgtcttgttatttgtgagttggagaggatgatcagtttgatgttttagcacttaataagagtagaaatcctcttcttgtctcaattaatacttatgtcaagataaactgtgtgagattcatatcgtactactggttgatgatcatttgtttgttccttttgttttctgcaggttcctgggctt

SEQ ID NO: 40534 - DNA, 534 bp, Arabidopsis lyrata
  Intron number 2 from transcript 492669 (locus 492669) deri ved from phytozome v7.0 (chr-ID scaffold_7; pos 8881490 to 8882023)
agaggcttagatttggaatcgaaatcgattgttatctttaggtaacggaacccagttacggaatcctagcgttgagcttatcaaaccctaatttcaggggattagatccatttgcatcacatttctgcttttgtaaatcaagaattagtctccaaagagtgttcttttaacaacatttcaaccaatctgtgcttgatttgtaagaaatgttgtgtcaatttcactctcactataatattcttcttcaccaaatctctctttggcttcaaagtttttatctttttgcttctatgaatcattatcgtatcatgcctttcttcatttgatctcctctgcttttagctagcaagaaatgtataagtttaaaggttttttaaccaagtttcataagataaagttgagtttttggattacatttaccattcctgctacaattttagaggttcttaacaaattctgagattgtaggatacaaatttaactgttgctgtgtgatatctttaaagaattgtggttttggttattgcagaagtt

SEQ ID NO: 40535 - DNA, 632 bp, Arabidopsis lyrata
  Intron number 1 from transcript 477668 (locus 477668) deri ved from phytozome v7.0 (chr-ID scaffold_3; pos 1356719 to 1357350 reverse strand)
agctcgagctcttcttacaggtattcattgcatttcttttgctctttctaagtgttgttttccgataatgggaccttgccgcaggctcatgaacgatcgatcaatcttaagcttgtttgtgatatttgattcttattcaagtttgtaaccagtgatgcaattgtcttagttaagtttctatttttagttttggataaccgcatggactctgtttctacagtttcttcaaaatgaagttgtgtggaattctcccattaatggggaaatgtgttttttgttatagtgggaatgagaagatgaagttgcctgtttgctagttttttgtgcttttgatcctgctctcaagttactatttgtaatatcttcgctcaagagatggtctgatatcttcagctcaataaaattactgggaaacttatatcttggtttttcaaggtccacaattggcttaaaactcttcactcctgtaattccaacaagatgctttaatggatgatattagattcccttgttcattgtgctgcaatttttattatgcatttcggtggcattttcagctcgcaggaatctttgtgtctgaacttttattgtgatattatttcagctaaaaccgggtttaagtgcatatccta

SEQ ID NO: 40536 - DNA, 455 bp, Arabidopsis lyrata
  Intron number 1 from transcript 477628 (locus 477628) deri ved from phytozome v7.0 (chr-ID scaffold_3; pos 1237360 to 1237814)
ccatctctcaattccactcttctcattccgtgaggtacgcttccgagtttccatggcttccgcatgactattctcgttctttcccttcctactctcttatttagcttccgtctcttcgttttcctttcctctcaattcatttttgaatttcgtttgattccgtttctccttcgtgtttaatacttagatctaaatccggtgagttaaatttctacgaatcacagatctgcctatttttatatgatcagattcgtagatctgctcttgagaatctctgttttgcgatctttctctgcgttagatctctggtttgtgtagttttgatctttaaactctcaagacaaaaaagctgcaaaaacttttttacttttgtttttcaatgattgaatggtgaagccgtcatttaatttaatggatgctactttactacagaacacgaagtacattttaggatt

SEQ ID NO: 40537 - DNA, 454 bp, Arabidopsis lyrata
  Intron number 3 from transcript 473837 (locus 473837) deri ved from phytozome v7.0 (chr-ID scaffold_1; pos 23092529 t o 23092982 reverse strand)
ttggttcacaagaaacacctcgtcctctagagcctgtaagtgttttatttgtgcttcatttcgattatatggtagtaataactggtgtgttaggtgtttccttgtacattttttgatttaataatatattgactctgaatagttgaaagctcttcttaagatcttagaaaatagttaagaaactgagaaatatgtaaaagttatcgatgaccaacattttgtctgaaaaggagttggtcgtaagctgtaaatatttcagtggaatgataccctggtcctattcgatgaaatagtttgaagggtggggatgatacagaagatctctttcagagggcttaatcactaattgattaatgccaatgatgatttatcgttctttttcctatgcgttgatgcatgtgttacatatggttttcatattgtgttctacagataaatcttttggcggctagaa

SEQ ID NO: 40538 - DNA, 473 bp, Arabidopsis lyrata
  Intron number 1 from transcript 915414 (locus 915414) deri ved from phytozome v7.0 (chr-ID scaffold_8; pos 865501 to 865973 reverse strand)
gcgtgaagttgctgcgttgcttagaaacagtgataaacttcacgcttaagggggagattgttggtttaagcttgaaagaggcttaaaccggaggttacttaaaccgcaagatgtcggtttattgaagagataaagactaattctttaggagttatctagagaatattatgtaatcctaattgagttatgattaggtttagaggttgtggctatataagcatataacgagttgtgatatagcttaagagattaagagagttttatgtgtttaagagtttgagaaaagagagtttgagagaagagagtttgtgagctttagtttttgagttatttttctaaagcatattaataagagagtaattaattcttaaagctttgtgttcttaatctctacttttcttaaagctttgtattcttaatctctattttgaattctagaagacagacctcgagcaagtcctcaattttctctg

SEQ ID NO: 40539 - DNA, 533 bp, Arabidopsis lyrata
  Intron number 1 from transcript 929393 (locus 929393) deri ved from phytozome v7.0 (chr-ID scaffold_3; pos 6642249 to 6642781 reverse strand)
ctaccggaaagtgtctccttaccgttaaacgaaaggtaaacttaattactctcttttttcttcttcttgtaattgagttgagacgagtaagagtctagtcgtgaaggtgactcggtgattagaaataaagtttgatacttaacttgttgtgctgaatttgatttgatgggtttggttacaaaaataaatttaattggtttgcatccataattcaagaatcttgataacctttttttttgtcaagaaaatcttcgaaattttttgtattgataaaaaaaaaatagacttggctagaattcgatgaagattattgttacaaacgagatctgaagaaattgttttgagctgaaaattctaatcaacatatttttaataagcctagttccgagtcatcgactcagttgctaacacaattatagtgttctttattgttattcagttataataaacaataaatactatatattaatgatgatactgagtcaactcgctgtttctgtttttgatgaacagagaccaactctacaccaaag

SEQ ID NO: 40540 - DNA, 726 bp, Arabidopsis lyrata
  Intron number 3 from transcript 892827 (locus 892827) deri ved from phytozome v7.0 (chr-ID scaffold_6; pos 3666433 to 3667158 reverse strand)
tagcgattaagtctctcaaagctggagattttcaaggtacattttgacttttatactaaattggcactttgtttaacttggcgctgatgtaaacctattttgctagtgtgtttcattgtctacgatcagtagaagcaatgtggggacaaatcctgattctacagaagctacaaagcttgttagtgataattgagtttagtcttatgttattctatataacatatcatacgtttcttgtaaagtcaatcggtatgtgttaaccgtgacttgttacgaaagggtgtgtgtaagagttgtgacttgttggataagacacaaccgttacaacagttatctacggttttgttatgtagaaaactatataagtgcaagtgttgtcctaatgtaaagttgtcgagtaaataaaacaagtttcagattcaataaagagttatttttgttcttgtcttctttacaagagaagagacaaatgtctcttgcactgtttttcttctttctctcaatattccaacaaagctgacatcttggtatgattctgaaggtaaagagacatctatgtccgccatgaactctgggatgagttcttctgccaataattgatcaagatccatgtattctgacagagtttccctttctcacatcaataccaacccatctttaggcgaggacataattagttacatcttaagatctgggagacagaaaagttgaggacataattagctg

SEQ ID NO: 40541 - DNA, 480 bp, Arabidopsis lyrata
  Intron number 2 from transcript 489265 (locus 489265) deri ved from phytozome v7.0 (chr-ID scaffold_6; pos 10373874 t o 10374353 reverse strand)
ctcaggtcaaagattgtcagtctcgtggcatcaaggttggttcattcacatatccgatatcctttaattaggtctagatgatttttgttttttttttgacaaaaaaaaaatgatttttgttttcgagatagaaaataaataaattttgttttctttctcaagttttaatgctataaattaactagtttgaaatcacatttcttttgatacttttttttttttttatttttttttttttttttactttaaatttccattaaaaaagaaaagtacaagacccttaggcccaatgacggccacatggcccatacaactaacagaaaataaaaagaacagccaggccccaaagaagagcccagaacaaacaaaagcagagaacagggctcaatcttctatccctctcggttcctctcttatggttacctggttctctttgtttcaagattcttttgatacttatgtcaaaattatttaaaggtt

SEQ ID NO: 40542 - DNA, 429 bp, Arabidopsis lyrata
  Intron number 2 from transcript 892707 (locus 892707) deri ved from phytozome v7.0 (chr-ID scaffold_6; pos 3030417 to 3030845)
aagcttttgaggtaaaacccgataaacttcaagtaatgtgaaattaaaattcttcttaacatttggttattgtcagatattttaatttgctggagactctggtcatgtagctataaacaagtgactgaaaagcatgttatgatttgtcagaaatctgagtaattgtactaagaatgtctctataagcatatgttattaatttgaaattgacaatactctgtcttgtcgtctgttcaaagtcttttgcacaaagtcaactgtgctttcacaagtctatgcgattgatcattctcttctatttctgggaaatgttgttctaaattagtgttatttgatctaaatcggtgaagaaatctgtttgttgttaaatatactaaatcgtctgtttggttcttgatccaatgtcgattgtctagatctctggcgctg

SEQ ID NO: 40543 - DNA, 588 bp, Arabidopsis lyrata
  Intron number 1 from transcript 927082 (locus 927082) deri ved from phytozome v7.0 (chr-ID scaffold_2; pos 17369946 t o 17370533)
ggaagaggtttctaggtgcgcgttttcttccttttctctttattcccttttcctttttttggtaattttcttattccactctctctttttttttcttttgaaatttttttcagtggaaatgattatgaaagttgttctttattcaattgatgagagttgtttaaagatctgggttttgtagagttaattgtccgagatttggttcaaattttcttttggggttgcttgaatttcgctgaatttgtaaggagtgtctttttttttgttgttgtatagttcagtgagattcagattcggacagctcttgtagtgggtttaattaaaaatttaaactttatttacataattaacagtttaattttagacaatataagttgggtcatgttttattcatgagattgagaaagcaagagtctttctcacaaactcatgctcattgatccatttctcaaccatatttatcctcatttttcactaattacttctttttctttttcaaaacataattcgtctatttattttatgaaattcgattttacagtatcatgaatttgtgattttttttttctttctggtttggtcaggaaa

SEQ ID NO: 40544 - DNA, 455 bp, Arabidopsis lyrata
  Intron number 1 from transcript 906202 (locus 906202) deri ved from phytozome v7.0 (chr-ID scaffold_3; pos 19321751 t o 19322205)
tcagagaaagaaaagaggttagtattcaatattataaaagaagatttcttacaaaatgaaggtcaatttagagatatgttttaaatgtttataatgaaatatattcaaagtacttacaggggacttttttttactttttttacctgcagacaaataagcgtaaacaaggggataattcttataatgatattcctacaagaaaacaggtaagaattcaattttgtaaaacaatctgttcgtttttataaactaatttcacaaggaatgcattgttgcatttcttttgtacatatataagcaaagacattacaagttttacaaattgtaatgtcttttattacttcacaaggaatgcattgttttaaactgagtattcgtggcattgtttgaaatttttacaagttgtttttataagtattgttttgttttttttgtttgcagcctcagagaaaaaa

SEQ ID NO: 40545 - DNA, 539 bp, Arabidopsis lyrata
  Intron number 1 from transcript 951091 (locus 951091) deri ved from phytozome v7.0 (chr-ID scaffold_8; pos 20780829 t o 20781367)
gacctaccatcttcttctactacacacagtaagctttctttcttgatacttttcttgaatcgttagtgggtgcttaaagattttgtaggttcttgataaagttttttggtttagggttttagaaacgccttgtgggtaattgacgatttgcaggttcaaactcatagattcaagagtgtgacattcttggtttagaataaattaaaacttttcttgaatttttaattgggaaattgaagattttgcaggttcactagcatagatacattcttgattaagagtcaaattgtcacattctttgtttaagaaaaaaaattgaaacattattgaataggttagtgggagattaaagattttttagctttaccaagcatgtaggggcaagaatgtgacattctgattatgatagaggacagcaactgttcttgaatccaatctttagaccaaattttctctaactgtctctaatgtttttttccttgtctctgttgttttgatttgtaggtggacatttgctctgataactctctatttcggag

SEQ ID NO: 40546 - DNA, 669 bp, Arabidopsis lyrata
  Intron number 1 from transcript 485521 (locus 485521) deri ved from phytozome v7.0 (chr-ID scaffold_5; pos 15715776 t o 15716444)
gttgctactaaggtataaacttttctccatttttttctcttatgtttcttttggagacagaacatttaatttcgaaattatgtttctgtacttgttgtctgaaaaactctcgaaattgttacgtttttttcatgtggttttgctctgttttgcgtgatgggttgcttgttttttgcatttaaacagaaacgaatctcattcaagaaaatctgaaatgtgttaaatgcttgtttcaagaaatctgttctttatttttctaatcttcttaacattttgctctagatctttggaaatgttggttttgttgtgttttttttttaagttccgttcaaattttcaaaaactggatgggagaaatatgaatggttttagatgttactgtgtggcattattctatgtcttgtccattttgattctctttttgtcttacttttcgtaaaattacttccatagctttgtctccttcctactgctacagtgtatcattctttgtgtggccgtacattgaagttattaaatcagtctctgttctcgattactacacatacattgcataatatctacaaggtacaatacataacatctcagttcaactattcaagttttgatgaatccatatgtttcaatattgcagatattcatcaacgtgccttggtacttcagtgtaat

SEQ ID NO: 40547 - DNA, 648 bp, Arabidopsis lyrata
  Intron number 3 from transcript 482664 (locus 482664) deri ved from phytozome v7.0 (chr-ID scaffold_4; pos 17511498 t o 17512145 reverse strand)
cttgggaaggtaaaagaccctcgtcttattgctttgtgtcttaatcatatttatatacactacttgcacatgatcacttgttaatatgagccaataccttggatgatcttctttcattctctgtctttgtttgaggcaataatttgaactcttgaggcttgtttgccttaggctagtgtgttatttgaagttattgttagaggggattaggttattgtatcctataactctatcgctatcaagatcatagatggtcttctttttttctttgggtaggctggttagttaggacaaattctaaagtaatcatgtggctcaacaagtgagacttagcgggagttgaaccctggtatcgtttctagtctagccacctggttctaactgagaaaactgtaggctaattgggatgcatagataatcatcttcacacaaacagctaaagtcagaaaatatggattagaccaggattttgattgagaatcggatcaatcgttatcgtaattagtaatgaaatgtgctccgcacatagtatgaacgcattaaatacaaaactacctgtacctattttctgttttgttagacttgatcataattatctttggctgtaagttaacatcggtctctctgttgttcctgagtatgcagttc

SEQ ID NO: 40548 - DNA, 1019 bp, Arabidopsis lyrata
  Intron number 1 from transcript 936976 (locus 936976) deri ved from phytozome v7.0 (chr-ID scaffold_5; pos 10432462 t o 10433480)
agtgtagattttgggctgatttgattgacaaaaaggtactactatactttctgaattatttaggcactacaacacttttttaattatttgagtagtaggtgggccggatccgcatatccggcttttttaggataaccggatccgacttttcattatccggatccggatccgctccacccagatatccggcggatattctgatccggatccgctccacccggaaatccgaatttaggatatccgtaaaaatagccggatatccggcggatattcggatccggatttctttatataatttttttttattaatataaaattaaagaaaaatattaaaaaacaaataatttaacataaataattaaaaatattattaaaagtattattattatataaaagataataaaaattattaataaaatttaaataatagtaataaaatgtttaaaaatattattataatataaaatattctggatccggatatccggctttaatttttctattatccggatccggtcggatccgcttttcattattcggattcggatccgtcccacccggatatcctatttttcggagcggattccggatcggatcccggatcccggataatttggtctcagggctagtactacatggtcatctaattactagatttatgtgtggttgaaactagtatcgtccaaaaatttaacgttttggtcaaaattgaactatgagaataacacgagatatacaaaagataaggaatttttagcgaagtgtaatttctttgttggtagtaaatttaacatgggggaatagcataagaaattttctgttaacattatttttttggtttgtgtaacttcttcttgatacttaaaaataacaaatacgatctactatatacttcataatattaaatgttatggtgtgtatataaaaagttcaacgaaaggagagactaaaagttcaatgtctttgtgattaatatatataaataaataaaaacaggtttttgacgctggaagaagaac

SEQ ID NO: 40549 - DNA, 468 bp, Arabidopsis lyrata
  Intron number 1 from transcript 901646 (locus 901646) deri ved from phytozome v7.0 (chr-ID scaffold_4; pos 18090052 t o 18090519 reverse strand)
gtcaagcaaacgaggtggtaagaacgtctccagtaagtgcttctaaagagtctcttaaacataaaaagaaatgattattttgttatgtaattaaattttaattttaaaaagaaaataaaccaatatgggagagacatgttgcttagaagggtttaataagtattaagagcccctcttcatgctattatttaagagtccttcttaattctctttctttttttcaatattttgattgaatttttaattaaaattctgctaattaaggatcttccattggaggtggtataagatatatcgttttagaatcaagtcggtttccatttttaattgattgacatcgtaaaataataaacttatacccatgcaagtccacaattcagttctatctgatagtaatttcgtttattttttttatttttttttcatacgaaagcatctagttccaaagagccatcagaccattttatt

SEQ ID NO: 40550 - DNA, 784 bp, Arabidopsis lyrata
  Intron number 1 from transcript 489743 (locus 489743) deri ved from phytozome v7.0 (chr-ID scaffold_6; pos 18346096 t o 18346879 reverse strand)
cagtctcgagtaacctacctcagagataaagcagagtaagaattgtagttttcttcatctctctaagcttcgatttcatggaatttatcagtgttgtttgttgaatttggtgaaatattgttgaaacgaagaaatggaagtctaggtttgtgaattgagatgtttgagtagcattcagtgtctatgctatgttaggtttgtataagattggtttggtgatgatttagagttggattttgtggagaaactagggtttttggtgaaatattgttgaaacgaagaaaatgagaattataggtatttgaattgagatgtttgagtagaaatttagtgtctttggtaggctaggtttttacaagattcgtttggtgatgatttagagttggatggagaaactaggttttgtggtcactgatgtttgttgaacttggtgaaatatggtttaaacaaagaaaatgataaatctaagtctgtaaattgcgatgttcgagtagtattcactgtccatggtaggcttggtttgtataagattggtttggtggattaaagtttgattttgtggagaaatgagagctgtaatggttcggtttcatttagtatatgagattaaggtttgcatcgaaaggaatggctgaagattgatgctatctccaatttatggtttaaaggattctgataattgtcagaaaatttcgagaaagatttatggaaagcagaatcatctgaagtctgaactttgctttttgcagcaacttcacctttgagggtgtgcggaggttgctgg

SEQ ID NO: 40551 - DNA, 896 bp, Arabidopsis lyrata
  Intron number 3 from transcript 493416 (locus 493416) deri ved from phytozome v7.0 (chr-ID scaffold_7; pos 13567583 t o 13568478 reverse strand)
tcactcgtggagagctagctactgctttgagaaaggtgagctctctaggggttttcaatttctgaattttgggatgattttggttgtgagatttgggaattagggtttcgaatctctttgatttagatgctttagtgcttattcttgttttagtttcctcttttgctttagttaaacatgtcaatttgtttgaagctttcctctgtcatagtgtggttttgatagtattaagatgttttgatacttaatgcttgttcataagcttataactcgttttgtttcacttcctcttgtatggtggtgtgaaaccattgttgatacaagcggttctgagattccgatcattacgattctcgttaccttagggtaggtaaatgacattggaaagttttacctaatgtgttcattatctagacatagtgtggcctttagaaacattcaaggtattttagaaagacgattagaatattctacactttgttgcagttatatgtgcttggatgttacagaagtttctctttgagtttgatgaagttgttttcttatgccaagcttgataagttattattattcattgactaagaattcacaagactaggaattttgtgctacctttcaaggttactctgacttccgtgacttgattgtggaaatctgatactcaaggctaacttatttgtggtcgtttaccgatttagggtagatcttcctacgatggacagtgttgttgagtgggttatatacctatggatcctttgctatagattgttaaatgatcctccctggcttattttggttgtttatgactggtctgcatatccgtacttaatgttttgaaatttctcattgctgtctgttctgtttgattacagaatccgtattcggtgaacatcctg

SEQ ID NO: 40552 - DNA, 648 bp, Arabidopsis lyrata
  Intron number 2 from transcript 479930 (locus 479930) deri ved from phytozome v7.0 (chr-ID scaffold_3; pos 11456871 t o 11457518 reverse strand)
accttgtaagtcttccaaaaaaaaaaaaatcacctagacatgtttgttaaataatccgccggttcacggcggttgagttgactcgccggttcacggcggcgggggattgttgactcagccgggtcaaaagttcgggtttcggaaaacgcgttttcctttattaaagttattaaacgtgcacgtcatatgtgggggacgtttcgctggttcgtttttgtgttattgtaaaaagacgaaactaccctttggtttttaaacctttttgagatttgtttcgggtgtttgttggaggggtatattcgggaatttacatttttcttggggggtcattgtttcgtgagctgttcctcacatgatggtgagctaccacaattaattttcaaccatttcgatttttatttgtcacacctttttcgaaaattgttttattttatttattattcgatgctccttcatttgacaattattattgggataaattatgaaatgacataattacccttccatttttccttcacccacccatttatctttttcggaaaacgaggacgtgttgatccgagttgactcagtcgagttcactcagtctaatttaatttgaaatttcaaatttggtttgcagggagtggttgaggaagaggatttgga

SEQ ID NO: 40553 - DNA, 311 bp, Arabidopsis lyrata
  Intron number 1 from transcript 922713 (locus 922713) deri ved from phytozome v7.0 (chr-ID scaffold_1; pos 17327589 t o 17327899 reverse strand)
tttcagacaccaatcgttgcctccgaggagccttggtatgctcatcttcttgttttttggctatacatattattttcgttactataaattctaatagtgtttgtttttttaaacgattgtatgttttggatgaatgaaagcaaccacgatgcatgaagaagattcaggtgatgtttcaattgatcttttatctttaatttatcgattttctaattttacaaaaatgttctcaccgagtagaatatacttttgagttttgagttaaatctttcacagtgttgtggattagcaacgtttcaagccatattaac

SEQ ID NO: 40554 - DNA, 426 bp, Arabidopsis lyrata
  Intron number 1 from transcript 934420 (locus 934420) deri ved from phytozome v7.0 (chr-ID scaffold_4; pos 18054033 t o 18054458 reverse strand)
gagtttgggattattatccttttcaatatcatttggtaagcatttttattttattttattaaaattttaactctcttatcttcttaataagtgtatgctaatagtgttttggggtcttcgcattaatttcctctgtttggtttccagaaaaaaggaaaatacgattacttttgtatagtgtgatgataacaaatcattccaagttttgcttaaaaccttgtcaaagttttacattttcatttcttgaagcttcttgaaatggaaaaattttaatttgtaattcgaaaattcgacagatcttgtagatatgttgtgatcttttagagctttgaattggagaaacttatgaaaagggttgattttgaaattggtacagatgaagaaggatggtgagatgggaagaagtgatgtcaggaggagcaggag

SEQ ID NO: 40555 - DNA, 582 bp, Arabidopsis lyrata
  Intron number 2 from transcript 893718 (locus 893718) deri ved from phytozome v7.0 (chr-ID scaffold_6; pos 7467349 to 7467930)
aataaacaggtgatcttatagtttatatgtacaaatttgatttttttttttttttgtatttatggtttcactattttcaccactaatcaatttttataatcaaaaagtttggtttcaacttttgagaaggtaatcatcgatggtttggtatgtttctttttgttgtaaaaagatgaggtacctcccgattttgttgaggtacatgttcttattattttcaaatatgtctttttcagaagaaacactccacttttgataacacagttgccacaaagtcagaaagatgacttatttcagggatgaatcttcagaggaggctaatttttgtcgttaatacaatttaagtattcctctctttagattcgggataacaaacttggctgttaaattcaggaattactcttcgttgccaatctctctccccaaactaaaatattacatatatggaagtagtaacttaaagtttttggtatcgaggtcattctaaggcactgagattcggactttggtatgtataggattcgttttctatgcactaagatttaattattgtttaatttattggtttttaggttcctttcc

SEQ ID NO: 40556 - DNA, 404 bp, Arabidopsis lyrata
  Intron number 2 from transcript 473749 (locus 473749) deri ved from phytozome v7.0 (chr-ID scaffold_1; pos 21697475 t o 21697878 reverse strand)
ctgtggctaagaaacgaagaaggtatatctgattttactctttttaaacctaattgagaaaaattagggtttatggatggatttgtatatttgtgttgattttggtttcatttagatttgagaacaaatcttttaagtaatttagcagatacgtatgtgtatcattgaagatttgataaattagtgtttatattttggttgccattatatagtttagcttgtgatattcttcatgagctggttatgttcaaacatatgtatgtgtgacgttaaagatttgattatgagtgatgtgattggtttttttgtcatatggagttccagtttgtgtattttggctgcatttagaatctgaggtttgataattgggatgtgattgtggttcaggagagtaagaaatagag

SEQ ID NO: 40557 - DNA, 694 bp, Arabidopsis lyrata
  Intron number 1 from transcript 930294 (locus 930294) deri ved from phytozome v7.0 (chr-ID scaffold_3; pos 10321137 t o 10321830 reverse strand)
ttgaagagcttgtttacaagaatatccgcttcgaggtacggacactttcttgatttgcgaatccttgtttcttaggttctttttgaggtttgatcttaggacatggagatgggagttgaatctttatgaattcttcttaaatttgcaatcttttgttgtgttattgtctttaggtatgttgaatgcccgcagttttcttgcaaaatggatgtttgtcatgattggtctagaagcccatagtgttgaacgttttgatatgtgtggatacttgcgatttatggtttcgtataacaaatttctgtagatgctgtttatctggcttttatgttataccgggtggactgtttgctacttcttactagcttagttttaatgccagaggattggtgtttggaacgtcttcttttatacagtggtcaagtcatggcctgagatgaaaccatttctgttttatgacaatctgcatgttttcttgtatgtcagtaccaaatgatgcatataaacgttaccatacttataaatcgaacttttgtttgacacataaagctttaaatcccttcctgtaaaaaaataactgtttgacgcttgcatacattcaactttgagctttgcaaattaaagatttgatgcgatgttacttatgatatggttgtcttcaggtttgggatcttggtgggcaagataggctaagaac

SEQ ID NO: 40558 - DNA, 418 bp, Arabidopsis lyrata
  Intron number 1 from transcript 494081 (locus 494081) deri ved from phytozome v7.0 (chr-ID scaffold_7; pos 23489010 t o 23489427 reverse strand)
gtagtagctacagagatcctctgttgcagaatcaggtctgttctataaacctttcttgtttctcactctcatgtctgatgattcttgcttttgtaaagtttcgacctttattcaccaatagtttctggaacctaaagaaattgtggtgatggattctatttcctgtgtcatgtgacttgaaattacttgttagcttttgaagcatagagttctcatttgacatgtaatcatttgattggaactattggattgttacaacagaagaaatattcttaaagtttgattcttgaaatttgattttgccaaattatgagtttccaagtttatatgcttgaaaactaggacatgtgtttcagtgagaaccttgattccaaatttgttttcattctttaacatgtgcaggataaaccgaaagcga

SEQ ID NO: 40559 - DNA, 294 bp, Arabidopsis lyrata
  Intron number 2 from transcript 496845 (locus 496845) deri ved from phytozome v7.0 (chr-ID scaffold_8; pos 22266113 t o 22266406 reverse strand)
aggactcttcaccgatatcggcaagaaagccaaaggtataataatcatcgtatcgctcttcttctatatcccttctctcgtcacttagattccggttgaaatcgcgcaattagtgcgtgcgtttatgcctgttcattgattccaagtgctggagtttcgaatttatttatcctgtagattgatagattttgaatttgttttgggtgattctgtcgattttaagctgattctgttgattatttgttttccttctcggtagatctgttgacgagagactacaattctgatcagaag

SEQ ID NO: 40560 - DNA, 590 bp, Arabidopsis lyrata
  Intron number 3 from transcript 497418 (locus 497418) deri ved from phytozome v7.0 (chr-ID scaffold_390; pos 6087 to 6676 reverse strand)
gctttgatcaagaaattgcgcaaagcggtaaaaacccttattctttcatcactaattagatctttgttgaaacatatatacacaattgtcaaatctagaaattgtgtaaagttaatagattttgatgatcaaattactgttttttattttattttccttaaaatcaaattactgatttttagtttggcttatgtgacgattgctgcattggttttttttttaatggctaatagactcattgttatcatcagcctattttcgcatgataatgttaagtttgtattccatctctatgcatatatatatatattcattcttccctatgtaattttgtgtttgatcttggctaggaaatggctttaatagtaaagattatgactttagattactcaaatctcttgtgtgacgattatgacgttgtgtctttagtttataattcataccccatttttgtgctaatccgtgtaatccatctattataattttgtgtttgtcctttgcaaccaaatagttttaaagaccaaaagagtaaataatttttgtgtgtttgagcagaaaatagaggcaccagctggtgagaagccagcagc

SEQ ID NO: 40561 - DNA, 418 bp, Arabidopsis lyrata
  Intron number 1 from transcript 479158 (locus 479158) deri ved from phytozome v7.0 (chr-ID scaffold_3; pos 7218419 to 7218836 reverse strand)
gctctcgccgatcgatctatcggccccggttccacggtaatcgattttactctagctgaaatgtttcatttccgaaattttgtcaaaatcaattcgttcaaaagaaaaacattagaaactgtttcctgtagatttttcccaatcaatcaattataatcgatttcatatagaatctgttttagggaatcatcatgattatggaagaaatcgcagattacaaccataatgttctgaaactaattgctctcgcatgattcttgttgatcgatgcactggtgatgttgatgtttgttgactttttttaatgaacaatattttggtttggttgtttggtcttcttgcaatctgtgtaatttcactagaccagaaaatgttataattgtttcaggtggctattattgcaccgaacattccagca

SEQ ID NO: 40562 - DNA, 409 bp, Arabidopsis lyrata
  Intron number 1 from transcript 899149 (locus 899149) deri ved from phytozome v7.0 (chr-ID scaffold_5; pos 20449338 t o 20449746 reverse strand)
cttcagttctgctaaccccggtacgtacgatctcaattcttctctcttcttttgtacttcacaacattccaacttgaaacgacatcatctacttttgggaatcttctttcccaaggaatccattgattgtggaaagcttcaaatccaacgagttgttaatttttttctattctttcggatagtcagtcagttatctaccgattaaacaacgaaaaaatgaaatctagttggctttaaataatgacatcaaaccattgactttgattaattaatcaatcaaataacaaacatgagagaatgtcgtaacattagaatatatgaatatatgtacatacaagtttcaccgttgacccgttttgttgttttgaaaacaggacttcacaacacaggcttacaagtactaaagata

SEQ ID NO: 40563 - DNA, 568 bp, Arabidopsis lyrata
  Intron number 1 from transcript 496913 (locus 496913) deri ved from phytozome v7.0 (chr-ID scaffold_8; pos 22556712 t o 22557279 reverse strand)
ttttggaaaggagaaagattcgttgtttaattgaggtaagtttgatttttcctattttgttcgatgatttgatttagttaaaagtttgattgatagagattgatattgatagattttactttgatcatttatgatatttatagtatcttgtttaattttgtggaatctgttgatcttcttcgtcttcttgttatcctacacataaacctaatttatttcctttcgaaaaataaatcttcttgccttgtaaacagatctgaaaacttttcttggtcatcttgatcttggttcttaatgtttataatcagaaaattgatttttttccttccatttcactattctattacttgtacggaaattttttgttgcacgaatcacgataacatttatatacaatctctcaacttcatctaatgacttacacgaagcttcctcgatgcatttattttcacgatccctatttcattattttcaagataatttctactcctatttaatttaaagaaactgaatatttttctttcttttatatcttctcaggctctcaagtctctcaagagagacaaaa

SEQ ID NO: 40564 - DNA, 475 bp, Arabidopsis lyrata
  Intron number 1 from transcript 350640 (locus 350640) deri ved from phytozome v7.0 (chr-ID scaffold_6; pos 6106637 to 6107111 reverse strand)
gttaaacctccattgggctcccctccaaacgaatcgtgagttctcttttcaatattcgagattttagcgatgagcacacagagagtttcgtatttctgctgttaaactagttggttcttggcaaaagatttggttggtttactaatcttgaaatgtggcttatctcgattttatttgtgatcgtggcttgttttgacgcataatgatgaataatttcactttttttcttgtttaatgagaattattgatcactttttggaaataaaagatacgtttcaagaatcaaaaggacaaatttgatatgttcttagtgagtttctagatttagttggtgatcataggttggatctttggttgcttgacaaagaaacttaattttaagcccatgaaataatatgacatttagatcaggaagttacgtttattcattgtttgagtgaaatttacttcaatggttagagcttgtttggggcag

SEQ ID NO: 40565 - DNA, 848 bp, Arabidopsis lyrata
  Intron number 1 from transcript 907990 (locus 907990) deri ved from phytozome v7.0 (chr-ID scaffold_2; pos 9805357 to 9806204 reverse strand)
aggtgtcacgcccgcacccacacccgtaccccatagtacgtattttttttttttttggttttaaagttaagacccatagtgcgtatttatttgcatttaggggttgaatattggaaaaaaatgtcatttaaatcatcagttgtctattttcgttgatttaaagcatgaattatgtacctggtgattaaaatgctcaattttatgttgactttcaatttaatcacgaattttcgttaacaaaagcaaattgaggcacaaaatcgaaagaagaaagacgaaattttaagaaactaagattaaatcaggatttgagaagaaatcgagaggattagaaaagaaatcgagagaatttttaattttaaagttctaactttgatatcaattttcttgtttcgattacgattttgtgcctcaattggctttgtcaacgaatattcatgattaaattaaaaatcaacataaaattgagcattttaatcaccaggagcagagttcatgctttaaatcaacgaaaatagacaaccgatgatttaaatgacattgttcccgttgaatatttctgacttatcggaagaagggacaagataattgaactaaagctggttttacagaaccaaagaaatttgatgtcaagaccatcttgggggtagttgcagcagcagcagctgttgcatttctggttatcttttgttgtgcatcttcatctggtcgacgaatattacgaaacggtagattcggttttcatgatttctgattagttttcttaactttatttttgggtttacaaacttataaatgcgttaaaaaatacagtgtttgcttttccgaagaacaagaaaggaaagaat

SEQ ID NO: 40566 - DNA, 566 bp, Arabidopsis lyrata
  Intron number 1 from transcript 943011 (locus 943011) deri ved from phytozome v7.0 (chr-ID scaffold_6; pos 21262439 t o 21263004 reverse strand)
atctggtgagttttgtttatctttagggtttttgattttggtggagtttgattgttgtgatcaaattgagattgtagatttggaattgagaatttgttcgtaatttagtctgcattgcttgttgttattacattgttatggacattgaaatctagggttttgaggaactttgatgtctctttgacattagaatgtatcaactctttgggtttactgggttttcacggttgttgtttattaacaatctaagatgatgtagggaattagagatagattaataactggtcttatactcttctggttgttgtcatttgttggacactcatcgatgtgtcataggaatgtttctgactatacagtgcttagagactttggaagtttttcttttacataatgatatctcttgcatctgaatggttaggatcgtatacatgtttgtcatgagtgttcatatagtgtctggttgagttaatgcttgagaacttagagaccatttacttttagtctctcttataatatctttttgtgtaggaggatccggtgctgctggttcctgaggacaaaag

SEQ ID NO: 40567 - DNA, 726 bp, Arabidopsis lyrata
  Intron number 1 from transcript 921812 (locus 921812) deri ved from phytozome v7.0 (chr-ID scaffold_1; pos 12125892 t o 12126617)
agagtttcttggatattcctcctcttatcatacaggttcgtacgtatttcatttatttatttttttcttgctgggaaacttatgatttcaatttcaaaagttaaaaccatgactcatattgtttccgtattagttaattttcgtgaaagaattatattcgaattttttttggagggggataaacgtagctcgaatattttaggtttcttaaagttagttggatcgactgttctgtttaaatatactaattcgtaggaataatctaaattgtttttaaattcctgactcttaaattgattcggccactttgttcttttcaaataagaaatgcatacttttactggtcgtgcataagcattcgatgtatcaataacataaagttattttctaccacatttcttcttaaaatacgtgaactttaataaagacattatatggaagaaaaagaggggcgcatagagaataatttgtctgttcaatcatactctttttcttttcttgtttacacgaaaaacaaaacttttttttcttgcattgaattagttcattctataagtcgttttgttcaactcatgttatgtgttttattaaaactgcgtttctatgaacttacgtataaaagtttgattattaacgcttaaaagctagtcgaatgtaataataaatcgatattttcatatcttacgaatattaatgccccaggtgacgtatcttcgttgtgggggt

SEQ ID NO: 40568 - DNA, 711 bp, Arabidopsis lyrata
  Intron number 1 from transcript 491739 (locus 491739) deri ved from phytozome v7.0 (chr-ID scaffold_7; pos 4952983 to 4953693)
gtttagcaacggtcggaatattccagacgttatcggttagttttcttgatttaattagatgaatccatttttacttgcgttattcaattatgaactaactactatgtcatctagccgaccatgaccgggttctttcagaaacaattataaagatagttgtccatagtgttaaaactgtatatgcatgaacttcttttttttcaaaaaaagaattcaaggttaactttagaaaaatacagcattttatattttcttttctaaaatcacttgtatatgctgatatgcatgaacttctttttttttttttttcaaaagaagaattcaaggttaactttagaaaatacagcattttaaattttcttttctaaaatcaccaccaaaatcctaaaattctaaatattccaaaaaattgggaaggattcctaaaatttcagtcaaacttatcaacagcataatcataaaatttagctgtatatttgaccccaaaaaaccatatattttggtattaaagtattaatatatttgtaactaaactttattgttgtggaattcaacaatattaattaacaaatttgtatactccattttagaagaaaattcaaagttatgagattaatatgcaagccttttatctcatcattgtttttgtttaacagtacatatttaataaagttgaacaatttttacttttagctgaactagcgggtttca

SEQ ID NO: 40569 - DNA, 687 bp, Arabidopsis lyrata
  Intron number 1 from transcript 350231 (locus 350231) deri ved from phytozome v7.0 (chr-ID scaffold_6; pos 4077137 to 4077823 reverse strand)
agaagactccgagcagctctacaaggcctttaaaggttttcatctcctcccttcattattcgattgatttaacgacgttaaaaactaggccttcacataatcacatatattcatgcttcgattgaatcatttgctttttaatacttattactaattgggctgattatcaatagttcaatctattattgaccggcctgatctactgatctagctaactggtttggttgatgatatgtatataggttttttaagaaatagatgattgataagtaagcttgaaaaatcatatgattgaaatcttatgaagtcttaaatttgtgattttgatgcaaaatcacgactttgtgattatacagctccattgcatgatcttttgttacgatgcaatattgtgacattactttaaagtatcttactgattttttttttttggagcgttttctgaccgtttggtttgtaaccgaagaagattagacatctctacaaaacagatcaacttgttgttttcctaggaatattttgttcagattttccaaacctaatttatttgttctactagcgaacatttgttttcttgtgaatttatattttttccaattgtccgaaaatttggtttagtttaattgaccagtttggttacattgctgactaaacttcggtttgaaatttgtttttgtgtggcgcagg

SEQ ID NO: 40570 - DNA, 508 bp, Arabidopsis lyrata
  Intron number 2 from transcript 476225 (locus 476225) deri ved from phytozome v7.0 (chr-ID scaffold_2; pos 14669218 t o 14669725)
cttcatcgcttaagtttcgaattcgacatctctctgtgtatcttaccatcgcaaggttcgttccctaaactctaatctcgcatattctttgtgccatcagttcttctcactgagctaaatctgttctgtgttatgattcaatcatgtacgtatttgctttgtctctgttttctccggtaacttaattcgtttcaaacgtaacgattagtttgaatttgaatctgttgcatgcttaccagatcaattttggatgaattgaatccagttattttacaaaaccctatgaatttgatataaaactgacaaattcttgttgttataaacagttagaggagcaatctaattttagatgacaggatcttgaaacgacttgtaacctaatttcccaatctggcaaaacttaattttcaagattattagttaattgattagtgttttgtttgttcaattgcaattattgttaatgttgaatgtttttgttttcttgtggtgattgtagcagtagttg

SEQ ID NO: 40571 - DNA, 616 bp, Arabidopsis lyrata
  Intron number 2 from transcript 489519 (locus 489519) deri ved from phytozome v7.0 (chr-ID scaffold_6; pos 12331745 t o 12332360)
tcaaggtatgtcaattcatcattttctggcttttaaacattctccaaaattacttggccttgtttagtcctcaaaatctcattggattctctctaaatggagctgtatcaagccttagaactagagccgataaaaaagtacaaatcttggtttcgttacctgttaggacataattcatctgcgtggttttgctgagagcttctgattgtcttttcctgctgggactgtaatggcattaaccctcagacattagtcactgatgattatataaattttttggttctcagtagagccagcattattgattaccttgttacgatcaaaagtgaagagaactgacataacagagttgacaccttctttgaaatagctgctggttggctttccacatatagatcaattttagccgcatttgattcacagatttagatagtttaccccatcgtttcttaaattgtaatcttccctgcataatacaaaatagctaaaaactatttctgtcaaaccgtaaatgacacaattttatatagtttgggagatgtttgcttctctgaccagcatgtgctttttctggcgtgcaggatcctaaagttctcgcagccttacaagagagcag

SEQ ID NO: 40572 - DNA, 486 bp, Arabidopsis lyrata
  Intron number 1 from transcript 919181 (locus 919181) deri ved from phytozome v7.0 (chr-ID scaffold_1; pos 1684681 to 1685166 reverse strand)
agaggaagtcctcagtttctgcaaccgcgggtgaggtttctttcaatttggtttcttgcagctcttcgattattcaaatttagtttctttgtaattctgcttggtatgtttcatatgttaatgcttagattctagctaattagtggaaagattattggggaaaatgctcgagatgatcctaggtttcttgattcaagatatatgctttatttacctgattctcttggatctagttatctttctatttaggttctttgtcctggtatatgatcaaattattgctttacttttgtttctttactctggtctagtaatttctctttcgtggaatgaggaagacttgaaaatgcttttatattctagcaaatgttaagtgtttgcacataatcacttttgattattgcccttgttctagtcatattttctcattttcgtcaattttggtacttaggttgccccgcccccaacttcaattctagacactgg

SEQ ID NO: 40573 - DNA, 493 bp, Arabidopsis lyrata
  Intron number 2 from transcript 478446 (locus 478446) deri ved from phytozome v7.0 (chr-ID scaffold_3; pos 4428481 to 4428973)
caacctcaagtagctgttcgcttaaggaatctgaggtatcattgactcagcttctcagatttgttttcatttcttcgtttccgtttagatttctgttttggaaaccttcgattttggtttgtcactgagcgtttgaggaggaagaacacatgtggttatgatatctttcatctttctttggtttccgaagtagcaactggtattaacgtttattaattgaagatcctctctgcttagggtttctggaacttagtagacagaacaaatttcattatagtgtcttccgtaatcatgaaatttttaggtttagtgttgttaacattgtctcaaagtgaaaaatggtcctgcttggggtatctggaactgaatattttagagaattactgcaaattgcttgatgattttggagacatttcactttcctcattatcgttttttgcttttcttatgcttttgttttgatatatatcttgattctttctagtgagaagca

SEQ ID NO: 40574 - DNA, 620 bp, Arabidopsis lyrata; identical to SEQ ID NO: 38107
  Intron number 1 from transcript 472429 (locus 472429) deri ved from phytozome v7.0 (chr-ID scaffold_1; pos 9508051 to 9508670)

SEQ ID NO: 40575 - DNA, 630 bp, Arabidopsis lyrata
  Intron number 2 from transcript 490514 (locus 490514) deri ved from phytozome v7.0 (chr-ID scaffold_6; pos 24786123 t o 24786752 reverse strand)
ggatcctctgccgtctccgtgcctcactatcgcaggcaggttccttcttttcttttttggtttctgccaaatcaactttttggttataagcaggtctaaatcaatgtagggcttattcttgaaaattgcgtgtcttttgtcttcaccatttgattagaggtctgtattttggtattttggctgtgtgcattgatgctcaaaatggataatcttttgtagagtcaaatatgagagtaatggcttgttatgatgaatcaacaacactcactacaacttggcaaggttttagctaaaagctagagtctttttgttgtttgcgtctttatatgctatgttcccaacgctagttcataagaaactttgttttgaacaacttgtcacataagagcttgcagttattcttgtcttcttcttcgtctcttatcagtatgctatatcaaccagtctgctgtgtcagaaaataagcacagaataatcttgtagttcataagagactttgtttgagaatggttcataataaacacaagagcctgcactgatctttcctctcatatcagtttactgtattaaccaatctttggtaatgcagaagcacaagtacctgttgtgttgggaactgaagagcaagac

SEQ ID NO: 40576 - DNA, 680 bp, Arabidopsis lyrata
  Intron number 2 from transcript 492440 (locus 492440) deri ved from phytozome v7.0 (chr-ID scaffold_7; pos 7702361 to 7703040)
gcttgacctagggtttcgtcttccttgtgcttcatcgtgagttctttatttctctctctctttttagaatgatgaatagctctgaaattcgcctagggtttattagtggtattcatttttggtcatctgtcttaattaattttgattgtttgaaatgatctttggaatattgttcattgaattgggctgaatctcatattctttgtcatatagtaatatgtgttgaattttgctagtttttttcttctgaattttagggttttgatcctggacctgggatttggttggcatgattttgaaataactatagtttctgagattgggagattttacaatatttgttgtccttttactgtaccatcaatttgaaattggctttatccccgttaatatcagtcacggtcataagaaggtatcttgtagttgtcctgcagattgtagttatttgttttggtactatgccatatgtaaaattcatatttttcgacattggagtgatcttggattccttgcatatgaattgggactttctagtctattagcaaagcatggtgaactcaatttcatattcacttttttttctgaacagtttgattgtgttttttgtacttgtcacagtaggttaatgacataaagtttgtcctgttatgttttttttttgtttctcaggactttttcga

SEQ ID NO: 40577 - DNA, 485 bp, Arabidopsis lyrata
  Intron number 2 from transcript 488922 (locus 488922) deri ved from phytozome v7.0 (chr-ID scaffold_6; pos 8544846 to 8545330)
aaggaattataccttccccgttgtaagtgaatcttgtatgatctgttttttgcttttgactaattaggtgtttcattcggatttttgaggggttaagtacagtgtatatgtcgttcatgaagatgggtataaagatactaaagaaccaaagctcttactttcatttgaccattgtgaatcacttgctacctaaattttgttctattcattgaaaaatgagtagctagtatgggaaatcttatgtttgctaaagactttaatcttgttttggctgttttccgttgattcagagtgttgaaaagttactaaaatgcaatttagtttcgataaaggtaatcaggtttcactataatggaacatcacacagaatcatgaagtatatatgcacttgttttcctttgcagagttgaaagtaacaagaaacttacttttaaagtgttttgtgtttataaaacaggttgtctgagtcgattgctagtcaggag

SEQ ID NO: 40578 - DNA, 641 bp, Arabidopsis lyrata
  Intron number 2 from transcript 485733 (locus 485733) deri ved from phytozome v7.0 (chr-ID scaffold_5; pos 16622410 t o 16623050)
caaggtgagtcctctgttttcactgttttaccctctattgttactgtatttacgtttcttttacttgtttttcttatcaacaacagcaaatatacatattttacttaggtaagtataagagaagaaccgaggaaaaaaaaaaagtataagagaagtagagaacagattaccaaactataagcaagtttttgtgcaaacacattgtttgttttttaagttcttttggtagcaaagattaaggcgggctacgggacctatagccttaaatgggtaaataatgcattgtcatacgtgtaaccgatctgattatgtttctacaattatctctttcatattcaaaacatgaatatgatatttataaattataatataatattatatttgataaaatttctataaaatatcatgagaaaataatactattatttacattatcctgattcctgaagatattatatatgatattaatttaatgtaaaataaaaaggatattttgggtttggtgaggacaccccaaatgatttgggctaaatccatagattgtttatgtacaattctaaatgggtttaattaagctcactataaatgttttttttttgcaataagtaggtgtgacatccttcgacatagattttgcttca

SEQ ID NO: 40579 - DNA, 513 bp, Arabidopsis lyrata
  Intron number 1 from transcript 919144 (locus 919144) deri ved from phytozome v7.0 (chr-ID scaffold_1; pos 1528257 to 1528769)
aggaaaatctgaccaaattccgtacgagctttctcttctttaatcgcattgcggtttcttcaaaactcaattattcatttaggtttccctctgtttgtgtgatgtcgattttaatattcatgtcaacaaacgatttggtttacttattaattttttaatcaaactgtgtttttagtttttctaaatgtgtaacaattggtgctttatgtcgttgatttaaaattttccctttttttgattgaattgtcaattgtgaatgagattattttacaaaaatatgaagatgagcaacgaaacttgttgcagattgaacaaagctctgaacaactaattcctctttctattgattttgttatggatgagaacaaaaattaaggatcttttttttgagaaactcatctctctttgttgttctcttcgattttcatttctcggattatctgtttcgattgtgtagttatgatgttgtggtttatgcgcaggctgcttcagccaaagtaactgttgggtctc

SEQ ID NO: 40580 - DNA, 706 bp, Arabidopsis lyrata
  Intron number 1 from transcript 487719 (locus 487719) deri ved from phytozome v7.0 (chr-ID scaffold_6; pos 3643983 to 3644688)
gtgtatcaatcgatctctacccagattctccggaggtacttattaatgatttgttttaacccaaaattcttgcaaaagttggcatgcgtttgatctgcttattgcaattgcagatcttttttatttctcattttctgctttgttgtgtaaaagttagatcaataatgtattagtttggtgttatgagtttatcatgttttaaggcagtgtaactcatgaaggagagcaaccctttttttgaaagtgacgattttttttgtcttataagtttaaaaatctttagtttattcatcagtgggtgtttggtggaatccttgtttgaagcttttttatagagttaatggtgtcttcttatacattattgatatcttttccgttactcaactaataaaaatttaatctttttgatttgcatacatcttttctttgtgatgaaagctttttactagttcttctcatgatctgataggttggtttgatcttattaattgattattgttgttactacgtcttattcgcttcttgttagacatttcttctcacttgtgattcagaaaaactctttgatgcttctttaagctttattctatttttctctgtgttttgcttcccctgttttctcttccatactggttttgagattatgctgaatctggtggtttcgtatgtttttttaactgtaggagctttgagtcttctcgtatag

SEQ ID NO: 40581 - DNA, 379 bp, Arabidopsis lyrata
  Intron number 1 from transcript 924037 (locus 924037) deri ved from phytozome v7.0 (chr-ID scaffold_1; pos 29212674 t o 29213052 reverse strand)
gttctaggggttttcgtcttcaagctccattggtaacttcttcttaccttttcttcgtttctcgattccattgttaggtttcgctatcaaaaaaatcgaagataataataacccatcacgagttttctgggaaatgtttagacttttgacatgattttgcttttaatttcttcaatttgtttcctttttcagtaaccctagctaaattctccaaatttggtagtttttgactcttgttccgtaactgtttctgactattttttctgccctaaattgcaaaaatgcatctttgtttaattattgtggacctctctttttgattttctgagatcggaatcttgcaggtggattctgtttcttgctattgtagagtagattc

SEQ ID NO: 40582 - DNA, 742 bp, Arabidopsis lyrata
  Intron number 3 from transcript 921438 (locus 921438) deri ved from phytozome v7.0 (chr-ID scaffold_1; pos 10520112 t o 10520853)
atcttcctttgtgctctattcctaaccctaagaaggtataaatcaatccttttagaaccattttcactctgttcctttgcctgtgacctttgttgcattttgggttgtgtgtgtgttgtttgggtaatcaaaaagtctatagctttggaatgtaatgaaaggttttttaagtttgcatttttcttctccggtaaagtaggatgattaaatcattagttatgggagaaatagagaaaccagagttccttttatcagatgtgaatatagaaactacttgagttggcataaatgattacattccagggtggtgataggaatgtccactagagaaaaggtagatgattaccatttttttgctttttaaatgtacaaactttgatggcctcctgagaaaaaaggtacatagtcccatgttctcttctggcaaagttagagaactcaagtaaactttattggataataatattatgatagaaatttgtttcaatgggcttaaatgattatcctttagcttgttaatggggacttgtttgagaaaaggtagataatcaaagcttcttacattcatagttgcttttgctcccaagtataagaattgggtagtctaactattttgggtttgtggtaaagtggagcagctagaaatgttggttgtgcttttagctagtaaagctataagccagagtgtatctgatcaatgcctttctagtttttccataggtcttagttattggaggaggag

SEQ ID NO: 40583 - DNA, 345 bp, Arabidopsis lyrata
  Intron number 3 from transcript 480426 (locus 480426) deri ved from phytozome v7.0 (chr-ID scaffold_3; pos 20236619 t o 20236963)
ggcgacgaacactctctcatcccaaaggtacctttttgttttctgggtctcctttctttacacttaatctgattagggtttcttcttttgagtaatcaaacccatcattttcacgagttttcattaaacgattctgtaaaaattgaaactttttgcatctgggtcttatgtaattttgaattttggttttctttaaagcaaatttaatgatacccatgttgtgttttgcccttgaattaaggtttttgtttctaaaataagcaaaaacaagtcacttaacatgtgttgtgttttttttttttggttgcaggatagttttgtcttcaagcttcctaaaaaatcacc

SEQ ID NO: 40584 - DNA, 927 bp, Arabidopsis lyrata
  Intron number 1 from transcript 497072 (locus 497072) deri ved from phytozome v7.0 (chr-ID scaffold_9; pos 745867 to 746793 reverse strand)
tctactagtgatatatatctacaatatattcttctattaatggattgattcagatcccaaattacttatttaattctatatagacttttagggataagtcaaaacagaatggttttgttatgaaaaccaactaagtggaggaacaaccataaaactaacagagtaacagagcaatgtatcacaaagattgtctctcaaaatggagtttcagcgtcacttcttgtttcgtttgtttcggcgtcagttcttgtttcgttcgggctatagaaggccgatctattcctcggtctattccaactgcctcacaacctcttccttggtgggtctaacagacggcacgggagcacaacatcccattgctagcttcagtgcatgaattaaaccatcttctataggactccttattccttttagaacctccaaattgactatcttcattgttgaatcctctaaacgcaattttaaccaatgaagataaatccataaactcgttgttctttccgatttttactgatttcttccccattaataactccaccagaaggatcccaagcacatagacatcaggtcttggattccgtttcttcatcttgtggagttctgctgctttgtagcggtcagatttcgcatgttacattacctcatcggctacggcttgtaccattaacttgtcaagaccaaactcagtgagcctagccaagaaaaagtcatctacgagaactttccctgatctaacagttccatggattataggaacttcttgtccggtgtgaagataagccaatcccttgctattcccagcgcaatcttgtgtctcctagcccaattcagaaccagttttcctggtttgctttctgaaaatcaagaagataaccataagacttaacatttggatcaaggaaaaggtgaaataccatgcaacaaatc

SEQ ID NO: 40585 - DNA, 453 bp, Arabidopsis lyrata
  Intron number 1 from transcript 929847 (locus 929847) deri ved from phytozome v7.0 (chr-ID scaffold_3; pos 8444682 to 8445134)
ctttgcctcatctcagtattaaaaacactccaatcgttagtctcactctctctctctgtctctgtcttcttcttcctcttgaagttcagatttttcaccattttcaagggatttgatttagaaagcttcttcagatttgcatttgaaatctttttttagtggtggttggttttattaatcgaattttattttcttgagaatgtttttcattggtcgttggttggtggaaattgatgtcatattctttggtgggatttgatttttcttactaacgattggagaatattgaaacttagtttagttattgtgagagtattaaacagaagttttgatttttcttctttggtttcttcttctgagccttatttgaacactttagttattgagactctactttttttcttactgtttgttacaggaaacatcatctgctcagtatattcttcaacagtt

SEQ ID NO: 40586 - DNA, 653 bp, Arabidopsis lyrata
  Intron number 1 from transcript 947470 (locus 947470) deri ved from phytozome v7.0 (chr-ID scaffold_7; pos 20939756 t o 20940408 reverse strand)
tttgctacgaagctttcacaattcctatcttccaggttttgttacttctccgattgattcaaagaatttctgttttgataactagaagtggttcaaactcattaggaagaagaagaagttggaattgtgcccatttactagattttaagagtatccttagtattgcagagactttctgttttggtaattagaattgattgtcaagcttttgatatgtgtgttagactctgcatatagttgtaactgtggccatttactagattctaagagtatccttagctttttatgattttgaggattctagtgaacttttgaaagtgatgttaaagaaactcatattcattagaagtttctgtttctgttttggcaactcattaggaaggagaagaagttggaattgtgtccatttactagatttcaagagtaacattagctttaatttttgatgattttgaggattctagtgaacttttgtaagatatgttcatgtttgcagttgtatagttcttgaaaatatgtgtataactcggcaagattgaagtctatatcgggaatcatttacggagagtacatcatccatagtcgatgaatattatctatacgttgttagagcttttaatcacaagttattggttttgaatttcagtgtgata

SEQ ID NO: 40587 - DNA, 440 bp, Arabidopsis lyrata
  Intron number 1 from transcript 475218 (locus 475218) deri ved from phytozome v7.0 (chr-ID scaffold_2; pos 2745498 to 2745937)
tgttgttcggtcgtaaatcatcaagcaagttacaggtaaaaattcttcttatttcttgattgattatagatgatttattcacatatccttgattatatgttaaattttcttcatttattttgattattcacatatatatccataaaacccttttatatatttggaatttattcatatgattcatagaaaactcttaataagtttcttgtctctaggagttatggttccaaaaagacataccaaaaattctcatgtagtcttcatttgttcatgttatagatcattttctaattatggttaataaaactatgataatgaaacataaaagaaataacaaatttttcataatcacgtttccaaaatgcaaaatacttgattctgaatttctctctttgttttttgcagcctgtaaaagggcaagcatcgcctaaagttagcaa

SEQ ID NO: 40588 - DNA, 620 bp, Arabidopsis lyrata
  Intron number 1 from transcript 349631 (locus 349631) deri ved from phytozome v7.0 (chr-ID scaffold_6; pos 1032753 to 1033372 reverse strand)
gcaacctctccttcatttttcaattgacggcaaaggtgagttctttcatctctctggtgtctctgttttgggttgatgttcttgtgtgcttcaatttctagctgttaatctaaaaatgaatgtgggtttggtggtttgaatctgttagactcttgatttgcatttacctatcagtctcttcttcttcgattggtttttactttcaagataaatatgtctctgtttagtttcaagctgaatatatgagagatcgttgaaatgattaatttctaggaattgttgaaatgtaggattcattgcaaaacatctctggttcagatttgtatgcttcagtttttatctgttatcgatatgtgtatgggtttgttatgtctggtagattcaagggaacaagagttcttctatctcatttggtttggttgtttaattcatgtgtgatttattggttgtgaaaagtgcagaaccagcatccctccaggaacttcctgtgttgattatccttgctcttagatttaacggaacgagattctggtaacaggtgagttctataaactccttagtgttggttttcttgtttaattcgtgagactagtaatagctgcttgcttgattcaggtttc

SEQ ID NO: 40589 - DNA, 423 bp, Arabidopsis lyrata
  Intron number 1 from transcript 358545 (locus 358545) deri ved from phytozome v7.0 (chr-ID scaffold_8; pos 20946618 t o 20947040)
cgtttcctgttccgtcacttctgctcctgcttctggtctgttgtttttctttctctcctcttcttttcctattgggttcctgggaaaataagttattgattgattaaaggtgctccactactgtaatgggtttgaagtattttgaattagcataggaaaaaattgaaactttttgagattttaggttgatagtggccgatttggatttagtttcttcggagattctcattctgattgtgtgagtataatcatttgagtatggtttgttatgtgccgtgaatggaccatatgggactgattaatcaagtggttgttttgtgtattgaggttctttgttcttttctaagatgttgattctggtgttatgctttttctttctatgtttcaggtacatctccatcctctaagacgccgcgtagaaga

SEQ ID NO: 40590 - DNA, 730 bp, Arabidopsis lyrata
  Intron number 1 from transcript 486299 (locus 486299) deri ved from phytozome v7.0 (chr-ID scaffold_5; pos 18915161 t o 18915890 reverse strand)
cagtgcaagcctctctccgagcaacaggtgcctgagattgtgttataactatagcttttcgttttcgtcatttaaaattggatctgtaatttagttttccgggtgaagtttggctatatcgatgattggatctcagattttgtttcaaatcgaagggttggttatttctgtaatttatgtgatgatctgatttgtcgacaaggatcttctagtataggtgtagagctcaccggtgctcatttcatgtcagttttatggattgttaaaaaaaatggatttctttttctttttcaaaatgatttctggctgtattggcttctgaataggcgattagctctcatttcaatgtttgtctcacccacagccaaaattatcattttgattaggtgattgactagttaaaatctcatctgttagatgcattactggattctcaatttgggatacacatcttaaatgatagttttggttgcaattcgataaaagacgttctgagctaatacctagggaaacaattgatcaatagctgtaaaaaaaagtcttattggctgtagatgatctttctgtttcctgcttgtctcaaattgctgtatttaatttgacattttaatgttatggttttgatactggataatactgttagtactgtatctcactaggaagtaaaagaggggaaagatgaatttattatgtgcagtgtttttttttatttgctttaggtcagagcatt

SEQ ID NO: 40591 - DNA, 587 bp, Arabidopsis lyrata
  Intron number 1 from transcript 495412 (locus 495412) deri ved from phytozome v7.0 (chr-ID scaffold_8; pos 15701857 t o 15702443)
taaggaggaggagaagaaggaatctggtcccattggtaatatcaagtcgttttctttttatctaatcatgatgaaattgaatcttgaatcttggcatgtcgttgatcgtgagatgtttcagtttgagaatcttgtatagggtatgtcttcttaggattggaaactttgattgtgattgatggacaaactgtgaatttagaactcgaagaggcttatttgttggtcttgattaagttttatgttattggttcaatttggtattaagaactatgatgtagtagaggagttgttagactttgaaatcggttaaaactttttattcgatgcttgttctagcctctaggaagtattaagtatcagtaggttctgtttgtgttcacctaataccaattttaacatcaaccttgttggatcttaagttctagaacttgatgtctctctagtgaaagcaaaacatcataagttttagacttgatggtagtttcttctatcttatgctttagtggatccatttgatgagctttggtgttctcctgttatctcgagttaactttgtgtgtgtttctttgcagttcctaaccaaggta

SEQ ID NO: 40592 - DNA, 515 bp, Arabidopsis lyrata
  Intron number 1 from transcript 483804 (locus 483804) deri ved from phytozome v7.0 (chr-ID scaffold_4; pos 22573202 t o 22573716 reverse strand)
cttcccatttgaaaaatccggtaccaattactccaattctttctcttcttaggtcttattacttcattaatagttgcggaaccttcaaattgaaggaatctttgattattggggggttttgcaaataattatccactcattaaacaactagacaaaaaatctagtaggcattacatttgacattgagccattgactattgattagttaattatttaattacatttttcaaaagatcaaatccaatcttttcatgtcacacgttagaatgtcgtactctgtatataaaccccttaaatttttttatttattttataaacccttatattacgaatataaaagaataatatgtaaacatgacgtattgtttattaatgtgtgctagttggttgtgttatcaccagttttgttgaaaacaaagataaaacaatacgtacatggtggactaattaaattgatctttggaaacatgattttggcaggcaacaacaacacgagactacaagtgcttaaaatt

SEQ ID NO: 40593 - DNA, 570 bp, Arabidopsis lyrata
  Intron number 1 from transcript 929869 (locus 929869) deri ved from phytozome v7.0 (chr-ID scaffold_3; pos 8516186 to 8516755)
cagctgttcaagagctcaacaatcatctcactctggtaactctacttcttcgctttttggttcttcatttgattcaaattttatcgtaataatatagtatcaaatatcaattcatttaatcaatttattttttctcaaagtattttatatataaataatagtttgtcagctaactaataacttttaaacaagcgaaaatagattgttttatctccatttatgaatttttttgaattaacattgaaatatatcgagattaaaaagacaaaatgtccataactttttggtttataaaagagaaaatcaatatagatttatgaattgctcaatataaactcatgatattctaaagaaaggtcaaacttgctcacacatgtagaaatatattcgtttgaaatcgaaataacagaatcaatgttaatatgttatacatgcatgagttgtttatttttgtaagagaaaaatattcattgaaaggttattatgtgagatttaataaattaatacaaatgaataacaatataattatttacagctgtcaaatcaattggaagcagaaaaaaagataac

SEQ ID NO: 40594 - DNA, 818 bp, Arabidopsis lyrata
  Intron number 2 from transcript 930274 (locus 930274) deri ved from phytozome v7.0 (chr-ID scaffold_3; pos 10202312 t o 10203129 reverse strand)
gagtaatcaacggcaaggttttgattccatctccttcttttacaagaaaaattaggggtttgaatcaaaaaattgaggttttcttgttttagtcattttaatttctgaagctgtaaacattgtttcttgatttggttgattcaacatgtggatcacaaaacctgaagttaaggggttgatgttttggtgtagatactaactggattaacagatgctcagttagagaatttagatatgattgaaccgttgttctgagttaacttggaattttatgtatctgagttcttgctctgcttcacaatgtcgattcaattgaagtttatttgattggaattgcacttggttgatttggaattgcacttggttgatttgggccgttgtcttcttactcatattcctcttgttctttttagtttttacttcatgatcacgattcagtgtttaagacttggttttgcttcttaatcatattcttcctcttctattagctttcactatatattcacgatttagtgttaaaagacttgattttgcttctcttaacacgctagatcaaagatgggattccatgcttggttccaaaggatggaaaaatacttgaggaggaaagtgggacatcaaaagcttaatgacttttgcttttacaccaaaaatataaaatgatcagagtgaaaaggtaacaacttgtatctgcagcgacttatcaatggttctttctgtcttcacattttagacttgtgagcacttttaagtttgaagttttaatgggaacattgatgtaagaaattgaaagtcaatagaggtgtagttgcaggtga

SEQ ID NO: 40595 - DNA, 389 bp, Arabidopsis lyrata
  Intron number 1 from transcript 937663 (locus 937663) deri ved from phytozome v7.0 (chr-ID scaffold_5; pos 14078844 t o 14079232)
acatcaaagaaggtgcaaccatccttgcttctcaggtaatgtctatgtttaggttcctaggtttataattagcttttatatatctagtaattcatataaacttttgatctactatacaaatctttgcaatcgcctattttcatatgcctcattttgacctatacagatccatgttcgtcagaaaacaatggaacaaacaaaacagaacctaatcaagtagatcaatgcctaaccaaaataaaagagaattgaaccaactgccacatttgtgttgtatcaaatagtattatatcagcctgtatagatacaaagattagtcaattattcttcgatctttagataaataattacatttggttttaaacaaacaggacgaatctgaatatccc

SEQ ID NO: 40596 - DNA, 328 bp, Arabidopsis lyrata
  Intron number 1 from transcript 941394 (locus 941394) deri ved from phytozome v7.0 (chr-ID scaffold_6; pos 7789685 to 7790012)
ctccgtttctcaattccacttcaaaatctaaatcggtaaataaccctctcttctctcctccttcgatttgctattgttcttaaactttatacgaaatcaaaattcaatcattttctggaaaatctgcagaaatcgaagaaaaaaaaatctcttttttctttcccgtgagtgtttaggtgatactaattcagattagagtctattgaacatagaaacttaagaaagacttaatcttttttcctattgattatcgaattctgaaataagttttcatttttattctttgtttgcagctcgagagtgtcaaattattcgttgggcttccact

SEQ ID NO: 40597 - DNA, 496 bp, Arabidopsis lyrata
  Intron number 1 from transcript 484947 (locus 484947) deri ved from phytozome v7.0 (chr-ID scaffold_5; pos 12098435 t o 12098930 reverse strand)
ttccacaatctccgatcgaatctccctactcagccgtatgttttcacttcatcgtcgtgattgattctttgatgttgggatttgaatcgccgattctcaaaaccctaattctggttttgagatcaacttgtttactgattcggattgtagaatctctatggagatttttgattgtcgtcgatatgtcttttcgattgtttgttcgttgaaccgtcgcgtcacatgcacggattaattatggctacctcttgactttgccttgttagattttcgatttcgatctgaaagtttgaatctttggaataatattagtttcttgatcgggaagatgttctatttgtactgttattagttaaattgtccatttttttattatctaagcaatgtagccagttgctcaagtaccaaagttttatgtagttttgtcagtatggtagcttttgcttgtttttcttttgattccagtctttttatctctgtcttattcaggaaaaaa

SEQ ID NO: 40598 - DNA, 628 bp, Arabidopsis lyrata
  Intron number 2 from transcript 491884 (locus 491884) deri ved from phytozome v7.0 (chr-ID scaffold_7; pos 5603167 to 5603794 reverse strand)
ggttcagccactggttattgaattggatcaacttggtatgtttacatttccttaacctttctatttatttcatagcttagctttgattaattgattgattatgattatactaagctttagttcatgtcatggctttagatggaggatgaactaatgatttttagttgtttagaagtatccattagttctattgccgcctttaacctttggatttggtttcatatgcatagtaccaatttagtttgtgttgtggcatttagactcggtgaaagaacacaagtcttgttcacctttcaattggtttagttttgtagattcgaatgagttcgtatgttttttttttaatatctttaactcctgtttctggactttgggtttaaaacttacattttggggattcttgtttgcctttggtatttgtttcttggagaatcactagtctatacttatatcataatagtaaatgttgtctctctttgataacagttgaagatgcaattgtcaaaatatttggtgattttggacaagagagaaaaatctgttatgtttctatcttaattttgtttgagtaaactatgtttggttcatttcaggtccacaagggccacaactgcagaaggtactggaa

SEQ ID NO: 40599 - DNA, 1005 bp, Arabidopsis lyrata
  Intron number 2 from transcript 472699 (locus 472699) deri ved from phytozome v7.0 (chr-ID scaffold_1; pos 10945609 t o 10946613 reverse strand)
tctcttacgaccacttctttttcaggacatttaaggtatgaatttactcttcaagatttggtgaaactagtggtgtgcattaggggctgtgcaaaatattcgttcgatccgcttcgactctgtattcgattcaaaaaatccgaatatccgtaagattttggatcaaagcaaataggaaaatgtagtattcgtaaaaaccgaagcaaataacaaatattgttttttaaaaattcgaatatccgcttcgatccgtatcttttgatatatattagaatatatagttatgtctatatatatataacataaatagtttgtgtattgttgctacgtaccttatgtttttatgttaagatgtttgtttgatcatttttctattatgttatgttttgatcaatgacatcttaatctatcgggttttggtttttggaattagttggataacattttgttgaccggtgataacaacaacggttatgtttgatatttggaacttattttgaaagcatgttaaataaaaactttaaatatctgatatggttatatagtttacagatttttttcatatttatatttatcaaagcggatatccgcaaatatcacaaaaaaactggatattcgaatttccggatatccgaaaattttcgaatcaaagcaaatcacaaaatcaggtattcggttaaaacgaatcgaataacaaatatcacaatttttctggatatccgcttcgtacccaaacctaaattactgtgcatcagagcatgatctaaaagcttaacaagttggtgctttagacatcacaattaatattttaagaattgaaaggaatatcaattctgagtaatttgttatggtgggtggcagattttgagattttttattttattttaccgttgtgtttgttagtgggctcaagaaaaaattattttgttccaggtccgaaatactccgggctggcctgattgtgtgaattgatatttttcttttttggggtatgcgtttaggttg

SEQ ID NO: 40600 - DNA, 830 bp, Arabidopsis lyrata
  Intron number 1 from transcript 936962 (locus 936962) deri ved from phytozome v7.0 (chr-ID scaffold_5; pos 10310623 t o 10311452)
tggtatggcttgattctttctcttagttcttgtttatcatatgcatattcctgtggaaattcggttttcgttgatgggttattcataaattttgagttagaaacttaaatcagtctcattcgtgtagttgtgttggtacatttcgtttggttgtgtttgtagaaacatactcttaaatacgttaaggtaaaagtctactagactggatagagctatgctatgtggtgagaatcctgtgcttgcttaaacgcagtctcatttcgtttggttgtggttgtatgatgactattcttcatttacttttggctgtgttctatacttaagcatggattgtttgatagttgttttgcaagttttactggattgttgcttttaattgtttttggaatgttgctctgtcatttcagctttgtactataagggaggatctaaatttgaactttgtttgtcaatggtgcatgatgtttcatgttcagttttgaagaattcagcttttcatttctgttttactcagttcaataaagttttcaacttgctcataatcatgactatgggtatgggtagttctatgttctaaggtgtgtaagctatctgaattgtcatagtgtttgttcagacaaccttgttaaggtgcttaactggaaatttcctttttcatttacctgcagaagctttaaagtcttgtcagtatcttcagtggcctattttattgttttcacactcattttgctgctatattgaactgctaactcagagccctcaaattattgtgtcttttctttggatcttgattaggggatacaagcgtttcttcagacgttccttgcttg

SEQ ID NO: 40601 - DNA, 614 bp, Arabidopsis lyrata
  Intron number 2 from transcript 940294 (locus 940294) deri ved from phytozome v7.0 (chr-ID scaffold_6; pos 3269168 to 3269781)
gcttgtttcaccactgtttgcttggagtgtcagaggtaatttccattttcttaatctatctacatttctgattcattagaacttagtgttttatcttcatacgatgttatactccatcgaagctttgatttctcaatgttgctaaggctccattgttcattcctcaccaatgtagtaacttgctagattctggaatgttggcttcatttggagattcttgaccattttattacaggctctagatttttcttaggaatgacaatcttgatagaatctaatctagttcaattcccaatcccaaaaccccaagtaaatccagaacttccttttatagctgttagctctctagatagataatcaactcaacgattgctgataaacctactatccattacaaacccgcctaggctattacaacgctcatgagatagactaacataaggacaatggatttctttctgtcgtcttcaatcctatgatattgttttgtttataacttgatccctttccacttgtttgagctgtgtgaattgacataggagcttgttttagtaatattaactgtggaaatcagattgagacaagtgagtcaaacttttgcaggcacgagcagt

SEQ ID NO: 40602 - DNA, 712 bp, Arabidopsis lyrata
  Intron number 1 from transcript 921873 (locus 921873) deri ved from phytozome v7.0 (chr-ID scaffold_1; pos 12422359 t o 12423070 reverse strand)
ttcatcgttggagatttcaaggtaaaagaattcgatttttaatggtatgtttttagcataagggtatctttggagggatcttgatcaaaaaaatattatgcagattttgatgaagactttaatagccgagtttttggattccgtattttaatttttttcctaaattatatagtttttgtttcattttatgatatatagtatagtttagtacggattcccaagaaatgaggaatactaagatttgttcttttgttttattaattgagaaaatccattgaaaacaattaaatatataaagagtatttcaaattcattggtagtcaaccaaatttattgggatctgtattttaacattttctaaaccatttggatattttaaaatagttaaacatagatttccaaacatagatttgtcatccttatctttaattagaaacattatttaaatattgttcaaacctttttatcttgtgtttcaataaattaggtggtttaacaacttgtattttcaatcatggttgaataacacaaaattctgatttggatttccaatcaatcaaatcaagcccctaaactttttcatttctagtgttaaaaaaataataatcgaataaaacaaagaaaattatgattaaacttcagaatcaactttaaatcatcatcatattatgttgtaggtgatagcaagagaagcaagagagttcaagattgg

SEQ ID NO: 40603 - DNA, 876 bp, Arabidopsis lyrata
  Intron number 4 from transcript 480573 (locus 480573) deri ved from phytozome v7.0 (chr-ID scaffold_3; pos 21633313 t o 21634188 reverse strand)
gaaagagagaccaaggaccgggatagagatcgcaggtgctccttctctctcttttctttatttcaaacttgttctcataaatgcctactgcatttaatcaatatactttttgttcatacttcttgagaagtacacatccgagttggtgatcgacttgatactctacatatcgcctgctagttcactctttagaatccgattcttaaatttatgtactgtgtttagtagcttctttgtactttttccgaaggacttcttcatggtagtttcagaatattattgagatgttgagagtgaaattgaggatgcaggctcctagtgcttcccatcttcttgatttgatgactgaatttggaaatcaaatctcttatgctatttgggttatgctgcaaaaactttgatgtaagctataaatgttaacaggttcatactaatgctattaggtccattggtattgccttctgtacaacttgatggggcacgttcttaagattatcattgtaatagaaggtaaaaagtttttggttagacttcaggttggtcctgtgctaaatttaaaatgaaagaagatctaagttttaattattagtttattgttcatcccttgttgactttgcatagttccctgcagggccatctcgtgcttcacgtgtgtacgcctaacggagaaaagtttatctgttttgaattgttataatattaacatattgctgtataccagaagatgccattgatatgttgtctctggcctattcaaaagatgttgcgacaacttgtaaaatatagatgaaaaagtttatagtatgaaattaaacaagctcacatgtttgttattatgcagacgccataaagataagaaggaggataaggtagaac

SEQ ID NO: 40604 - DNA, 313 bp, Arabidopsis lyrata
  Intron number 3 from transcript 484296 (locus 484296) deri ved from phytozome v7.0 (chr-ID scaffold_5; pos 2058539 to 2058851 reverse strand)
aaacagtaaaaataaggtaagataaatccaatccagagattcaccgagaacccggagattggcaaatcaaagcccagaaggtgaaggatcacctcgaagatctaagattcattgttaatggaagatgatgatgatcgaaagaaataaaggagattgaagaagatagtttgtgtttttgattccttctcagaaaatggctaaaaccctttacatatagagttacgatagtttggtggtctaaacaaatgaccaaagaagattagtgaaccggaaattagaaaactaaaccggttaccggtttatcctattacac

SEQ ID NO: 40605 - DNA, 408 bp, Arabidopsis lyrata
  Intron number 1 from transcript 893752 (locus 893752) deri ved from phytozome v7.0 (chr-ID scaffold_6; pos 7612530 to 7612937 reverse strand)
atcgagcctgtgatcatagcttctgggcaggttgtttgatttttctcttcttcttctttttttgcgatttcttgtgattcttgcttgagtttgttgatcttataatttgcatgtgttttgatttcgatatattcatatgaattgtatttatgtctatgtataaatgcagcttctttatgtatatgcatacaaagtttcagtttcagagaaaacaagaaacagagttataatggttcacattgccaataaagattcatggttgtgtatagatattggatgattatgtaaacaaaatgtgtttattttgtgctatacgaatacagagattgatccaatttcttgaaaagttaggattctggtatatgtgctgattttgctttattcgctttttgtttctttttcagactt

SEQ ID NO: 40606 - DNA, 894 bp, Arabidopsis lyrata
  Intron number 1 from transcript 359670 (locus 359670) deri ved from phytozome v7.0 (chr-ID scaffold_655; pos 532 to 1 425 reverse strand)
catcgcatcaatctcagccacttctttcgattcaggtcagatttcagaacaaggtttacgatttgagcatttacgattcatttgtgaaggaagtagaagaagaagactttattgctatgatttgcttttggatttgatactttgttgctttgatttgcttttggatgtgatactttgttgtttatttggatatttgtcttaaacttttggattgtatttgagatttttgcagattttggcgtttttcataatttgttcttgtggtgaccaatggacaccaatggacagtctattaaaatatgggcaataatgggcatgggctataatggacatgagctataatggacatggatgttatttgtccataactaaaatggtcaatattggaccgggctaatggacggggacagcctattttgacagctctactctaacacgctcaaaatataaagaaattttgagaacttacaaaagctatatataggccccctttccacgtagttctgcccatgtaagtcatatcaaaagtgccacaggtacccataagttcactctaggatatgttaattattctcattttttaacaactcgatcaaaaaaatttatgaaggatgacaattaccttactatataataaaggcttataggtagagaaaaaaagaactagaaacaacaacattcacattctttatggttttttaattaagttatgaaataccaaaaaaaaaaaaaaaaatcatatgtttccaaattatttactttagaaggcttccatatttttttttctttttccttttgttgttgtcggcctcgggggtttcgttttaactcccaggtttaggtttcggaagaagacaatttgtgtgtctttcaattttagggtttctgtcgact

SEQ ID NO: 40607 - DNA, 687 bp, Arabidopsis lyrata
  Intron number 4 from transcript 471375 (locus 471375) deri ved from phytozome v7.0 (chr-ID scaffold_1; pos 4966936 to 4967622)
tgagaaagcagttgcctacaaagctaacttctcaggttagtctttctcaactgtgttatcacttgtattccctttgcaatgattaaggatttatgatattagacttatgaaagagaacaacttccacaaatcataatcgaatcttcacgtgtacccttttactagttaaacttccttgaatctcatttcctttgcctccacaagcattttgacattttttcgagtaactgttacccgattaaagctcgattcttttacttatttcattagatcaatttggagtatatctttcattgtttgttggataactttttttgtgagctttaagaccctggagatgtctatcttcaattctttaaaacgttctccatgaacttcaccatagtgacaacctccattacatgcaacacccgagttttgaaatctagaagtgttagccttatggaatctgagaattgagtagttcatttgattccatctttgtcccacgaaaatctggcaagtatctatgaacaaacacagttcttcggccgttttcttgttctgtaaacttcttaatccaggaaatcttcccttcaaagaattcatattttgcggggaaattctttcataccttaatctgaatgtgttttgtatttatgaaaggtgtgaatttcaatggcaggtgctgatttgagtgatacattg

SEQ ID NO: 40608 - DNA, 545 bp, Arabidopsis lyrata
  Intron number 2 from transcript 952043 (locus 952043) deri ved from phytozome v7.0 (chr-ID scaffold_334; pos 2309 to 2853 reverse strand)
ctattttctgcgttcgatcgggatcgagattgttggtatgtttgatgtttcttataatttcgttgtatttttgattgaattaggttgattttgacaagaattgtgaatccaatttaatgatacgtttgaacttttgattgaatttttggatagtgtcgtcggcggtgaatctcaaatcttggcagattcagtagtttgagttttgagatagtttttgttgaaatttcaatctgtttcgatctctaaatttttgttagattctggtcacattcaatctttcttcaaggatctgcaacttacttacgcttttctttgttttgaatttggtaaagaggatagtactaaactttaggtttctacgaggattggaagatgcagagtacattgacgcccctccaaatctagaagctgtaaataacagaagagaagcttagaagaaaggagtaagttttgtttctacatgaatatgcagaaaaaagtactaattttttcatttccttaacatagtggtgctaatagcatatatttccttcttaatctgtaga

SEQ ID NO: 40609 - DNA, 535 bp, Arabidopsis lyrata
  Intron number 2 from transcript 473277 (locus 473277) deri ved from phytozome v7.0 (chr-ID scaffold_1; pos 13693130 t o 13693664 reverse strand)
cctcgacagatcaaagtttggttccagaatcgcaggtcaaaatgtttttgtgttctttgattgtttctgaaattaaatattgaatatcttttgtttgtatttgaagacaaaaatgattcctttcaataatttaaaacgcctgttcttctctgacaatgttttttggtaatcttcttgtttttggtctaaatggtgttttaaagcttttgaatttcagatctatgtctattgttttttttctctcttttttgcttacaggctttgttgacacagttgaaagttaaaattacaaggaaaagtgacagctaatcaaaaatgtcttcgatgagtctttttttcttaaaaaatattctgcagagaatatgttggaaattacattagcttttgttctttatgtcattctggtataatttctaaagcaaaaagtttgtgttcttctgttcatttccctattattttcaacacatttatcatactagtactatagtttgtctttaacttttcttgtttcttttgtttgtttgttgacttttag

SEQ ID NO: 40610 - DNA, 635 bp, Arabidopsis lyrata
  Intron number 1 from transcript 913514 (locus 913514) deri ved from phytozome v7.0 (chr-ID scaffold_1; pos 18421918 t o 18422552 reverse strand)
ggaagctaccggaacctttagatcaatcagaaaaggtaaaccctagtcacggcattgcttgcttgttggacaagaatcagtttgttcagctaaaatccagaaaaaccctaacaagatttctgatttgttttcttgcgaaggaagctattaggtcttgagtcttctcccaaccgttagtcgcagtttctttgtgcttttccaatcaattgagttgagggtggtatttaagaagcatgatatcattttcttttgttatgctccatgacttgtggcatataggcttggatttgattggtaaggattagattatgtgatgttatgattgagatttatgtttatgtttgatggtgatatttggtaatgttatgacaagtatgtaggtattaaatgtgaggatttatgtatgagtatgtatgtatgagaatgatttaggtatggacattgatgggctgacgggttacatgttggtcaagaaagactgacgagcctggtatgcatgggagtgtctgagccatgagggccagcctccactcatgaggttctagtcatcacgatgatgattggacctaacgatacgtatgtgtgtgttagtatggataatatgattgttatgaattgttgttagaaattaaagc

SEQ ID NO: 40611 - DNA, 800 bp, Arabidopsis lyrata
  Intron number 2 from transcript 932781 (locus 932781) deri ved from phytozome v7.0 (chr-ID scaffold_4; pos 5305716 to 5306515 reverse strand)
ggttggtcttgccaacacaaatcttgctttgcctggtaaattttaacttttcatgatttccaatttaataatttttgtttactaaacaaaagtttaagctttttaacctaccaaatatttaaaacaacatgcttttaaatattgctttcatattgcctgttctttggttttaacatatttccaactcaatacagatgttgtaggaaaaataatttcaatccaaggttcaaacctttgtgacccaactacaacaaaccaaattgttgttaatttatggctccaaccgtaagtttcaaatcttatattcaaacataattgtttctaacctttctattatctctttcccaaaaacaaattaatcactttgatcttcatacagaaatgtaattgtctccttgtctctttgggctaaaactgcttctcgccttcgagccatcctatctggtccaatctctttaacatttgttgttttggtaacagctgttaatccaacaattcttgatggtacgactattttcccaaaccaaaaaataaatccatattcccattaagcaataatgtatttggtcttctaaattagctttacatgcagggacacttttcttggatggaacaatatacacacggttttttttcaaccaacacattgcgccaatctctaagtttactaattggtaagtctattttaaaatttacccacttttttaaataaaataaaaatactaataaaaacaaaacctctcttcttaagttttggtgtttcaggaaaccaaacatttaccatcatcgacttagcagca

SEQ ID NO: 40612 - DNA, 788 bp, Arabidopsis lyrata
  Intron number 1 from transcript 475108 (locus 475108) deri ved from phytozome v7.0 (chr-ID scaffold_2; pos 1796561 to 1797348 reverse strand)
aaggtaataaaaattaaattttgaaattagtaacagtttaggatttttttgtataatcaatgaatttggttaaattgtggaactgtgtgtggataattctgggtgtttgggttaattggtccggtccggttcgtaaatttcggtgtttcggtttggaaatggaaccgaaaacgatatttggtttggttgattattgaagatttgacatttttcaatatttcggttaaatttggtacatttcggtgattctggttaaatttaggtagtttcggtttggcagttccgaaccggtttcatgcttcctcttgctgcttggtttcacctagtaaaccgaatccgaaccgaattagcctaactggtttggttcagcttctcggtttggtttcatatgcctagttttaagtttggttatggagattgttgatagtgttaatgattatgtttcggtttggaaattggtgctgaaatggaaccgaaaaccaaaattggtttggttcattattgaaaatttgacgttttttcaatatttcggttaaatttttgtatatgttggtgaattcggttatatttaagataaatttttgtatatgttggtgaattcggttatatttaagataaattttttgtaatatcggtttggcaatgccgaaccaaaccagttactcaatttcatacttcttcttgccgcttggtatctagtaaaccgaatccgaatcgaattagccgaactggtttggtttatatggagtttggtgtaatgtttattcttcttatgatgtttcagctct

SEQ ID NO: 40613 - DNA, 595 bp, Arabidopsis lyrata
  Intron number 2 from transcript 496800 (locus 496800) deri ved from phytozome v7.0 (chr-ID scaffold_8; pos 22061754 t o 22062348)
ccatttttccatcaacgatttgtttttcccttgaggtaactttttcttctctgtttcgaatccggtaatttgagcttgatgatgtttgtgtgtgaatatgtgtgttagtagttactagatctaggagttatttagtttcttcgtttttttttttttggaactctttgaggttatttctatggcgaattttggcttctgtgagctgttggcttaaacctagctgttggcttaaaccttgctaggtttagtgatgtgtagatagaattccgtggaaggtgaaatctgagatcagcttgaaaaatgtatctcaacggtttagtttcgtcgtctgacctagagttgacttctttttctttaatagctttccattttctcttcgttttgctctagatttcgttttgtgagttttacctagatgcaatctactctaaaacctaattgatacggtttagagttgcttcggatttttgttgaaattgagttcttgattctttttggtaatttagggttttgtttgaggatttaattatggttatgtgaatttgatgtgtaaaaatcatcaggtaatcacctttgcagttgaagaaaccttaag

SEQ ID NO: 40614 - DNA, 665 bp, Arabidopsis lyrata
  Intron number 1 from transcript 915999 (locus 915999) deri ved from phytozome v7.0 (chr-ID scaffold_8; pos 5469849 to 5470513)
tggggtattccaactctcggaggttcgttgatgaatcttcaaaaagtgatttctgaaactgaagtctgtggtgaagtaatggagacagtcactaattaaatgttgatagattttgtacaatgttgaggaatttgaaagctctctgtatctgcaaattttaatttcttctttgacgattgaaatattactttacttcattgggccacataaggttatgtgtatctgcaactttagttcttttttatcttctttaatcgtcgatcactattattgatcttttcaactatttaacagtgtactgtaatttcaatttgaattttaacagtgtactgtaatttcatcacatgaacaaatgtgggaaatctttcaggattttttgtttgattcgatgagtattacacaaaactgacattcacatcgattttttttttgttttatctactgtaacaaactaacaactctttcaacaataaagattaaaaacttttcatctaattacagttgggtttttcgtcagacgatcatcattcatcgatcctagaatttacgatgagctcttattcaaaattactaagaagagcttgaaatagggattgtttgcgtaatacaggtatatcattgtttcttcaggctgtcaccaacgtacactgcaagaaacttttttt

SEQ ID NO: 40615 - DNA, 340 bp, Arabidopsis lyrata
  Intron number 4 from transcript 946724 (locus 946724) deri ved from phytozome v7.0 (chr-ID scaffold_7; pos 12670644 t o 12670983)
gaaataccatcgaagccaaggtaaagtctcatgattgtctatttagatcacatttgtattttgcatttattgaagaaatcattttttttttgtttgtgtattttaaatataaaacaaattttgtatatcaaatggaatgaacaacctttcttttgtgtgtgacgtttacatttacaattaaaaatataatttttgatgtttaaatatttaaagttgtggttttatttgagaaaaatgtgaacactaatgcaaaagtgaacaaattattgaaatcttatttataagcatatcaataggttatacaatctaatgtttttcttctcccataggtcttgattgg

SEQ ID NO: 40616 - DNA, 872 bp, Arabidopsis lyrata
  Intron number 1 from transcript 358507 (locus 358507) deri ved from phytozome v7.0 (chr-ID scaffold_8; pos 20792279 t o 20793150 reverse strand)
cgacagtattcgatccatgttcacccaacttaaaagatttactaaataattttgaaagaaacagcctttttatgattttcttttgttttggttatgaacagagattataaattttattttgtttcagcaacttaatttttgtggaatatattttagtccttgagtttatcgtatcagcagaaattcgaagtcatcttaaatatactatatataacttattgcatgtccaagtatcttaggtttttctgtttcccttcaaatattttctgaattttagaaaccctaaatagctagaatttaatttgtattgtatgctacttcgtaagttaataattattttcttctacgtttccttgttaatgatattataattttagcttgttttttgtcaacattttaattttagttttatcaatagacttttacaagaaatctaattttagttattatcccacgcaaagcaatatctaatagaataatagagtagtagaacattaaaatagtaagcaattaatacgaatccatcattgaatcaaacctttgaatataaattataaatacatgagtgatgttactatggggtcggttactatacttctttcattatctgataaggggtcggtttaattagagttgggataggattgtaacttacaaattcaggagactaaaaccaaaacagtatcacatcagaagaaatttgaagtcatccaaatcttaattatataaaaaaaaaaaaaaattatatataacttcctgcctctccaagtttctaagataactcatgtttttttttgttccttgaaataattttctaataaatttgagaaacccttaagctagaattaattttgttgtgaatcaggaagagt

SEQ ID NO: 40617 - DNA, 381 bp, Arabidopsis lyrata
  Intron number 1 from transcript 489000 (locus 489000) deri ved from phytozome v7.0 (chr-ID scaffold_6; pos 8873132 to 8873512 reverse strand)
tctctacgccaatcttagcgcttagacattcctttgtgagttttcttcgatcccttttcgaattcttttggtctatctcataagtaaatcgtgttttggaagatttgagtatatagagattggtaaacctagctgttccttttctcttttgaagccttgttctatatttatttgggtattttttttagcgggaatcgaaaatttattctgaatctcgttatggtttcgttgacgttgcgattatcgctctgatttagaaaccctaatttcggacttgcctatgctcatcgttgttacagattattttgattctaatatatttatttggtttgtgagtgcttattatcattgtatgttttcgtttctatctcagttgcaatc

SEQ ID NO: 40618 - DNA, 124 bp, Arabidopsis lyrata
  Intron number 2 from transcript 475922 (locus 475922) deri ved from phytozome v7.0 (chr-ID scaffold_2; pos 12900061 t o 12900184 reverse strand)
tcaatctcttggtagaccaaggttgtcgcgttgaggtaattctttcttctttctaggcatcaagattattactacttttgattcattcacacttagttttctgtttttgttttgaataatagat

SEQ ID NO: 40619 - DNA, 321 bp, Arabidopsis lyrata
  Intron number 2 from transcript 496612 (locus 496612) deri ved from phytozome v7.0 (chr-ID scaffold_8; pos 21320907 t o 21321227 reverse strand)
tgcagagatacggccttgaggttagtagattttcttttttaaacctgatgatgataaaaataaaatctattgtatttatggaattgggatctttcaacatcagaagttgtaatggatttgaggatttggtagacaaaaccagtaaaatgtgggatgaagaattgtaatcctgcaacattcttcagtttgattgctttcatagtggtgatgaaatttgatatatctaagagatgattgatgtaagggaaggatcatattctgaaacattattcagctttggtttcttctcaccattgtgataaaattggacttatccagggg

SEQ ID NO: 40620 - DNA, 589 bp, Arabidopsis lyrata
  Intron number 2 from transcript 478237 (locus 478237) deri ved from phytozome v7.0 (chr-ID scaffold_3; pos 3654151 to 3654739 reverse strand)
ctaaacaattcccctcacaacatcacaattcattggtactcgattatttaattaacctcgttttattttaattgcttaactaatgaattaacctcgtctaacattaataattgcttaactaatatctatgattacgttttggtttttttgactttactagagacgttaccctttcacagtctcttatttgtttaacttttttcgcatagtattcaattgtgttttcggaatagaaaaacaaaaaaaaaaaaaacttggagtgtaatcatttccgttcttcttattttctttattttaacggttttcgggttatgaaattacagaattgtttttttctaaaagaagaagatattttcttttgttcaaatcagcactgcaggttcaaattcgttatatatatatatagtatcaacaaattgaatgattttctatgttttgtttgtgtgtgttatatataggtttagtttatacggtagtgcatgatttttttgtgttatgttcgatgaaattgtttaaatatgaatatcttaatatattttgtgttcatgacgcaggcacgggatcttccatagactaacagtttgggcag

SEQ ID NO: 40621 - DNA, 403 bp, Arabidopsis lyrata
  Intron number 1 from transcript 478237 (locus 478237) deri ved from phytozome v7.0 (chr-ID scaffold_3; pos 3654822 to 3655224 reverse strand)
tagcttctgccgccattgtcgaacacaccttcaacgtaattgtctcctcctttttttctttcttgcctcatatcttcttcctctaatattgatttatattggcatgtatattatttgatctattttatatcactacataaaaaaactagatatattgttttattgacatgttgattatttttgtatcggttcaaaatttgtaacaagattatataagttgaaaatgaaattcatgtgtttgccaaatgttttttatttgatcttataatcttagaatattgtgaaatatgatcagtttattttaccaactagtacgaccattgacctagcgatttcgctaacgacgtgagatacttggattttgccaggtacaaaacttaacgctgtctaggctgtgcaaacg

SEQ ID NO: 40622 - DNA, 681 bp, Arabidopsis lyrata
  Intron number 1 from transcript 494409 (locus 494409) deri ved from phytozome v7.0 (chr-ID scaffold_8; pos 1458607 to 1459287 reverse strand)
aaagcccagatttgggatactgctggtcaagaaaggtctcatctttttcaaccacattgttcatttctcgatctggtttctttgattaggaaagttttgagctttatggtttgtttgattgccgatgaaagtaattttagagcttaggttgttagatctgtgtcaattgatttagatccattggttttgacaagaagagatctggattggtatgtgattttgaaatttagatacgattatgattaaaaagtttttagctttatctaatttcttctctttgctaatttagtttatgtaagagagcctgattggtttcagttgcttcatttctacgattcctagctttttctttctcagatttatcggtctcttggatcactgtcttgaagctttgcttagtcagatttcttctcttgtttttgcttgtttatgtatgagtgattggtttcagttggattcttaatttgaagctttacttggtcttaatttcgaaattgaaaagcttcgaagcgtacatagtctgcattcgaaactgaaaagcttcttgcttttttatgattttgtagtcggttcttcttcgtattagctatgttctgatgtttttggttaactttaattctcagtttcgttaacaatgtttgaataggtaccgagccatcactagtgcgtactatcgaggag

SEQ ID NO: 40623 - DNA, 866 bp, Arabidopsis lyrata
  Intron number 1 from transcript 916571 (locus 916571) deri ved from phytozome v7.0 (chr-ID scaffold_8; pos 13476054 t o 13476919)
attactgatcctcacgttagttccgtttgattcaaaaagaatccaaattttggagttaaagaagagcaatcaatattaccccttcctttcaaaataaccactccctttgttccaacataattttcttattttagtgaaaatatcaaatttaatgatgttctcatttctgtaattccaaatattggtgtattttattgtttgtgactatatttattctgcagaattttaaaaattagttgagcagtttgtttttgagacaataaattatgtttaaatataaaatagacaaaaaaaatttacaaaatttatgtgcaaaaaaacttaaatactctctccgtctcactttatgtgatgttttagagaaaaaaattttgtttcattttaagtgatgttttcaattttctatgaaaaaattacatgtatttaattttgcttgaccaattatatttttcagcatattttctaattggttgaaatcatttcatataatgatgtttttgtataaaaaaggtaaattaaatgaaaattatgtgttttttttttaatatgtgtagaaaccttaaacatcaattaaaaagatacaaatgcactgttaattaaaatgtagcagagggagtatcatcgtaaggttttatttttccttcccatcaacctattggcatttctatctaacaacattttccaaaccttccattaattaatagcactatcatctttttcaagttgaactagtttttaaatggtccactgccaatttctataatttatatgtttcaattaaattattcaaagtcttctcctttttgttaaaattattatgtagatgttttgttagctaggaggctgtatttttttaattcaagatt

SEQ ID NO: 40624 - DNA, 582 bp, Arabidopsis lyrata
  Intron number 2 from transcript 900605 (locus 900605) deri ved from phytozome v7.0 (chr-ID scaffold_4; pos 12688038 t o 12688619)
aataaacaggtgatcttatagtttatatgtacaaatttgattttttttttttttgtatttatggtttcactattttcaccactaatcaatttttataatcaaaaagtttggtttcaacttttgagaaggtaatcatcgatggtttggtatgtttctttttgttgtaaaaagatgaggtacctcccgattttgttgaggtacatgttcttattattttcaaatatgtcttttctcataagaaacactcaacttttgataacacagttgccacaaagtcagaaagatgacttatttcagggatgaatcttcagaggaggctaatttttgtcgttaatacaatttaagtattcctctctttagattagggataacaaacttggctgttaaattcaagaattactcttcgttgccaatctctctccccaaactaaaatattacatatatggaagtagtaacttaaagtttttggtatcgaggtcattctaaggcactgagattcggactttggtatgtataggattcgttttccatgcactaagatttaattattgtttaatttatttgtttttaggtttctttcc

SEQ ID NO: 40625 - DNA, 562 bp, Arabidopsis lyrata
  Intron number 2 from transcript 496447 (locus 496447) deri ved from phytozome v7.0 (chr-ID scaffold_8; pos 20613577 t o 20614138 reverse strand)
atcgcaagcagattcgcaagagagaaattaagcgtgtaagggcttttgttttctccattctgaattttccctttctttgttgttgatgaaatcgaattgggattaattgttgttgttgtagttgtatgagttattgagtttagattcaggttaaaattgctctgtttttgatttagctttgattcatatattactctttgtggtgagtttaaagcatgttttggtgattttatcattggttcaagtggacaaatcttcatataaaggctaatctttatcctagattagactctttttttttgggttgtttaggcattagataaattgatttgggaatttgatttgctagctcagactcctttaggtcaataatcaatagctttgcagtagctaagaaagtgaagatgatatttttttgaccatcttgttcaattgttgtctcattatctgtgagcaaatattgttggtgtttgtctatttgtgggctacgtttcttaccatttacataaactttggttcttaaacagaacaagaaagagaggcaaaaggtaagagaggttgg

SEQ ID NO: 40626 - DNA, 760 bp, Arabidopsis lyrata
  Intron number 1 from transcript 907598 (locus 907598) deri ved from phytozome v7.0 (chr-ID scaffold_2; pos 4423463 to 4424222)
tgaagccaactcaagtaaggcactgtatagtatggttctcttaaggattaccacgctactctttcattacgtggctagccataagggacagattagccactggagcgagaatgcgtaggtggggtttctcccaaccttgcttattgtgtggtgagccaaatgagacaagggaccatatcttctttgcttgtcctttctcttttatgctatggatggaggtcgcaaagccgctgctagaaagaaggatctcttgggattggagccgtatactcctttctttgtcaccagctacgtacaaccttacggactatactctcctacgattgtgttttcaggcagtgatttatcacctatggcgtgaacgaaatagacgcaaagtcatcaacgacaccactcctcccatcagttggctctaaacatcatcaagattaatttcatgtcgactcataggtcttaaatatcccacaactttaaagtttggagatctagtctcatttgcatcctctgtaaattatctatggatttggctctgttttgccattttatggttttaaaagtcactaggactctgtttttgttaaagttcagtttggttgagttactattgtacataccacctttgattttttgatctataaatttcacatttcatcagaaaaaaaaaacatggaagacacttacgacttacgagtgtaatgcaatgaagtggttctgcttgagggcatgttcagggacaagacggtccatggtttcagtaggg

SEQ ID NO: 40627 - DNA, 364 bp, Arabidopsis lyrata
  Intron number 1 from transcript 929992 (locus 929992) deri ved from phytozome v7.0 (chr-ID scaffold_3; pos 9021480 to 9021843)
tttcttgtgcctcgccgtcgaatcctttgcaccaggttcactgcttttccctttctcatcgatacttagctttacccattagtcaattgctctgtttcgtaagtttgttgttagttttatatagtgatgattcacgttttgaggttgttgaggaagctggtaaatatgtgtttgctgcaatttggtgtcaattgctctgtttaggagtctgcttttgattaaccttttttggttaagtagagtagtgtatttaagttagagttggtttggttattattctgagcttgaaggtgttctcttctctgtgtgttgatacctattttggtgcttatgatttgcaggagaatagccatcacaaagggaa

SEQ ID NO: 40628 - DNA, 397 bp, Arabidopsis lyrata
  Intron number 1 from transcript 471827 (locus 471827) deri ved from phytozome v7.0 (chr-ID scaffold_1; pos 6837193 to 6837589)
agctttatccatcgtcatcgtacgatcattctcaggtattaaacgttttcgttttctctctcttgggtttagctttgaattttgatctgcttcgcttttgtatgtccgtgtcgcctggagttttagtagatagtaaggaggtgatgtcttgtttttggttctggtttcaatttctcagtgtaaagtcaactcgttgttttctattttatcgctatcttctctacttgcgtcctcacttgtcgttgaaatattgaattcctagtcgtttgccctgagttattatttgattgagaagctgaatcgatgataggaagcattaaagtttcagtgggtttattatatcttttgtctcatatgatcaggtcacgtcaagtcttggattcactcacaacctggc

SEQ ID NO: 40629 - DNA, 954 bp, Arabidopsis lyrata
  Intron number 1 from transcript 947365 (locus 947365) deri ved from phytozome v7.0 (chr-ID scaffold_7; pos 20093742 t o 20094695 reverse strand)
tgttgaagcacacagattctccttatattagagcggtgagtgaatctcttaacgatctttttgcattattgatctagaagagcatatgtaggatggaattatatggataccttataaagtatgatatacggtgatgctatacccttgtctttttggttttcgttgtagaatctagaaatatgtctttccatcttctggcttcttcttgattttcagtaacatttagaaatctaacattgtgtgctgcttgttccaatacatgttccttgttaccagctgagttgtttcttattagtcaattttaacccggaaaaggtaggtgtttcctttgtttgacaaataattatagagcctcttacagtcaggtaatagcattccttacctctgggttccatctaaaactattcctttctcatcccgtattgaagggatgagcgtgcacataattgttctcctgttttcatagcagattttcacaaccacaaacaaagttgggatgtcattctttctttgagttgctgagagtttctcccaccaaaatatataagacctttctttgctaggagtatccgcatatcaaggtttgaggtgtcttttctattttagctactatatctctctaggatcacctctctgcccatttaccagtatagaacgtagctattgacaaataatatgtatgatactttgctcttggttgggcaccggtgttccagttaaagttctaggatatatgtgaagattttcttttgaatgagatagcatttacatgcttccttggtttatgtgaagttatgctagtcttgcattttatatcagtgtttctcttgctactttgttttgctttgcgttttttcttcttataacaacttgtctgatcttttttacttgtccattgcttttgatctgaccacagggatctaaatgtgcaggttggattcctatatttaagat

SEQ ID NO: 40630 - DNA, 120 bp, Arabidopsis lyrata
  Intron number 1 from transcript 906822 (locus 906822) deri ved from phytozome v7.0 (chr-ID scaffold_3; pos 23666655 t o 23666774 reverse strand)
tctgcagctgaagaggttcaaaaatctgcagatatgtatgttttcttgtagcttttgatcttaagtagcttttgatgttgcataaatgaagagattgagatgtttttttggattattaga

SEQ ID NO: 40631 - DNA, 902 bp, Arabidopsis lyrata
  Intron number 1 from transcript 911457 (locus 911457) deri ved from phytozome v7.0 (chr-ID scaffold_1; pos 6928908 to 6929809 reverse strand)
ttgcaggtgaaagttctccctttgtttagatttgggattttagccacttttattaaaaatgttgttgtatatatatattattcccttttggtcacgatatcttttttcttgtatatattgctgcatccaagtttataaacattatggtttctttattttgttttttttttcttgtggtcgttcatgttgttaaactcttcaatttgtttgtctttttgattcttgaaattaacgtttatattaattagggcttttggatcttgtcaatgtgatatttgctttttcttagattttttgttgtttttggaaagtatcgaaaccgcgtgtaagaatagtgaaggaagtcactttctagttttctatcaaaagtctatatcgcatgtcacattaaaaggcagaaatcatgacattatttctttttatttgttatcttatgaaaaattatgacgcggtgaataattaatccatgtctaaacgcgacgtcttactattttctactattgaatattactataagatcattgacaaaatcattacaaacaaacaaaccatcattttataagcatgcatttatttattacataaacatcatgtaatagtacatcatataatccatcactaaaagttccaaaataacatcatcaatgatttttttcaagagaattaaacgctaaaataacatattccactgtatacataattgcatggttttcgtaaaaattatagaaatgcaacatcatttcgttatttagcggattaaaaccattcatctacttttcttgcaataataactatttacatgtctttaaataatagaaataaatattattaatatccaaaccaagtatactaatttaacgatcgtaggagctgtcggagaaccaccggagcgacgctgttaa

SEQ ID NO: 40632 - DNA, 315 bp, Arabidopsis lyrata
  Intron number 1 from transcript 351018 (locus 351018) deri ved from phytozome v7.0 (chr-ID scaffold_6; pos 8069396 to 8069710)
gcaacctaaccattgtgatttgcccaggtaaatgggaaagtgagggaaaaaagaacggtgctttttggtttgatgttcttcacagtttcagcatctttctctgtagccaaaggagtttgctaaagattcttaagtcgctttcagttttgtcttagagattgtatgggattagaaatgttatgtttaggatctgattctcacccagatcaaaggagtgtttatggcgttggatttatagattagttgttaataatgtgtttgtttgaattattgttacttagcttacacttcttgttatataatggatcagatttg

SEQ ID NO: 40633 - DNA, 627 bp, Arabidopsis lyrata
  Intron number 1 from transcript 898770 (locus 898770) deri ved from phytozome v7.0 (chr-ID scaffold_5; pos 18754696 t o 18755322)
gttaagattacattgtctggtatggaagtttttcattgttgaagaaagagaatcctttgtgttttactttcttgtttcttaaccgtttctttagaatcaaactattatatataagaagagtaagatatacagagaaaataacaccccaggaatgagaatgttaatgatctttgctcatgtctaaagtttttaacaataagaggaccacacttcaattcaaagttatagtactgtgctaaagattgaacatgtttacctaactataattaagaagttttaagaatctttattaaaacaaaaactgtaataaagaagtgtcttaattattggtatttatagacataatgtcccctaaacaggatgcaacttaactactttgttctttgtcacttctaaatgctttaattatctttaaatcacttcattggttttgcttatgctaactttgataagtctcatctaatccaatttggaatttcccacctagaagcttctctagttgattagtcatcaaatttcgcaactgattagtgacaccaatggaacacgacttcttgtccttttctcggttcttgctttgtgttttcaaaagaagttataacttataacaaaaggaagaaaggagat

SEQ ID NO: 40634 - DNA, 686 bp, Arabidopsis lyrata
  Intron number 3 from transcript 489387 (locus 489387) deri ved from phytozome v7.0 (chr-ID scaffold_6; pos 11337667 t o 11338352 reverse strand)
aagtacaagcaaccccacagaatttgtaaaccacggtgagttgacatttccacacattgttgttgatcctttcttgcattttagatgcttgaattgttgcctaataagtgaaagaccatgtattcaactttgaaagtatctacttatgatgttagcttactcattcggatggtcaacccgcttttaatatatgtaggcaggtgttggcttacattattgtttatatttatttcatctcaatcagtggaagatccctagtttgtgactgactagataaaatacatttgggggcacatgtctgtagagtatactatgtatttgttggttcaacaggaaaatctttcgtctcatgacacgtagatgttggcttctgatggatattctctatcaaacctacgttgaattaaacctgacctgtatataataagctttcacacctatatggatttctctatgccgaaaagttaaatattttttcctccactttcttctgtaatggtatgttttggcctgcatcttcagatattagttctttgactttcggggtgctataattccattacttcatgattcttcgctctgtttattcgtatttttgttcttcagtgcagtcattttccttaaaagtttgtgcctgttctttcttcctgttcaggattgaacctctggaaccaaactaggcaaca

SEQ ID NO: 40635 - DNA, 596 bp, Arabidopsis lyrata
  Intron number 2 from transcript 489387 (locus 489387) deri ved from phytozome v7.0 (chr-ID scaffold_6; pos 11338551 t o 11339146 reverse strand)
gggtaagtgaggatctttctcttcagtttcttgtttttggatttgaaagtttcaatctttttgtgttgtgttgtgttgtgttgtgttgtgtgtgtatgactgagagataggaagaggaatcttatgaaactgaagtgtaaaattttttactttaaagtctgaatttgatatgtttcttacttaaaatttatgttaggttattgcttatgtgtttgttgcttgcattttaagcaaaaaaatggaatcaaagcatctctcaagttttagttttgctctagatcttttatctcactcaatattgaaatcgttcgagtgttgggagcgtcggatcgctaaaattctcttaatgtcaataccttttggttaagagcatcaaagaaacttcacttcataatatttagaggatcaaagaactttcttgtgtccctttgttgtttgttcgataaaaagaaaaaccatcacttgatctctttatgtggaatctacggttgtagttgcaaagagtcttccaaatcaaattccttagttcttgcatttcttctcactggcgtttttgttgttgttgtggttttgcaacagtacagaggttgttttgg

SEQ ID NO: 40636 - DNA, 160 bp, Arabidopsis lyrata
  Intron number 1 from transcript 899051 (locus 899051) deri ved from phytozome v7.0 (chr-ID scaffold_5; pos 20061581 t o 20061740 reverse strand)
ggtggacaagagattcacgaaagtgtaattcaagatttaagttttgataactttggtttttgtctgcttgagttatggcaaataatgatgtttttcccttttcttggtgtcttttcttcttacagtctaacagcaggttaggagaaaacttgaaggaaga

SEQ ID NO: 40637 - DNA, 771 bp, Arabidopsis lyrata
  Intron number 1 from transcript 897044 (locus 897044) deri ved from phytozome v7.0 (chr-ID scaffold_5; pos 9575370 to 9576140)
aaggatctgttgaagcttgccactgctacacgcaagttcaagatattgatacgagcagggccggcccatgggtaaagcccaacaagccaatgctttaggcatcaaagtttataaataattttaagggcatcaatttttgaagtgtccagtagtatagtggttaagtagcttttgtgtaacctttgtaaccaaggttcgagcctcttattccctttttgcaaaaacgaatttttctttttttttcctaaaaaaatttaatcgatttgaatttcttaacttcagttaccttttatattattattatttttatattagactgattaacattaaattattaactaaacaatttaatttgtttttaaaacctaatttgctaagtgacgacgaagatctggttgagaagctcgattattcaaaattaataaatgaatttgcaagaaagaaagcaacgaggaatatctttcgtgaagaaaaaaattgatgcttctgtatttttcttttggttttaacacttttccttttttatttttttcatgttaacattaagttttagagaattatgttgttttgttatatggaaaaaaaatatggggcatcaattttttaatttgctttaggtatcaaataattttgggccggcactggatacgagatacggtagcacatacaaccgtagaggtgtccaaaaagcccagtcttaaagagtttctaattaggattttggtgcttggaataggttgtttttggtgctttttctttttacattaggtt

SEQ ID NO: 40638 - DNA, 272 bp, Arabidopsis lyrata
  Intron number 1 from transcript 928343 (locus 928343) deri ved from phytozome v7.0 (chr-ID scaffold_3; pos 2859793 to 2860064 reverse strand)
cggcgtcgcgcccattctttgttcaccctcccactgtaagtttcttctcaccaaatttcttgtttctttttttgattttttctcaaattaattttggggcatgacattagcttccgagaagctcttctaggagaaaaagaaacatcgaaactctttaaatttagaaagaaaataaaattatcagagggacttaaagtttgctaagaatgttttggatttctggtcatttttggacaaaagatcaaacaagttctgtcatattttcgcagttg

SEQ ID NO: 40639 - DNA, 527 bp, Arabidopsis lyrata
  Intron number 2 from transcript 948358 (locus 948358) deri ved from phytozome v7.0 (chr-ID scaffold_8; pos 1298289 to 1298815 reverse strand)
tttgactgttccattagccatcaatcaatctcaaggtgaattaatcatttcgaaatagtaaatattgttcatatttttcttttcgaaatagttttatttccttcatttgctcaacatacaaaaaaataaatattataaataatgcatttatatataattagtgtaccaaatttagtatatatcatatagttcttaccatacgtatgcatgtgttatcacatgtcacatatacatagaaatgtacgttcattattcatatattagtttgtatatatatatattggtcatatatataatattagataggtcataatcatataatatggcaaataaattattcaactatcctatattttggaacgagtaacgcatgcatacgtgttttggggaaaagacgttttggtctttagatttgactgtttattttcttgggataaattagtattatttcattattttgactaacattaattatcaaaacatgttccattggtcacaagaagaacgagatataatattatccggtg

SEQ ID NO: 40640 - DNA, 414 bp, Arabidopsis lyrata
  Intron number 1 from transcript 490741 (locus 490741) deri ved from phytozome v7.0 (chr-ID scaffold_7; pos 671477 to 671890)
cctcgaggttttgcttcattcttctttatatgttcttcaagcttctgtgtttgtaaaaagattgaattgtttttataatcgttttagctcaatgatggatttatagattgtgtttgtggttattattgttccaatgacaagactgtatcatgaaaccatgttttgaggttttacttcttcctcgcttgaatttgtgtagttttgaatctcagcttctgggtcgttaaaagattggatttttatctgtttagctcaatggtagattcataagctgtgttttgtgttcaatgacaccatgaaaggttctgtgaggaggtgtgttggtgccttcattgagcattgaaagtttgcaaccattgtattgatttcttatcttgctgtgattcttctattattctataggtgttcaggtgg

SEQ ID NO: 40641 - DNA, 647 bp, Arabidopsis lyrata
  Intron number 1 from transcript 334176 (locus 334176) deri ved from phytozome v7.0 (chr-ID scaffold_1; pos 3403460 to 3404106)
tgaatctgccgccgacgtctacgatcgtgtttctagtaagttctttgaattttattatagtggacattagatacgaataattgatgctttcattacaataacattgaatattagttttgaattcgacaaaacatactataattaattataagaaaggtagtggaatcatataattaatatctcgaaatggtgtgtttggtcaagtctactttcaggactttttgacatgagaaaagaagacgtagtttgattggttttcgagtttgttgatttttttgggggaacgtcttcgtgtaacgtacgtattcttttatgtataaactaattagaaaaatcattttacggaaccaactagctagtgaaagttgtagatgtagactaatttatctagaaattagtttgtaaatttttaggctgtatctttaaataaaattatattattgcagaaaaaagacattcaacgtttaatttttttatataaattgttttttttttatcattttttatcagtgttcatcttctctagtaacattagtatatgtaaagtgagatcaatgtcaaaactttcatttattcaaaatttcatggatgttatataacattgatcgtttaatgtctcacctgatttgaaaggttttctggagtct

SEQ ID NO: 40642 - DNA, 451 bp, Arabidopsis lyrata
  Intron number 1 from transcript 495672 (locus 495672) deri ved from phytozome v7.0 (chr-ID scaffold_8; pos 17212023 t o 17212473)
acgaaagaggtgggtttgtttttgagtccttttttgaatttaatgttacaaaatttactgtgatataagtagacttaggtctgagaatttctgtagttttggtctccatgggtttgtgattctaacttaggggagacttagagtacaaaggcacttctttgaagagattcttagatctcagtgagtcatttctcctgaggacatttgtgattttttcttgagtcagatttgtattggccgattcaatgttttacaatttaggaacttgttgagtcgtttgtagattaggtttcagaatacacaattctagtgtctttgaaggaacccttacttgacaatgtggcttcttatgatcttgcacatcagttataaactatcttttgtgtcttttagatgtcttcctgattggttttttctttttctccgttgaattgcagactctactcacaat

SEQ ID NO: 40643 - DNA, 750 bp, Arabidopsis lyrata
  Intron number 4 from transcript 491017 (locus 491017) deri ved from phytozome v7.0 (chr-ID scaffold_7; pos 1962663 to 1963412)
cacctcctcaggtattctcgttttactgtgatatcattttgaaatagataggataattgttctactagatgttcaatctaaattttatcttctatgggaaattacatggatattttgtctttcatgggtccaagcgcctttttgtttgtctcataagctcttttatgagacacattttaaccttttaggtaaaagccgagtatctttaagacttgtgtaatcacaaaacaaaaaagtaaaaagtctgtcctaaaacttcagttccatgtagaccaaagttcgttcctctttatctccatttttatatgaattttttttttatattaggcgtttaaagtgttaacatataacatttttatatatagctgttgaattaaagtgttatatgtatcgtttcaaatcccttatatagctgttggataagcagattttgtaaatactatgaaaaatatgtgtgcctatcatatttcttgcaatatctcaaaatcgattttttttaattagtagtagtttgatatatagcttgcatatgagtatgtacctatgcttatttgctagctttctttcttgtggtctcacacttttaaggcatgctcttattgtgtctcactacaaataaaagcaacattatttcttctttttgtttgacattggcctaaaggtttggcatatttgcactaaacgtaataaaccattccttattatgattgtgtaggaagaagggtgggtggtttgtagagcgttcaagaa

SEQ ID NO: 40644 - DNA, 252 bp, Arabidopsis lyrata
  Intron number 2 from transcript 949571 (locus 949571) deri ved from phytozome v7.0 (chr-ID scaffold_8; pos 13925915 t o 13926166 reverse strand)
aagaagtggattgattcagggtatgacattatttgtgagatattggaagaaaaaaatatattctttcttttttttataaaatgtaaaattttatccaatcaataaccttttttacaaaatatgcatcttttagtttgaagtatctgcagaactcaaagtgaaaaacaaagtattgagagctaaaacagagcagatcctatatatcataattcataagcaactacgtacgtgagccagaccagagtgtcgact

SEQ ID NO: 40645 - DNA, 619 bp, Arabidopsis lyrata
  Intron number 1 from transcript 490401 (locus 490401) deri ved from phytozome v7.0 (chr-ID scaffold_6; pos 24134532 t o 24135150 reverse strand)
tcgattctagaaccgcatacagtttcggttcccaggtaaagttttcacctttgagatatctttagctttcagttcatgagatctagctggaactgtcttatagactcgcaatgagtagattggctcatgtgacttccatatattactctagatcccatcacatttccgttatggcattcttaaccaggtcttcatcagacttagatcttggatgttcttgattagctctgagtgattactgcgatcataagtttgagtagtccctaaggtttcggttttgagatgtgtttactattagattatgagtttccaagttccaactcaaaacctattagcaatgaatggattggtccgtatcctttatattatgatccttgcccaacttccgatgtgggacataattcccaatatatagtacatccatggttgatcctataaaaaaaacaaaagatggtcaacttgtggatgtagtagcagccatttttcttttggttcttgatcgaatttgaatgattatgtataccatgtttctcagtgtgatgaaagcatatctttttcctgatttatttatcatatccgattagggtttcttcaatttcacagctcgaaggccgcaaca

SEQ ID NO: 40646 - DNA, 767 bp, Arabidopsis lyrata
  Intron number 3 from transcript 912787 (locus 912787) deri ved from phytozome v7.0 (chr-ID scaffold_1; pos 13138411 t o 13139177 reverse strand)
tgcttctggagctagaacattttgctccctagaaggtaaaattcatcattccgctgctctaacataataacagttgatatctgaatcaagatttccttgttttgactgaatcatgacatgattcatttgttggtacttgtgtttgttgaggtttgatgtatatgatgaacatccaattgattgagttctgtatcgtatgtggcgaacataggtcctcttatagagaaactatactaggaagcttaagcttttttctataatataagaccagcaaatgatgtcactcacctctgtgatatcagaacaacttctattggagaccccttagcctcttcccatctctattttagataagtcagtggtgaattagaggcaaaagatgatgacgagtcaggaagaataagtttcaaacaagtgtcattcttccattgtataactctatggaaagacaaaaattacaccagattaattcaagtatcagtattcatcattctcatatctttactagctaaagcagttttctgctgtcttgcagtaaattccaacttttttgtcatatcctttctaaagttttgaagttttagaatatattgctatgatatccttgttgctgcccttataaaccacttctttacctaattggttaaaagatggattcatggttatattctacagcatttgtaaccaaacctagttattaatatggtattcttttcgctctgcttttatatctttgtcttagatttattagccaaaaagtgtgtgcc

SEQ ID NO: 40647 - DNA, 812 bp, Arabidopsis lyrata
  Intron number 1 from transcript 492144 (locus 492144) deri ved from phytozome v7.0 (chr-ID scaffold_7; pos 6580319 to 6581130)
gccgccgggtcttgtgatactctgaggtgagattccaaagtcttgtgctttagaaccctgtggatactctgcttaaatctttgtgagcttttatgtttcgtgctttggtttgaagtcgcatgttcttttggtttggtgttgtgtttgttgaaagttgcgatgagaagttagggtttctcatgcgcttcttttatctgcgaatttcgatgttttgaggagttattgtctttttgttcatccgatgctattaagttgttgtcaaaatgcatgaatttgacgttgattgacttaatttcgagagattcaagtggataaaaagatggggttttgttttctctgaatctgtgtgatgtaaggttaggagatttctctgagttatagggtgtttttgggtttcatttgtccatctggatctttgtttctccagaatgtagaagaagtgagcataaatgatgaacctttgagatttgagattttgttttcttaatgacttactcaaattttcatttagatcttctttttcagatctaaagtgggagtaagtgataattacggatcacgcatgagatctaaattaaattttgaccagccaagttttagattttgttatcctggagttagttttctttgttgcatatatgctagtgtgaattcaatgcgtttaacatgtcctttatgtgatgttgttaagtttctttatagagagagcattaatttctgctatcgtagcaatattaatcctctaaactgatttctcatgcacagcctttgattacaacaagaagtgtttttggtggaaggatctactgttt

SEQ ID NO: 40648 - DNA, 446 bp, Arabidopsis lyrata
  Intron number 1 from transcript 932059 (locus 932059) deri ved from phytozome v7.0 (chr-ID scaffold_4; pos 243593 to 244038)
acgaagctgccctctgttgctcctgtgacgaaaaagtaaccaactttatcagaaaaaatctcattttcttagattaacacttttatctcaaccaatgcaaaaaaaaagttgaaaattttgagtcaatttctagttgcagtgctaaattcacagatgttgaggttattgtaactcgaacatggccaaaaggtgttctctagttgtgttttgattgttaaagaaacatttgagtgattttagcttgtcagaatttgaactttgcatatagcatcattatctctggcgatacactcactctattgaagctggaagagctatgagactttcttttttttttttaatctgcaatggcttttattgaggaagtgatcagatataagaaaaagaaacattttttgtttgtgtgtttaggttcacaagtgcaacaagctggctagtcggcatct

SEQ ID NO: 40649 - DNA, 276 bp, Arabidopsis lyrata
  Intron number 1 from transcript 489935 (locus 489935) deri ved from phytozome v7.0 (chr-ID scaffold_6; pos 20636534 t o 20636809 reverse strand)
gaagaatcccagttgattatctaggttaaaattcttccccaaatttctgggttttgattctaatttttcgatttcaagaattatttgctcttacttgatttcttgttttcgattctttatgagaattttggccttttttctcaaattcgatgttgttcttgaatgttaaagaaagaaatagagattgaagcattggtttttgtttttccattgaaaatcttgtgaacagctgatcgtctaggcttaccattcgttcctagctatcttggacaaact

SEQ ID NO: 40650 - DNA, 890 bp, Arabidopsis lyrata
  Intron number 2 from transcript 924987 (locus 924987) deri ved from phytozome v7.0 (chr-ID scaffold_2; pos 2998432 to 2999321 reverse strand)
acggtaagtttctaatgcattgtcattaagtttcagtaagtggcttgcagatttcttgttatttggtaacgtcattttgcttgggagatgaaaaatggggaaccaacatggtgatgctactttgggtgtatgctttgttaaagataaagtcctatgggaaaagttcttttatatttttttggctataagctaggcttaaagttctctattgctctattgatgaaaagacaccttaccatatcataaaggttgtttaaagtatggttaagagtgtataagaggaggaataacaagtattgctgacgatagatctggctttctattagctatggagtcatgttggaactagatttgaccctaaagcttgatttgatttctgtagttaccctgaatctaaattcgccaaatgggtgatgtcagatatccttgggtttttttcgactttctgaagtttattttgatatgttacctttatgaaagataagatttcatatggccgactcttgagttatgaagcgatgattaaacattggttatattgtctgcagtatggcctacactgtagtgttagactcgcataataagattggaaaaggaagttaacagattaccttatcggcttatccatactgtctatccagtcagatttcttctatgaagttgggctgaagaaatggatagatattttatgacttgagttgtacaagcagatatatgactcgtactaatataagttttgacattgcccctttttaacatttataataactctagtttgctattattttatctttcaactatttaactcatgacctttgagtttgtctgggctaagaatggaatccgttttttcagcaaaaacgaagaaaaggggaagaacatagtaccgg

SEQ ID NO: 40651 - DNA, 578 bp, Arabidopsis lyrata
  Intron number 2 from transcript 474167 (locus 474167) deri ved from phytozome v7.0 (chr-ID scaffold_1; pos 26301772 t o 26302349)
tttctcaattttgcttcttacttctttcctggtactgactgattcttcccaattttcccttttttttgttttgttgttgtcgtgctcttagggtttcttatatcgaaagtttggttttttgattatattgtcccgccattgcatgttgttgttgttgttgttgttgttgttgttgttctgttctgtcctaattgcttttctgggtttcggaataatcttgaattggagttcttttggttcactccgaagagtttcggtgatcgtccactagaatttgatgccaaaacattacaaagtttccaaagccaccgcccacttgaaactttttttggtgattataatttgtttatttcgatttagcattacttttacaatatgcaagtgattctcttcataaagtatgtagctttaccttgtttgatcttatctggaagctcttactcttttggtaatcttagtttcggatttgcctttcgcgataacagagctctttgtaaaagttatgcgttttagatgattaacattcctttcttgtgtatgtcaggctgattagaaacttgaccgcttaattcttcaaa

SEQ ID NO: 40652 - DNA, 532 bp, Arabidopsis lyrata
  Intron number 5 from transcript 474167 (locus 474167) deri ved from phytozome v7.0 (chr-ID scaffold_1; pos 26303092 t o 26303623)
acgagaggctgatctatcaggctgctctacaggtattcatccttatctcaacttttgactttccgattcccatcttagttttccttttgtgcttctattctatgtgcaatgcacctctctctttcaccagctgtggggttattggacttcattataatttataaagtattatgacagtggtagtgaacttggccattgaatgattggaataggctcgttccttcctgtttgttttatgtcagaaatgagtaataggttaataaaggttcggatgtctcaatttctcattgatgcttgagacctagtaacatgctgaatttctctgttttagaccatgtgtgtggaagcattttttttcttcctttttgagaaacgataaagaatatgaacactcacttttgttgcattcgtttcttatttcgcactgttgcatcaaggttatgatttccatttgtaagtgcttaaaatactgataattgagtacatattttttgcaggaactgaatcaacccaagtctgaggtcgatttacc

SEQ ID NO: 40653 - DNA, 816 bp, Arabidopsis lyrata
  Intron number 2 from transcript 479725 (locus 479725) deri ved from phytozome v7.0 (chr-ID scaffold_3; pos 9806492 to 9807307)
gagaagaaactatctttctcaataaggtaaagtccctctttagaactagctagcctcaaaatacaaactttaaccatttctcaatgttaatttcactttttcttatctgggtgtagttaaattcttgttcttgccttaaatattgatttacaagttctaatttctattttaagaaatacattttttttgtgtgttttgttttgattctgtgatagtaatattttatggctcacgtactgtgtgtgactctgctacatttagcatttaatgtcttctcaacaaattaccttaaaatgagggcacacaaatctctcttttgtttttcctgtgaaaccaataatcactaatttggaatctgtaacctgatttctctgagtatcaatggactcaaaagttttggttaagtgagtaatgaagtaagatgtctccatcatcatttattgcattttttgttcttatacttgttctctgactttctcccatatttctctgtaaatcaaacaaaattttgcccctctttagaagaagataagaggctttgtttggatttttcttggatactattcacttcccttttgttcttacttgttattgtgtgacttatgagatgatcttaaatgattggagacacagagacctttgtgtagttgatacttaatttccttcctgtcttgtaataactgttgcctttattccttcacaaaacatggcttaaagtttttagcttttttcttgtgggtctttttgtgttcttgaagaaacttactcatatgacttacttttgtgttgttttgtattttgactgcagcaaatcat

SEQ ID NO: 40654 - DNA, 476 bp, Arabidopsis lyrata
  Intron number 14 from transcript 476721 (locus 476721) der ived from phytozome v7.0 (chr-ID scaffold_2; pos 16858143 to 16858618 reverse strand)
cctctgtaccacggaagcttcgttcaggtgcgttgttcgtgactcattgagaaaacttgtacaaactcataactttaatgtttttttttttttggtttttcctttgtatagtcgtgatcgttaagtgtgtcagtaaaacaactcagtttcttagttgttgggaagattatggtatttttggcttttgaatctgtcgagatttttgattatgtttcaagcaaacccttttgcttttttttttttctctttctcactttcttattatggacgcaagattctgctacttgtcttttatcttcttttttcttctacttattaaaatcaaaagtgatcaatcttcaacttatattattattttcatcttctttcttttctttaaagcttgtctttgtcatctccaattcaaaactttttcacttttatctctagtttgtgaattctttagcatcttcttttgttcacttttaattacagcc

SEQ ID NO: 40655 - DNA, 526 bp, Arabidopsis lyrata
  Intron number 1 from transcript 940659 (locus 940659) deri ved from phytozome v7.0 (chr-ID scaffold_6; pos 4763613 to 4764138)
tcgggttttcctcttcggcaatacctgtaagccactttccttctctatcttggtttaagattgtcgaaatgtagaggaggtttgtttggtaatggagatctaatctcaaattggttttaaaattgcaactagtgtgaaaaaatggaaactttgctcttgggtttgtcttgctcaatactgatgagtgtagtcactctcctagcttcagattccactaatctcatcttacaaaaatcaaattaattcaatgatcttctttcttcttaagctctttgctgttttacttgcgcctctcctcttgttgtagtaagagttatgtgtatatagagtaaccaacttcgtgctgttgttatttatttttggctttgactcaagttttatggtttcacaagttctactgtaacatgttttctgtatttttgggttacaatgatatctatctagattacgcttctatgtgtttaagatgttcttgggaatttttttggcagaaacaaaactttacgtattcgtcgaggtgtttttc

SEQ ID NO: 40656 - DNA, 650 bp, Arabidopsis lyrata
  Intron number 1 from transcript 481422 (locus 481422) deri ved from phytozome v7.0 (chr-ID scaffold_4; pos 4744287 to 4744936 reverse strand)
agagattacaagatccatgtaagaaacccatctcagatattgattttcatcaaccaaaaaagctactcttttttgaaacccagaaatttaattttcaccttctcaatcacaaaatagtttttctattttatttatagtacttttaatgcagtttcttatgtatatatgggtcaaatttggtttctttagaaaatttcttggtctaattttaccaaagttctaatctttttttttttttgtttttgtgcaaaaccaaagttataatctttgcatgttgtttcttcatagttcattttttttttaatatatacatttttttaaggatgaaaaaattaacattttcttttgtccgttgcaaatatttctccgctgatttcaagttgaggaatttaattatggaatattttggcatattctttgaaaatctctcattctttggttcattctagataatttaattttgttgtataaattttttttaaaaaagagtaactagagtaccaaaaagtacggtactttgattaaaaaacttatctgatgctaattaatcggcgtaatttatattaatgaatcttgttaagaagttgtattattagtctctctgatgagtttttttattttatgaaacagattgaagaagaaaccgtaaa

SEQ ID NO: 40657 - DNA, 709 bp, Arabidopsis lyrata
  Intron number 1 from transcript 480210 (locus 480210) deri ved from phytozome v7.0 (chr-ID scaffold_3; pos 14516582 t o 14517290)
agcttcaaggccttcgtgtcggcgtcaatcttgaggtccttccttctctctctgtctttcgcatctatgttcaacaaaactttgaatttcttcttacatgggcttcaagttgtaaagtttgaaacttttgaggattatggatttgaatgtcggagctaagtgttcggtttattaggcataagttacatctattgatgcattaacttttgcatccaaagagacttgttttgtgttgttgattgagtcatgagatgttatcactgtctttttttcgactgtgctgttatgtaacgaacccgagaatgattactacgcaaagcttgtcttgaagttataaagtttggaactttatggataatggatttgagtgtggactgtgaagctaagtatagatggtttgtctattcatgcattcttgcttatgttcttgtgctttttgagccatgagatgtgtcatcattgtcacattttttttgaattttccagttatgtaacgaacccacaaatgattacattgcaaagcttgttttgaagttgtaaagtttgaaaatttatggattatggatttgagtgttggagctaattatttggttttattagagatggttcatctattgatgcactcgcatattttttgtgctgtttgagctatgagatgtctcatcattatcttgttttggacttgtacagttatataacgaacccacga

SEQ ID NO: 40658 - DNA, 496 bp, Arabidopsis lyrata
  Intron number 1 from transcript 484129 (locus 484129) deri ved from phytozome v7.0 (chr-ID scaffold_5; pos 665519 to 666014)
cgttcacgccgtcgagattctcggtggtcaacaccgtaagtttattatatatatttttttctcttcaaatcttttgtgtctttgtttgattcaaatatcttaaaattacgatttttatttggatataactaaaaaagattgaaaatttctcatttgttttcgtaaagaatcagtttttgaaccaagtcttgatacttttgttactttgtttcattcttatcttaaagtttgggttttgctttggattattgtaaaaaagtttgagatttccttattgttttaaattcatcatctttgtcaagtttctgaggcaagccttcacgcttttgttgttttgtttcattcataaagtttgttttttctgaatatttctaaaataataatctcattgtgttttcatgaaaagtaatcataaagaatcatcataggcacctttttgattttgttgttggttgggtttgatgaaacaggagcaacaccaaaacttgttcttaag

SEQ ID NO: 40659 - DNA, 452 bp, Arabidopsis lyrata
  Intron number 4 from transcript 484824 (locus 484824) deri ved from phytozome v7.0 (chr-ID scaffold_5; pos 10524384 t o 10524835)
taagtttgtgtttctgtttggatctgttttgcaagttatacgccaaaaagtgacttgctagtagttttggtgaaatatatcatgatttctttttgtgtggttagtgaaactttggcagaatgttgtaatccactttgaccagctcattgttgtattttgagtcatgaatgttctctgaggttgattcttcgtttgtttacctgtttagttaaaaagcccattccaatttgttagtacatttgctccctatagttttggggttgtttcttcttccattgttcattctttcataattattttgtttgaacttgtttgcttgagccattgacgtagatttttgactgcaatgatctcactaacagctatcacatacttattttctgttgccaaacacaagggatctgtctattatctgcaatgacatcgtgttttgtctagttcagattctggtt

SEQ ID NO: 40660 - DNA, 250 bp, Arabidopsis lyrata
  Intron number 1 from transcript 328542 (locus 328542) deri ved from phytozome v7.0 (chr-ID scaffold_7; pos 4146336 to 4146585 reverse strand)
ctgcagagaaaactgttcacgatttcactgtaaaggtatgtttctctttcttaatttatctgaagaagaaaattaggtttttgtttcttcgttagctttaaatgctatcgaaacggaagaatttggtctgccatcaaaatatgatttttcttaatctcactgaattatgtagtactccttcctaactaaaacctagacttggagacataattatgttttgttttttaataatgactgggacagtacatag

SEQ ID NO: 40661 - DNA, 414 bp, Arabidopsis lyrata
  Intron number 1 from transcript 495327 (locus 495327) deri ved from phytozome v7.0 (chr-ID scaffold_8; pos 15209244 t o 15209657)
tctcgacaattccccagtcgtcgaagaagctacaggtaaaccgatataaccatcttctcaatttctcctcttctcatcgcattatgttcatacctcgccgtttatgttttgtgaatcgagatcgatttgttgtttttgcattccagaatcttggtttgtttttttttttttttttttttgaattatggattacacaaccgaattcaatcttaatcttccgtgaactttaaccgaatttttctttgttcgtgtttcccttgatcgccacgaaagtttcagattttttttttggattttcttaaccgaatttagtttaatctttgctgatgttctgtttcatgccatgttctaaaatattgttttttaaactcatcaccagcttgcaatttgctcgtgttctcttccatcgttcca

SEQ ID NO: 40662 - DNA, 563 bp, Arabidopsis lyrata
  Intron number 2 from transcript 938787 (locus 938787) deri ved from phytozome v7.0 (chr-ID scaffold_5; pos 18690727 t o 18691289)
cttacggtaaaactttcttgtttccatatgttttcctctttttattaaaggtttcaaatttaaagtctgattcaggttatttctttcaaattaaatttgtacgtaggttgtggttttatatcatcatatgactagttttacattcccccccaaccatgaacttttcctggctttagctctcttcttcaaaatatagattggattcttaaataggaactattggaatctccggcttctgatctcttatgctattgatgttattctattttgcctatttaattttgactttgatcaatctgctgccataagtagagggcctaggcctacattattgcacggttagcgcaagcatactcccttaattagctgctattctggttcccactttgctcttcttttgttattccaatttacgggctcattaagtacctatcatagggtttcttagtcccattttcatcctagtcttccgatacttgttgctttacactttaactcgaatctcagttactgaaattttgtttctaggtgttcaactgttttgggagacagttctgtttaca

SEQ ID NO: 40663 - DNA, 344 bp, Arabidopsis lyrata
  Intron number 1 from transcript 486713 (locus 486713) deri ved from phytozome v7.0 (chr-ID scaffold_5; pos 20655878 t o 20656221)
caccttgattcgaggagctgactctaaaggagctggtacactctctctctctccttctctttcgttcttcttctttgagattcgagaaaacgcttgaggaggtgtttccactagcacattgacctttgttgtccactattcggtctcgattttgactctcttagttggaatttgaaattaatggtgtttgattttgttctgttgctcgatttcgtagacttctttgaatctttgctggtgaaaaaagatttggtaatactaagtctctttgtttgattagtttttgagtgtattgatgatgatttgtgtttattttcaactctaatttggtgcagtgtgcttag

SEQ ID NO: 40664 - DNA, 945 bp, Arabidopsis lyrata
  Intron number 1 from transcript 913031 (locus 913031) deri ved from phytozome v7.0 (chr-ID scaffold_1; pos 14706115 t o 14707059)
tgggaattagatatcaatccaactgcaataggtatgtaagcctcccgttaaaattttgagataattgggtgaaagacgttactttttgacttaattaaattttcgatgttagcccatttggcccaagacaacaataatacttagctactctttcttccgactataacctcacgcgcccctctctcttctaccaaatagtagcccaattacgcatgacaaatatcttgctaaagaccattctcgaggatttaatgcgtgtctctttattctgactcttgcgtgtccaacatctctcttctactacatctcgacttttcgctctcattttctgcaagaattttcatcttctgttacgacatggagagtgtttctctaagtctttctcagttttgttccatttgattttttccggagtttcactgcagtttttggaatttttggtcgatttggtcgtattttttctctttcgccgtcattggttttgtagccactgtttctccgtcgtttgcaaaaaaaccttgaatatctgtatttctcgtttcttttttccaagttcttttacttcttcacctattttcttagatcttatttggttatttatacatctatatagatctttacttttctaattgcaactattaaatctattgtcggtccattaactgacgatgatctgtttctctaagtctttcttattttttttctctgtctctagctatctatattggtcgtttcttctttccagatccacttatgtctttacctattttcttagatctggtttggacattcaaaaatctgcatagatctatactttcgtgtttgcatgttcataagtttttttgcgggtccattaactgttcacccccctcgtaatccacatccagcaataccaaccttgttctgtctccacctgttcatgtttttagcaatccaagttaatac

SEQ ID NO: 40665 - DNA, 330 bp, Arabidopsis lyrata
  Intron number 1 from transcript 337406 (locus 337406) deri ved from phytozome v7.0 (chr-ID scaffold_1; pos 28000249 t o 28000578 reverse strand)
tttagttgcttctgctgtggaaaaggatttgatcggtacgtgtgagttttatcttgttttgtttggtttatgggttttatctgatttctctattgttgtgttcttccaaaatttgttcttggttttatctatttagctattattcttaattagggttttgagatttatatcatttctcgagttctctcgaatgcttgaatctaggagcctatccatgttcaaaatttggttttctgtgtaaagtttggaactttcgaccaacaatctactgtttgataagcttaagtttcacaaattgcacaggcaaaagaaggtgaaaacggagccatc

SEQ ID NO: 40666 - DNA, 502 bp, Arabidopsis lyrata
  Intron number 1 from transcript 473646 (locus 473646) deri ved from phytozome v7.0 (chr-ID scaffold_1; pos 16818069 t o 16818570 reverse strand)
ggccaaactcaacgagcaagctgagagatacggtaaacaaaagaccgtacttgtttcttttatgtttgaaatttctttagtaatcttaaaactatgttccttagatctgtcctttcatacttttgtctgaaaatgtaatgatcgtaaaacattttttgatggttacttagaaatcaagtaaataaaaagtttgtgaacgagttaatttgtggaatcttctaattccatcagtttgaatttttttttaggggtttgtgaatttggatgttattctttttatagtttttctctgtttccttgcgtaaaatcggatcttattcgattattgtttacgcgatgaaaaatgttttaaatgtaaacttctgacatacctcatagtttggtaactagaacaatgggattgttgtgctatatgatatagttcaattcaatcaatttacttttgtttgattaggcgttgaattgagtactatgctttattgtgttgttcttgtaaacagag

SEQ ID NO: 40667 - DNA, 729 bp, Arabidopsis lyrata
  Intron number 2 from transcript 327471 (locus 327471) deri ved from phytozome v7.0 (chr-ID scaffold_6; pos 23072177 t o 23072905 reverse strand)
gtttgctttggaaattcgtcgtcgtcttggatttggtaacaatttatattctctgcatgatttcatttgcattctatattttaagttcgtttggttattaaagtgatgttattatctggttaatttgtggatattaacaaaggatcctaaataagtattattttaagatcttcattgaaatttttcatcacatattactggcgacaaaaatgcaatgaaatcaacatttctgtggcaaaaatttcacaactattttgcagcttttacataatgattttctcgttatactaacttactaagttttggtccaaatggtgtaattcaagaattgaagattttgatataatgtatccatatatgatatattgatcattagttcaatttgtgttacatgaccgaccacctgaatttttttccgagtgtactgttttgttcgttttttgtttttttttttgttattattatcacaattcgagtgataataatatgtataaatgtgtataaatgtcaaagacgatgattgataactgatggtggttaatttgcgtttatagggatagatgaattcgttgggtggaaagttaaaacacttagattgaatgctacctaattagtattcgtgtcttaataaaaatatttcttatcgtttgttaggtgagattagctaaaataattaatatgtttaattttaattgtgtatcaattttgttattaaccgtgatgaaggtg

SEQ ID NO: 40668 - DNA, 587 bp, Arabidopsis lyrata
  Intron number 1 from transcript 484344 (locus 484344) deri ved from phytozome v7.0 (chr-ID scaffold_5; pos 2487833 to 2488419 reverse strand)
gctctttcttctcccttacgctcctgtgagtgattgattaccttcagattcatagttcctgaaatttagccatagttgtatgtgtaaattttgctaaggtttatgtagaatcatcacattgatgatgaatcttgaaagtgatttggataattttaggaattgagagccatttcaatttctctgcttgaatgttttgagaatcgaataagtttgctgttatatctagcttatagtctgaaatcatagtcatagtgtaacaccccggtttcaggaaatatggtggtgcatgcggagatctatgtggttactaatttatcttgagctacttgccaacggattatgtgaatgtttttggaaggtttatgtagaattcaaattggtgaatcttgaaagtaatttggatgttggatgattttaggaatgataactttttcagtttctctccttgaatgtttcgagaatcgaatgagtttgttgttatcttcaagcattatcttagattatacattttgtatggtttattaattagaaaatagtctctttgatcaacagggagatccagtttgggcaattagttcagagacagt

SEQ ID NO: 40669 - DNA, 506 bp, Arabidopsis lyrata
  Intron number 2 from transcript 925966 (locus 925966) deri ved from phytozome v7.0 (chr-ID scaffold_2; pos 12311812 t o 12312317 reverse strand)
gataggcaaattctctcacggtatgcttcgatcttgttgtaattctaatactgtaacttagtttcacggaatcttctaatacttattggtaccggaacactgctaagatcatcagatttctgttcataacttgtaatatcgtaaattactggtctgtacgtgaattatgttcgaatcaacgcatgggaaagctagtgtttatttatgtttaatgtttgagtatgcacacagttataggtcccgtttatttatgttttcattcgcagtatgatgattgtgtgcatcagaggtaactatgtgtttgctagtatttaagttcattgtttgtgcttgattgaaacttaaaactatgtatgtgtgcatcatggagcttagggtctaaactgtttgctgcatatctgctggttgttaatagcactctgaaaaataagttgcatagttctgaatttatcctttttctctggtatttaggtttcagagacctcctggaccaattccgtcgtcaa

SEQ ID NO: 40670 - DNA, 271 bp, Arabidopsis lyrata
  Intron number 2 from transcript 480961 (locus 480961) deri ved from phytozome v7.0 (chr-ID scaffold_4; pos 148795 to 149065 reverse strand)
tctcaaacgagctggtgctattggtacccgtgcaggttctctcttcttcttgtaattgaatcgatttttgaattgttaacaagctttttataatcttcttgttccatttacagtttctcttattcacaaatgtaacgtctcttcactcaaactagctttaatggattcaataacagttactaatagctttgttttatctgaaacttgttccctatcaaaatgatataatctcataatggaattggttttctctcactggatgatacaggat

SEQ ID NO: 40671 - DNA, 813 bp, Arabidopsis lyrata
  Intron number 1 from transcript 355578 (locus 355578) deri ved from phytozome v7.0 (chr-ID scaffold_7; pos 18847155 t o 18847967)
gattttgcttgaactctcggtattctcaaaatcccccttctctctctctgtgttcaatcatgtgcatttgttcgctttgtggaacgaagactttctttggactaatcgaaatattggcttaatagacttctcaaaactcttgctatagggacttagtcttgtggatctcaaagtataacataagacctttaagcatcggttatgatattcggtttcttctgcaaggcaaagattcaagttgagtgtatgtagtatagactgattttgaaatggagctgacgaattgtcacaattagtcaatagggacaaagagtgtacaaaattaagtagtgctggttctttgttagtaaagagatgtagcaatggactttaagtgtgatgcatcttgtttccatctttcagaatcaattcgtttgatgtccttattttttagattactatcaaatatactttgctttcgtctagacagagagcatgagcatgtaaatagttggttgactgtgtaatttgattagacattagaaaattgatgagtgataaagtattccaaagacaaagctaaagaagccattgcttttttcgtggctgtttctgctattggccttgttttctattagtagatagcagtctagtttctatatgaattcctgaaacctgtcatctatattacataagttgtttggtgctcctgcgcttttctcttgctatactggtctgcatgtattcctagcacattaaaaataattagctactacttcttctttttttctgtttgcaggaaccaagtttgttatcacgtgtaaggatatacaa

SEQ ID NO: 40672 - DNA, 816 bp, Arabidopsis lyrata
  Intron number 2 from transcript 479752 (locus 479752) deri ved from phytozome v7.0 (chr-ID scaffold_3; pos 9996920 to 9997735)
gataccgctccgaccgcgttttcttctctaacaaggtaaacgcttaacgttttgggacaggtgggtaataataatacactaattgaccggaattaagtactaatcaaatggtttttatattcgacttggaattttatatagtattttctaactaatcttagattgctcagaattttccatgtgcaaacgttatcataaatattcttaaaccgtaggtcattcttaatctttgagtatctatgtatttatttatttattctctggataagtagagagtattaattaatacatttaagagggtactagttagtggttggatgtaaggttatctcctaatccatatgacttaaatctttaaatcatttattttgattgactagagagagttttggaatattcgtgtacgtgtgtagtaaacatataattgtaccgaagaatgaaaccatctttacaagtcaccatctccctttattccaataatttttctaatctaatagaatctttttataacttgataacgacaaccatttttagttattgatattatattgtttcatctttctttctcatattttattggatttattcttatcacaaaccttgattttcttacacaataaagtggatgggtctgactctactatagagtcaaaagtcaaaaggcataatatgggttggacatttaatttattttttctctagtagttaacctaaaataaacccatagaataatgtatggtgaagttattgttttactaactttattatattctcctttaaggcatatcttccaagtgaaacaccggagctaatcaa

SEQ ID NO: 40673 - DNA, 785 bp, Arabidopsis lyrata
  Intron number 1 from transcript 928450 (locus 928450) deri ved from phytozome v7.0 (chr-ID scaffold_3; pos 3225394 to 3226178 reverse strand)
tcctgacgagaccgctcaacgcttacttcttcagggtataatctcgaccttctcttcacttgtttcattacctgatttcttttctttgattggatccacgacgggagattgtatttatatttcgatttggggttttctctaacctttaacttaggttttagcatctgattttctcctttgattttatctgaattcactatcatcggtttcttcgcctgttaagttttaagctctctctagttgtttatgtgatactattgtgttgtaaccttttttgtggatttgatttggaatatccgggaatcaatttacttccactagtgatgtgtgaaacaaagggtattagcttctaactggaatttttcttagtggttttcctaggaataatacttttgctaggtatgagttctaaacaaaggctagtgcgttgtagatgaatctactgcttagaaatccacattttcatcatcttaccagttacctaaacaagttgttatgaattaggattttttttttaatctatgatatacatgtggtaccagttctaaactcatgtgctcgatctgtctgtggtacgttggttatgtttatcctgttccagtaaccatgattttcttggcatttgtggtattgcatcagaatttttgagtgcttcatgtaacctgcttgtgtaccatgtaatttagagattaggatatgtttcatgttatgtttttgttgagtttgtctatacaatcttctgtgctcatgcaaaaaaattgtttatgactctgcagatccattcc

SEQ ID NO: 40674 - DNA, 700 bp, Arabidopsis lyrata
  Intron number 1 from transcript 494529 (locus 494529) deri ved from phytozome v7.0 (chr-ID scaffold_8; pos 3208157 to 3208856)
tcaagtaagacttgcccaggccaaacgtctccaacgtaagtatttaacactacttctcttacttttgtagtcagtcagttttcttgtgcttatgtattgaggtttaaatacgagctccccacatccatatatagtaatagcgttataaaatagtgatatttaagaaaataacaagttcatgcatacgattgcttagttttattcgtggacatctggcttggagtttttatttggtttaattcttatcatctaaagttgcagaaggtttgattcttttccatggtatcacactattttttgtatggacatctaatttatcgaatataattgtttatcttttatacaagtgtttgatctattatattggtattgaaagtgttaaaatagtattatatcaatgttcgagactatctaccaaatgaatatattttttttattttcaaaaaataatgtaggacactgtagcaaatatttgtgtctcttttttttttcctttctaatagcagctctctctagcaattatcatttacctaaatacgtaatatttttttcataattacctatttaccttgtttactctatacatatttttctgttgtagttttattcatatttattgtttgaagaaactaatcatacaatttttggtgcatacatattgttagaaaggaacgaattgcgtttggattgtgttcctctt

SEQ ID NO: 40675 - DNA, 694 bp, Arabidopsis lyrata
  Intron number 1 from transcript 322443 (locus 322443) deri ved from phytozome v7.0 (chr-ID scaffold_4; pos 23275284 t o 23275977 reverse strand)
ttctaagaatcttcgacgacactgatttcaggtttaattaacactagctcctctgtttttctttttctcaagtattgtttagttaccaaaaccctacagctagcttaaggatacaaattgtcctttccttttattaaatcaaacaataaatgaattatgtatgtgccaattaattaagatcctagctagtcgtcatggtcgtctcgtgagagtatcaaatgtgtgtacatatacatacaaacacatatgcacaaacatgtatatacattgcccacttaagtttttctgtgaagaactactccagctgtatattcttagggacagcttcaaactcgtcaatatacttttgtctgaattattattattattattcgtataaaaataaatatctcatggggttcttgtgaaacatctttttttcttttttcttttttctaccaaattcacaataattaaatgtttttcttttttttttttatcaaattggtggcagacatagaaaaaggtcgtggtatagtactcttgttgttctcgtaagcattctaataacgaaggtccctatataggtgcatgtggttttatgttagaaatattttgataatcaaacacagagatcatattaattaattaggggtttactatatatgattgagttataggaacgtgttgaaggcgagcatagaagttccgggga

SEQ ID NO: 40676 - DNA, 568 bp, Arabidopsis lyrata
  Intron number 4 from transcript 483406 (locus 483406) deri ved from phytozome v7.0 (chr-ID scaffold_4; pos 21045782 t o 21046349 reverse strand)
atcgtaggtacgttagattcatattcccgaaattggcttttattgaaacgacaatatctgcgaggttcaatttcatcattgttttgaaatctgtgacttacaaaagcaatggtgttgacagatccacattgcaattttttttgttgaattttggaacatacattgttcttctttgatttcaaaacaagaattagaaaattcattaatcataatagattttgctgatgtgatgatgaacagatgaaaggaatgtagtctcgaattgtttaaggttataatgattcctctaagtgaacaaaaacaaaagcagaaaaaaaatcagaaagatgacaaagctgaagacttctttttgtctttgaagcttctatttttggtgggtccttttaagacaatgatttcgattcttggattttgtctcaagaaaaattttgttcttctctttacaatgtttttgattgtgagcctgcgttgacttaaatcatgtcatattttttggtttctcacggttttatttattgtgccaagtgatgcagttgcttgttacggtggattgatatttggagtattg

SEQ ID NO: 40677 - DNA, 900 bp, Arabidopsis lyrata
  Intron number 4 from transcript 492221 (locus 492221) deri ved from phytozome v7.0 (chr-ID scaffold_7; pos 6883018 to 6883917 reverse strand)
ctctctccgagaaggtacctctcttaaccgaaacaaaccggcgttgagttcttttttgttttttgtaaacattttgtgttaattacttcaattattagattcgttaatagaccaattactctctcttttttttagtatcaattagtaaataaatgtattcgactttgttatactataagtatatacacaaataattgtttgttttgtggaaataccaactaaagtctgctaattaaggcattgcctcggtcgataaaaacttttttttcaaacctataaacgacatttaggtcgttaaatatagaaatttcttacatgagtcgttttttcgcacatgggttcttcaatccgtaattccgtattagttttaatgtgagtaacattaatggcttaatccaattttaaggatgatttcattttctgttaacactttttttttttgaattatcatttttcaagttcaataaagagattttttggcatgcgtccatctcttctcattacttatttactttctaaccgtattctagtagtagctggtgattatattcttcatttttctgagacactaataaagtatggggaagtatagatccctttattttccttttataaaatatacttcggtcattgatgaaaaaataataaatgcattgtctttaattcggttatagctgcattgcattttgcatttataaggcggttgagtttgatacgatttaattttgacctatatttggttctttaaagctagccagccacaaaacggtttaatcgcttaaatttaaaatttaaaatgtgatcaggtaaatccagttgatgttttatgataatttgtctgggttactggtaacttttgttgcaggtaggaaatttcttgcactacataagccggttcat

SEQ ID NO: 40678 - DNA, 1000 bp, Arabidopsis lyrata
  Intron number 2 from transcript 910830 (locus 910830) deri ved from phytozome v7.0 (chr-ID scaffold_1; pos 4288976 to 4289975 reverse strand)
acggtaagttcgtaatgttgtcttcgttttggttaagcttcattgagcttgtgtccatacgtcttgttgttcatgtgcttttccttagatgataagaaaaattaccactctagacttctctcaaggatatttcttctgctagagaattaattagctgtttctagcattccttttcaagttgtatgtggctgttatggaagtagttatcttgagggatatttctgtcactgttaaatggatatgttaaatatgagggaatcagcatgatgatgtaaccttgcgtgtgtgctttgtgataaagataaagtcctacaaaaaagctagaggttttattgatgaaaagtcactgccatgtcgtaaagattgtctaaacactggtaaaggacgagcaaaaagagataatgacaagtattgctgacgctagattagtctttatattagctttcgagtccatgattgtggagggaattgttggaaaaggaaataagcctaaagctttttcttaattatttctgtagttatcctgacatagaagattttacttttatgggtgagggctgaaactgatccctatactttttggagtttaagaaaattatattggcgtgttatctttgattagaagttactaaaaatttatggattttttttaaatgattatattgctcgcagcatgagttacatacatcataatgttaattgttttttgtttgcataataaataatgtggaacgaaatgaattaatgaagtatattgctttattatcatcatatttccaactccttcgtatctctgtcctgtcataattgacttgagttttcaatcagatatatgatgtaatcaaacatgaagttccaaatttcttcctttttcttttcattagtgcttgtttgccttcattttatctttcactaaatatctatcatgatctttacgtttctcttggctaagtcgggcatctattttcacagagaaaacggaggaaaagagaagataata

SEQ ID NO: 40679 - DNA, 431 bp, Arabidopsis lyrata
  Intron number 1 from transcript 333508 (locus 333508) deri ved from phytozome v7.0 (chr-ID scaffold_1; pos 318612 to 319042)
ggcgagatcagtttcactttccacagcgccggcaggtaaaaaacctacttcccccgtcgtttgattctgtttcatacattataaattataagatcatcttataatcaaaaagaaaagaatcttataatcaaattgttagagatggtcactcggtttggtttggttatgctccgttatttggattttccgttttatgaatcggtttgatttttttttttttttttaaataaatcaaactaaaaccggctaaactaactataaacaaattttggttcgctttagatgtgcaacacataattagcgtttgtctcttttcgtttacctttagtgtacttatattgtaaatcaaacacaatctttgctaattaattatatgtaatgataaaatttaaatagggagattggaaagggaaagataccggacccgggtt

SEQ ID NO: 40680 - DNA, 442 bp, Arabidopsis lyrata
  Intron number 1 from transcript 894539 (locus 894539) deri ved from phytozome v7.0 (chr-ID scaffold_6; pos 11877121 t o 11877562)
aactggtttgttattctaatattcttggataaagatacgaactttttcttgcaattgaacggaaaaatcagaactttttagtgtttttgaatgccaaaatacaaactttttgaaatttggttgttcatgtgaatgattttagacatgggtttgagttttttcgctctatgattaactttttggtggacaatgtttagattttagtgttagtgaatgcaaatttgttcatcttttaagtgtttctgttttgtgggtgttgttctgattgtttaaaagaagaaatagatgaatcaattgtttccctaaagattggtgtgaagttttaggtgaagagaaagattgatttggtttatggtgtcttttaagtgtctctcttccacttttgtcttcatttccattagttgcaatgcaatttaaaactttaatctaaaatatcttttat

SEQ ID NO: 40681 - DNA, 1005 bp, Arabidopsis lyrata
  Intron number 1 from transcript 893867 (locus 893867) deri ved from phytozome v7.0 (chr-ID scaffold_6; pos 8190893 to 8191897 reverse strand)
tatcccttcttcctcgcgcagctctccaccttcgggtaacaaactctctcttcctctctctttgaaaatgcctaaaataagatttcagattttttggttttgagatttcgatttgagctctcttttgatgatctagcattcattgtgttcaattgttgttaccgtacgtttggaatcccagatagatattggtatgtaaaaatgtaattatcacaagattctctttaacaaatgattgatgggtcatagttggcgacttgtttcaattagatactttattattatcttcacctaaaaaatatttttatgcgcatttaaacttttatctcacgtgcgagtatgctctgcgtcacctacatggtggctattcgttttaattagtgatttttttgttggatctgcggtgagtttaataatgaaacgaaacttatcttgtgccagaatatttgaccctttcttaattcatttaaccacgtgtcaggcacgtgtctcactctcttttgcgtatgggctcttttgctgtgtgcaagttacaagtatgttgattgttgccttcttgcatcagatttttcaaatgtagactatactaacgagatcagaaaatctgttcacctgtttatacagtgtatgagatagacacattatattttactctgggactgccggactggaatgcaatgtatatattttagagaatgtatatggttgttttctgcttgatgcatccgaaatttagtccatagtaataatgtgactttagccgtgtaatttgtcagtctttgatccttctagagataaactcttgtactgttgaactcacccactcatgatctcgggcttatagaaagagaaattaagcttagagtttgttttaattgttcttcaatgtggataaacccatagtttcgcggtaatattcatcttactcgatttcctggatgtatcttgtttttatttgcacaaaaaaatataacatttttcttttgctatgtcttttttgcaggt

SEQ ID NO: 40682 - DNA, 469 bp, Arabidopsis lyrata
  Intron number 1 from transcript 483125 (locus 483125) deri ved from phytozome v7.0 (chr-ID scaffold_4; pos 19836969 t o 19837437)
tatcagctctctgcaaacacttctccttggatcctgtaagtgaagatgtcaatctcaaaagcgtcaccttttttttcttctggattttttttttttgcttggtagctgagtgtatgtatgatcatgttttggattagttagtcgggaaaattcgaaattttgctaattgggtgctgatttaattataaagatcatgttctatattatgttaatcagtgtacacttgtgtatcaagctggttatgaaaaaggaagaaactttagaaattaggcgtttataatcttcttgaattgggtttgcatggcatttcattgtacactgtgttgatcaattttatttctcatccagaattgacaccaatcccttatgtttttcttctagatagacaggatgatttatggttttgtttctgaaattgattttgattcatttgcttaggaaccttttctgggcggagcaggtgatagtg

SEQ ID NO: 40683 - DNA, 1011 bp, Arabidopsis lyrata
  Intron number 3 from transcript 896233 (locus 896233) deri ved from phytozome v7.0 (chr-ID scaffold_5; pos 1225390 to 1226400)
aatcatatcttgaacagaggggagttaaacaatcagtaagtttatctactaatcatacagacatcctaaaactccaaaactgaatgtgtgtacatgttatttggagaattatagagtatggttgtcgcttgaatagattatgaaatagttgcctcagactttaaaggtttgcttgtggctgtgtttacttgaatccgaattcaaaagttcatcaaagtttatgggtttgccttgtctttgatatcacatcacatagctgagtattgacttgttttattgtctctaatgctttgatttcttttgtatctgttttctattgcaatagttttttaattgaataaattgacttggcaaataatttgagttgtagtattctttgtctcttctctcccttcatgttcggccattaaatcccttcatgttttagaatttcttttgttcaatgtgttttatggtgagataagcttgtggtttcttgtatgaaatttgttcacttgtttaacacttgtttgtttggcttttgatgatttttcaggttaaaacggaagtcttttgagagagaaaatggctaaaaagattaaatttttgcagcataggactagaaggaaccttgatgattattagtgtttttaagcttaataagattatatttttattttaaactctctgtttttctgttttgaattacgggaaagtatttgtttgagatatttataatctgtttaatcaagttctgtttatatatgttttggtttattatttttatttcaatttttgctcataatttatcacaaaaatatgttattataattacattttaactaaaaattattactagctaagtaaatatctttatggatgtaaatttataaattatattttgttgatgtaaaataaatttatacaaatttgacccaaaaaataaaattataaaaatatataaaaattatacaaaattatatttttgtcgcgtcagcgaaacgaacacaaaccctgtggcggcggcggcgg

SEQ ID NO: 40684 - DNA, 390 bp, Arabidopsis lyrata
  Intron number 1 from transcript 950353 (locus 950353) deri ved from phytozome v7.0 (chr-ID scaffold_8; pos 17726597 t o 17726986)
tggtctcgcccacaaaacacccgatcgtaaaaaaggttacaactttgacttattacgccaatcttcgagtttttttattttcacaataggataataacctttttcagtaatcaaaacgttccggatcttaggtccataattgatttggatcggagatcaaaatatgttaaattggtcatcggtgtgattggttttgacataaaggttgtacacgtacgtctagagtcttgccaagtcggaacatttcctaaagcatgcaaccgctatatctatatatatgatgatttagagtggcaagaaaatgatgtgttaacgcgatctttaggcttggattttgttcagtttttctcaaaaaataatatttatttattttgtgtaattaggggttcc

SEQ ID NO: 40685 - DNA, 518 bp, Arabidopsis lyrata
  Intron number 2 from transcript 496470 (locus 496470) deri ved from phytozome v7.0 (chr-ID scaffold_8; pos 20731034 t o 20731551)
tgctcatctgctacaccagcaataaattccctactgtgagttttcttaaaaaaaaacctctctttatctctgaaattttgatcaagactctcatctgggtttctcagatttagctcaaatttacaaaattttaatcaatttcactatctgggtctactaaatttcagtttcttcttgccataaaggttcttagaatctacctgggtatttcaaagttagctcctttttcctagggattgtgcatgaaacaagatccatttttagagaattttaaaatttttacttacctttttgaagtatgtgtgtgcgcatctgggtttttgcagcttttgtgtatagtccagctttatgttatcttcaatcctaacatcctctggattcgtcagacttttcttcatgatattattatttttataatacgtataaatgctttgatttgatctattgaaactgtggattgatttgatgaattgtttgtaacaggactacataccaacagtttttgacaactttagtgc

SEQ ID NO: 40686 - DNA, 340 bp, Arabidopsis lyrata
  Intron number 2 from transcript 487025 (locus 487025) deri ved from phytozome v7.0 (chr-ID scaffold_6; pos 642350 to 642689 reverse strand)
gttcgcatctctgtgaacaaaacaaaaccctagaaatctccaaaattttctagggtttttttccgcctttggaggatcactggttcgtctttagtcctgattacgtcttttgaacagcttattaatctctgtgccggctagggtttcttcacatcgctagatctaatccactggttgattgatacccatttcttaattttttcctgattgtttgttctttatggtaaaaattgaaatgggagctgcacagattataaacaatcgagggttttttttagattctgtgtccgttgattttagtcaacgattgatttgattcatgagcaactaaaagcttttg

SEQ ID NO: 40687 - DNA, 791 bp, Arabidopsis lyrata; identical to SEQ ID NO: 39038
  Intron number 2 from transcript 897000 (locus 897000) deri ved from phytozome v7.0 (chr-ID scaffold_5; pos 7034260 to 7035050)

SEQ ID NO: 40688 - DNA, 1032 bp, Arabidopsis lyrata
  Intron number 4 from transcript 474972 (locus 474972) deri ved from phytozome v7.0 (chr-ID scaffold_2; pos 623657 to 624688)
agaagaagaaaatttgtacttatccatccctgaaaacgaagtgtaatcccctatatattaatagagaaacatttaaaagaaaaaaccttaccattatgtcttattaacaagattgctacgttgatgtgtcgttctcacaatgatttgatttctatttagataattactcaagatttattagactatttacagaatttgctattagtctcatacatccatatatcacattaataattaaaaacatacattttttgtttatcttatattattatatttatatttatatttttctttatatacatttatataaattttctttagtggatgggtaaacaatctttttatttatatttatatttatgtttatatttaaatgataaaatatatacatttggttcaagaatctcgaattcaaaactacaaaatctttacatttttcataatttttttacttaaataaataagataatctcctttctatatatgttacgaatacttaaaatcctactttttggaggagttctaacttttcgaagaaaaacattataaccacatatgtatataaactaaaatctggccacattataaccatttcgtaaataatccattcataatctaagaatgttagatttggaacactacaaaatcttagcttggaaactatcaaatttcatctttactaaattttgatttcttatacttattaaaaaaaaaatttctttttttctacaaaatctcgaaatctttaaaacatacggaaagacatattgccataaatgttaacatttcgtcaatacctttttatcacgttgaagctttattcaaggttcaaatatttcacgggtaaaacatatttttatatgaaatagtcccaaatttgaattttaaaaaaaagattgtaatatgtttcgttttacacaaacggatcttggatcccggataataattttaatcataataattttacttgaatcacttcatcccgcatatcgtgcgggttgttatctagttttgagttattattgagttgta

SEQ ID NO: 40689 - DNA, 352 bp, Arabidopsis lyrata
  Intron number 2 from transcript 488716 (locus 488716) deri ved from phytozome v7.0 (chr-ID scaffold_6; pos 7647555 to 7647906 reverse strand)
aagcaattgcagctctttccacattctccttagaggtaactccgatgttcaagattttggttaaatttagaaattgtgggtttctggatcattttgattacaagagttcatatttcagaaaatttgactagaaatgatatgacttgttgtttctttatttttccatttcttgataaattattttcgtgtaaaattatcacatttagtgtttaatcacgtatttgtctgcggatctttgcatagttagcagtaaaataggtttcaacgaaatgttgaagatttaagtagcttcttgaaaattttgaagtcactgtagtacattttcttgaatcattttgaattttgttatagg

SEQ ID NO: 40690 - DNA, 416 bp, Arabidopsis lyrata
  Intron number 2 from transcript 929350 (locus 929350) deri ved from phytozome v7.0 (chr-ID scaffold_3; pos 6475414 to 6475829 reverse strand)
agctcaagggctcttcttcctgtttgtttttcgaggtaaagtttcaatcttttttgcctaccttaattgcagaaccagttaatgttctatggtctgatcttcttagtcttaagggttttttactcaaattcttatcagttctcctaaaaagtttagtatgatatgtaacttggtaaaagtttcataccattgatgataggaacaaagagcataactgattggattctttttgtctggttcaaaatgggctctttagtctctctgttttaatgtcatcatgtctggatttacttgtcactgtgcaatctgtggagtattaaactgcaaaattatcttcttgatttcttccaagaaactgaagttagtacgtgtttgtttgttttcgtcttcagtgtaggaagcacaaagatctttac

SEQ ID NO: 40691 - DNA, 322 bp, Arabidopsis lyrata
  Intron number 1 from transcript 913569 (locus 913569) deri ved from phytozome v7.0 (chr-ID scaffold_1; pos 22113854 t o 22114175)
ggtgagtggtctgtttcggtgaagatttgaattgttggtctgtttcgcgtggctcgggtagagagctcaatatgattttgggtgacgagcatgttagtattttaataacttaccttctatacatgttttcgatattaaattgaattgtttttttctttaacatttcatttgcagttcacccaaatttaagccattgttcgtgatgaattaattgataattatttttcaagattgataatcgacgagtgggtgagcattaaaatttttgatgtatcccgggttaacagcatcttgagaccagtaccgaatagattcaagattg

SEQ ID NO: 40692 - DNA, 680 bp, Arabidopsis lyrata
  Intron number 1 from transcript 890702 (locus 890702) deri ved from phytozome v7.0 (chr-ID scaffold_7; pos 12676468 t o 12677147)
tggtgacactttgttttcagcaatctcgttaatcagttagtgccttagtgacaattaaaaaacgttgttcatcaatgatggacagttaaagacttttgttattgagtatttgcgtggtaatgaaacttttaataaaaaatttcccttgaaactaaatctctatgtttctttgtttgctttttttttgtacaattctaatagaagcatatccattacatacactaatatacattctacatatgcatacaaatcaaaattttcttcagtttttgaatctatctaaatacattagattttagagtactatttttattcgtaaatcacaagaagtaatttctttttccgactcacttattattttatttctcttttttaataatcagtcaaacaaacatttatttgcttcataacccagaattttttcactattacaccttttcagacttgaaaccttttagtccactccgagtctttcctctaactcgattgaatgcgagataaaccgactcttaggcgataaaggtatcggtggagtcgaagtctcgttacttgacctcttgcgcttcatagtccaactaacgttaacagccatggcatgaggtttgtgacgtatcaagtgagaactacgtcgaagaaaatgaaaggtcatctgactttctcgtaccggttcaatggggcag

SEQ ID NO: 40693 - DNA, 879 bp, Arabidopsis lyrata
  Intron number 2 from transcript 897197 (locus 897197) deri ved from phytozome v7.0 (chr-ID scaffold_5; pos 10906353 t o 10907231 reverse strand)
ccagtgtatctactactgctactaccatcccaaaggtgcataaccacttctttaaaatgaagattttcatcaaatactaattgaacaagttctttttctcaaataccaaattaattctattttatatgtgggattccaatataaaaaaaaactgatgtctcaacacctttttggacaagcatgcgcagtaaactagcagaataatctttaaaacatttattacagcatagaaaattcaaaacgaatcaccctttgattctgtccaaaatctttatcatagatgtttatatatatatatataatcgcatatatcagggcttacttatatcagctatatatacatttttggagacatttatgaaataaatcttagagttccaacttatttacgatcaaatgtcattaacattaattatttagattttcaaaattaaaacaaagatattaacataaaaaaatcatttccaaaaatcttaacctaatatattaagcataactaatccttaccacaattacatccatattcaattcaatttccttaaaagatctcaacaatctctacatttaatcgtggccattcaaatcttaatccggtttttaatcttcaatcttgaacataaaaaaaaaaagtaaaaattcatgcatgcattctttcctctataggttatatattagattcatagaatttctatatcctaagatgcataagttagtatctaagttactgataatatctaagaaaaacaatagttaatctttcttgatcaaataaggttgtaacgaagtttgttgttattcaatatagttgaggaacgaattcagtatctgtcgaatctacataaagtcaggaagctcgagagcctttgacagacgtcccac

SEQ ID NO: 40694 - DNA, 494 bp, Arabidopsis lyrata
  Intron number 1 from transcript 926580 (locus 926580) deri ved from phytozome v7.0 (chr-ID scaffold_2; pos 15254183 t o 15254676)
tccttgtcaagccaattgttctcattggttctgcggttacctctctttctctctcaatcatttctagtctttgattcggtttctcgcttcaatgagatcggaagatatttgactgaatttattcccctttttgtcatcaactgttattgcctacgacctctcctgatcgtttgcttttggttagagattgtattttgcatttagaatccaaacagcataagtttgtaatcttaaatttccaaacttcgatacagattcttggatttggttgacaatggaattcagagtcacggactttttgcttcctgcttaatgtctttaacaactatctactcttttgaagtttgtatatttatagcctttagattttttggcttactaggttcttcaagttcactggtctaattacgaattcattgcaacgaataatactgcttttcatgtgatctgtctctctaacttttcttttcaatttgtttttaggaaattgcatt

SEQ ID NO: 40695 - DNA, 625 bp, Arabidopsis lyrata
  Intron number 2 from transcript 933364 (locus 933364) deri ved from phytozome v7.0 (chr-ID scaffold_4; pos 13174996 t o 13175620 reverse strand)
tatcgcgccggaatcgtccccgtctctttccgccggtaagaagaacaaactcctaggcttttagattggtttcttgaattagaaaaattggggttagatttggtatattataaactttggggtgtgaaatttaatatcttagaagtattggggttgctgttgagaagtccatattattggggttaatgtttacagaattaaaagtttggggtattaaacataacattttataaataccatggtgcagttgtgaagacttatttctagattctgaatactttgggttaatgtgaaagaatttaaagtttggggtcttaaacaatattttataagtataggggtacggttgaaaagtctgtctttgattcttggcgcgagtcggtgcagcatttatgtcgggtctctagtacttggctaaattaccaaatctaaaagatcttattttctgcaaaaagacgaaactgtccttataacaatctcttttttacctatcagtaccatataataaaagtcaagagtaacaataatgaaatggtgtcttttagtcaacaacgcgttttctcaactttttcttgaaatgacgtaactaaccttgacttgtttgttttaattacaacagtgtgcc

SEQ ID NO: 40696 - DNA, 236 bp, Arabidopsis lyrata
  Intron number 2 from transcript 488180 (locus 488180) deri ved from phytozome v7.0 (chr-ID scaffold_6; pos 5493265 to 5493500)
ttgttcttaagttcggcaatcattctgatcccactgtaagttgatgattcttttaactttattttgaagctgaggtactactagtgtttacatcagaaactaatggctggacaatctcattctcaaatgtttgattcttctatggattgatatctgattttccactcataatttttatgatctgtctattatttcgattggttaattccttattctattgtttcagggtactactc

SEQ ID NO: 40697 - DNA, 566 bp, Arabidopsis lyrata
  Intron number 1 from transcript 901145 (locus 901145) deri ved from phytozome v7.0 (chr-ID scaffold_4; pos 15760262 t o 15760827 reverse strand)
gtaatcaatccaatgattagaccactccaatcaaaggcatagctagatagatattgtaactttgaaatgtttctaaaccaatccaatccttttggttagaccaatccctcatgtctggtttattagaaaaagcccttaagagtaaaataggtatcttcacaaaacagtctttaataagattccaaaaatttgataccaacaaaatcaaatcaggtccacttgacagagaatctcacacattgcatcaatggctcttccttttcgccaacattctctagatcccattgcagcaacgcccacactttcaaaatccattccttttccccaaaatgtccttcttcgtacactctcttctcgccggagttttcccaagttttccgactgtcgtcatattcggagttcgcctccaaaccactttaccaaagattaccggaaacccatttcgcagaatggctctctttactcagctttcgttgtcaaatgcagagactacgacgaacctcactcaactaccgtttcttctgagttcgtcgacgatgaaaagtcggagactttacagaaaatcg

SEQ ID NO: 40698 - DNA, 553 bp, Arabidopsis lyrata
  Intron number 2 from transcript 889207 (locus 889207) deri ved from phytozome v7.0 (chr-ID scaffold_7; pos 5354941 to 5355493)
gccggttatttcggttggaaccgactcctcttaaggtaaagctatgccaaaatatttcttttgttttggtctggagtaacttatctagctcagtaaagttgaaatcctaacccattatcatatacaaaactgagatttatctagaggcggatcggttacagacttacagctatgattgtagattaactaaaattaaaagaaacacaactgaaaaaagacaaaaaaaaaatagaaacaaaataatgggttgcgtgtgattactaacagaactccgaataatattcgaaagaagatttaaacaataatatttgaaagactaagtttttcctatacaatattagatctaaagaataatattagaaagactaaagtttaaaagaatgagattagaaaaactgaatatttgacttcaaaaaattaagtgattataaaatctcaaggctctaaatagtattccaccaatcatttagccatctaaactaaacttatgaaccggtacatgtggtaaaatactaagtttgttgttttggttaatggaattgatgcaggggtc

SEQ ID NO: 40699 - DNA, 587 bp, Arabidopsis lyrata
  Intron number 3 from transcript 479152 (locus 479152) deri ved from phytozome v7.0 (chr-ID scaffold_3; pos 7198628 to 7199214)
cttaggacttgtctttacgaaggttcgaatcaataaccaagatcttctctgtctttcttgttttttttcttttgtgtgcgagagagagagagagagagagagagttcatggtctcttcctccaatgatgggtttatttgtggtccattctctcaaaattatgttattttgaggaataattatggttttcatatcggtggttgactaactttgctcccccttaaatagcaacaaaattaagcaattcttgttactttttaagattcacatattaatctcaagttccttcatttagatcacaccatttgatctgttgaaagattcacatgtagattatctctgtttttttaggattttacatgtgagatccattgtatataataatttaggaggtttatggattcaaatctgagtctttgatctttgacttgagtttggttaaatgtcaattcaagagatccttcttgtttggactctcaacagttttgtctctctttgatctgagtttattattggttatgaaagtctctgttttctttactctttttagatatgaaacttttggttgttctgtcatgcagtaacgaa

SEQ ID NO: 40700 - DNA, 272 bp, Arabidopsis lyrata
  Intron number 1 from transcript 936540 (locus 936540) deri ved from phytozome v7.0 (chr-ID scaffold_5; pos 4041271 to 4041542 reverse strand)
ttgcctggaaatttccgttcagcttttagtttcaggtaatatctctctttaaacttgagattttgttttcatcttggtcatgatcgtgttgttaatctattgctcgcttaaatctaaaggaatggttgcatacatgttagggaatatgatgatgattttcttctctttggtcctttgataaaactgtttgtgaatctcaactttgctttgtgttgcttctggatcgttggtgttcagatactttaactcgctgcagagtgagtgttttccac

SEQ ID NO: 40701 - DNA, 340 bp, Arabidopsis lyrata
  Intron number 2 from transcript 480888 (locus 480888) deri ved from phytozome v7.0 (chr-ID scaffold_3; pos 23922691 t o 23923030)
aggacttggtatgtttcttctttctcggttttgatttggctaattcctttttcgtcattgggtttcgtgtttagtatctgggttcatcagaaaggaatttaatttcaaatctgtaagatctgcagttaggttttcaattggaatctcaatcattgtagaattagggtttagaaagtgagtgtcttgtcgtcattccactagccggattataaagttgttaactttatgatgggaggagagttttttttttgtgtgtatattgtcactttcttactgactcgacttacattgggttgtgattgtagtctgaagaggacttggaactaaagcaaaaccttga

SEQ ID NO: 40702 - DNA, 286 bp, Arabidopsis lyrata
  Intron number 1 from transcript 942428 (locus 942428) deri ved from phytozome v7.0 (chr-ID scaffold_6; pos 13584132 t o 13584417 reverse strand)
accaacaggcttctcgccagaaagcaattcgtgagttcccatctctatgtttcattttcaatctcacagtgttgcgtcttcactatagtttaggtagaaagaatcttagaagaacagatttatagagcattttgatgttttgccataggaaaattttgaatttggtgacttttaggtttgatgtttagtattttgattatattgtatgattcatttttatattgcactgattttgtttcttttatatgattgatttagtttgtgtatcaattaatgtaggttattg

SEQ ID NO: 40703 - DNA, 594 bp, Arabidopsis lyrata
  Intron number 1 from transcript 485548 (locus 485548) deri ved from phytozome v7.0 (chr-ID scaffold_5; pos 15861929 t o 15862522)
atttctcaagtttcatcagacaactcaatacttatgtgagtcttctctctgttcttctttgctctgtaccaaaataaaaaacagagcaatgctctgtcttttttaccttcatttcccttgatcttatcatagttgctggaaaattacgtcaagtattctggatactagtacaaaaattacttacaattaacttggtaatggaaaaaaagcagtttttactgtagaatctgttgttaatttcggattctagaaacatcgaaaatgtagattccgtaaatggctggtggagtagaagaaggtttagtaacttccagaagcttgttttgtgtcaacttgcttactaaaataatcgaaagaaacagtcagcgatcttatcccaatagccattgtttattcactaatcagctttaaggttacccacttgtgccattctttaatataaaaaaacagagaaaaaagtatcaaagcagtctctctcactccaattattgatgtgagaatatgtagactttcaaaagatttagtttcaaattcaattttgaatattaatgttaaaaaaaaattacagggtttcagaaagatagaagcagagag

SEQ ID NO: 40704 - DNA, 387 bp, Arabidopsis lyrata
  Intron number 1 from transcript 914631 (locus 914631) deri ved from phytozome v7.0 (chr-ID scaffold_1; pos 29105241 t o 29105627 reverse strand)
tcttaagaggaagagaaatcaaccaggaaatccaggtaattatttagttatgatagtctggatgatgaagaagaagaaaaatcaactttttcttgttttttttggacgtattcatactaattatttgatactactatcatcgattattgttttttagaattctgggtactctccgaatattcttttttacccttttaactttgtcttctttctcatctctattattacattgggcaaaaaccaaataaaaatccaaactttattagtttttctttggaacttgttacttatatatatatatatatattaagcaaatttctgttaaaatctgatttaagttttggactttatttggtgttttttttttcagacccagaagcagaagtg

SEQ ID NO: 40705 - DNA, 507 bp, Arabidopsis lyrata
  Intron number 1 from transcript 941909 (locus 941909) deri ved from phytozome v7.0 (chr-ID scaffold_6; pos 10212125 t o 10212631)
ttatctccacgcgcctcctcctcgataccaccaccgtaagtccctcaaaaacgacacactacacttgtcgttttagctgaatctacttcttcggtgttttgtgtctttatgggtttgagttttgtgccttttgtcacgtgagggaagaattttctattattgatcggaagagtcttttggtggttggtgttgtcggcgaatcacgtagaacacgacacgtgtgttcttgtgggaccccagtacatgacttttccagttcaattagctgtctcccatgagaagaatttcgggttttaggggttttaggaaaagaaaatccaaattaaagaattcggttcgattggattcatatatgtttggtttaagttatatattttctttcggtttgaatcggtttagtttaagtgaattacggtttgggtcggtttattgcacaaatctgctcactagtcatatcgttttcacggtctaggttctgatagagaaagaagccgtgacgacgacgac

SEQ ID NO: 40706 - DNA, 970 bp, Arabidopsis lyrata
  Intron number 1 from transcript 333229 (locus 333229) deri ved from phytozome v7.0 (chr-ID scaffold_189; pos 12054 to 13023)
gagaagaagaagaagtagaagaagaagaagaagaagaagaacgtcggagctgcaacgtcggagctgcaacgtcggagctgttgaagaagaataagaagaagaagaagaagaagaagaagaagaagaagaagaagaagaagaagaagaaagtctcgtacgttcctacgtttaatgttgtaaaaggtgagacatttggtaggtttgtttttttaatgagagaagagagagaaaatttttgattggttgataaaaaatatgttgatattaaattaaatgtataattaaagggataaggggtagagttggtttataaaaaaattgggaaggagagggggtagtgagaataagtaggggtttttcaaaaattgattttggccaaaggggccaatgagattaaaatcctgtcgggactgtgttacaaacaacgaaccgatatctgggaacccgcccgggtcgggtctcaccctcaccaattccaaatgagcttaaaattgggcttttcaaaatacatgaggccagttgagaaattttagagaatggcgggggcgggaaggaatatttcacgaggagcctaaaatgcgccaaactgcacacgtcagcagtccttgccaccaagagtatccaataagaaccgtcacgtgtaagagctttccttctttttaagattccttttcaaccgtcgatatgtttacatgaaaaagcagatccaacggtgcagatatcgatccgcgtcaatctatttcatccaatcatatcactccatacgatctatataaaattatcctctcaagtttttataggtgataaagcaatccacagccatttaacctctcagatctcgttaaacctagaaacctcgagaaactgaattacgggttccgaaagcagagaagaagcccgctgagaagaaaccagcttccgagaagcctgtggaggagaaatcaaaagccgagaaagctccggcggagaa

SEQ ID NO: 40707 - DNA, 469 bp, Arabidopsis lyrata
  Intron number 1 from transcript 944044 (locus 944044) deri ved from phytozome v7.0 (chr-ID scaffold_7; pos 992398 to 992866 reverse strand)
ttccttcttcaaggtgttcgttccacaacgtcactgtatgctttcttgtaacttaattctatgtcttttcactgaaacaggttctacaatattataaatactagattattgaaactcagtaatattatcacaagacttgtgatctttcttttgttttctctttttgagggacaaaacttgtgtatttggtttttgtttggtagattttatgtttttggaataggtcaaaatgactcaatcttgttttcttaatttatttcaattttcaaaattctaatgttaaagtgcttagatttatttcccctttggtataatccacggttgaatctaaacaacatatatacatattcacgttaatttttttaattttcgtttaattgtaaacttgtaaatcttttttttggtttttttaattgtaaatcttcttattacagaaacaatttaaacgtcacaaaaccgggacaaaaac

SEQ ID NO: 40708 - DNA, 777 bp, Arabidopsis lyrata
  Intron number 1 from transcript 478645 (locus 478645) deri ved from phytozome v7.0 (chr-ID scaffold_3; pos 5125658 to 5126434 reverse strand)
tcatcacaattggagatctcttcccaaactcgctggtcagtcctgtaatctaaatgcatgcttctctctctctatctcattctcatatctattttttctcttttgttcgcataattctgtttgaagtttcattttgtgacttttgtctatctttctattgttcatctgtcattctatttctcattactttgattactgttcgattctttcccgtgaaacaatattgtttcgatagactctttactcgttacagttttatagatttaaacaataaaaattacgaatgaagaatgttttggtttttgatatccgcaacgtatcaaaatgttgttacatttttcagttataattttggtgattatttcataaattttggtatcttttttcttgaaggaataaaatctgaggagaagtttgaccacaatttgtaaccttcgtgtttattatttcttctaaaagtttctcatacaaaatcttccggaagatggaatgaaatcttgaatagatggctaaattgctcaattaaaaattaatgtaatgaaaaataagtaaaaatatgatgaaaccttatgcagcatctgatgaaatattcatgtaattatttaaaaattaatgaatgatggagaaagacagagagaacccaatcaaatgtgcttttgatgccactgcagtgtatgtagtgttgaattgactaagttactcggtttcttatcttcacttttgccttttttatatgtcaagattgataatgttgaaacttgaaacaaaataggattg

SEQ ID NO: 40709 - DNA, 270 bp, Arabidopsis lyrata
  Intron number 1 from transcript 489386 (locus 489386) deri ved from phytozome v7.0 (chr-ID scaffold_6; pos 11332422 t o 11332691 reverse strand)
tctggaatcttcagatttagtggtatgcttcttgaaatcctttaatttggtttcttgatatagaatcttgatttagggttctttaggtttctagggtttgatccgctttagactctgtttttggttccatttcgtggatttgctttgttatgttacattaagtttgtttttaggttttttcaggagttatattgtctctgtttagtgtggaagagtcttgagattggaattgagaataatggagttgttacttgttttgatttataggtg

SEQ ID NO: 40710 - DNA, 997 bp, Arabidopsis lyrata
  Intron number 1 from transcript 925604 (locus 925604) deri ved from phytozome v7.0 (chr-ID scaffold_2; pos 9356988 to 9357984)
taccttattttgaattcggttccaggtaatataccaatcttcttcttttttaatatagctttgattggttacttgcagattatgagtttgattgcaaaaactagtactacaataaataaaaataaataaaagggaaaaggctctacataatggtttaataaataaatttgttgcgtttccagttattcttataaatattacttttgattggtttaaaataatagagatggaagctcataataccaaaatgtgcaaaatcattggaacttgggaggttcgatactgcatgggtgacgctgaagctaaaaatgctacgtgcgtggcagcttttgcggagacaaaaaaagttgttactaattgcagttgtagtcaagctagttaccctgatcttatttgtaggtgtcttactccttgttaggttttaagataactgtataaccaaaatatatttactattctcttttatacaaaaggggagtgaatgtatattttgtgacaaaaaaaaaaaatacaatcttatatcattgtgagtttttgtggtatatgttatatgtattaaagtttatcaaaatacataaaaacctaaagtgtgtgcccaatctttgtgaaataaaatacaggggtgcttttagataatgttattttctatacgaagaaaaataatcgattgggtttattatacaatctttttaaccacaaaattttaataactcataaaaaaatggtgaaatattttttttatatacaatattaagtgacaagcaagataactaacatgaaatatatactttatacagataattttttggatttattatctattactaaacacaattttttgcagtgaatcggtcgtgaaaattgcgtttttgaaaaatgcaagctggctagacatagctggaaagtttgacacacgatatttgtccccgaggacaaggtatgaggtggtgtttgtggtgaagttggaatacacattcgggagacaccggtgaagtta

SEQ ID NO: 40711 - DNA, 390 bp, Arabidopsis lyrata
  Intron number 2 from transcript 479443 (locus 479443) deri ved from phytozome v7.0 (chr-ID scaffold_3; pos 8316423 to 8316812 reverse strand)
gtaaaaatccaatctttattgctggtggtaacaaggtttgtcgccgaatcatttgtctatcatcaaattatgtatctaatttctctgggtgactgattattcagtgctttggtagcaagtcaagggaatcaaaatttaagctttgcttgttaactagttgttggatgtgatattagtgtgtcaccatgaaatgagcaaaatctcatgtgttgtaataatgtttattggattctgtggtttctcagttataatgagacttgaaagatttgtatttttcaatgatggtgtggcagagaacaagtattgaaggatttcttcttatgagtggttattggcttcatttctctcaattgtttgtaggacttcgaatcgtgttctgttgattgtgtt

SEQ ID NO: 40712 - DNA, 937 bp, Arabidopsis lyrata
  Intron number 2 from transcript 888695 (locus 888695) deri ved from phytozome v7.0 (chr-ID scaffold_7; pos 3072134 to 3073070 reverse strand)
aaaaaaaaaaaaaaaaaaaaaaaaaaaaaaaaaaacttctccaaaatccttagaaattttaaataaaatatatttagatagaagtagatgcccatatccatatgctattcgattttcacattacgaagatatagaaatgtgtacaatgtctctttctactttaacttttatcttaatttctatatttgttgtcaactgtgtttttttcttttgaatatgcataacactggattaacgtgctaatgtttttaaaatacattacaaaatcatgcatactctaaaggcctagacggctatacatatttctcctctagtcgatgattaaatcatgtaaactataattttgaaccaatcaatgatggattaaagaggtacgacttatgagagagaatgattgtgtttgtcagtttgtgtattatgacaatatttggattatcctaatttttagttgtcattatatatatcaaaacagaaataaactaaggaatggaatatttcgacaataagcgtaattcaattttaggtcaagttgatgcaagattagaaatcaagcctatattttgaaaaacgcgtaacttgtagtgacccaaaaataacggccggattttttccatctatagtgtgatttgaagttttaaactacatcttttctttttttgcttttgtttaaatgattttttttcctactatatatctttttgttttgatgttgtgtttttgatgaaatatctaagaattatccatctaatttatgcaactaagtaaattaaagctcttcctttatgactctaactttaccaacttcgactaatttataagtgtttagtttatagttatttatcatctaaataagaatagagaactcttttttgcttaatttgtcaagttccgtggataaatttaaaaaaaaaaaaaaaaaaaaaaaaacttcgcagta

SEQ ID NO: 40713 - DNA, 558 bp, Arabidopsis lyrata
  Intron number 2 from transcript 929544 (locus 929544) deri ved from phytozome v7.0 (chr-ID scaffold_3; pos 7256926 to 7257483 reverse strand)
ttgacattgtcaacactgccgctaggaagaaaacggtaatggttcttcttatgtccctcgtttgaaagaataatgcataaaacctgtccgcaactttaaacacttttatgcttagagagttatactttactaataaggttcacataagttatgtgacataacaacacctgaatttgaatatcaagattttgattccaaaaggtggtgatcttccacttgcggatagtttatgaatacgcatcagtaaagagtacccataacttgtaccaaacaattgtctatctcttctggtgttctagaaaaaattaatttgaggagtggtgggactatactctattgaataacctgtaattgtactgatatagaatatgttacacacctatcatagtattattcagaagttctttgaatgcttaatgttgcattgtgagctgtgtgaccaagaaaaaaacattgtcaactcaattcatatgaatgagactttctttacaacaagtgtttggttttgtgttaaacgatgatacaactattgtgaaacatgtgcaggttacagtagtg

SEQ ID NO: 40714 - DNA, 499 bp, Arabidopsis lyrata
  Intron number 1 from transcript 495725 (locus 495725) deri ved from phytozome v7.0 (chr-ID scaffold_8; pos 17461532 t o 17462030)
ttgggttttcaagaaaaagtagagacattttaaaggtatgggcatgtaaatttctgggtttttctttctttcatagattgtgtttctttattatgtttttttttttgggaaaatatttgacaaaggaagaaaataaaaagctagaaatttgattctttttttttaagggttttgttccctctttgatcttttacaagattctgggttcttcagattttttttctcttttttttttgggtttaattctttgtggtttttatccaaattcgtgtaaaaatctaagctttgtctgaatttgattggtcaaaatcattaaatttggaaattaatgacaaaatctactcatttgtataaagttataaacttttaagggtcttagacctgaaatttaaaacctaaagtggaagatgattgacaagttaacaaatttctagggtttcattgtgtgttcttcttgtttgcagaatcaagagatttggggttgaaggaggatagatat

SEQ ID NO: 40715 - DNA, 695 bp, Arabidopsis lyrata
  Intron number 1 from transcript 931870 (locus 931870) deri ved from phytozome v7.0 (chr-ID scaffold_3; pos 23633185 t o 23633879 reverse strand)
gcgtcttctcataaaggtaacgtttttattttggattctgcatttcatagttttagaaagtttgagactttttttgactcgtgaagatgaacgtagcgtaacgattgttttcatcttgattttacatcctcaacttgtttttgtttggaaagtttcatgattgtgagtgctaattttattggtgggtctttctaaaacacattttcaagctcattggttgatgtgttgtaccataaaagaggaaactttctttgtgtctgcgatgttcttggaacttattgtaatgaatgtggattcttcttaaagaacctttatggattcacttgctttgtggaaacatgtatcttgttctcttctgggttttgtgagcttttgtattgttgtttcgatttcctagactcgttgatgtcccaggcaacatgtagaattcgagtgtttttgttctgcggttatagtagagggtttctttgtgttactgtacatggtactaaattagattttcttgttgcataaattttgatctgaaaccattcttctaaatgtggcaaacaagctcatggaagcagtctttgactaatttgtgtttctgtcatggagaattattttgttaatacattgttattttaggagttgtaattgcgattgaaatgtaaatttacgtcttttttcttcatgcaggagctgcaggtgactca

SEQ ID NO: 40716 - DNA, 713 bp, Arabidopsis lyrata
  Intron number 5 from transcript 890779 (locus 890779) deri ved from phytozome v7.0 (chr-ID scaffold_7; pos 13199725 t o 13200437 reverse strand)
aaagccgtttgataaatcccagactcgcaagggtctatgttttagaaaatactcattgtgtaaatgggagatgcttaaagcttgttcgagaagagaacttcttttgatgaaacggacactacaagaatattggcttttaatagcacaatactatagcgttttgttcacatatgctattataagtataaggacgagtttaagatagcgtttgtagttttaaaaacgctattaataagtttagcagaaagaaaaataaacacgcgcctaataatttgggtttttaatagaagaattatcaggaaacgctattaaaagtgaaccgggaaaacctaaaaataattggccttgaaccgggaaataaaaatattttcccccctctctcgattttttctaagtatcaaagctctcttagacgaaaaagtctcaaaacacaaatgctctcttccaacacttcgactgattctctcttaccacaaaatctctctttcactcaagatttcgtttgattctgtcactcactatcatactcgttcttagttttacggattctattcgattggtgttgaatctctcactcgattacaaacggtatagctaatactttcatgaaatttcatctcgttttagggttcttaaaagtagtaattgattccagtcgattattacctttgtctgcaggaagatttcaggttatttgtcacggtcaaaggtat

SEQ ID NO: 40717 - DNA, 541 bp, Arabidopsis lyrata
  Intron number 2 from transcript 477533 (locus 477533) deri ved from phytozome v7.0 (chr-ID scaffold_3; pos 781430 to 781970)
ctaagcttcttcaaaacagaaaacatctcatcaaggtctctcctttttctctctcacttagtctacatgtataattttgattgattgtgtgtgtgtgccctgcgttcaaaactgatcatttcaatgtgggttagtgttttccaagattctgatatatgtgtgtgtgtgtgtgtgtctttgattgctaattgctatgtgtgtgtgtgtttctagagttgttagagtgtgtgcgtgtccagcaattaagatgtgaaatttctatatggtcaggttctgatttggtgaatcgtatggggatttggaatgaaacacaatttcttctcgttctgttttttttgaatgaaacacaatgtctttgaatgctatatatgtgtgtgtgtttctactttctagagttgttagtgtgtgtgtgtccagcaattaagatgtgaaatttctatatagtctaattctgatttggtgaatcttatgagggttttgaatgaaacacaatttttttgcaaaaggggactgtgaaacttgtgtttcaaccaggcgagga

SEQ ID NO: 40718 - DNA, 357 bp, Arabidopsis lyrata
  Intron number 1 from transcript 942007 (locus 942007) deri ved from phytozome v7.0 (chr-ID scaffold_6; pos 10729886 t o 10730242)
tccaccaagcttgtgctcgattcggtttttttcaggtacctaattataattatacataattttagatcacgtataagctttttgcatcaactaaagaaaatatgttagtattctttttttttgatatttttgttaatcaaatatagtggtatataattagcttggagctcctataatcaaatagattatatgtgacaaaaaaaaatgaagaaaaaagtgtttcttgatatttgacttgttctatgctgactattatcatttggaacttatatacaaaaactttttggttaattttcttttttttggcggctattttttcgaggtcataaatcacggagtaagtaaacaattaataga

SEQ ID NO: 40719 - DNA, 442 bp, Arabidopsis lyrata
  Intron number 2 from transcript 900413 (locus 900413) deri ved from phytozome v7.0 (chr-ID scaffold_4; pos 11287288 t o 11287729 reverse strand)
caacagaacaagccattcttaacttggggaataaggttttgtttctttctaatcttgcattactacttgctatagtgattaagtttataaataatgacacttagttactcgtattttgtagttgggaatgaaatttgatgatgctagctaggtcagcatcattagcccgtcatactataccattcaacccaacaaagaaatatggaggcgtggcactacaggtaacataaccttgtctataatgttattgagaagatatataggtgcacacacatatatgttatatctgttttcacttgacacagatattccggtgcagctttgttagaactccgcaattgtttgactgttaatctgcctgcatattttatgctatttttgattcttatatagttttttatttcacttcttatcattcatttctagctgggtacacacgctc

SEQ ID NO: 40720 - DNA, 481 bp, Arabidopsis lyrata
  Intron number 1 from transcript 940884 (locus 940884) deri ved from phytozome v7.0 (chr-ID scaffold_6; pos 5703809 to 5704289)
tcgagcgagagctacttgctaaacaggtactcccttctggaatctgaatcggtcgaatctgatgtaatgctgttcttagggaataaatactatgcatgatcaattttacaatcaaagagtcttttcggtttcttgtctagacactcgttaatggcccgcttgaatgctttaggatgatgatgtcgtattagcttagctcaaatcgaagcggttctgagatttttaaggtcgaattgttactttcgatctgtttggttagcggattatttcaattggaagaagtcttgtaattaggtttgggataaaacgattgtttcagtctcattctccatgaagttatatggtgttttgactaatcattttgtaagtattaatttattatatgttgtagattgtttatcatctacaaatatttatgcaagctagagttgaggtctaacggaggattttaatatacaggtggcattggacttaacccaag

SEQ ID NO: 40721 - DNA, 740 bp, Arabidopsis lyrata
  Intron number 2 from transcript 482096 (locus 482096) deri ved from phytozome v7.0 (chr-ID scaffold_4; pos 14968904 t o 14969643 reverse strand)
ctgagtctcttttctctgtaagtattttttccttcatttactctgttttgttcctcctttttggtctttttgacttaactatctaaaggcaaaagaaattgataaatcttttggtattttttgttatcatcttcttgtggggttttctactgaagtttgcttggctttgaatcttgtctaatgtctatagaagctcacttttaatgattaactaatgagttatatgaactaactatatgaactaattaatgagttaattccgtagtttcatgcattaaacaatgtatgtctatgtatggaagcaaagtatgatatcatatttaaacatctatgattgtgctactaaagtttaaataatactttaagctgatgtgatcttatagggataaactctgaccattatctactttttttgaccattgctctaattttctaatccaaaagtcgtatcttccaatgcattggttggtccaaacctagatttgcatccctttgttgttcacatttaactgtaatgttgaaacgaatgcaccaatttgttttgtctgtctgagaatacctcaaggcatatagttttgtccttatgacgcttgcaaaagcaagttgttgagttgtaatcttatgtttttttctgcaacttgctttggatgaagccatgagattagctttataaagggtagctagtaaaccggtttcttatgtcgaaaaccgatctttttgtttttgtttgatgacaagga

SEQ ID NO: 40722 - DNA, 356 bp, Arabidopsis lyrata
  Intron number 3 from transcript 922661 (locus 922661) deri ved from phytozome v7.0 (chr-ID scaffold_1; pos 16922540 t o 16922895)
caggtaacgaatctttgatccgttgaaacgaacctgttctttgcttcagtaaaactagaaactgctgataatgggtatgatagaaaagttttggaattgtccaccaacatagttcattgctgataatggatatgatggatagccttagtggtggctcatgatttggtgtagatgctggaattgtgcacacacattgttcataagctttgaaatcaaatggaattgtgcacacacattgtttagttttgcattatgataatactctcatgtgcctccttatcttgatctgagtctgttgtgttacttttgatgattaatcaggacgaaagtccggaggagatcaaagaagcagcagc

SEQ ID NO: 40723 - DNA, 300 bp, Arabidopsis lyrata
  Intron number 2 from transcript 925809 (locus 925809) deri ved from phytozome v7.0 (chr-ID scaffold_2; pos 11179391 t o 11179690)
attccttaactgaggtaaatttcaattggtggcaaaatataatctttttttttcacttttgataataactaatatataactgtttcaaaatttgtttttgatttgaaaaaatatatggtaaaactcctttccaagatgtacacaatttctctttgattttaacattccacccaaagatttttaataagtgatacactagaaaaaatcgtctcgttctctatttgtgtttagttcatggatcttctttacacattcatattcatgattttaattgtttaaaatatgattttactgtaggcg

SEQ ID NO: 40724 - DNA, 763 bp, Arabidopsis lyrata
  Intron number 1 from transcript 473307 (locus 473307) deri ved from phytozome v7.0 (chr-ID scaffold_1; pos 13861479 t o 13862241)
cacgcgggtgcttctattggagaggtttattacaggtaaatcctacgctaatttaagaatcaaaagttataatctttttttttatttcgtctttacaccgagaaactatttataagctacactagtactttttaaaatatttggtttactttatatataatatagtacaagctatacttacttaccgaagaaaaggaggaagttacattgattttaaaaataatcgagtttacaaagtattaaatttggttacttcggggacacttgatttttcttctataaaggtatcattgttttatttatttatttaaagctatggagaacaacctcgtaagttttcatactaaaattttaaactttaaaacagaaaatggttcaaaaattgtgacttttttggggatacgttgccacacagaaccaagcagaccagagatatgcggtaaatcaaaccaaaatttcggctaaccaattgaaatattacgattttggttcaaccggttggtttattccgttttcgtttgttcttttttttttttttttttttttgtattgtattgttaaattggatttatagaaacaatatgtaatctttggggtttttgactaatagattataggtaggtgaaaagaggttgataagtggttttattcttataaccaatttactaaaaaaacactaatatggttaagctgtggttatgacccggttattaattggtttatctttcatgacttcaaaggatccaagagaaaagcaaaatcc

SEQ ID NO: 40725 - DNA, 509 bp, Arabidopsis lyrata
  Intron number 1 from transcript 888917 (locus 888917) deri ved from phytozome v7.0 (chr-ID scaffold_7; pos 4073910 to 4074418 reverse strand)
gctcggaattgggatctatcactctggtcttgaaggtaaattgttttatatcttctttgttttttctcgattctgggtttgattgttcttgggtttgttacacctttatcccctaatacactgagaaacatgagacaatattaggggataaaggtcaatgctttggtcaattttgttggattgtaacattgattggtaattttggggaatgtagctgagaaaagatgattaatcccttctctgtattgttttgcttggtttggttttattgcaaagtttggttggtggatgaaaaatatgtattgttaagagtagacttgctttgggtcctcctggaatccgacttagagactaaatgtgttttgatgataagaacttaagtgaacagttttgtgggcgttgtttgcttggttttaacaatgaatcaatcacgccataacttgtggttaatcgaaaaatccgatattgaatgttctttcttggttttggctattcattgtttgtagttc

SEQ ID NO: 40726 - DNA, 343 bp, Arabidopsis lyrata
  Intron number 1 from transcript 475739 (locus 475739) deri ved from phytozome v7.0 (chr-ID scaffold_2; pos 11028350 t o 11028692)
gcaccaggttcctttaagagctggtattttatttcacacatatataattaatcactagaaattttctttccatctacataatattcgaaaggttaattaacaaacgcatattgatagtttcttcatgaaacaaaagtcagacgccaacctatgtaaagtcgttaacttctttcattggtttttcttttagtaattgaacaaagggaaatttctacacgaagacgtgtttttgagtgtgaatagtacattatttatattagtgtgcatagattatttatgataatcaatgtcgactgttggttttatagggctaaatcggtgccgaaagagttgtagactaaga

SEQ ID NO: 40727 - DNA, 317 bp, Arabidopsis lyrata
  Intron number 3 from transcript 922027 (locus 922027) deri ved from phytozome v7.0 (chr-ID scaffold_1; pos 13151659 t o 13151975 reverse strand)
atcttgtgcttggtgtgatttctcaaatcatcaaggtgaggctataatgctgctactgctatttgtttttggtaatggtgaatgtgtaaataatctttattattgttgttctgtctagatacagttgctagcagacttaaacttgaagaaaactcccagctggtggagttggttgctgatagcaatataaaattactcactcatagtgaaaattttgactttgttttgagcacaaggtacgactgttttttgcttctttaatgtccaatttattatacatgatgggaataatctctatgatttcatttactttgaga

SEQ ID NO: 40728 - DNA, 386 bp, Arabidopsis lyrata
  Intron number 1 from transcript 321182 (locus 321182) deri ved from phytozome v7.0 (chr-ID scaffold_4; pos 16412762 t o 16413147 reverse strand)
cagcctacccggagattctccctctcatccgccaggtaaaaataacaatttttaaaaattattttatatattggccaaagtgagatttttcaaaaaaaaattaatagtaaaaaaagaatcatcataatatgagtttttttttttttttttggttgcatgcattgactctgttacataatttgttatcttgttctgcaagaacagacctgttcttatcatgtcggtcttttccagttctttgaattgttatcaaagagtcttttccagcccatcacaataattatgattttattagctaaatatatttccttaattacatgttataattgaattttttgtttttgattacagattttacgcagccgaagttctagtggcgttagaat

SEQ ID NO: 40729 - DNA, 453 bp, Arabidopsis lyrata
  Intron number 1 from transcript 918912 (locus 918912) deri ved from phytozome v7.0 (chr-ID scaffold_1; pos 689312 to 689764)
ttgaaagacgaggttcgattctctcgcttctcccttatttcacctccttcttcttagatcatgttctagtttcagctatcgaatcgatccaattcgtttttgatttccatttgttcccgttgaaatttcgtttgatttgtctggatttgttcttcaactgattattagatgttcaaattcgtgtgtaattggaatctgggtgttgaaacagagcttagaagagtctagttttggagtagattctgatcttattttagcagtttgagccaaattagggttttactttttatgcattcaggttcgatctcacgtaactccagatgtttactttgatatcaattttcgtttcctgattgaatcagtttctatttgtttcttacttaatttagcttaacgcttttggagatttgtgtaacagagattggtgcagcatcaaccaactcagcatccaac

SEQ ID NO: 40730 - DNA, 507 bp, Arabidopsis lyrata
  Intron number 2 from transcript 317356 (locus 317356) deri ved from phytozome v7.0 (chr-ID scaffold_3; pos 1760428 to 1760934)
aagttctgggtaaaggagcttcaaagactgtgtaagaatctctcgcttctcttcttttctgcttatgtttctctcaaaattttgcagctttttcttttctggatctggtgatgatttaagcttaatctgttgatctttcttcataaagtttgaaactttttgttttcccaatcaaaacccatttgtgatccaacaaatatttcctttcgatttttgggtttttgtgtgtgtgtttgtgtttgattcatgattgaatctaatcctgttaaagaggaaataaaaaagttgagcttttttgtttttctgcttaattgaatcacttgtagtttgatcattaattccccacaagagaaatttccaacaacaacaactttgccttttttggatctctttattgctttgacttatacccaattcagattctgcaaacaaaacaaaaaaccttctttgatcatacacacacattattaatcttctttcttttgatttgtagttacagagcatttg

SEQ ID NO: 40731 - DNA, 421 bp, Arabidopsis lyrata
  Intron number 1 from transcript 490994 (locus 490994) deri ved from phytozome v7.0 (chr-ID scaffold_7; pos 1842346 to 1842766)
gagtgaccattgttaggtacctctattgaaaattcttcaactttcgattgctcttaagcagatgaattagctagctttggattgtgtgagcatggtgttgaattgtagtacctattaggtatgagaattggaaaggaacattatttgattctggaattggataaagttgcttgctttttttctatgggaagtaaagttctgagcttgatgttgagtttcttgtcaaaatgtacagagcataaatgatgttcaattgaaggaatcttgaggaagagcaattagaatagcttttgtagtttattagaatagatttttgtcttgaaacatcaattgatagcatctgtatgattttcgtgaagggtttcgtctttactttcacatgcttaagcttttagcttttgacactgcaggagttactaaa

SEQ ID NO: 40732 - DNA, 608 bp, Arabidopsis lyrata
  Intron number 1 from transcript 888054 (locus 888054) deri ved from phytozome v7.0 (chr-ID scaffold_7; pos 133812 to 134419)
gcgaggtcggagccagcacatcaaactatcaaaggtcccagctttttgggctccacttccctctcgtccttttttgcctcattctacggacaaaccaaacaaactgtgagaaagaataagagatcatttttttaggtaagaaaagaaaagagttgatgttattattgacatcataataataattcaagtctcctcttgattttaactcttttagtttagacattttctcgaattgggggtcaaatggatgaattttcttctacgtttcttctattaagacaaatcaaagaagagaacaattatacggtttagattggggaaaaatgttgtttaatagccgaactttaaaaaaatggccgtttaatacgtgaacttgttatatggccaatttaaacatgaaataaatgttgaccggtcaatttaaacatgaaatattcgttgaccaggccaaaaaccacacgccgttagctgtcgttaacagatctgataacagtcgttaacgattccgttattacctaaaacgacgtcgttttgggctaaatcgccgccgctaaatcctctacatcttccagctacttaccggagcatcaaccgtcgaagctgcaaac

SEQ ID NO: 40733 - DNA, 519 bp, Arabidopsis lyrata
  Intron number 1 from transcript 951177 (locus 951177) deri ved from phytozome v7.0 (chr-ID scaffold_8; pos 21078729 t o 21079247)
cttgatacaaaggtttatcattctcttcttttcttatggattttgttcttgacttgtttttctagaagtgtttaaacgtgaattgtgttaatctttcttatggactaggatctagattgtgtttctcccttgtgattttgctgaagagtgtttacactttgtagttgaattttgaaatcttcaagtttgattttttaactccataaaagcttcagcctttcaattgtgaaatttcagtagagagcaagaaagttattttatgagaagggaaagaaattccaatagagtgtctttgtttgctacattaggcatttagtgttttcattttgcttattattgttgatggtctcagaagcagatgtttattgatgacgttggctcaaactagcaactgatagatcttatgtgttacttagcgaaacattataattggagtctatgtctgtgttagaaccatttcagtaaataatatgagtgttacatcacaggggcctgagattcgtaccggtttcttgaaag

SEQ ID NO: 40734 - DNA, 347 bp, Arabidopsis lyrata
  Intron number 2 from transcript 482009 (locus 482009) deri ved from phytozome v7.0 (chr-ID scaffold_4; pos 14467849 t o 14468195)
cgtggagtcctgatcactccagtatgtttctctcttccttgcctttttgtttttttttttaataattatatgaggaggaggatctatagtttggctggtaagaaagatagatgagagaactgaattgccttttatgttgttctaatacatcttgctaatcaaatttcttcaaaatccctagaattcaggattttcgggtcaatgtttgttatgtctgtttgtcagtgtctcttcttaggaacagttggtatcttctgtactaagcctgtaaccatttatgtgctgtgacatttgctttgtttttcttcctagtggttgctctctgtcctaacaatactcaagttcat

SEQ ID NO: 40735 - DNA, 258 bp, Arabidopsis lyrata
  Intron number 1 from transcript 903319 (locus 903319) deri ved from phytozome v7.0 (chr-ID scaffold_3; pos 1748715 to 1748972)
agcgtttcttattgtgctcgtcttcttctctgctggtaaataatcctttttgtttttatacgttaaatgaacatttttacatttttacatgcaagaagttaattatttcatctagtaagttgcatgatggccagagattaacaaattggtttacttgtttcttttctctcagattcagtctagttgatctaagttggttttgattaaatttgtatgattttttaaaaaacaatttgcttgcagaattgaaaataggaa

SEQ ID NO: 40736 - DNA, 709 bp, Arabidopsis lyrata
  Intron number 3 from transcript 922857 (locus 922857) deri ved from phytozome v7.0 (chr-ID scaffold_1; pos 22121580 t o 22122288 reverse strand)
ccctctatcaccttcgtcttggctctcctattcaggtatatatacaaaagtgtctcactctttcatataagccctgagttgatccaaaggttgtgtttattttataaaaacaaatcggaagttgggcataatactttattttaattttaaataatttgtgataaaaagctaaagaatcgtaaaaaataataaatcaaatcaaagaaaatcactttaatctattttattatttatttttatattcttaaagcataaatgatagccatattattattttcatatcatatgtcaattataagtgtggatgagaattggttacttttaaaatatagtttattttatgcataaaatatatcaagttgtgattttgctttgtgtaaaagtaaattagttatgaagataagaaaaagtaagcaggagaaacaacaaattgactattatgagttgagttttgactcaaaagatttgtctagagaaagaacgaggataaagaaaatatgtttgaaggaatcacctacgctttcaatatggtatattttaacaaaccatgtaggtcaaaaataaaatatggaatcaaattatctaaaatttagctagaaccaatacatctaaaaattcagtatattttgctcaaatatttcgaaatctaaactgaatttatatataataaaaagattagagacggtgaccttgaagaagtcacacggag

SEQ ID NO: 40737 - DNA, 499 bp, Arabidopsis lyrata
  Intron number 3 from transcript 906835 (locus 906835) deri ved from phytozome v7.0 (chr-ID scaffold_3; pos 23753428 t o 23753926)
caccattgtcgtccggtgttgtaatcgctaaccttgtaagttgaaagattttttaatagagaacacttcaataacaaactaaatcattgtggagaattatgatgaacctcataaagaacaatttgataacagactaaataaaatttgaagttatgaatccattcgtttgatataattcaagttctttatcaaacttattccagttgttaaaataaaaactgagaatttgttgtgacatgtgaatgaatgattaaacaatgatgaataaaaaaaccagaattgggaaattagaaatcagaatttgtaaattgcaaaaagaagagacatgcgatttatgaaaccctaaaatcagaagatgcaagaacttcaattttacacccgataaaagttggaggaaaccggaatcagaaaaagaagagatttggaagctttttgtgtgaattcatgttgtttcattgttgaagaagagaagagaagcgaagtggagatatcaagatcg

SEQ ID NO: 40738 - DNA, 566 bp, Arabidopsis lyrata
  Intron number 3 from transcript 314063 (locus 314063) deri ved from phytozome v7.0 (chr-ID scaffold_1; pos 18017140 t o 18017705)
cgtgtttgtattgataaggtaaaggcgtttttacactttctatgtttatctaatacttctggctactcttctggttgtgcatttctttgaagcaccctaaaacactcctttttgattgggaaaatgtgactgagaagattgaactcgaacaactttagaaaatctacctaaacttgtataatcagatcatgatatttagtgattcttacgctattagtcctctgaattctgatagttcaatacttaagtaatgggctgccttttttatgcatctgaactaaaactagcctttggtatcatctttagtaatcaaagtaaattttgtactgttaacaataaattcaaactaaacatttgttcattagcattaagattagtttttttctcagctagtagtagcataagactatatgggtatagctagcttttgtatggcacagtcaaaacctggcaaatgtgatttgtatttgcaatgacacagtaaagccccttaacctttttcttttaatgcaaatcttgtgtgtatatctctgggcactgatcataattgttttgacagtgggctt

SEQ ID NO: 40739 - DNA, 259 bp, Arabidopsis lyrata; identical to SEQ ID NO: 38455
  Intron number 1 from transcript 931386 (locus 931386) deri ved from phytozome v7.0 (chr-ID scaffold_3; pos 20716547 t o 20716805 reverse strand)

SEQ ID NO: 40740 - DNA, 769 bp, Arabidopsis lyrata
  Intron number 1 from transcript 939886 (locus 939886) deri ved from phytozome v7.0 (chr-ID scaffold_6; pos 1665051 to 1665819)
gagtcctaactcgatatacttaagcatctccaaaggtaggttctctcaatttttttgatgagttctcttctataatttgattaaaaataattctaaagtggttaaacaagagagaatcgcctctcttaagagggttttgagattgtgagagagacggacacgtgtcgctgattgattggaggaatcattttaacaaaagcaaaaaaaaaactcattttttttgttatttctctctctcgaccaaatcttccaaacacgactttctctctctgtctctctcgcgaatgcgattccaaggaagtgatgaacaaccgtcggatttcgtgattttccgatgaatcgacgccgattttgtggtatgtgagacttaccagccgtcggaatcatgagttggatagacggttaagaccatcggcgaatggagtcaaatcgaatcgtagattggcgatggagaagaaggattcgttgaaggatggtccaacttcttgttccaggtatgaatctagcccctttcccctgtgtatcatgacttaattcgttttattttgtggttcttgatccaaattagggttttgatttgtaagttagggttttttgtttttagcgacaaaatggtgtttaataatcaatttggaggctttgtgtttgaaaattttccataattgttgacgaatttgtcatagatagttagatttagggttcatagtttcggggaaaaaaattatagtttggttttgtcatttgaatggaattggaggtgaaagattgc

SEQ ID NO: 40741 - DNA, 940 bp, Arabidopsis lyrata
  Intron number 1 from transcript 482208 (locus 482208) deri ved from phytozome v7.0 (chr-ID scaffold_4; pos 15482913 t o 15483852 reverse strand)
gaaaggttctttcttcttttctctttattctcacctataaaattagagatcccgtgcttaaaattcccccctttttgatgtttgcatgagtttaagcttttgaagtctcagatttctaagtctgaaattatcagatcaaatctttagatgggtagagagtcgcaaaatggtgtagttattaaacatatgctaaagatttagctcttttgatctatttatcaagtgaaaattttcttatttttgaattgaagatggagaaatgtagaaatagttcttcttacttttagagttataccaaagaaatatgtttgatttcttctacattgacctctcttgggatggattactgactcgtgttgatcacttgtttgccctgaagatcgatcattttcggttgtgattaacttgtgaaggaatctgtagatacatttttgagcctcccttcatagtgaaaacttgtatcatgttttcttcattggttggtttgtcacaagaaagtttgaaactttaaacctttcggtgtgtttgttacttgagtagcttctgtttctgttcattctgccattcgtgtgggggttttcgcagtttactggtcagtgtcaagttcagaaaaccccaaatatatctctgaacatggttgctggtggagtattttgtttcaagtacccatctttctgttacttttcgatttatatgcacataaacacatcgcgaccaccatatcttgttttactcgaaagggagcaagaaccttaagaacttttctttctgttgctccactgcttctttacttacatttgaatcataggccttacaagtggattcacccatgttttaaacttcttggtttgacaagaaatcttcaaagttcagaaattctataacttggtttcatttttgcctttcctaacttcagacatttgcaaaatgcaggtgtaca

SEQ ID NO: 40742 - DNA, 419 bp, Arabidopsis lyrata; identical to SEQ ID NO: 39003
  Intron number 1 from transcript 496146 (locus 496146) deri ved from phytozome v7.0 (chr-ID scaffold_8; pos 19391538 t o 19391956 reverse strand)

SEQ ID NO: 40743 - DNA, 705 bp, Arabidopsis lyrata
  Intron number 3 from transcript 470092 (locus 470092) deri ved from phytozome v7.0 (chr-ID scaffold_1; pos 164656 to 165360)
tttttgcaaagtattcaaaattggttggtttctgggtaagtgagtatctttgggactattccttccaaattgtcttaacgtttgtaatgtcatctgccatcattgctttaccagattgtatgtttctcactgtaaattttctacttccctttgattcaaatcatagagagaagaaaaagttcaaatttcttgattaattctgcagtctacttctcatccctcagcttgttttttctgctttctgggcataaagaaagaaaaaaaaaaaacttaaaaagttcaattttttttttttgtctttttgattttcgtaaacaatagatgaaacgtattttaagattctgaatcttaaagattggttctttacggttgatgtttgtattcactagaaaaataaagctaaagttgtgatctcatacttataattgctttatcgtcgatagagacaattgagtgatttttcttctgttttctgtgattcttttgtctaaattcagaagatgatcaacactttcccctatatctcatttctggtcttctgttttgaatcagattcataatcacaagtttattttgtgtgtgtgtttattatctcagtgactcacctaaagatcatactgcatcaattctgtgaaatcttgcttaacctctacacgtgtatacttactgaatctctctacatttcacagatcaagttttggctgg

SEQ ID NO: 40744 - DNA, 687 bp, Arabidopsis lyrata
  Intron number 4 from transcript 470092 (locus 470092) deri ved from phytozome v7.0 (chr-ID scaffold_1; pos 165364 to 166050)
caacagtcaagtcaactactaaattgaaggtaaaaaatctccctttagatcatccttaaagattacttgtaaattttgggctaatttcaatattatagaagatcactcagtatctaatttccttacaaatagagagacagagacttcccattgacttctcttcaaagaaaagtctgcaagttaactttaatcctcagccagatttttcctttctgttactatcaagtatcaacacactgaatcattctgatcagaaaattacagcttgtgcttccccttttttaagaaaactttctccaatcacgaaactaatctttacgagtttttaaaagtttttttttgcattgacaatgatggttcatggagagtgagtatatctcgtggctgtgaatgagtttaatgtgttatgcttatgatatgttagggtgaagcatttaatgaatatgcatctagaaaccactcgaaatgatatgtcgtggggaaacttccttcttttcttaagcaatggcttgtgtgtatctgttagatgttgttttcatcttaacttaatattttcttttgtcttctactcactatattgtgttccataaagttttgatctttattaatctacaagtacagttaatcagaatttgtgatctgaaattatcagtgaggaacatagagaactggggagaattttggatc

SEQ ID NO: 40745 - DNA, 310 bp, Arabidopsis lyrata
  Intron number 1 from transcript 926634 (locus 926634) deri ved from phytozome v7.0 (chr-ID scaffold_2; pos 15523866 t o 15524175)
gcggatcaaaaccgatcaggtactcacaatcaacgatcatgggtttacgcatttctttaatttcaccgcgcttctcgtgtgaaaaggaagattttttgttcaaaattatgtttgtttcctcaaattcactatcaaatttacgcgtctattattggatggttttgatcggaaaattttctaaagaaacaatataggtccgtttttgattcgttgctctgttttttctcttatggaataacgaatccaaaccctttttctattgttgggtttcatagaggagaagaaggtgaaatcgcctaaagtgtttgaa

SEQ ID NO: 40746 - DNA, 515 bp, Arabidopsis lyrata
  Intron number 2 from transcript 940329 (locus 940329) deri ved from phytozome v7.0 (chr-ID scaffold_6; pos 3417721 to 3418235)
ccggaggaatcttagaggaaaccggtcgacatctggtacttcttcttttttctttctaaatgtttatttttattaattgttcaaaacatttttgaaataaataggatatgtttttttttaccgtgttagttcatcatatcaaaaattttgtttaacgaaattggtcttatcgattgagtactcacataaagaatccaagttcgaaatttccaaaagtaaaacctataattgatttgtgctatgctttttgttaataagcacacgcatggtcttcgatattgaaatttatctttggctaagtaaaaaaaaaaaaaaaactgaattggggtgcatgaagtccgccggaagagttcaaccaataaaactaacgaagagtatttaatgtcgagcgactttgatagggtgcatgaaatgcttttgcctacgagatatgagtatttaataacccaaaaaaaactctaataaattagatgtggttgcatgcatatgcatggatgaagggagagagatttagc

SEQ ID NO: 40747 - DNA, 682 bp, Arabidopsis lyrata
  Intron number 1 from transcript 941736 (locus 941736) deri ved from phytozome v7.0 (chr-ID scaffold_6; pos 9313701 to 9314382 reverse strand)
ctactcacacccatatcaaaggtcttggccttgaggtgctccttctcctctctctccctctccgtctccgtatatagctctatttgactttagtagattcccagtagtttgctcgagtctagggtttagttaaggtttaaagttctatgctttttagggttttatagctagttgcttcgtttggtacgcttagagactcgtttctctgttctagcacaaccaaaccctagtttgcatttttaaagtttctgactttcttggggataatgcatctagatgtattgcagtatgctcgtattgctcaaagttcttcaaggttttgggtttaatgtaaagtcttaggatttttaagaggttaaagctaattgcttcgtttggtatgctcctagaccttttttggttgtagcacaattataccctggttttgatttgcaaagattcaattgaatgtatctattatgaactattgttcctaacgatgcttgaagacccatactttgccttgctcttccactttggcactgcactgtgattttatttagctatctaatgttcttttactgactgtagtttcttaagcatgtgtgtgatctctttctatatccagtacatcatttctgttgctaatgttgcgtctccttttctagccaaccggtattcctataaaattggcggctggatt

SEQ ID NO: 40748 - DNA, 557 bp, Arabidopsis lyrata
  Intron number 1 from transcript 491306 (locus 491306) deri ved from phytozome v7.0 (chr-ID scaffold_7; pos 3142986 to 3143542 reverse strand)
tcttcttctcttagataactctctcaaactctcaggtactatactctcttcctcacaaaactccaagttttgtttcttttgagttgtctccgaatccgattcttgtcccttctatcttttcctgtaatctctttgtgaatgttcttgattttggctattttcaagaattggtttcttgatttgactcttttagctgtttaaaatcgaagcttccgttggtgagttcctttatgccatgcccattcttcttctactacttattcttcgttgaatttgtcttcaagatttgggggttttagtgtctcagtctctgtttgctgattagggttcaatttgtatagtttagttttacttcaacttaggttgcaattaatttgatatttttctcttttgcatgtcacatcttctattgttctttgtggttttaatgaattacaaaaatttggtttttgaggggattgattggcttattctataaaagcttgtttctttattatcacaggttaaaaatcttagtatggtttttgtataacagctaagaagaagttttgttgaat

SEQ ID NO: 40749 - DNA, 785 bp, Arabidopsis lyrata
  Intron number 1 from transcript 482935 (locus 482935) deri ved from phytozome v7.0 (chr-ID scaffold_4; pos 18991717 t o 18992501 reverse strand)
ttttctctctgcttcgtcgtcatctagggtttcctgtaagttcttattatctcttcttgtttctcaatttatgctctttttggtgttttaggagattttgccatctgggtttatgttattgaatcgcttggtgttagaatccttcttattgacctagctagtaaaaaattgggcgttttcgttggatagtgattgaaggtgttataggtgtttaattgtttgataaaatgtgtatatttattgaaatttgatgatgcttatggagttaaagtgatttttttttttgtaatttgagtttgttggtgaatgataagatgttatctagaatggtacagatggttcgtgtacatggttgtgttttgtgtatgagtctgcaacacaacaaattgattagaggttcattagttctcgattcatctatttaaggctctcttttgttaaccttagcttctcttggatcgcttgtgaatcgtagtagtttgcattagattccttttaagcttctcaaacctcactttgggcaatagtggtgtcattggtgttggttctcgtagaatctcctgattcgattcatcatctaggcacaataagagtaattggtagttgaaaactaaaagcttgagttcgttgtatataaagttttaatcttactttgttattggcattgtttagtttgtattttctgtttttatttttttgactggacccggtgtgctaattttgctatgttactgttgattttagagaccttaatttttttaggaaatttgtgtttttttaacaga

SEQ ID NO: 40750 - DNA, 463 bp, Arabidopsis lyrata
  Intron number 3 from transcript 476195 (locus 476195) deri ved from phytozome v7.0 (chr-ID scaffold_2; pos 14545406 t o 14545868)
aatcttggactggtaccattattggtcctcatactgtacgttttctctatctctccatcgttataacttgtagtattgctaaagaaagaaactttccacatgttaaaaacttaaaagatgaaatttttgatgatagagcaagaaattttccaaatgttaaacttaaagatgcaattttttttttaataatagagctagataactctcaaatctcttcatcgttagatttgaataaagatacaatttttgatgatagagcaagataactttcaatgtttcattagattctgctgcttgttgttataactggaaatgatccttagctgagttttagacgtatgtagcattttaatccattttggtgaattaggagagacacaaaagggaatcattttactatttgtttccacttttgggattttgagaagaaagatttgattttttttttgttatcagactgcgt

SEQ ID NO: 40751 - DNA, 921 bp, Arabidopsis lyrata
  Intron number 1 from transcript 472254 (locus 472254) deri ved from phytozome v7.0 (chr-ID scaffold_1; pos 8634181 to 8635101 reverse strand)
ctaacctcggttttgggagccattgataccaccaagtaaactatctcatgctttgattattttggatctaataattgatacaataaatgtttgatttgtaagagtgtttttcctatatatatatgctttctgatggcattctcatgtttacctttaaccttacaaaaataaaataacaatggatacaaatggaatatactagtatgttctttgagaaactcggtcaatctccatcttcagttgagaaacattaattctagtattcctttttattctcttgaattatggtatcataaaaagagaaacgtttcctgtaaaactctctatacaacacataataaagcgaaacagaaacaaattttgcaaaaatgatcttttgttcgaaaacagaatcaattaatttttattatcaatggatattataataagatttgctgacattttgttcaacttgataactaataaagtattttgcaatctaaataaaacaataaatgtataatattttgaatttgcatatatccggcaacgataattaaaaaatttagattccatctcaaaatccatcaaaatataataagaattggtaactttgtattatgttgagattgtcttgccttttctagtaatgcaattgatgttttttttttctaagctaaattttgttgtctatttaacaacctggttagtaaatcattacaataaactaaaataatcacatcaacaagcgaagcagaatcaaggtgattctaactttgagtcatcatctcatcatgaatggtttacctttgcatctcctagacgagattctcttcagaatggaacctaaatctctgggaatgatgcgatgtacgaataattttttcaaatcttatatatctgacccaaaatttgaaaatgttttgtttcatctttccagct

SEQ ID NO: 40752 - DNA, 921 bp, Arabidopsis lyrata
  Intron number 2 from transcript 482894 (locus 482894) deri ved from phytozome v7.0 (chr-ID scaffold_4; pos 18830573 t o 18831493 reverse strand)
aatccatctctcgctcttctcgcgccggtattcaggtactcctcaaaccctagctccttttgcgtgttgagaatcgagtggctctgagtttgaatgtgctttagggtttttgatttatgttcatttgtgatttgggaactagatttatactttgttctatctttaatgcattattgtgaaatcgttgcctctctagtttctggaaatatgtttcgctctgtgtttctgcaataaagtaactatggtttatacacactaacttggtttctctgtatgcaatctttgtagctgcgtatgttggaaaacagtgttatctatctagattctagagtaacgtttatacaatggagtgcttctgttttgtagctaattacagtgtactaccaattggtactaagtgagccttaattgaagcatctacttgtcttgtgtatgtttgtgtgtgtgtgttattgtcattagtttacttttgggaatcttccttgttaaagccgaattgtagatatcactgaatccatacaagtctatgtttcttatatggctttattgctgcagtgtcttttactatgataatcacttgatacgttgtaatatctataagatgtactagatgaatggtcaagcaaataaaagaactgtgtggttagtttaagtgtcttctgtagttatttataagataaacaattggttagcgtttcataactcattggattttgtgtaattggttatcatatattgtgcttcccctatataaatgtttgcagtttgaatgtatatctatctacaatatctatctacaagaagatatgtctgattaatgggaagcctttctctttgctttaagtgatatgcttatttttttctttccgatgtggtcttctttcagtttccagtgggtcgtattcatcgtcaactcaagca

SEQ ID NO: 40753 - DNA, 270 bp, Arabidopsis lyrata
  Intron number 1 from transcript 475817 (locus 475817) deri ved from phytozome v7.0 (chr-ID scaffold_2; pos 12277898 t o 12278167 reverse strand)
catcttctctcatatctacaagccacacttttgaggttcaatatttcttatactctctctctgtctctttgatttttctcctttacatgtatatatatctagttcaatctttttatcttgcagattaattacaagtaaactttttgttgggatttatctcttaagtgtagatacaatattcttgtattaagttataatgttaatctccaactgggatctaattcgtttttttttttttcttcagttcttcacttcttctacatatattag

SEQ ID NO: 40754 - DNA, 745 bp, Arabidopsis lyrata
  Intron number 7 from transcript 481705 (locus 481705) deri ved from phytozome v7.0 (chr-ID scaffold_4; pos 12112837 t o 12113581)
gaatgtaagctgaataacttcttggggcttagtttctcgtgcaaggaaattcttcatggttctgtcttggaaatgtatggaaccttgaagcttgatagatggggttttcttataggtttaaagggtctttagctgagatatcattcctatgatgtgtgttggtacattagtaagataaaaccgtgcaatgagttcattaatggttaaatcctatatattttgtgtttacacagagaagaattagctgtggaattggaatgtgttccaacttgtctctgttgtgataatgatcaatatgttttcaattctaagtttctaactcttgtggtccattgattcttgaatcctttgtccaggttagtactttcttcgaagaagggacggttagaatatgccaaatacattctctggttcaactttcttaaaactgtctgcatctttggatccttagatttgtcttccggttccggaattatttgactatagataccgatttgacagaagtcttacatttcacacaaataagagtttgccttataacattgtttccacatcatttctgcttcagtgatttttttttaatctagcttcaagattcaaacatagtttttgatctatcactggtttgaatggcacttaagctgtgcgtgacgtacattagttttgatgggttttttcgcatgctatggcggttaagttatgtttatattatgtttcaggtactaaggttgcaatcttatccaag

SEQ ID NO: 40755 - DNA, 588 bp, Arabidopsis lyrata
  Intron number 1 from transcript 894156 (locus 894156) deri ved from phytozome v7.0 (chr-ID scaffold_6; pos 9608160 to 9608747)
gaaagttagctactgacttcaccggtacttagcttttctcttttcttcgttatttatttcagtaaaatatatagtgacacacaacatgaagatatacatgcatgcatgagtatatacatacatcacacatgttttaactaaacaacattttgaaccgcatgtatatccactatgcatgtacatgtactcaaagatgatgatctaggaggcctttatgtgaaacgatgcatgcagtatttagttgaatatttctgagagtaattgtttcacatgcacctatatttgatgtgaatcaagatttctagcaagggttaattaagagtaaaacattaagagccatgacttgatgatgatttcttcaacttagagtacaaaaattaaacaaccaattgttgggttgtattttgcatgcatggggagcaaatgttttactgaaatgaagaaaacaatgtacatgcattaggttgatatttgtgcatgtatatgtgtacatgcatacacatatactaatgcaataatgaattattagtttattttctgtgtgtttgtgtagctgagaatcttgggttcacatcatacccacaagct

SEQ ID NO: 40756 - DNA, 455 bp, Arabidopsis lyrata
  Intron number 2 from transcript 478145 (locus 478145) deri ved from phytozome v7.0 (chr-ID scaffold_3; pos 3350483 to 3350937)
cattaaagagcttgttcatccaatctacaccaaaggtaattattgaaagctttgctttgattccggttcaatttcttagggttttagtttccggttattggataacagtaaccgaaattagttacaattccatggttcagtttggcttttggtttatattcggttcgattttagatagaaaaatatctgaagaatcatacatatataatcaaattcaattaacattatagatttatagtcatattatatacactatgctgataattctatagaaaaaattagtaagtaatgaattgtccaattttgggtcaatcctgcttttggtgtagtttggttcgatttggtataatgttgattaccctaccaattttatctattgaagaatttggtttcataattcgattattctgacaaatgtagggaacttggtgaagaacggagggttcgaagaaggt

SEQ ID NO: 40757 - DNA, 505 bp, Arabidopsis lyrata
  Intron number 1 from transcript 897215 (locus 897215) deri ved from phytozome v7.0 (chr-ID scaffold_5; pos 11091630 t o 11092134 reverse strand)
tggactggagatcgtaagtgaccttcagtatcttgacaacaaatctatattggtgatcggagctactggcttcttaggaaagagtactgatctatatctctctgtataattgtctttagatatattggcaataacgcttcttaaaattttgtaacgtccattaattagttttaattttttacaaggggtatttgctaacaaatcctttgaattaattatacgagagtcaatttcataaagaggatgaaagcaatatcagcattttattaatggttcttgacattgaagcagctggatcgacatgtgttcaaaaataaaataaaaacttttttgtttatcaagaagatatacactaaacttcaaataaatattgttttttttttcttttgaaatttgtaataagtattgttagttgttcttaacttttatgttagctttcttttaacttgtatgcagtttttgtggagaagatactaaggttgcaccaaacttgaggaaactatat

SEQ ID NO: 40758 - DNA, 370 bp, Arabidopsis lyrata
  Intron number 1 from transcript 350906 (locus 350906) deri ved from phytozome v7.0 (chr-ID scaffold_6; pos 7463994 to 7464363 reverse strand)
ttcttcgaagggaagatttttcgtctgaagtaagtctcataatttctcatacttcatcacttattttcttattagcctttttttcttatgtttaaagatcgaatctttttgtccttcagtgtgtttcttgtagtctcatgaacttagatctgtctgttcttgctcttaactaagtttactgctttttccgatttcttgttgagttcttgtgtgtgaaataatcggatcgaaccacatcgatttaaccagtgaaaaaaggttgaaactttgactgtatttatcactgaaattgaagaatgtggcttcattttaccatttcttgatgttctttcttttgatatttcttgatgttgttgtccctctgaagaga

SEQ ID NO: 40759 - DNA, 295 bp, Arabidopsis lyrata
  Intron number 1 from transcript 921570 (locus 921570) deri ved from phytozome v7.0 (chr-ID scaffold_1; pos 11166604 t o 11166898 reverse strand)
cccaaagacgcaagcttggtcaatatcagcaaaaggtttttcttttttggaatctgagatcgagtggattattagtttttatacatcaaaatatcctaattggtgatatcttaaagtggattgttgttcaatggatggttttgatttgtttttaatgtttttttttattgtttgttggtactgatgaaaataaaccccagcttttgacttctttggctcatctctttgttaacccatcttctcaaattttgctaatttagcttgagaaagtaattgaagccgaaaagcaagctgc

SEQ ID NO: 40760 - DNA, 499 bp, Arabidopsis lyrata
  Intron number 1 from transcript 477873 (locus 477873) deri ved from phytozome v7.0 (chr-ID scaffold_3; pos 2248997 to 2249495 reverse strand)
tctcaactaaacctcacctcgacgattgtctaacggtttgtacaaattttattcaaagttcactttttttcttttgtattttttttttctttccgacccatggggaattttatgatgatggggaatgtaggatttcaagaaccaactgagctgcatttaacttcatattctttgatttttcttagatcatggagaaatcagttcaattggcaaacttttctttatggttctagcgattggaaagttaaagctagaacctttatagcattggttgggaaattagtaaattttgaagacatttagtgtgtttatggtatatattgatcttcttataaacgcaaatttggatggatgattcctaggttcatagtcaggcaaagctagaaccttttatagcaaaaccatgtcctcgagctttgtttggtacgattgtttccattgagctttatgttgttttattgcaggttatagcattgccattgcctcacaagcctcttat

SEQ ID NO: 40761 - DNA, 387 bp, Arabidopsis lyrata
  Intron number 1 from transcript 494098 (locus 494098) deri ved from phytozome v7.0 (chr-ID scaffold_7; pos 23640981 t o 23641367)
gacgagaaagctaaagaagacaaatctccctgaaggtaggtctaattttctcttatttcgattcttttttctcttaattcgagaattttgttcattcttgcttacttgagtttgaagattctgaattgattaaagatgtttcattgcacaacccaaaagactttataagagtttgtactgttctgttttgttttgattgttgttgtgtatactagattgtgttcttagagttgtgacttgttttatttggaaaattgagaccttttgatttggaatcacattgaactcaattacaaagggtttatcttgtgcagcagaagctaattgcttttgtaaatttttgtttgtctaattgaagtgactgattaatcaatgcaggagaaactg

SEQ ID NO: 40762 - DNA, 482 bp, Arabidopsis lyrata
  Intron number 2 from transcript 477112 (locus 477112) deri ved from phytozome v7.0 (chr-ID scaffold_2; pos 18675040 t o 18675521)
ttccggtgtcaagaaaacctctaagcgaccaaaatgtgatctttctatctattcctccaatttcctttttcaatttttctgatttgtgtccaactttgttttatttttgtcccttggaaattctcgtcttgtttttctttctttcttggaatggtcattgaatttacataaaaatgaaccttgattctttgtttatggtgttgctataccacgatcatcatgtttatgaatgttttgtatcatggacacatatctttgatttgtaatatgcattcttgtatactctaggtttgaatgcagattcttatttaaaagagatagctaggttgttgaatttttttttatgtcacattggttgaaatcttttgttcgaaaacttttaaccattaatcaaaactgtatggtgggctatggattctctcttcttaacaactgtttctttaccagattctaagtttactcagcaagagcttccagcgtgc

SEQ ID NO: 40763 - DNA, 752 bp, Arabidopsis lyrata
  Intron number 3 from transcript 473540 (locus 473540) deri ved from phytozome v7.0 (chr-ID scaffold_1; pos 15794710 t o 15795461 reverse strand)
tctacgccggcgattctgacatcattcttgcccaagtaaacaaactctatttccttccttttagctttaataagtcctatgcgtctcactttggttttacgtaaatggataggtttatatatatcatatattttctaatatatcgaattaagtttttaatgatatatttttcttactacaagtctaacagtatattataactatttaaaattgaaaagaagtttttgtctgacgaaatataaataaaatatgaaaacaaaacataagatatatatatatatataaggaaaataaataaaaaaaaacaaatgaaaaaattgtaactttatgttaagtttgagacattaaaacaaaatagatgattatcagttaccaattataccaaaaatataacgttacaaaatgttacatagaaaataaatttttttatttatgatgatggattggtttaagtgatgagtaggtgattcgtgccacggcttctttctatattgaacatataaatctgttttctataattttatgtttttgtatggttagtttatttagaataaacttttttcttttttcacatctggaataaacatgtttatactatatatacccatctatatatatatatatatatatatatatatatatatatatatattatgaactgggagtttgccaatgttttattaattgttaaaacttgagaaataaaaacatttatttgtgatgaaataaaaatggtattgtttgaatggcag

SEQ ID NO: 40764 - DNA, 394 bp, Arabidopsis lyrata
  Intron number 1 from transcript 487751 (locus 487751) deri ved from phytozome v7.0 (chr-ID scaffold_6; pos 3725495 to 3725888)
aagattccaataagcaacctccgtaagttttcaatctttttcgaaaaccctaatttccaattttgttctgctaagcctgacgatacgtgttttttcttttcgtgattcagttttagtgtaggaaaaattgaattagtagctcttttatcttccctctgattctctcatctcctgaattttgctagagttagacattgaacctgaaattgaatgcggaacatatgattgtcttgaacttgggattattaatcggttttgatatttgtctcagttacaacttgagtttctgtgcatacgctataatgtggattatggacaagttgtttggttatcttttaatggaggattctctctggcagcgaaaagcgagtacggtttccaaagggtaaaaagt

SEQ ID NO: 40765 - DNA, 471 bp, Arabidopsis lyrata
  Intron number 7 from transcript 483427 (locus 483427) deri ved from phytozome v7.0 (chr-ID scaffold_4; pos 21138592 t o 21139062)
tggaagtgttgacgccacaaacttctccgcaatatgtatcctttctttttatgagagaacttaagtaaggtgatctagttgtaaagctgtttttctggattttacagtgaatggtgcgtttcatcagacgttctgtagatatgccttgtaggtttgctatacgattatgtcttaccatccggaagaagtaattatttctaggagtacatgcctctgtggtagagttcaaaatagtttaagaagaatggacccttacactttgaaatcttttggtgaaatcacctctcatcattttgcgctgtataagtttatctctctagctggcgtatccatttaggactatacatttgagtgcatgtgtagtttaagttctttttgattgattttcttgaggtagcaattttgaaagaacagggatccttacatcagtttgtagacccatattcatctgttccttgtatagctgccatt

SEQ ID NO: 40766 - DNA, 718 bp, Arabidopsis lyrata
  Intron number 2 from transcript 353011 (locus 353011) deri ved from phytozome v7.0 (chr-ID scaffold_7; pos 870522 to 871239 reverse strand)
acttgaagcatcctaatatcatcagatttaaagaggtatgtatgataaataatgatcaaaatcatgaccgcataaccataatcgagtctgaagtttggtttacaaatcggtttagtagaggacacacataaatcaactaaacaatagaaaattataacaaaaatcagtgaatatgtgatgataagtttggttgataaaaaaaaaaaaagtgataataagctagtacgatattatggtttagtgtacaaattaatgttagcctagaacgtaataataaacatattttttttccactgcaacatagaattggtgtgaaaatttgatatccgttggtttgaattccgatccacggtaaaataaaagtaagaaatatctggccatgtaatttatgtgtattaatttcttatggttagactttggacctcttgtgaaaaaaaaaaaaaaaaagactttggacctcttctaagttcgaagagaatgtattaaattgcttttaataaataacatgtcctattctccaacggtccaaattcgagtttcatatgacagcttatgtatataagtcacggcgttgaaaattcgagattatataaaaatagaagcaatcggtaggtcgtctcgatcttgaagataataaaataaatatgtttatgtgttggttttttttggggtctattttgcaggtttttgtaacgccaacacatctggccatagtaat

SEQ ID NO: 40767 - DNA, 649 bp, Arabidopsis lyrata
  Intron number 1 from transcript 315701 (locus 315701) deri ved from phytozome v7.0 (chr-ID scaffold_2; pos 11776765 t o 11777413)
acggtaaaaatctccactttattgatgttttactcggtttatttaggttttagtctctattgattcttatggcttggtcctgtttcagactcttatgattcttgacaccaataattggaacatattgtttacccaattgctatatcagagccatgatgttaattaacgattgaatggagtaatttgactaatttgaatgtgctaaagactttaactttggatttcttgaatactgatagatcttgaggctgcttgtgttttagttggattcatctatgcacaagttcttcttgagttacattgttatttggacgatgctattctcttgtgtgtcgaaagttctcttttgggccgttttgcagggtgatatgttttgccttaattagtgttttcgtatgttgttcgcaattgatttgaagtttggctctgtaaactgtgatcaagaatgatgcattagttttccagcattcatgattcttggatttgcttaggaattgttatatcttgataagatatgtttctgttacttgtctttatgcaatcgaagctagccatctactttgatagctctgatcattttcttgtaagaaagataatggaaaacgattgttctgactgaccccagctttgcttttggtacagatttgga

SEQ ID NO: 40768 - DNA, 446 bp, Arabidopsis lyrata
  Intron number 1 from transcript 494125 (locus 494125) deri ved from phytozome v7.0 (chr-ID scaffold_7; pos 23919734 t o 23920179)
atctttaagattaggatcaggttcttcgttcaaaggtaaaatctaatcactttctcaaattctaattcttcctaatcgtcttcgattctcctctctcgacttcgtaaattgaaaagtcttaataggaaacggtgagagaggagacaatttctcacttgaaagagcttatttttatacctgtttcgctattaggttcttgaaaaagttatgcccttttgttgttcgattaaatgcctcagtgagattacttaatttaagctttccctgaatcttatctctgtatgggtttaatcccaaatagcttctttgattatcttaggcctaacttgttaagtgcatctctaaagtttgtgtttttatcaaaattattcacatgtttttgttaagtcttctttgggttttggtgaatgaagagatatgatgcttgaaatgtacaggacctgaag

SEQ ID NO: 40769 - DNA, 716 bp, Arabidopsis lyrata
  Intron number 3 from transcript 327981 (locus 327981) deri ved from phytozome v7.0 (chr-ID scaffold_7; pos 1009693 to 1010408)
attcaatactagtaacattgaaggtggtggaggtcagcctcaagaagacgcatagtgaaacaagtctattaataatcatgtaatggagatatctatatacatgcttttttaatctcgtctatcacaaagtaacatatgtatattatcatgacatatgtataattatttctgtaataatcaatctaagtatagttgtctcttggtgttaatgtaaggtctaaagatcatgtgtccttgaaagaaaactcaattctggtcttgctcattcatgttccttaattacctcttcattcaagaatcagagtcgcgattcaatctgttgattcgatttcaaagcttattgagagaatcagagatgatgagctccagccacagctattattcaagggtatattagtaactaataatcaaatgtcttttttaacttttgggcttacgacagggccaatcatatctttccgccgaaaagccctatacgttttcagaaacaattgagtcccacatcgaaaaaagaataaacatttactaatttatgacccctataaataaaactatccatttgcattttaaacaaacaaacagtaatgggctttccacgaaggcccgactggtggcttaattgcccaaaagtacaaaattattttccgcgtttttttttttttttttttttacgggttttagaggttttaaacgtttttttcaaatctatttttatt

SEQ ID NO: 40770 - DNA, 815 bp, Arabidopsis lyrata
  Intron number 5 from transcript 488515 (locus 488515) deri ved from phytozome v7.0 (chr-ID scaffold_6; pos 6762769 to 6763583 reverse strand)
tttagcgaccctagtgttgtcgccgaagaaacgtaaatattttaaaatgaaatgataatctaattatcgttccaaaactatagttttgcatagtttatatatttcttagaaccaaaaattataaacatataaacaatttgacctatataatataagaataaaactgtcaacgtattcgttcgtctgtctctgtactaagtactttaaaaatcgtacctaaaataaaatacaataatgaatggtatatatattttttatgaaatgtaatggtttaccatcttttgaagtatttgtttttttaccatttaaaatatattttcaaaattgtaagttttttttttttccgtcaaacaccattttattaagtaatcggatggagactttcttctaaagagagccaatctagagccgatgtgcttacatgggagaataaagaacctcgtgcacttgccttttttgcgaggcaatctgcaaaagttataattctactgttaaggtaggctattcagatgggttatcaaagtggaaattagctcggagcaatctgtggcgaagtcaaaactcgtcttggattctgagatgaggcagaaaatgtttcccttagttgcacgatttatgattatcatgtgaacactccacctagataaagttttttcttactaggaaaaagcgttatacgattgatcatgtgcgataatattttcatgtttggtttaatcgactatttatttttttcaatattatcaaggtgtttaaaaaaattcaaatattgaaattcaggtacggaattgagcaagagtacactttgctgcaaa

SEQ ID NO: 40771 - DNA, 296 bp, Arabidopsis lyrata
  Intron number 1 from transcript 488515 (locus 488515) deri ved from phytozome v7.0 (chr-ID scaffold_6; pos 6764177 to 6764472 reverse strand)
gattccactgaccagatcatcgccgagtacatgttcgtaaatttcttccttgatctctgtcaatttcagcgtttgaagttcagtttgcgtattaaaaacatagtatctttatgattttcatttataataatagatcaaaaagtttgctttgagtttgtgtttgtgtctaaaaaaaatatcatattcttgaggttttttcttaaacatgagtcaaaagtttaaacctttgtctcatctactacgttgaaagattttgtgtgtgtttggtgaataggattggtggatcgggcttggat

SEQ ID NO: 40772 - DNA, 509 bp, Arabidopsis lyrata
  Intron number 1 from transcript 933267 (locus 933267) deri ved from phytozome v7.0 (chr-ID scaffold_4; pos 12412058 t o 12412566)
aagaggagaaagctgctgagaacgttttcattaaggtaaaagatcagaagctttccttatcgatgtgaacagtaattgtagactaagaatactcaaagctaaaaatcttcattgattaaccctgttggagattactcaaagaagaaagaagtgctaacagaggagcttccttaactgctaatagagtaacaaaagaggatcgaatacaatcatacgtagtttcgagcagtaattgtagactaagaatactcaaagctaaaagtatatttactttccttatatggtgacgaaaacttattattaagctcttgcttgattctatctgtctctgttgtgagctgtgaacagataatattttgtttttacttacattgtgtctgattatagaagctaaatgtattgttatataaaccttgtaacatccagcttgaactagaaacatggtagataatacattcatcttcagttcttctatatatcttgcttatgtgttttctacattgcagaaa

SEQ ID NO: 40773 - DNA, 565 bp, Arabidopsis lyrata
  Intron number 2 from transcript 933267 (locus 933267) deri ved from phytozome v7.0 (chr-ID scaffold_4; pos 12412568 t o 12413132)
tggagaaggagaagcttgagaagatagcccgacaggtaaatgattcttttaactcaagttgttgattgaaactatggccatgaatgttttggggtttttgagtggtttttagattattgattttggtttatagattttagatttagatttttggtttttggattttgcaaaagagaaaaaaatagaaaaataaataaatggaaaacaaaaaaagtttgaatccacggcaaacattttaaaaactaacaaaaatgggtttttgggatttgtgaagaaaattgtaaaaactatcaaaatctagatttcctattttttaggaaaaccatttttctcataatcttgaatggatgatttattggtttttagaaatcaaaaaccaaaaaccatgctaaaaactactacccattcaaagcctatgaatagcttgtttagatgaagctttgttctatcaagaaaaaaaaagagaaaatttagagtcttgtcttgtgtggccaatactcgagctctgaaacttcttatgaacttactagggtcctggagaacaagcagcagggacagcaagcga

SEQ ID NO: 40774 - DNA, 507 bp, Arabidopsis lyrata
  Intron number 1 from transcript 937131 (locus 937131) deri ved from phytozome v7.0 (chr-ID scaffold_5; pos 11492035 t o 11492541 reverse strand)
gcttaatctctccgataactcttttggcggtaccatccctcatatagctctgtttctattaatgattctgcatccctcaaatccctcatagatttcgatttgtctatgaaatttatgttcttttattggtggattagaagattgattccgttgaagattgatttcgatttgtttctgaaatttgtgttcttaaatttttgtcagcaatattcactgccaacggagtgatcccacttggtttttcaccttctgctagaaccgtgacctggacgtaagtaaagtaagcacaagtgacaagtctcacgcattacgtcactatgctcagaaaaacaatcaaatttagctttcttcattagttacacttagagctttggtattacttgagaagatcaagttgttatctcaacagatatgtctttaaaagagttggattattattaatttttggcttttgatgatttccaaagtacagaattgaaaacgttttgttactacaggaaagaaaac

SEQ ID NO: 40775 - DNA, 772 bp, Arabidopsis lyrata
  Intron number 2 from transcript 906646 (locus 906646) deri ved from phytozome v7.0 (chr-ID scaffold_3; pos 22497505 t o 22498276)
tgtctgttaaaacagtcgtggatttggtgaagcaattaaactcaaggtttgacaccgttgatacaagcatcaaagaagtgtcttcaaatatggagaaggtgattggagatagagtagaagcgaggatggatgaaaagtttgaatatatggagaaggagttgaaacagatgaaagagcgtctgaatgcaattgagcagggagtagggaaatctggtgaaaacgttgaggtaaactcagccttcaaacaaatagaacctcccgaaaagccgacgcaagtcgaccttttgctgaatcaaaaagaaaaagcaacaccaaaaggtccagcgaaacctctacaaaaccagtctgttactagtcctctggtaagctaacagtgccagacatatgtataaatacattgcggctgagttattattatcttaataaccttgtagctgagttttcattatcttgatcacataatggctgagttatcattatattaatcaccttacggctgagttatcattatattacggctggttatcattatcttgatcatattatggctgagttattattatattaatcacctaacggcggagttatctttatcttatggttgagttatcggtacgtttatgcaggcgaaggatattgtcgatgttgagaaggatattggtattgctggtgtcagtaagaatctggaaaaggaatttgctaatgtcattgatggcaaatctgtattgatttcatagatacgttacctaataatattaggaaattacgctcc

SEQ ID NO: 40776 - DNA, 593 bp, Arabidopsis lyrata
  Intron number 1 from transcript 950116 (locus 950116) deri ved from phytozome v7.0 (chr-ID scaffold_8; pos 16699519 t o 16700111)
tccttaaatctgatatccccggtacatacgtttttctcacgccacaattctcttatttatttttgtctggaaaacgttttttctgcattagaataaaattaaaaataggatagatcggaactttaaaaaaataaaaatatatactaaatcttcgttcaaataatttgttatacattcataacgatcaaaatttaacatgtgaactgatgaatagatatagtacaactacaaatatgaacagaaacctaagtttctttgaaagtgaggatatatttgattaagagtgtaattaaacatgaaccaatctcaaaacataccaaactcatacaaattttttcattcaattttaggatttcttttgtcaaatttactttaaatatcaaaatgatcgaaccacaacttggattggacaatcttattatggtaacgagaaacatgatataatatgaaatataaaattatcaaataatattttaaaactggtataaaataaattatgtaatccttttcttgatgtttcaagaaggaaaaaaaaactgattaaaattttggtacttgtatattagtggtgggaaaaaataacgtgcaggtgt

SEQ ID NO: 40777 - DNA, 445 bp, Arabidopsis lyrata
  Intron number 1 from transcript 944474 (locus 944474) deri ved from phytozome v7.0 (chr-ID scaffold_7; pos 2839774 to 2840218 reverse strand)
agttcatattctcgtgtcaaccaaaaaacaaaaaggtgcgttttgcttccactagttgcttggaatgattaaattcgtagggaaagcagtagatgctatagcctattaactgttctcgttattgaatggattagtctggttagatgtaatggatactgactagccagctgatatgaatctaggtagcatttttaggatttagaagaatcaaagcacatatctatgattagcaagtagtagttgtagaacaatgagttttgtatatccctagggttgtttatcatgtgtcaagttgtagatttttcaatctcatttaacaaacgagaagctttttgatacatctgagtcttgatactgcgatgcttctggttgtgttttgccattgatatatagcttttctttgggagcagcattcaagacgtagttcattcgatatttctgattc

SEQ ID NO: 40778 - DNA, 422 bp, Arabidopsis lyrata
  Intron number 1 from transcript 320761 (locus 320761) deri ved from phytozome v7.0 (chr-ID scaffold_4; pos 13949660 t o 13950081 reverse strand)
ttgaaggtttgggtcttggtggttgcattgctcaggttagattttttctttcttcaattcttatttttaattttttggtaaactaattattgcaaatttaattagagtttaaatagttaggggacaataataaatatagtgagaaaatagtactagttgttggttctgacttttgaaataatgatttttaagaaacctagaagaagtaatagttttgatagatgttgacatttttgcatatcatagaatgtgacattctaatttagagctgctcatggtttaaatcaaaaccataccaagtatccgaaaaccgaaccaaatgtaacatttgtgagtttcatggatagtgttttttttcatagggttaatatgtgatattgtttgatggtcaggctgggtttaaggcagggacagtggtgtat

SEQ ID NO: 40779 - DNA, 390 bp, Arabidopsis lyrata
  Intron number 1 from transcript 920058 (locus 920058) deri ved from phytozome v7.0 (chr-ID scaffold_1; pos 4960776 to 4961165)
aacggtaaacaataattacattaaaaaaaaactattttattgattttacttatttgttaatttgagtagcaaaaagagagagtatatactcttttttgttacaaattcacagaatattcattcttccttttcatgtatatttgttttccataatctgggagaaaatgttgaaaatcatataaaaatttccaaattatgcaacagtgattgattcattcaaatccagtgaattttaatactaaagcattatatagattcatcataagatcttgtgataatactaaagcattatatagattcatagtaattactaattagtttgtttgtttgttttgttccaatatggtgttgcacaatggcaaatttgggcttttctttcctcagatccta

SEQ ID NO: 40780 - DNA, 739 bp, Arabidopsis lyrata
  Intron number 2 from transcript 920058 (locus 920058) deri ved from phytozome v7.0 (chr-ID scaffold_1; pos 4961137 to 4961875)
gcaaatttgggcttttctttcctcagatcctagtaagttttactttcctttgttttctgaatttctcttagattctgtgaattttggtttcttttgattatgtagaatttgaaaattaataataactggagcgacaagaagtagtagatcacagaacaacatttcacacaatccacgttatagccagtaatcaacaaaaatatatacaactaacaaagtaaaaagttcaccgacaaaatcagaacagagttacctcgcaaccaattacaaaattactagtaatatttagttgtacttttttgaaaaaataatatatttatttacaacaaaggtaaaaagttcacagacaaaatcagaacagtgttacctcacaaccaattgcaaaattaggattatttcttttaaaaaaattgttttgccagtttgtatcccacgtgagaatttcacatgctaaaaagattgtttaaatcattggttttttatttttgctaaagaaatcattggttgccatagaaaagtaatcttgattgtataaaatcctttatgaatgcaaagtttggatcttgtctcaaaattggataaagccagtggggtatacgaactaagctatatttgtttttggtaccttaaaactttcttatgtactaatagaatccccaatatttatttattattcttattttgaccccaaaagactaaaatgtttgcaattttgtccaggtccattgttctacaaagg

SEQ ID NO: 40781 - DNA, 298 bp, Arabidopsis lyrata
  Intron number 1 from transcript 494605 (locus 494605) deri ved from phytozome v7.0 (chr-ID scaffold_8; pos 3829282 to 3829579)
ctctctccctgcttctattccccagtggccttcaggtaaaattttatcattccaattgttgacgattttcaactttacttttttcagatcggaattcgattttcccccaaagtgtctcgatttagctctttagtttcgatgtgatttgatccaatccatgtacaagtcttaggaacagtcttttacgtttctaacaactcatctattcataaatcgtaaaaagttttttgatacacttttcttggctttgaattgattatcaggtcaaggctttggttcaggaagaatcaatcttggc

SEQ ID NO: 40782 - DNA, 591 bp, Arabidopsis lyrata
  Intron number 3 from transcript 471459 (locus 471459) deri ved from phytozome v7.0 (chr-ID scaffold_1; pos 5407499 to 5408089)
actgccaattctggcacagaaatcttggaattaaggtacctaactcgaattttttttggctgtctgaactgataacttggatctttgattaatcttcctttctgtggatatcgggaatcttgctgccttgttcttattttgattttttatatttctaaaagcagcagattcatttaccttatcaaatactttaagttttagttctgtctatgtttaagaatgacaatgattttgcttgtttgatggtgaccctaagatcatacaagtctctttgaatgctaagcatgcgactttagttgagcatgtggtggctttagatcccttttcttgaatcaaacatttccgtagcaataaagttcagcttcttttatttcgctctacttagatagcaactaaataaagaacttagtttgatgaatgcaatatgatacagtttctcttcatttaagtgaataaagagcacttagttattgtgtctaaaaagtttggatgttaataccattgtagacttcttcaatttatcaccaaaatctcgtttgttgattctatggctaatctcttaatttatttgtctatccaagtgccgtctac

SEQ ID NO: 40783 - DNA, 669 bp, Arabidopsis lyrata
  Intron number 1 from transcript 929771 (locus 929771) deri ved from phytozome v7.0 (chr-ID scaffold_3; pos 8087746 to 8088414)
actctcctcaaagtcatcatcctcggtgatagcgggttaggtttctccgggatactattttttctcatgtgattttgagttttctgatgagtaatttggtggtttcggtttctgggtttttgagatttatgtcggatttttgtctaattcgtttcctttgaagtttggattcgatatgatatgttttgatctcttagatgacttgctggttttaggtttctttgttttgggttactcataattgattctgattttaattaaaggttgcttttttttttcatggagggttttgtttgatcaaatatcagaaactttttatggtaaatttaagaattgagtcgatctagtctcaaacatagatagacgcctttaacatagtctcaaatttaagaaccgggtttctttttacattttgcatgttcttgtctgcatctgttttgtggttactgaatttctgcttgacattcaagatcatatgctggttttgttatggcactcgtttcgctctttttttcttttcgtggttatgtcctgaggcagaaaatgcttgtgtaatgactacatgaaatgggtgtgtatccaagatcatctcttgttatctttatttgagtgaaactgattttggacttctctaacttgttgttttgtagggtgggaaaaacctctttg

SEQ ID NO: 40784 - DNA, 601 bp, Arabidopsis lyrata
  Intron number 2 from transcript 891473 (locus 891473) deri ved from phytozome v7.0 (chr-ID scaffold_7; pos 21225994 t o 21226594)
aatatattgattctattgcggataggtatcaacaagtgagttttgattcgcttgttgaagctagtctcggactccggctgagatctgatctggtctataaccaaaggtatcatgaaacagaatattctatgtcattcaaggaaaagagtaatgtaacaactcttctcaccggaatatgcaatgtcaagatcctctgcttgtctgataacactcttgaggtcagtcccccatctttctcctactcttttgttaattactagtcttgaaagtaaaagaagaataaacaaaacaatttttgtcgatatatatattgattagtcttgtttttgttaatagaccaatgcttaagggcttgacttgatttttataggtacttggttgctgccgtgatacaataccggttttcaacaacctcattgagttaactattgagactaaaccagatggaatatggaaatcattgcctgctatgctcaagaattgtccaaatctagtaacccttgtattcgaagtaatatacatacacaatccctttaaatcaaccctaccacgtttttcaacacacttagattctgaaactgtttcatttatgtttcaggga

SEQ ID NO: 40785 - DNA, 698 bp, Arabidopsis lyrata
  Intron number 1 from transcript 489481 (locus 489481) deri ved from phytozome v7.0 (chr-ID scaffold_6; pos 12041608 t o 12042305)
atcgtctgaccaaattctccgtgtttccttctccttcaggttcgcgttcttctcaatgtctcttctaaagtttcttaatttctgtctgaaaattacctctgaatctcaaacaaaacatgtgttcttgtctttgattcatgtcattatctccaatgctcgatcttacatttcgtctaatctctaattagatcttagattcgttctctagcaaattctgggtatcaatttgatttaagaaatttgatgaaatttgtttcctttgttcattgttcttcaatcggatctgaatttagatctgcaattgaatcactttgattttggtcgaatcgattctctttaaagttaagaaaatttggtaaagattacatttttaagatttgaattgttttaaagttttcgtttttttttttcttcttcttcttcttctctcggatctgatttgttttgttgatctatatacgtcagaatttatctctgcttacatcacttgatcttagcatttagatctgtgatttatttagatgttaatgaaatgtttgtattgaaatggttgagaagtaagaacaaagatcatgttctttatgcttaatttatagttttattgtattcaataagttacactaaaatatcaatgccttatctaatttggttgattgattcttcttctcaggtaatattttaacaaattgcttagtacc

SEQ ID NO: 40786 - DNA, 791 bp, Arabidopsis lyrata; identical to SEQ ID NO: 39038
  Intron number 2 from transcript 907557 (locus 907557) deri ved from phytozome v7.0 (chr-ID scaffold_2; pos 4019999 to 4020789)

SEQ ID NO: 40787 - DNA, 746 bp, Arabidopsis lyrata
  Intron number 3 from transcript 488134 (locus 488134) deri ved from phytozome v7.0 (chr-ID scaffold_6; pos 5313213 to 5313958 reverse strand)
ctttattgcggcgacactggtctcaccaatctcaggttttcacctataccattttagagtcttgttcttctacgactcgattataataaatcgagtgaatttgcaatcggcaatttcaatacttagtagaaaaattagcacctctaatcattattgccagtggtttttgagtatgagatgaagaatttaggttttgtttgatcgattgcttcaggattctcaaacttggattgcgtgtttcattagcaatgtttgatcaacgacagctttttttttgcatatgaaatgtgagattctatatgaacaaactgttacaaaactcattgatgaagccagttattgttaatttctctcaaaaaatatgtttaagctgataagataaagctactgctttgtgactcttctgttgttaacaacattttgcccttattggtggagttatttagatggtgcttaatttcaggatctcttctgttttgatccctgcggtggttgattttaatgaagttaatctgctttatgttttcgcgtttctcggcatttgtgtttagggcctacatttttcattcttctgaagcattttaagagcatgagactgtacttattcattgtcacaaccttttcttttatgtgctaatattcattgtgacgacctgtggtttacgttttctttgtttgtgatatgtattttcatatttggatgtgaaacagatcgaaacctggtgtagctgctgttgttgcttgca

SEQ ID NO: 40788 - DNA, 548 bp, Arabidopsis lyrata
  Intron number 1 from transcript 490144 (locus 490144) deri ved from phytozome v7.0 (chr-ID scaffold_6; pos 22718932 t o 22719479)
tccacctactgctcctgtaaagacttttcgacaaggtatcttttgacacatgccgtcgctaaatatttgtagtttccctgcaaattcttttattacaaatatatttgagttccagtttttatttccacgattttcttaacagtttttgtgtaagttttgttccagagtttcagtttttttttttttttttttttttagttcgtactttttacccaattagagaaaatcatatgtttaaactttaaacataaaccagacctttttcttgttaaagatttaaaaaacgtaaactaaactgaaaatctgttaaatgaaaagaaaaaaaaaaattagaagatctaagaaattctaaataatacttagtatttttgttaaggaagtatatgagacttagggtaataaagataaattattcatttacttagaaaagtagagttaagtcatctcgtaatgaacaatgaattttacgttaactttgatttaaaaactccaacttcgtatatataacgttatcatcagacaacacatcgggtgacgatagcgagacc

SEQ ID NO: 40789 - DNA, 517 bp, Arabidopsis lyrata
  Intron number 2 from transcript 484166 (locus 484166) deri ved from phytozome v7.0 (chr-ID scaffold_5; pos 933481 to 933997)
ttaagataaagtttgctgctttttctggttgttagggtatgtgctcttaatttcttcagtcaaattttcatttgagttaaagagaacaattttgttttgatgatacaataaagattgggttagaatgtcttcttgattatcatcaacctctcacttgaaataagacctttatttctcaagtgggtttgtcagcttttgcttaagcaggcttgcaataagtttttcttttcttttgtactttttcgttttgtcctctatctttatggaccttctaaaattagggtttttcttattgtttggagtaaattattaaaaaatgggtttaacgagtagtgaagaaagctcttgcctttttgtagcttaatcatttgattttactcattaataatctttactcttgttttttcttcctaactagtttctttgtccccaaactaataaaaaacactttgcaaaactcaaaaaaaaaagtttcaaataaccgtgtttattttctaagcagatatagatcaagaga

SEQ ID NO: 40790 - DNA, 632 bp, Arabidopsis lyrata
  Intron number 1 from transcript 937723 (locus 937723) deri ved from phytozome v7.0 (chr-ID scaffold_5; pos 14408157 t o 14408788 reverse strand)
ggtacctctctccgccattatcgctttcaattccaaaattgctgctaatttcgcactcttatatcggaatcagctctgtgattgattgatcggcacctgcaatttgattgatgttacctgtcatcgatctgatctaagtgattctgagttcatttctccacttcttctttttgttttagcgtcatccacttatgtgctagatcgaatccagaagtagatacaatttatgcttacaattttcttcatccactgattggatttgttgttgtagctcatatcaaatctggaattatcatttgaatacgatggtttgctttgccctttccaaatctggtatcagtgattgacgataatccttatgtaaattctggcagatttgttttcatgtgtcataactaggtttgatcaaatgtgtcgttgatcaaagatttggatgattttgatggaatgtttagatcgagtgactattacctgattcattatcaaatgaacaagatgatactgttattacgaataatggtgcaattaatgataatagtatgttcaatgcattgatgaatcaattcatgctgatacacttgtgtttatcgatgattatgttgttgcagctggggactggcttcagggtcctt

SEQ ID NO: 40791 - DNA, 672 bp, Arabidopsis lyrata
  Intron number 1 from transcript 472196 (locus 472196) deri ved from phytozome v7.0 (chr-ID scaffold_1; pos 8369909 to 8370580 reverse strand)
tcagccacatccacactcacaaacacaatctctaggtttttttttgagtttaaactttgattctctccctcaggtagtttttctttaaacttttaaattccaagttcttgattcttgattcttgatatgattgatcttgtactgtgtttcttgatttttttttttgtttactttctgttttttttctcccttcctttttgaaaattctcctacagaaatgaaatcatcaaaaacactttacttctttatgtaataattgaatcttctctgcttttgactcactacgttgagctacacttcttctttttactctgcattttttccaacctcaaattagggtttgtttccctcccaatttcacctccatagatcgggtattcctctacgattgcacaattcctgaattggggtttcctgggtttcttaagttcttcaccaaaaacatttgcttttatcaagaatttgactttaatcctcggaaaaatttggtccgattctgtttgttgctttcgaaactgtttacgatataaaaaaattgtttggtgtaaaatgattacgatgttttaacctctcttagattccatcagaaactttaaaaattccacaccttacacgactcttcttcttatttttgcaggatctcattttccgaccaaattcatcgaactgaga

SEQ ID NO: 40792 - DNA, 995 bp, Arabidopsis lyrata
  Intron number 3 from transcript 492866 (locus 492866) deri ved from phytozome v7.0 (chr-ID scaffold_7; pos 9815719 to 9816713)
acaatagagaagctcaaaatcaagatcaattagaggtaacgtttttactgattttcttgctttttaaaaatccattttatgatatttaattagaggacagaaagtaatgttcttatgccaatgccatatttaaaatcaattttatatacgaaaatcttcatttttcatgaagaaggtgcaaatgcaggtaaccacactaaaaaaaaaaagttttgtttcatcctccattgttcttaaaagcaatagtagagttatcaagataataagttaaatatgattatcttaattctcttttcaatacttgaaatttatttttcttataattttacaccattcttaagcatttcaataaatcttaaacttgggaatcagaaaaagaaagagtgaacgaaaatacctttagttggaagaaatattcaaataaagaagaaaaaaaactctaccaaaaacctatccaccactcaaacctccccaaccaaaaccccatgacttggtttatccttttacatacaatatctaatctcataatgcatgaatctatacctttatgcacttttgcggatctttttccatcttccgcaaactaactagcatatctatctcttagtcttccatatttaaatcacgtaaaagtcataatatatatattaatgttttgaagagaggtaggtttcaaggtaagtcatatgatagagtttagtattcataacaaagcatcataggtttagagtttcgatatttatggacaaataatacgttatagcgtaaaccggtagaaaaatagagaggaaaaagaggatcaaagatgtacaagagtgcgaaatgtgtgactcccattagaaaagacaaaagtttgtataatgtttcaatggtaaccttagttaggcctttctctttccatgtgctaacaacatacgtatatatataaatgtctcacaagcattaccttcagccattctcttatttggctcatttgattattataggaggaaacc

SEQ ID NO: 40793 - DNA, 1017 bp, Arabidopsis lyrata
  Intron number 1 from transcript 931759 (locus 931759) deri ved from phytozome v7.0 (chr-ID scaffold_3; pos 22921052 t o 22922068 reverse strand)
gcttcctcttgatttcagcttgaagcttcctattggttcgtctctctcctctgttgtcttctagtttcccctttgtttgactgaaatcatgtcttcttcttattaaattcgaaatgaatcttcttgttctctcgatttagtgtaatttgcaagagtttatttcagtttgtatgtagatttgttaatttctttgaattcgtgtagttcagatttgaagtttcaattttgtgtgttttaaaattccaaatttcaattgcatgtagattgattaagtcttctatctctttgattcatgttaatgtatatgtgtttgtgttcgaattcattgatttaaaaagagtttatgaagattatttcagagaattgttgtttcgggcttcacatgttgttctgcaattctgtttcttctctgtacactaacaacatttaaatgtagatttgttgatatctttgaattcgtgtaactcaattagaggtttcaatatgatgtatatagagtttgttttctttgtctgtttgaatatataggagtcatcaatgaccaaatagataagaaggttaggagatgcgttgcttgagtttgaataaggcttagcttgaatcattctttgatcttaaaataatctcctcaaacgtaggagtgtattagttgctctatatttttggttatgttctttgaatttgtgttactcgtttagagatttcaatttttgtattgtaaaactccaaattttaattgctaattgatttattaagtcctctagctctttgaatcatctttgtgtataatcttgtagatgtctccatttagtgagatatacatgcctcaaactgtgataatgggatatgtaaaaatttagattgaggaaagtttcacgttgttaaaggtctttttttggtagacagggtcttatttttatatcaagtgttttgtctcttaataacttaaaatatttgataaagctagtttgttctctattttcaggttttggatctacattacatcaaaggttatca

SEQ ID NO: 40794 - DNA, 820 bp, Arabidopsis lyrata
  Intron number 3 from transcript 485298 (locus 485298) deri ved from phytozome v7.0 (chr-ID scaffold_5; pos 14456496 t o 14457315 reverse strand)
atcattttcctacaagggtatattattcattttatgatctctatcttttgttttgttttcttgattgataaaaagtttgtgttttgatatgttttgatggatagtcttgttggttcttcatttgatgtctatttgttgagtatataattatgttgtaagttttgattgttagcatttacatctctagaaaatggatgtgttttggtgtatagaatgttctttttttcgttagtgtgtgaattcggatctttgtatttttctaatcttcccttagattttgatgatacagtgaggtgtagagaaatgatgatataaagtttcgagcttttgtgttttttcgtttaccataatttggtagcttgtttgttgattgaaaaccgcttgtatgctgaaacgttcagcaaatggataacagaaaaaagtttcgagctttgcgggtttgctttcgtgttcttgcatctattgcttgatcattgatacaatagcagtttcgctttgtgtgtagtttgttaatttgatttgttgactatttgcttttgcttatcagttacactttgtgaaaatggctgcctttgctttactaattttcttctttgtatgagctttgaagttttcgggttttaaatagaaagtattcatcgtttctgtggtcacattcttcaaacaatggtattagttgtcagatatgtgaagtgaaagtatgcaaaactgtactattgattaaaatcatgtggtggagatcaagttggtaatttgtgtgctttttgttttaccgcttgctacagagaaggagttttggccaagggaagcgaagaattaa

SEQ ID NO: 40795 - DNA, 380 bp, Arabidopsis lyrata
  Intron number 3 from transcript 490018 (locus 490018) deri ved from phytozome v7.0 (chr-ID scaffold_6; pos 21686495 t o 21686874 reverse strand)
ttggttcgagaccgctcagtcttatccaccttctcgtgagtattatcgcttcaggattttgattgttttttttgtgattagtctcgttttcgtgaaatgtgtgttaaagtttggtttgtgattacgtcatcttacgcaatgcggtaataacgatgggtgaaatatttgactcgaaattttaaagatgtttaattgagatataatcttcgttgtaatcttcttttttgtttaggaatctgttattctgatgattagattttgattttattcgtgtcctgaattgacaatttcattacaaatgcagagagtgtcttgttagaatcaaagtgtgtttatgtctgattcattttgtgttttgtttttttttttcagcttttgct

SEQ ID NO: 40796 - DNA, 529 bp, Arabidopsis lyrata
  Intron number 2 from transcript 916495 (locus 916495) deri ved from phytozome v7.0 (chr-ID scaffold_8; pos 12894832 t o 12895360 reverse strand)
gggtaatgttcattgagtgtttttattacaagagtttcatgatgattcttaggttttttgtttaggtttaggtttaaatttccaaatctcgaagctttcttgaaatggaaaaaggttgctttttaacccattgtttagcttaatcaagtgagccattgtaattaccatttgtagaagattatataattagtaatttaaggtctcttatgtgtcatcttgatgtgaggacagagtgcttaaatgatcatcctcattttacatttgagtgttaccagagttccatgattcttagattgattaggtttatgtttagattttatttccaaatcttgaagcttgcttgaaatggaaatggttgctttcttacgcattgtaatctcgaagtgcttctaaattagaaagtgatttaggttctcttatatgctatctttgatgtgagaacagagtccttaaatggttaaattcaaaacagtttgcttttgctttgttactaggtttgtcctgtctgcacaaagagggttggattgga

SEQ ID NO: 40797 - DNA, 444 bp, Arabidopsis lyrata
  Intron number 1 from transcript 474714 (locus 474714) deri ved from phytozome v7.0 (chr-ID scaffold_1; pos 30104786 t o 30105229 reverse strand)
aaaaacactgtaagttgcccatcagttgcttgtgatctttctgtggatttcagatcaaagatcaatgtattggctcgtttgggttaagatttgtcttattcatggctgtgttacatggtcttctttattgccctgcttagtcttgtattttggatcatagattcatttgttaatgaacaacttgttggctcttgagactagagatatttgggttaggacctgtttcaccaactttgtctgtattcatgttactgcatatttcagtcactgattatctttctttggctgtattagtcttggatcgctgatctttgattcattttcatgaacaaatgtttctggttggtaggatctcaattttgttcttattcatggttatatctactgatttctagaattcacagccaagtgtttgaccaatcttctatgttggaatgaaggttt

SEQ ID NO: 40798 - DNA, 535 bp, Arabidopsis lyrata
  Intron number 3 from transcript 487843 (locus 487843) deri ved from phytozome v7.0 (chr-ID scaffold_6; pos 4051992 to 4052526)
gttgaggtatttgcatttccctcttctctcttcttcttactctaaaaggttcagtctttttgcatatattcatagttcatgagagacatttaagtttgctctgtttcttgcttgctgaagtagaatgtttggttggttagttggttttgaattgtgattatggtgaaatagaatgaggctgctatttgtggtccggttgaaattttttgaggaaaactaaaggtgaaggctttgctttaagtttcagttttaagggtgggttgatagagctctccaaagcttgaaatttaagaaagggactcgatttgagatttaagaataagataagctgttcttaaggatatcttggatcatagctttatactgtgacaaaaccagtactttctatcccaaatgtacatggaatgaatgatttggaggctttatatcgtttcttcatagattttcatccattagtttctgtttttattttacacaacttgttcataatgataacatttcaaagccgtaaaactctgtttcgtttccataggcc

SEQ ID NO: 40799 - DNA, 852 bp, Arabidopsis lyrata
  Intron number 1 from transcript 480862 (locus 480862) deri ved from phytozome v7.0 (chr-ID scaffold_3; pos 23826187 t o 23827038)
gaagaagcacaaaggagtgaggaaaaagccatcaggtaaattctatccaaatgagctgtatgttgagctggagagactgctttgactgtacggagctgagcacaaggtttgtgtgaagatgctctgttaccgttggagtctaaagaggctttatcatttgaatctttgatgggctttggttgatcagtgaagcccacacttttgtctttgttttgctagctgaatactaggcctgcacaaataaaccgaaccaaatgtaccgaaccgacaccgaagcaaaaaaaccgaaccgaatcgaaccgaaaatttaaaaataatcgaatggatactaaattctataaccgaaataaccgtaaccaaatcgataccgaaccgatataattcgggtaaccgaaatacccaaaatacaattatattttcaaaataattagttatttatataccaaataatcaaaaatacttgaaaaatatataaaaataataatactcgaaagtaaccgaaatatatccaaaaatttccgaaaatactcaaaaataacctaaatatccgaaaatatcctaaacaaaataaccgaatggatactaaattttaaaaccgaaagaaccggaaccgaaccgaaaccgaaccgaaatttcaaaatatccgaatggatactaaattttgaaaccgaaagaaccgaaaccgaatggaccaaccgataaccgaacggttaaccgaaatcccaggcctactgaataccctttacagttttagtagtgctagtttatgtattttctttacatcaggtaaattatgttccaatatgttatatatagcatgcagtttatgtactttcataagccatcaggtaa

SEQ ID NO: 40800 - DNA, 628 bp, Arabidopsis lyrata
  Intron number 1 from transcript 473695 (locus 473695) deri ved from phytozome v7.0 (chr-ID scaffold_1; pos 17563616 t o 17564243)
ctgagcaattgagaactgcttttgaaggtatagtttcatgattcttgttctctgtttttgttatcttctagtgtacatgatcagtatcaacctttcgtaaaaatgatgaatctgttggttttggtttggtgggttattgtatgatcatctgttttgacttttttttttatgtggatcgaacttggttttggtccgatcttatggatgttgtgtcggtagtgttttatgatcatttgtatgatgatgatgatgatgatgatgtagatcgagcttgttccttcatggatcggatcagtgacaatgatatcctttctttgtgggatctagaacaatcttttgtgtttatagtgatttgatcatcagtaatgaagttttgattgtctgatcatgttgataatgaaaatgattactagagatcttgattggttgtgttttgattctcacagtcacagatctgtcttcttagtgtagatctaaaatgtagttatgtgtaatccaacactaataagatcttgagatttatactttgaatcggtttcatcggttttgttattatggatcttctgggatctgacgtatgtgactttgatgcttatgtaaagtgaatctgattcgtgtttttcgcagg

SEQ ID NO: 40801 - DNA, 254 bp, Arabidopsis lyrata
  Intron number 2 from transcript 489047 (locus 489047) deri ved from phytozome v7.0 (chr-ID scaffold_6; pos 9143967 to 9144220)
gaggttagggtttccgtttcaaatttcatttttttgcgcgagggcaattcaatcgaatcccttttgatttgtttgttctctaagacaacgatgtgagcttagattttgatttgatccggcgtaattgcattgatgaccttgtttttgggactcgaagccattttcgaattattatggttttcgtgttgaatttctcgtcttctctattggaatttttagggagcgggagatacgacgacgtcggaggggcattt

SEQ ID NO: 40802 - DNA, 313 bp, Arabidopsis lyrata
  Intron number 3 from transcript 481586 (locus 481586) deri ved from phytozome v7.0 (chr-ID scaffold_4; pos 10827497 t o 10827809)
ggcaaacactcttttgtctctttgcttctcttattatttctatttttatgttgatgagacttccatatttttgggtctttgttttttctagatcctttggttttattgtctatattattcattttgacgatctgggtattgagtttggtttgatgattcttcataaagttagaaattttttcttcttttcaaatcaagttaatatatttgttttttgactcttgatcttctgttttgttgttgttagcttctggtgattgaatatatgatcaaagaaagctaaataagattcttttttcaggttaaagaagtc

SEQ ID NO: 40803 - DNA, 899 bp, Arabidopsis lyrata
  Intron number 3 from transcript 931887 (locus 931887) deri ved from phytozome v7.0 (chr-ID scaffold_3; pos 23725818 t o 23726716 reverse strand)
agcagaaagatttgaggattgaaggaagaatcactgtaagtcatcatcatatattcttttgctctacacttttttttgctatggatttgttgttattgaagctccattatcatgaattgattagatccctagctttatttttgtgaaaatcgtgtttgttatgtgaacctcggagagatcgaatgcattagtctctgtttgaattattgcatttgttgctggacgttgaataggtgaattgatttagttcagccgtagaatcaaaaaggattgttgacattgatagtttcactgttactactgctcaaagaactgataagagcctgtcaatagaaactagtttgattcttaaggtcggtgttggtcctgcctcagactgcatttgtattgctaaacttttattcttatcgagtcataattctagctgttattacgttgagtatgagtgtgttattctctttggcttaaaacttatagttgcctgcagcctacttgattttgggtgttccttgtttcaatttgttgctatgcttgtaagtcttttattcttttcgagttatgattctagcattcaagcttttcgtagtttgattctatgcttataagtaatttggtgaaacttgagatttgtgatggtgtcattctcattgacttaaatcttggagttgtctacttgactattgttgttccatgttacaatttgtatagctatacttttattattctttgagttaagattctagcttttcttaggttgtaactatgtttggaggaacctgagatttgtgattgtgtcattctaatcggttctaaacttggagtttgtctacttgactttgggtgtatcattacattaatccttgtttcaatttctccttttgcagggttttgacgaatac

SEQ ID NO: 40804 - DNA, 825 bp, Arabidopsis lyrata
  Intron number 4 from transcript 482248 (locus 482248) deri ved from phytozome v7.0 (chr-ID scaffold_4; pos 15682489 t o 15683313 reverse strand)
tgtaatttcgctataggtttttgttttgaaaatgaatcttttagacttgaatgtccttacaaggaacaactgatgttcaatttctctttaatacataaggcatgcctttaacattgttcaatttctctttaaaaatgcgttctctaaattgtaattattacattttcttatcattgtataaaaagataaaaaaaaacttcctttgttaaatttagtctacaaaagaaaatttccattccctttatctacgtgagtatgtgtaaataaatctgtttccaatggtgagaccggtatcggtatcattaataaaaaaaaattatttgtaaaatcaaaaataaatatataaaaatatgggattacaaaagataatattacaatctataaaaacgtagaatatactaaatctcaaacagtatcataaaaaatctcaaataataaacaaatattataattaatattaaaaaaattgttaatgacactctatgagtatcaactatgtgcatgctcttataattttccaaatttgcttttaggtcctccaactttagatttggaatttgcacaagctgacgaaatctttctgaaatttactcatttagtcccttaaaattcaagggtttaatttttgattattctttcttcaaatacgtttaagctacccttttctttttcaccgtcttctctctcttttctctcttttctctctctcaccatttagtcctcgattctctctacgcgtttcagcgttaagtcttctagatctctaaagcttcgtgcgctcgccgatataaatctctgattcgcgtcgtttttaaggaaaaaaaa

SEQ ID NO: 40805 - DNA, 778 bp, Arabidopsis lyrata
  Intron number 1 from transcript 473911 (locus 473911) deri ved from phytozome v7.0 (chr-ID scaffold_1; pos 23959133 t o 23959910 reverse strand)
cttgttcttcccgtcgcgtttgcgtttcttggctggtgcgtttgcgtttttcttgatttttccaataaatatttttcttgtttttgagtttttttcttgaagtttgtgtttagtctttttttcaagattattttttattagtgaacggcgagggttcaactctctgtagtgttcagatccaatttcagggtttactttacatttttgggcaaaaatcaaaaatgttttttctttttcttgtcggaaataataatatattgactaattcacttttttttaactttggaaacattgagattcttgcagtagagattttggttttcttattttctttaatttgtcatgcttccatcattactcatgtggatactcacagacatactttttgctttaatttggattaagacagagccttctttatcgtctattttgtttcttgttaatttccggcaaatttacatttattatataatttattcttcttttttctggtatatagtaggtactaatgtaattgacagtcaaaaaggataaaacgttatgcattattgttgcaagtttaaacatttgaagtataacttgttatagttttggtgacaaaaaaataaaataataagttgttacagctttaaggttgagaatttttattggttagttcaatggcttagcttagttatggatatttgttattgcgatcaagtaattaagattgttatttaagaagtgaattattgttgttacaggagttggggaatactatccttgacaatagcttatt

SEQ ID NO: 40806 - DNA, 837 bp, Arabidopsis lyrata
  Intron number 2 from transcript 900165 (locus 900165) deri ved from phytozome v7.0 (chr-ID scaffold_4; pos 6113726 to 6114562 reverse strand)
tttgacgagttttcagtgaagaaggcaacaggaatgtatcgaccaacaactcataactacagaattgtatttgagtactctactgtcatctccccctctgagaagatttcagaatcgatttggctagatttagttccttttaattcagtactaagtggtaccttagatcaaaacaagttggttggtgagtttttttaaaagcttacttttttgtgagtttttgtacatgtatattgtactaaataatgtgttttacctttgctatagatatcattggccaactggtgaatgttggggaaatccaaagcgtggatgtcaaaggcaagcctaccaagaagattgatttccaactaagagacactgagtgagtgttttatataatatctataataagtctttctttagagtttattttgatcatatttacttttgattttgaatttctatctttagcgataaccgtctaccatgttcactgtggggaagatttgctgatcaaattagcaaagtgtcaaaagattctattgggggacaggtcatttgtttgatccggtgggctaagttgtgccattacaaaggtattgcatgacatatttgtcggataactccatatattacgtaaaatattgttactgattgaaaaccattctgtttttcagaaattagaagtatttcaaactcttttgatgcttctgacgttttgatcaaccctgtcttgacagaggtggatgattttaggcaaatgtgagtgttgtattttcatctaactgtctctttatatatctaaatataaattacgaaaactaactaattctgcgtttctcaggcttccttctg

SEQ ID NO: 40807 - DNA, 415 bp, Arabidopsis lyrata
  Intron number 1 from transcript 480735 (locus 480735) deri ved from phytozome v7.0 (chr-ID scaffold_3; pos 22700966 t o 22701380)
tccagagatttcaaagtttttgtcttttgatccagatatcgatttcattgaggttggttttcaatattctttcacatttggggtttctggatctgttgtgttttcttgtcggatttaaagattggttttgatgagtttcaatggataataataagttggagtaatgtgaatctgagatttttcaagattgggttctcatgaagagattatgctataattcgagctctttctattagtagttcatattttcttgatacccatttggcatagatgtgtaaatcccaagtttttatctttggggtctgtttttgtctgtgaaagtgttgagctttgattgcaaaacacaagtttttatgtgaaagtgtagagctttgttttgtttcctttgaattggttttgattagattataaaaac

SEQ ID NO: 40808 - DNA, 773 bp, Arabidopsis lyrata
  Intron number 1 from transcript 479786 (locus 479786) deri ved from phytozome v7.0 (chr-ID scaffold_3; pos 10154368 t o 10155140 reverse strand)
agtgcctcattacttctcctcatcttgttacaaaggtcacatatatataatctatgtagaaatatttatcgaaaaaagtacacgatctagagaacagattaaatagaatcaaaataacgtatttgtccaaacatattttagttagattcttgattctattaactttacaaacatggttttatttctttgcaacgagtattttttttttccttttttttttaattacgttctatgttttggatgaaactcatatgtaaacaaagagtaatatttttaaacagagctagtcgttccgtttatttaagtggagaaatgtagataagaaacaataatatgccacgttgtaacttagtaacgctgcgccgctaacgtgtacgtcataccacacgacgtttacaagattgtcactccagttttttagtttgattcacaatggcctgacgtgtagagtacaataatagcagaattcaaagaaaacataagaaaaaaggaaccatacaaattataaatattttaaagaaatttagtagatatgtatttctttttctttatttttagtttgactagttacttttcttagaaataaaagttttttttttctacttttctttttcattgttcccatcgatttttttaccttttccagctaattagtagtaaaaactgcatcagaaatatataattaataacatataagaaatatgtttgtaacatataatttgttttttcttttaataggtgcacttggattaccttgaatctggagcaaatat

SEQ ID NO: 40809 - DNA, 425 bp, Arabidopsis lyrata
  Intron number 1 from transcript 943763 (locus 943763) deri ved from phytozome v7.0 (chr-ID scaffold_6; pos 25073583 t o 25074007)
ccgcttcactaccttgttctggaatcccaaaatcggtaaggatttcgttattccatctccttttcccagtctgccggcatttctatacaataatggctaaaagctattggttcttctacatagacatggattgtttaggatcttaatctacatagctcgacttcaatatctgctctttggtctgaggttgttttttcaatgtctcgggtgaatgcttctctactcctgtttgaattgaccttgatctggggaaaaattacactattacttttgtccaagttcttttaacaacattccctgcctgtttggtcgagattgtttctatttctctttcaaaggtattcttcccttttacttgtttaatattttgttctctcccttccgatgcagttgataagcgttttaccaagaggaggagcatcaag

SEQ ID NO: 40810 - DNA, 454 bp, Arabidopsis lyrata
  Intron number 1 from transcript 922435 (locus 922435) deri ved from phytozome v7.0 (chr-ID scaffold_1; pos 15471885 t o 15472338)
gaaacagccctggaggttagtttgattatcctttgttgccatcacatatatatactcttatttggtcatcatcagcaacttttttatggtgatgtggtttgtgatatctagtttctgctcattgtagggtttgaagaagtaagtcaggaaagaactattattcagggatttcaatcccaccttctaccgatgatgtggagacgcccagcagatcgtcgacaagatgcaactgcttagaacctgccttgacgcctgaggcatttggatatacctttggtgtttcatgatgatggttaattgttggtatgtgctagctaatagcctaatactttgtgttgttttcggttttgttggtgttgaacaaagagcgtgggaagttgattcaagtgcaagatatatatggtgctcctttcttaagtggtcgcctaacatcgcttttcttgtagcttgcaga

SEQ ID NO: 40811 - DNA, 621 bp, Arabidopsis lyrata
  Intron number 4 from transcript 339406 (locus 339406) deri ved from phytozome v7.0 (chr-ID scaffold_2; pos 15067316 t o 15067936)
ctcacccgattggttgacaataatcgggtaaacatcctagtctagcttgtgtgtatgagtctttttctttttgttacttaacgaaataggaatatcactatcgctctctgtttaacgattggtgaactcgtgcttaaaagtttagtttgttaggaggttgctagtgtgacatgatattattactaatgtaatcttctccttcatcgctggttagtgttgctttccctggctgtagtaattttattttgaggtcaatctatgaacctatcttaatgctaaagtctcaccaatactcacttagtaatggataagattcacccttggaaataaggaaggacgtccagagacatatgagctgatcatcaaggcatctatgactatatttgatttagtcgattggatattaacatgatctgttgtaaacatcctagtagaagtgaagttgttgtgagcatttgtttctgatgttctactcacccgtgatttcttcttatacaatcaaatattagttcattatttgctagcaagttttggatgttccataaacagtgatgacgatagataactatctctctgatgttgattaatgaactaatctggcttcttgtttcagactgttaa

SEQ ID NO: 40812 - DNA, 836 bp, Arabidopsis lyrata
  Intron number 1 from transcript 887445 (locus 887445) deri ved from phytozome v7.0 (chr-ID scaffold_98; pos 20070 to 20905 reverse strand)
gtggttacaggctgcggcaacaactacaacgacgggtaactcgctggaaaaaagaagtcacaactagatcaagaaccggttcaaagagatacaattcggatgggttagaagggagtctataacaaaccagctgatacccttgcaaagcagagtctccaagcgaatgtattttctattttccatttctatgtaccaagctctattacagaagctttacattgtgattccttggtttcgtctgattaataaatatcctagatattcaaaaaataaaaaataaataagccaccgatctaacaagtatcttgagatccaacggctgaaaacaagccatgcacaaagatctctctctttctcatccctagagaccatccaaagtccctatctaaccctaatttagcgagaaagccttcaattctctccatcgaaccatggacgaaaatctccccaagatcaaagatttaagatctctcttcatctctaacccgaaactgattttttatatatatgatagatctgtcatagaccatagttaagtagccctgatctagtcgatctatcatagtataataatggttaatggatccaacctatctttaaacaaataaaacattctttcttctctacatatatgtatgtaatctatatgtagtctcagataaatggattttcctattcgaagcacatttgatcgtagtctcagataaagtcagatgtgacccctatttcttccgcaggctttcacttttggaggctgtttatttaatagtatgaaatcgagaaatataattgttctcttagtagagccggctggtgaacaagatactatatttcct

SEQ ID NO: 40813 - DNA, 762 bp, Arabidopsis lyrata
  Intron number 1 from transcript 475883 (locus 475883) deri ved from phytozome v7.0 (chr-ID scaffold_2; pos 12728311 t o 12729072 reverse strand)
tctggatcgctcttcatcaagacgagaaggtttttttattctctcatcctctctctctctccctcctagtttgaaatactcatatctgacacttttttggtcatgattttggtttcaattttatgaatttcttcgattttaagttaatgtgacactggatttgggattgaggtcaaaccctaggttatcgagaatttgtataatttatcctcaggattttaagaaatgggtctttttgttcatttcccatttgatttgatttgatttgaatgacatgtttgtgttgatttgatgatacaacgccatggaagtgttggttttgttcttcacttggctaagcttgaagctttaccgttattagatcagtcctttgactcaatgctagattatgtaatgttggattatggagataaacaatttctttggtcctatatatgattacagaactttgacttgcgtttgattgcttactttaatttaggtgtgaaatcacaagtagagattgtgaataggtatatgaaaccatcattattagttatttgataagctttaccatgattagattgtgaaatgtaggacaatggagataaaacagttttaattggccgatgtttcgtttgtttaattcaatgtctgattgtttttgctatgaaagtataagtagagattgtgattagggatatgaaacagctcattgatatgttttctttttggaattaagaaatctgataagaaaactgtaactatgtgcagcaagaaaga

SEQ ID NO: 40814 - DNA, 489 bp, Arabidopsis lyrata
  Intron number 2 from transcript 470934 (locus 470934) deri ved from phytozome v7.0 (chr-ID scaffold_1; pos 3281360 to 3281848 reverse strand)
tgtcagattttcagtccagcgttcaacagtgcgtggtttgtctcctttcccaatttctttgattcttgacctacttacttttatgcacaaatttctatatggattttgatcgatgccacactttcggtatattattgcgcactagttttgattctggatagttcatctttgatctatcgtaacgttattggatacatcttttagcctgtgtgtgtacaatgggatcagagtttgaaatatctaccaatctatcaatgtgctaagttgtatagtagaatcatgttttggaagtcaagagtaatgttatttaatgagctaaaacgctacattttggtcttcttctgtaacttatttttgtgttggaagaaactaggttatgggtttttgatgaagttttttagtttggaggctcgcatgtgttgggaatcacaataatgttattgtgtttatgcaggcaaacagagggcttggactctctgcccatattat

SEQ ID NO: 40815 - DNA, 824 bp, Arabidopsis lyrata
  Intron number 4 from transcript 937559 (locus 937559) deri ved from phytozome v7.0 (chr-ID scaffold_5; pos 13607780 t o 13608603 reverse strand)
tcttcagagaacatcttgcctcgtatcgataggtatatattttgctataataaccttaattatgatccttaattcttgcttaggtcaagattatgtaggactaaaacttaccagacatagtaaacttgatggattttatgcttttattacttcagcagatgctgatgattagatttagagggtattgtttaggaaactttttttaaagtaatcacacactaatttaggatttgtgaaaaaatataccgttaaacgatatgtattgactaaattaaattgttgtataatcataagattttgttatgataaaaagttatatatatgattacttttaattatcatggggttaacttttgtggtggttgtatattggatcaagctgagatttggtgtttatttttagtgggtccttaaatgatttttaatatggatcttaggaatactaataatataaaattgtttcttgtggccaaaagaataatccttcataagttaagcaagatcttcttgagatttgattctatagtagccggtgacatgttaggccctccaaaactttatattatttgttttaattgtttgggttgcttaatcttaggtagggtcatttataaatcccaatcctcgtgatagacacctcacatgcttttgcttattactaaggaaccaaacccctcttttttttttttttgataataaccaaacccctctttaccaaattatgtttaataattatcatatatgagctggccatttcctgcatccaaagttatcaactttatagaattggatcactaatattttgattatttttttgggttcag

SEQ ID NO: 40816 - DNA, 381 bp, Arabidopsis lyrata
  Intron number 1 from transcript 929724 (locus 929724) deri ved from phytozome v7.0 (chr-ID scaffold_3; pos 7904761 to 7905141)
tcttactgtcgtcgtcgtcttcgaattcacgatcggtaaattctttttttcccagtggttttagtttcccatgattttggggttcattggaaattgaattttctggatttggttttgtttccttgttaaagaaagagtatgcgtcgttgctttcatctgtagaatgaattcgtcgttttcttcttttataattatattaaaaaggcaagtgttttgcttttgtttgactgtaattgacgattactgtatcattgagcttaattatacttcacagtgcttaacattgctaaaatggtaattgtgtatagaagctttacattgtgatgactgttgttggttgtaataggagcaactctaagcaaagggtttaatcgagcgctt

SEQ ID NO: 40817 - DNA, 607 bp, Arabidopsis lyrata
  Intron number 1 from transcript 924899 (locus 924899) deri ved from phytozome v7.0 (chr-ID scaffold_2; pos 2545987 to 2546593 reverse strand)
tcctggcaacgacaaacatctttcttgaggtaattttctttttttgaatttaatacatgtttttaaaattttatatcttcgcaagtttattaaaattattttcaattagttttgaattttataagtttatatatatgatttttgcgcgcaaattattaaggttgttatatcttacatggtattactatctagataaattatttcccaaaaggtatttaatcaataaaaatgagatttgcttcaagatacataagacatgacaacgcgtcataatcttataccgtcgaccaatttatttaacaaggtatttgatggataaagtttactaaaatatgatatcttattccttagagctttagatacttttttcttacatgcattattcttcaagtagaagtagttggatgttagagcataatttgcacaaactctttgatgatcatcatttatagatctagtatgcaatttgcacaattgttttcctattattatctccattttcttttgttcataatctaatcttttttgtttagagcgagtttttgatggtgtttttttcacatatttcttaggctttcacaaagagatacgtaggaggaggaagaat

SEQ ID NO: 40818 - DNA, 539 bp, Arabidopsis lyrata
  Intron number 1 from transcript 919535 (locus 919535) deri ved from phytozome v7.0 (chr-ID scaffold_1; pos 2962196 to 2962734)
tttggaagctcacatctctctctgcatcatctcctgtgagttgaatttttagatgtcctgttttatggtttgcttattaaggagctggaacggttctctgtttgcgtttatcttttgtctacagaaacttgtatgctttagaagtagattagacgtcactggatggtttcacggacaaaattagtggagtttctatccgctgctctgcttattcatataatttttgtcaaagagttttggatttgctagatttcaattctctgaattattgattgtctttgagtcgtgaattgtgtatgtgtaccattttctgctttaatttttgtttcgtggtttgatttcatatgcgttctactgaaatcagtctaaatataattatcaaacctagcataagacttgttatacttctttgagtatgttgttgtcaatatcacttgccgccaggtaatggagatttggaattgttcatgtattgatgttcttttcctcttgttatgaacataggtggagacaatattagacaaagaaaatttcacctt

SEQ ID NO: 40819 - DNA, 474 bp, Arabidopsis lyrata
  Intron number 3 from transcript 487187 (locus 487187) deri ved from phytozome v7.0 (chr-ID scaffold_6; pos 1315681 to 1316154 reverse strand)
tcgacgcccttttctcttttttttctttttcttgggaccttgaaatgcttccaacgagtaatacaattttgttagctgttattatccggttaatcgcaaaaagtttcaattttgtagtaaaaataaatatgatgttgaaaattgatgtctatggcgaaacgtagcttttgagtgtgtcttcttatattaggcaatttatcaaatctgtttgctaagtttgtggtattggtcaaatggatataaatcctctgcatgtgaattagttgatgctcagatatatataattttctcaatactctgtatgtattgtgaaaataatgtattatctggtcctggtctctacttcggaactcagtttactaggagattaaatgtttggtatttttggtgtcttaattgtatgcttttgtctgttaattacattttagagttggttatgtcaggagttggatacttcttctgacaggaagggcc

SEQ ID NO: 40820 - DNA, 371 bp, Arabidopsis lyrata
  Intron number 2 from transcript 487187 (locus 487187) deri ved from phytozome v7.0 (chr-ID scaffold_6; pos 1316111 to 1316481 reverse strand)
gctttcggattcgagtcttcttcttcttcttcaggtttcgctagggtttctctgatccgcttcttctactgtgagctttttttgtcttcactcatcgattctttttattttttttttcatattttccggtttgttaatctgttggttttcgtgttttttttttttttttttataatttcgatttatttgggttaatggttataatatgatttgatttgatccagctttcgttaaacaagatatcaataatttctggaaaaaaattatggtttttcgaattgtttaagttcctgctcctaaatccatcttcctctgttggttcttctgtcgacgcccttttctcttttttttctttttcttgggaccttgaa

SEQ ID NO: 40821 - DNA, 317 bp, Arabidopsis lyrata
  Intron number 3 from transcript 482714 (locus 482714) deri ved from phytozome v7.0 (chr-ID scaffold_4; pos 17801911 t o 17802227 reverse strand)
gctatgtaagaagatacttatttgccttactgtaatcttcgattgttgtatatgaactctctgaggaattgctttatcttgtcttgttgttatgcgtttgtgttttggtgtttacttaatgtgtttatgttgctctatgtttctgtgataagctgtgttttagtgttttggaaagtaaaaaattttcttcggtgaatgcaatctttaaacttgtggcttctaaagatataacttggacctctgtgttgttgttcttattgcataagattcttgtttctttagttaaaaacattttgatatgattttgtaggagttgg

SEQ ID NO: 40822 - DNA, 489 bp, Arabidopsis lyrata
  Intron number 3 from transcript 937125 (locus 937125) deri ved from phytozome v7.0 (chr-ID scaffold_5; pos 11457460 t o 11457948 reverse strand)
aggaggtatatcaaagttattttatgaccagatttttcatgataatttagtttcttatttgggtaggagaaaaagatactcgcttgtttcatatgtgcaaggtggttaaatattgatactttgttttgatctcataggaagctttatatcgtagatgcagtttaagtgtgttcttaggttcttctctttggcaaagtctgcattttttgttttggactgttttttttattagtgcgattaacatagactttcatgtttttacgggaagcagcaaaggaacaatgattgtagaggaatgggattagtatttagccaagttttggcaagttgtactgccgagtgaaaaagacacacctgaggctaactccgaccacatcctgtagattttgtagaatggaagaaaagttcaatcctttttgtagagttttaggtcttcattattatttttgttcagtcttgataaagctgtggagctaaattatcagtgga

SEQ ID NO: 40823 - DNA, 484 bp, Arabidopsis lyrata
  Intron number 1 from transcript 927185 (locus 927185) deri ved from phytozome v7.0 (chr-ID scaffold_2; pos 17834083 t o 17834566 reverse strand)
ggcatttttgcaaaagctcctataattttcttttgggtacccaaattttggaaaatcatatcattactctatgagcactttttagttttaatttttgagattaatctaattgaattaaaagttaatagatgagaaacaagattaataaatatattaaagtataattgtagatattttctttgaaataatgttaaataaaaataataattacaatgatttattatgtgtattaattatgtaatataatattataaattaaaaaggctactatcgtgtgtatcaagattagtatgtatatctgttatgtgaatcttaaaatataattttagaaaattaatagacacataaacaaatcaaatcaagattaagtttgaagatgtgtcactattagaataaaatctataagataatgattgaagtatcaaacttgtttgtgatccgatatttaggggatttggaaaatagttacacaacctcttcggag

SEQ ID NO: 40824 - DNA, 629 bp, Arabidopsis lyrata
  Intron number 1 from transcript 929797 (locus 929797) deri ved from phytozome v7.0 (chr-ID scaffold_3; pos 8228119 to 8228747)
acgaggttgctgttaaagtcatcccaaaatctaaggtcaattttactactttactttttccaaattctcaagttttgtgcttcaagtgcttcatttcattgtagtgatagcgaaattgactgatttggttagtagatgttaaactgtttcaaggtagaagaacaaaccagcatagtgttagtctcttttttgcttcatgatgaacctgtaatttgatcattacgttctcttgatttttcttttcttctctacgagcttactgtcctcttgtttttgagccatctttttggaaaattaatagcgtatgtggactttcacgcttagaagaaattaatagaataacaaagtagtaaataatgaactcggatgaggttgaagtttttcaatgagactaatgaatcatccatgtttttcaatagccaagttttcaatggttgtagataatagctttgctgacttttatgtgaaaatttctaaacgttttgaattggtcaataaattggaagcatgggcatttgtgcttattgtcattaagcaaatgaaatctctatagtccttattttgatgactaactaagaatgttagcttaatccattatagactgttgctcatcatttttggtttggcag

SEQ ID NO: 40825 - DNA, 1030 bp, Arabidopsis lyrata
  Intron number 1 from transcript 923683 (locus 923683) deri ved from phytozome v7.0 (chr-ID scaffold_1; pos 27478054 t o 27479083 reverse strand)
aatatttcatcttgttcaatctcaaaatcaaaccggtaagcaaaaatttgtttgtataatctatgtgtgtgtgttcttcaacggttcttagtttattagattattaagtaataattcatctattgtcttaacaggattcatcagtgtagattgcggtttatcccctaccgagtcaccatacaatgcacctcaaacaggtttaacatatacatcagatgccggtttaataaacagtgggaagactggtagaatcgccaatgaattggaaccattcgtcgataagccggctttgacaatgagatactttccagacggagtacgaaactgctacaatctaaatgtcacccgtgacaccaattatctgatcaaggccacattcgtttatggaaattatgatggtcttaatgtcgacccgaacttcgacgtttactttggtccaaatctatggacaacggtgagtagtaatgacacgacagaggagatcatccatgtgacaaaattcaattctttgcagatctgtcttgttaagacaggaataagtataccttttataaatgttttggagatacgaccattgaagaaaaatgtgtacgctactcaaagcggttcactgaagtacttattcagggtgtatatgagcaattcaagtcgtcgtataaggtaagaaacgatcgaaatttttatctaacataaacatatgtctcgattgattgtttaatttaatttatgtttatatttcgtttactaataaattttctatgggtcgttaaaaagaaaaaaaaaaaaggtaaacaaattttttgaacttataaacgcgaaatcaaaactacaaaatcagaaagtggtattttgtgttttcatttataatttgtaagaaaaagtgaaaaacatattattatttcggttaaaaaataccaatacttacatgtcaatttgtagtttatgattttgaaacgatagccatatgtctgattagtaatgcgatctaatacaagattgtgacagcctttttttttggctaaacgattgt

SEQ ID NO: 40826 - DNA, 968 bp, Arabidopsis lyrata
  Intron number 3 from transcript 322539 (locus 322539) deri ved from phytozome v7.0 (chr-ID scaffold_5; pos 591375 to 592342)
ttctcgccggtctggattcctcagaactcttctatgtgaggtagtctgttggaacttgtttttgacaaaatggttttgaccattgttacggtggattttccggtgaagacgttcatcggaatgaccggttcttgggcacgatggaatcattgttgcgagcactacgtgatggtgtattggaatgtcaaaaacggagttcgtttgaatgagaaatagaagtccaaagtaacttgcttgcttagcttggaattttgacttaaagtcaaaattgtatactttggaagttagaggagaaatccaaacatacatgggttggatttgagatttgaaatttgggaaatgggcttacaacccatataattattttattttcccaaatttattttgatttaaattagtgattaaatcaaaaatatctaccttaatgattgtgtgtaatcaattgagacaattagggtcaaaaacgtttttgactttatcgtgagatttaagtctcttgattgtgtcattaaggtgatatattctcctttttgatgccatggacgtggagttcttgtgctataaagtcatggtcattgtctctcattctacgcatcgttcaccaacataatctccttcctcttcttctcttttctagtttgagtctgagagtacaacacaaggctagtgttcgattagcttttgatttgagtgttgcaatcaaaaggagaaacagttttatcctgggactctaattgtcatcaaaccgacacactacggggcgatttttgagttaaggagagagatcatcaacgttctcgactctgtttaccaccgtgaatcttcgttcttcaatcatcctttcggtatttttgatttttgatacttgttctatgttatttgttttacaaatattagattgtgcccttattgaaatattaaggtattacatagtcttcatcgtaataggtggtaccgctgtccgtttg

SEQ ID NO: 40827 - DNA, 611 bp, Arabidopsis lyrata
  Intron number 2 from transcript 488284 (locus 488284) deri ved from phytozome v7.0 (chr-ID scaffold_6; pos 5822936 to 5823546 reverse strand)
gattcgtcatcccgctgcgtcgttaagtttaaaggtagacacttttcctctcaatcgatttgggtcattttctggtgaatgtcgggagattcagtctcgaatttatgttttttttttccgattttgggtttagtctttcgtctaatgattcagagaatgtttcggttcaattcggggtaatatcgaattcgaaagctcgtggatttgtcagaaactggtttttgtttgttttacttattcagggttagagtgttggagtaggttttcgtaattggacttttatcttaatctagaagtcactaaatcgcgttttggtttgtggaaaattacgtgacgtgattgaatctactttctttatataaagaccattaccaaccttcgatttaaaagctatttcataagcggtgagaaatttcaacatctgtcaaagataaagctttcacctttttttacgaattaggtataggtaattgcatcttctactgagttgttaatgtcagaatcttaacaaagtttctgcattttctttctggggtttcatgaatatactctaaatgctatttctttgttttgcaggtactgaattgacttaagaggtttgatttgaatct

SEQ ID NO: 40828 - DNA, 520 bp, Arabidopsis lyrata
  Intron number 1 from transcript 478618 (locus 478618) deri ved from phytozome v7.0 (chr-ID scaffold_3; pos 5043424 to 5043943)
gctctcgtctcgtagccgggtaccgtttttttatccatccttcttgttcctttttttctctttttgtttgcgtttgtatcgcctctttggagctgctgttttggttacgtaatgtgaatctttcttcgtttattcgaaaattgtgggtgcgattgattaagacaggtgtaagtaaatgctggggatttgttttcatgggtctctacgtatccctgtattgaagtgattgctatcttcgagattaattgggcattttcggtgttatgtttgtttaaattttagaattgcaaaacaagagtcatgattgaagatttttttgtcttagagtcatgctttgacaagaggattttgacatgcttagaccttgttttgattgtaatggccatttatctgatcttggttgatgaccatgtctgtgtagcctttacctgtagtttttgtttccggagaccttgcttaacaagttcattgtcgggcgtttgtaggtgtattccatttaggtatataaattctgacaaag

SEQ ID NO: 40829 - DNA, 537 bp, Arabidopsis lyrata
  Intron number 1 from transcript 943148 (locus 943148) deri ved from phytozome v7.0 (chr-ID scaffold_6; pos 22030446 t o 22030982 reverse strand)
acattactgcttctccacttggtgttcctcaacaggtttcttcttcttctagatcgtgttactgtttctttggatttacagtttgtgatttgagattttgaatcaaagttttggtttttcttgtagattttgataaacccttaatttctagagagtttactgttgatctaacttttaggttactattaatggtaaagaaattgtgataaagtttctatctttgtttgtgtgtatttttagatttcagatttctcaaaagtttcaatcttttttttctgcttcagggcatacttcaaaattcatctacaagaaaacacaaaacacttttagtttcttgatttgttgaaagttttatcctttttttaacctgaatgaaagataaataaatctttagagtagaaaaagtttcagtcttttaactccagatccagctgtaggaaaagtgaagtgtagatctaaaacccaattagggtcctaacaatttctaaacaaagctaattttctattttaattactgtaatcaggtcattgctataa

SEQ ID NO: 40830 - DNA, 798 bp, Arabidopsis lyrata
  Intron number 1 from transcript 482479 (locus 482479) deri ved from phytozome v7.0 (chr-ID scaffold_4; pos 16686846 t o 16687643)
tccgatcttcgcccccatcgccgtttcgttttccggtaatactccaaaaaaaaaaaaaaaagaataaataaaaccctaatcgcaattctctcatcctagtttccgatcgctagtgcttctttctcttctccttggtgaaattcaatacgtttcttactattttttctcgtttatgttttgggttttggtagtaagtcgaatttaaaaccaggaaactccaagccgtgtcttttctccaggtctgattggttctttctgcattgcttttttttttttaattctcctttaatgttcatggctactgtttaattatctgttaaattatgcttgagagagagagagagagagttacgtcactgttttgattaatgtgtgaattgcgtcatcaacttcttcttttctttgtatgtttgcttacttgttgacttgttctatgagttcttttgattttggattctggggttttactgtttacactatgcaatttttgctttctcaaactactttcagaagttatttttcttcattagattattcagttatgttgtgttctttggtcatgaaaagattcatcaagtgcccaccattttttttgtgcaaaaagtgattttgctttttgttcttcataatttccaaatgaattgctctctctgtcaaaatttgatgccctgtttttttttgtgttgctcaatctactgtttttggctccacaagtctcttgattttctagtgtatcttctcagttcaacaaatgaaggaaagttagttctgttgttattttagttttctgtaacagcc

SEQ ID NO: 40831 - DNA, 475 bp, Arabidopsis lyrata
  Intron number 1 from transcript 922602 (locus 922602) deri ved from phytozome v7.0 (chr-ID scaffold_1; pos 16597995 t o 16598469)
gatcccactctcgatctttgagtaagctctcgaaattctcgagttaagattttgtttttgttcgtctttccgtacgtcaagatttttttttcttctcgtactcacttatttggtagctgtgtggacttaagcttctaaaatcatgtctacattattgatatgaaagaaaaatctatatcgttacttcagcctcttcttttactttgtttgaaccggaaattatatgatcatgtctatatatatcttactctttttttatttacttccaaatttttttgaatttttctgagaaacaaagatccattatatctaaaatcatgttacaaatgtaaatctatattctatttttattttgaattatattttgtcatgcttggaaatttggatttgttttagttcttttgttttgttttacagttctttattcatgtatatatattaattttttttgggtttgggttttcaggaatctacg

SEQ ID NO: 40832 - DNA, 493 bp, Arabidopsis lyrata
  Intron number 2 from transcript 473438 (locus 473438) deri ved from phytozome v7.0 (chr-ID scaffold_1; pos 14887039 t o 14887531)
tttttttcattaccgtacgaagacgaatcatcaacccaaggtaccgatttctgctccatctctttcttcttctgattttccgatttcttctctgtttttttttcttttcgtatgtgtaattgaatccgaaagtttcgtttttttttcctgggaaaatctcgagagttcggagaggaagagagaaacaaaaaaaaactagaaactgcgttgacttttgggggctaattttgagaatttagggttttttaaagattagtgattgattcgttttttgatttgtataaattgtaaagttttaattttttttacatggatttgtctttgttgttgttgattggagaatttggatttttaattgggttttgtttcaatgtgaaaatgattagagattttgaaattgttgtgaaaacgtaattgttgttttcatatagaacaatgtaagatgggttttgtttctctggtctaaaaattatgcagaagtttaaaggtattg

SEQ ID NO: 40833 - DNA, 548 bp, Arabidopsis lyrata
  Intron number 4 from transcript 478051 (locus 478051) deri ved from phytozome v7.0 (chr-ID scaffold_3; pos 3080797 to 3081344 reverse strand)
cacatcttcatccggtgctgattccgaaagcaaaagtaaatgtaccttttccttgcctttggctctcctttccacatgctgtttttagatccttacttatgccgcctgttttagttatgttattggtaagccatgaagataagtgttatggcaggaatataataatgttggctcacagtctcttttacaagcagatacataaggttttctttttagccatcttagacagatttagctgtcaagtggtttttgttttgctttgggaccttgtaatttgtaaaccctattacctgtcgttttgttgctggaattctcggtgaatttgtgttgtgttactgagttaaagagataaatgggaatcatatctgttcttatcagtctgttttttggtggttcgtctcacttctattggaattttatcttaaatgaagcataggtcaaaattttatatggcagcaaaaataagttataatttctggttgatattaatggtgtactttacccttgatttagctgctgataaaagttcattaactcggaagctgaag

SEQ ID NO: 40834 - DNA, 719 bp, Arabidopsis lyrata
  Intron number 2 from transcript 894150 (locus 894150) deri ved from phytozome v7.0 (chr-ID scaffold_6; pos 9567612 to 9568330 reverse strand)
acgtcgttaaggtctgcttctctgtctcttatgtgtgtttgctcgatttgattttttacttcttttttatatttatgttttatttgtgtgttttggtttcgtggtatcaagagcttgatgagataaagaggggattgaaagagatagaggaagaagctgctgccctgcacgatatgcaagccaaagccgaaaaataaatgggagctagtcaaggtttgtggctcttttgtttctttgcttctgtgttttcaagaaattgaatacgtttgcttgagactatctttgaattcgatatactgggaatcttttgattgtctataatacttatacgaaattgaagttttgttggttttatgctgttgcggagagtcttattgaccacttagaggtactatttagttgatgtctgatctcattaccaagtttagtgattttgtctttgttattcaaagtattgtaagaagacttttaccactgcattttgtttgggagtgttaagcaattactacgtggttgtggttatttctctttctcttgactgtcatgggtttgatttattccatattcggtttgaataataatgatgatgatggtgattttaatttggctttgttgcataggtaggattgaaaagcttatcatgatggtattgaattcttgtctcttcactctgtttcagatcagactttcttgatcttctccatcaagctccaggttcg

SEQ ID NO: 40835 - DNA, 697 bp, Arabidopsis lyrata
  Intron number 1 from transcript 934162 (locus 934162) deri ved from phytozome v7.0 (chr-ID scaffold_4; pos 16821626 t o 16822322)
agcttgaacatcgccgtcgtgctcgacaaaggtaaatattttaactgactagttagagaaatgtaggtatggctttttgtatattggctactagattgcttggggatgaagaatttacaaaaaaaacttggaattttttatacgtatgtttcatgaggataaaataggtcaaaataatatataaggtacgtagtacaacatatttttttaattaagacacttagggaataacccaatgtttttgattcagagagagtaaatttatgaattaacaagaacaaaacattgttggacactatttaagtaggaaaataaaactagttgaaatatagaaagaatcaagataagtgagtctgctacgtatgccatgacaccttgactcaaatttccatttacaatatatattttttcatttatctgaatttatgtttacgtaaattttaggttaattgcgttagttaattaatggtagggttaactttaattttagttagtatggctgtataatcatgtgcaatacggtgaaaaccagacagaatcataaaatcggtcaaagtaataacttttatgtttcagtacttactaatttcaagttttctagttgaaaaacgaatatctctttgagcacataacgaattttaaatagtgatgaatccgatcaggcttaccatctccaaccgagagctacagggtgttc

SEQ ID NO: 40836 - DNA, 589 bp, Arabidopsis lyrata
  Intron number 1 from transcript 356923 (locus 356923) deri ved from phytozome v7.0 (chr-ID scaffold_8; pos 6908520 to 6909108)
agcagattactactattgattgttcgatcctcaaggtgacgactctagtcttatcttcttcaatcggacattggtagagaaaacgagaatcaatggctggaaagccacttttgagaaaaaaaaatgctggaatgccactcatctaatttttatttctgagagaattaaaaataaaacaatttaaatcagaaaattatgaaaagactaaaaacccaaaaatcaaatccctaatttctcattttttcccttgctcttggaacagaggattcgaaacttaatcgttttttgagtttctcatttttccccttttactcaaaaatcaaatccctaatttctcattttttcccaaatcgaaaatcaacaaaaatcttctcgaattcgtggaatcgaattgaaatttcgtcgagttcgtcgccgtgggagtgttgtttcgtcgagttcgtcgccgtgggagtgaaattaatggagtgttcgtcccccgatagtaatcctttgagaatcctgccaccgatagtaatggctcgtgtaaagacggtgatgatttggtatacgagtcgacggagaggcgttggagagaagaaaccgccgg

SEQ ID NO: 40837 - DNA, 469 bp, Arabidopsis lyrata
  Intron number 2 from transcript 899919 (locus 899919) deri ved from phytozome v7.0 (chr-ID scaffold_4; pos 3648894 to 3649362)
cacaaatatatcttgacagaaaaaaaaaatcaaaaatttgagaaactatagtttaagttctacacctgaacaagacaggatctttgttttaatggatggaaaggggaagttatcacaagaacaaggtatgctcttacagtttcttatctatctgattttttttttttttcatcatttcaatagtgtgagaattgattaaaactatccacaaaacatttatatactttggatataaaattcttacatgggaagaagatataacataaaatttaaatataaatgtgttaggaggccatgatgaagatgatttttcatatgatgatgatgatgattgaatctccctccagcgacacaaattctaaaaaataatttttttgatctttgttataacataatttatactgtattattatattcattgtagaatgaaaacgatgcaaataatcactctatttatatgttcagatct

SEQ ID NO: 40838 - DNA, 290 bp, Arabidopsis lyrata
  Intron number 1 from transcript 941561 (locus 941561) deri ved from phytozome v7.0 (chr-ID scaffold_6; pos 8515383 to 8515672)
tctcctattactacttaacatctggaaacaatctggtgaacttttcttctgtattctctctaaatgaattttttctctctatgtaataatccatcatttcgaattccgtttattttatgctttgatacctttctcttgcatttcgtctaatgtgtgtgtggtgtgtgcttgtggtatttcacattcaatcagacgagtttcgacgaacaatacgaaacatatagattcatttttgtttgtgctttatgatctcaggtttatctggatcaagctaaggaagagacaggacc

SEQ ID NO: 40839 - DNA, 815 bp, Arabidopsis lyrata
  Intron number 1 from transcript 932927 (locus 932927) deri ved from phytozome v7.0 (chr-ID scaffold_4; pos 6968226 to 6969040)
gaccacgccggagaacagaggccattgattcttcagattataataggaattggattttcctattctccagaattcgtcctgagaccttattgtccaccccccaaagtcgcggcatgacattgagcattgcttgaaggttttgtcttctagagttcaccgactttacaataagactgaaacgggtctcactaatcgcttcttcacacaatttgaacgggagattgatcgcttcatctccaatttctaacgcaattttttgcaattgtctccggattttatctgccatgaacaatatgaaggaaaagggatattttcactcttatcaacccaaggaatccagagacatgtgcagggtttatatagattgttgggtgtagcagttaagagatcaataattgttttaccgttaatcagcgctgaaaaaacagccgataaccggcgaaaactgtcaatttctgacaaaaaacgcgagaaaaaagtgaacagatacgttcgcagagaaaatcgcctctctttttttttttttctttattgcatttgattttattttaaattatcttaaatataaattttcataaaactaaatagtaaatacttttgtgcatctttagcaaaaaaaaaaaaaaaagaaaattgtgcatggcacaagtttttacttcatggtaatttaaacgaccggtgaaaaataaaaaagggaaatgaaacagtgaaaactttaagaggattaaaacaaactaaaaaaaagaaatgagtaaagcgatgagaaacgtgtgttcacagatatttgataaaaagaagtaaatccatctctggcc

SEQ ID NO: 40840 - DNA, 658 bp, Arabidopsis lyrata
  Intron number 2 from transcript 483004 (locus 483004) deri ved from phytozome v7.0 (chr-ID scaffold_4; pos 19319081 t o 19319738)
ccggtgagatctcttgaaattttggttacttctctgtttgtgatgcatgtccttcaattttcaccgattgtgatttgaatctcagcatgtgtattcgaatcttcgatttttcggtgcttgatttgatgacataatgtccacgccattattggttaatcttgaaatgatgaatttttgtccgatctgggtttaaagctggaattttgattgtgggtactattagaatcattgatttcttgcttggtccaacatttttagctgctggaattgagctgttgttgtctgaattttggcaagaactatttttgttgttttgatttattgtgttttggatctgaattcattgacctttctctgtggttacattcactttgattagatctgaatgtatcctttttatgtgcttaagtttttctgtttctagcatgttttgtcaccaattttgccattttgtaatcgtttatttcattttctttactgaattccccaacgttatggattctacaatgtgattcagagttgatagttttcactgcctgtgaatctctccatagatttctgtatctctattgagctcataatataatttcttttcataagttagacattgttaagatctgacgtttgtaattgcagggaaaggagttagagcatcaag

SEQ ID NO: 40841 - DNA, 1013 bp, Arabidopsis lyrata
  Intron number 2 from transcript 894664 (locus 894664) deri ved from phytozome v7.0 (chr-ID scaffold_6; pos 12668264 t o 12669276 reverse strand)
acaatgttactttctgtggggactctgctgagatatatcgttatcttgagagtacaatttgtcgtcggagtcaccttccacgaccgcatgctgctatacaaggccatctacaagatatactaggcttagcaagaagcaactacaccttcaaacacataaaccgtcaacaaaatgttcaagctgatctccttgcaaaacatgccagaataaaccattctccttattaggcctgggcatatgggtaacccgttcgggttcggattgaatgggtaatgaatttatggtccattcgggtattcctatggtttcggttccggtccggttcgggtattatcgggttcgggtcggtttgggtaatacccgaagtttaaaatcactttacatactcaaatgatcaataaagagaatagaacatcaaatatgacatttaaatactaaatccaatccaaaataacaaagatgactatttcactcttaagtgttaagagtagattctaattatctatatacatatatagacatatgtgtattgcatatatataagtatataactatataagactatatatctaattatctatatacatatataaactcaaacgtcaaaagtcacaaaacctaaaacctaggacatacatataaggattttaatatctctagcccctttggggagaatcaatttttggaaaacccctctttattctcactaccccctctccttcccaatttttccataaaccaattctaccccttatcccttttattcaacatttaatttaataccaacacattttttattcaaccaatcaaaaattttatctctcttctctcatttaaaaaaacaaacctactaaatgtctcactttttacgatattaaacctacgagactttcttcttcttcttctttttcttcttctttttcttcttcttcttcttctttttcttcttcttcttcttcaacagctccgatgttgcagctccgacgttcttcagcagctccgacgttgcagct

SEQ ID NO: 40842 - DNA, 712 bp, Arabidopsis lyrata
  Intron number 1 from transcript 894664 (locus 894664) deri ved from phytozome v7.0 (chr-ID scaffold_6; pos 12669411 t o 12670122 reverse strand)
gtgaatattctgctaaatcaggttatcatcaacttacaaagcctactaatctaacagatcctgaacaagctttaaagaacaaactgagcagagctatttagaatttttctgccccaccaaaaattaaacatttctggtggaaagcatataataatgctcttcttgtggcagaagctctcagacgtaggcacatcaatatcatgacagactgcccattttgtggagaagcaaaggagaccattacacatattcttttccaatgccgtgtagcacaagagatttgggaacttgttcctattgcaataccttcagttcagtttgcttctgaccaaagtttttcagaatatcttaaaatcttgctttctattaaaccctcccagcaagaacaagagaatctttttcctttccttggatggcgaatatggaaagctagaaatgatctgatattcaatagtaagcaatggggaattcctcaaattatccatcaagccatagtggattatagattatggaatgaagctgctaagttcacaaaagaggttcaaatcaatattcaaaaccattcatcatcctctttacagcaaactttatcacatgcatcatcctctttacagcaaactttatcacatgcatcatcattatattgttgtattgatgcttcattgatagatgaaaaaaaaaaaaaaaaaaaaaaaaaaaatgcaggcattgg

SEQ ID NO: 40843 - DNA, 357 bp, Arabidopsis lyrata
  Intron number 1 from transcript 491768 (locus 491768) deri ved from phytozome v7.0 (chr-ID scaffold_7; pos 5094142 to 5094498)
ctccagtggagcgactacgccgttggagggtaattgcttttattccggttttatatgttaagtgcattttgaattttctttcctgttcttctcactgctcctgtgatttggacgaatttgattgatgtccatttggtttcgaattgttatttcattgactgcatagtgcttttatgtttgttttgttcggattctcggattgaacttagttattgttttatccggttttagtttatgcaatcgaagatacagtattttgcaattttcctcagccagatggttcaggctttctttgttttttcttcctaacattctggaaaataatttgggttttgtagcaagctgcgcttgttctta

SEQ ID NO: 40844 - DNA, 540 bp, Arabidopsis lyrata
  Intron number 3 from transcript 491768 (locus 491768) deri ved from phytozome v7.0 (chr-ID scaffold_7; pos 5094679 to 5095218)
acacctttttaaagcagctgcaagccgagtgactggtaatttcttttagtttcttgttcttttccttaattttcttttctccatcccattttgtgaagcatgtattctcttgcattttccatagagattaagtgattgtcaatttaataccagttgttttatatgcataatggaatgacactatggttagttgtgtagtcaaagttatgccaagagaaagtctggatgatttttgttttgactcttgttttacaaaatgtgattgatcttcattgcaatgggttgagttgattatcttttatatgtagtgtaaacagtatactcactctcgatttgcgaccttgatgttttcttggatatctttgtagaaccaattaatggttccaagttttctaattgatttacattatttgtttgggctgttacttcttctgtaaggaatttttttttttcttaatttttctgattgatatgctgtagttgactgaggtttatctctttttaggagttacaagtccacctccgactcctggcagtggt

SEQ ID NO: 40845 - DNA, 530 bp, Arabidopsis lyrata
  Intron number 2 from transcript 924757 (locus 924757) deri ved from phytozome v7.0 (chr-ID scaffold_2; pos 1744548 to 1745077 reverse strand)
ttatcagctcctgcactacatctgatatcttaaaggtgcatgctctaccataataaggcatatattgtttaactctaatttaaattaattatgtatatttgtagtttgtttttgctaaaagttatatttgtttatactacatatattttagatctacgtaaatcaatttgtgtcggggttttggctacaggaaaagagtctgagctaactaacaccaagtttttcttggtttacatgttaaaaaggacgaaactaatattacatgttgtggtttcgggtctggggggattacgggttttggcctagaacctcctggtattaaaaaaaaaaaaaaaggtgtgtaagttaaaaattttattatatatttaacactttgatttgttttgacaaaatccaacgaacttaagaagaattggtttcttatctttgcgttattatttatctatcttcagttttgtcaataaggctgatttgtgtctttttctttcactacagcgtgtgacatcccttattgtcgacaaagctgtcct

SEQ ID NO: 40846 - DNA, 387 bp, Arabidopsis lyrata
  Intron number 2 from transcript 929032 (locus 929032) deri ved from phytozome v7.0 (chr-ID scaffold_3; pos 5249531 to 5249917 reverse strand)
tggtatctgcgtgaaagtattttatacagtaaaacctctataaatcattaatgatattagaaaaacacatcgccagttcttacaactttacttctatctctgaaaaatgcagaaattaaaataaatacttttggttttatattttcaatgcagattttttgaataaaaatccatttctaaccctatttttttaatttttaaataagaagataagtttgtttagtgtattaaggtatactaaaacttttaatggttttcttaatatgtgtgaaaaactgttgaatgactctttctcaaatagaggaattacatgtcgtcataattgtcaaatttatagaattttgatacctcccctttatgtatgacagaccgttataaagccacgac

SEQ ID NO: 40847 - DNA, 1046 bp, Arabidopsis lyrata
  Intron number 2 from transcript 485279 (locus 485279) deri ved from phytozome v7.0 (chr-ID scaffold_5; pos 14348654 t o 14349699 reverse strand)
taaattggtgagtccaaattaactcgtacatacgtataaaacatagataaatattatatagttatatgaatgataaaatatatcaactcgtatagtcgtatgtatataacatagattaatgttttcaactctttgatggatttatggtttcattgacttttctgggtgttgttgcgtgatcgtcgagaaccggattgtgtttctttgaccaataatctttagggcggttctttttctaattttgtctacaatattatcacaatagttgagcaaaagccactgtgtgtatatttgtttttattttcactttgaaaagctttttttcgccggcttttcattttcagaagttaacatgtcgtttttagcttcgttttctacaattattaaattatattgtgtagaatcatgtttaatcaaatataaacaatatattttaactaccaaactcaaacataaaatatgaaacatatacttacttttgtatcctcaggcttaaaatggtaaccgtttgcaaaattttttttaaaaaaaaacattttagaattagaaatagtaagaagaaagaaatccaaagatcagtcagatatttttggtcaaggaaatgtataataattttggatttcattacaaaaatggaggataattttctttgtttgttatataaaatctaatagaatattagtacaaattattccacccaaatccaaatgatacaattttaagtatatttcctaaaattattactttttcaaaaaatatttttatcacttaaaattatattgcaatatattagcttttacgataatcaaaggattgtagatacaaatgtttttgcctacgcagtttgaatagtttttggtttttctttaatgctaataattaattatttttctctgtatttttttctacttgattatttttctcttttaaccagcatatgtatattacttttgagcttttactattaattttaacatttatttgaattaaaaattacttgaaggtgagcaatgggaacaagaaaagacaaactcaaagttgggttc

SEQ ID NO: 40848 - DNA, 841 bp, Arabidopsis lyrata
  Intron number 1 from transcript 328395 (locus 328395) deri ved from phytozome v7.0 (chr-ID scaffold_7; pos 3265369 to 3266209 reverse strand)
ttctccaacgcggcgctgtcattttgggatccaaggttatattatatatcccaatcctgaattctacaacaaattgttaaagttttcttcttttttttgggttatgaacagtttcaagagaattcaattggttaataatgtctgttgattgctctgtgagaatccaaaaattgggtttgtgattgctttttgatttgtgggttcataaagttttgttggtaaacactagtatattgattacgctggtttacaagaaaaaaaaaaaaaaaacactatattgattacgctaatcacggtcagtggttaaaatggacccaccattgtttgatacagcacaaaagctgttaagtttttagtggagatagtcttagtagtggaaatctggatttgcatatcaagaatcagtgttttgcttgaattatgtaccaacacttgttaatttcggattgacttgttcaatgaatgtgattttgatgtcaatagtagctgtaacaaaaaaaaaaaaaaaaagtcaaccatttttatatgatcagattccaagatgatgagttagatgtatagccaacttttgtctgaagcatgttcatgtacgaattagatctatcagattactagtgttgtctcctaatttatattaaattcttactgagttttgctgtcaagttaggattttgattttaaagtttgtctgctagtgttttagcacatgttcatggtcatgtaaactcaaaagtcatctgtacttatagacactttggaactctgtttttttttttttttttatcagttacaatattgatatttttttgtctgggattatggtttgataggacctagacga

SEQ ID NO: 40849 - DNA, 432 bp, Arabidopsis lyrata
  Intron number 1 from transcript 477548 (locus 477548) deri ved from phytozome v7.0 (chr-ID scaffold_3; pos 854123 to 854554 reverse strand)
agacttgtctgtcacactgctcagccgccggaacaataaggtaacgtatcttccattaatggtccctcgtagatttgtttccacagttgagaatgctttaatattagtttgttgttttctgaaatacccaattggtgaagccccagaatcgtaaaaccttgatcggtctcatgtttcattatatttcttctccgaccaatcctcatgtcttgatgaaagcaagtagctctttatcgaatcaattgttttctgagggaaacaagtattgtacttgttgtattattacttgagaaaactttcttaattcactttaatttgttactgtgtttctctcggaatcactggattttagttgttttgttttgcacattgattcaacattgtttgagttagtgaaagttctggtttttcttttctaattcttgtaggagg

SEQ ID NO: 40850 - DNA, 485 bp, Arabidopsis lyrata
  Intron number 1 from transcript 485455 (locus 485455) deri ved from phytozome v7.0 (chr-ID scaffold_5; pos 15469950 t o 15470434 reverse strand)
aatccaaaactcttgtaatcttcttctccaaaattttcttgattttactttgtttttgttgagatatggatttaatttgtttgtcttttattattcttgattttggtttgtttgggttgcttctttgatctctcatatagacgcaatgttatcatttgattcttttggtataaattcatgtttgaattttttttgaatctgaattaaccatagattagattctaggatttgtatagagatcataatgactagattaccacaaggcatattgatatttctatgaaactaagggatccctaggaaaatgtttaccctgaagagtgaagatgaatgtaacgttctcaattcttatgtttatgtttatttgatttaagacattaaaaggtaatatcagtgtaaatggtttttcaatgaaaatgattcatgatatgattggttatattgttgaaggtggtggttgatttcacggcttcttggtgtggacc

SEQ ID NO: 40851 - DNA, 708 bp, Arabidopsis lyrata
  Intron number 2 from transcript 905910 (locus 905910) deri ved from phytozome v7.0 (chr-ID scaffold_3; pos 14374596 t o 14375303)
gatctgcttgaacgtgagggccttttgacacaaaggtaatttcttgctatactttttttattttcttactgttgaattcgggaagggacaaacatgtacacagatcgttgttaatttgttgcatgggattagaatacaacaagagtttaagtaaggtgaaaagtattaggcgttagaaagaaagcgttgtcatgctatttcaatcaaaaacaaggtaactgtttggttttttgctatacattggttcatatagatttgtctcgaatatgtgatgagagcaattcatttgaagtcctttgattacagggtgttgaatcttctatactatacaagttgagaggagaagaggtagtacattcacgtgccttgttatcctcttaatatttaagttataatcaatccagttctagaatctgatacttatagattgaaattgtatttgatgtacttgtcctaaaccattaacctttattgattcagttgttagaccaagcaagcaaacaaaaactatacgaattctccaatggattacattgttgacaagataagggtaacgatacagatttcaatataatcggttagatttttattcttgttttatatgttttcttaattctcgaaaagatgttgttaattactctgtagatctgtgatgttgttaattactctgtagatctgggatcaaagtggacataaactacgagctat

SEQ ID NO: 40852 - DNA, 851 bp, Arabidopsis lyrata
  Intron number 1 from transcript 359284 (locus 359284) deri ved from phytozome v7.0 (chr-ID scaffold_90; pos 700 to 15 50 reverse strand)
gtgatcacttctttactgtttctatcactgactcggtgagtcaatcttatatattgttgacaagaaaataagcaatgtatatattttttcatatgataggcgcctatttgcatgggtggatggatggatctatatggtgatgaataatataccactaggcactagctagtatatattttttacgttttgaaatttcacttcttctttttttttattattcgaattatttttcaagttatcacgtttttatgtttttgaaaaattattacgctatatgttattagcgtattaaaaattataactgcgtagacaactttttagaactctggctataatatcaatattttttatttttcttccttttaaaatgaaatttaattcacttttcaactcattttcgtaatattattgtagacttatagttatgtatattgattattgaagtattggtttatcttttccgtagatgaatttgggatattaattaacggtaagaattttataatattattataaatttatatattgtttgttccctagcaaattataaatttgtatttgtccatgtccattagaacaccattattggtggtatcttagatggttcttaccttattatcttgaaattaaacattggaaaataaatcaaaacagattaaaatgctaagattggactcttagctaagaacttttggaagtgttaagagctaagatttgactcttaatttataaaaaccaaaattttaatcttaaacaatgttaagagctaaagttaagaactcaccgttaatgatggtcttagatgtctatataaggattttgacctttatctatcaactttcaggatttag

SEQ ID NO: 40853 - DNA, 521 bp, Arabidopsis lyrata
  Intron number 2 from transcript 919388 (locus 919388) deri ved from phytozome v7.0 (chr-ID scaffold_1; pos 2438850 to 2439370)
ggttttgtaggtactgctttttaccatgccaaaacttaataatatctatggtagaggttgtttatgtgggataacaattgctaatggtatatagtgaatgcatcatctcattgatgtacagtgatgggtttctagaaatggaagatttctttgatagagctttttcggaaaccaaagtgtagccataggagattttcagtcggagagccatagttttcttaatgctatatgtttagaaagatacggctttcttgtttctcatagtgagacaaacgctagagggtgatatttcatacttgcctccaatgccatttcctagttctttgagttcttatgtcccattttatttctaattctgttgtctttttgtgaaattcttatgggtaatattgttgtatttacttcgaatcctgattattcgttttaagctccttaaattgtattactataggatacttattctctctagttgtttctcttttttagtcgagctgatttcaaggaggaacctgctttcagtt

SEQ ID NO: 40854 - DNA, 753 bp, Arabidopsis lyrata
  Intron number 1 from transcript 329832 (locus 329832) deri ved from phytozome v7.0 (chr-ID scaffold_7; pos 11762593 t o 11763345)
gtccctgctaagcgatcaaaggctagaaggtttgttgataaatgtggttataggatttgaaaaatccccacttctgaaactgaattttagggtcccaatttcatatgtttcttttggtcaaaattttgtatattattggtttcttttgagtaatgatttttcgaccaagataaataaatatcaagtccaagaatgattttctaaattttgtttttaaatttgtttcttagtgaatgttcttcttttaaaaatctcattttaattttagtttttacacagtatacttaattcatttgattttacattttctagattttttcactttactgttagattcaatctatttaaataaacaaatcttttatagatactaatacaatcttaaatgaaaatgtctatatattattttatttttgctatatatagtacattgtatagtttgtattcaaaccaaaagttctatgtatagctcttgataacactattatatactatattctatcaaattttcacatatttctatttaacataagtttttgtatatttctttctttaaacaatcaaaagctaaattaattaagggtccacattccacatttccgaagctctccttaggtccacagccctgtgttttttcatcatgacaggctgttattttaatttaccatttctgtgttttattggactgcctttattaaccgggtaaatttgtttgcagccactacttaactcttcctaaacgccagttctata

SEQ ID NO: 40855 - DNA, 554 bp, Arabidopsis lyrata
  Intron number 1 from transcript 495700 (locus 495700) deri ved from phytozome v7.0 (chr-ID scaffold_8; pos 17342153 t o 17342706)
cgatcacagtcgtctgtctttgttgagcaagagaagtaattgaatctcagtttcttaaatttttgtttctttattgtttggtgatctttagctgatgtttctgatgaagtatgttgatctttgttttgacgattttgatttttagatcttaatagtttatcgcaaatctggattttctgtgttttgttttcttctgtttatatattaggatctatgtttcgattccgatgcatttgattgaatctcaatccagttcacttcttgcaaagcatcagtttttagtgttttgaggatcatttcattggttatgttcgtttctgttattattgatttgtgttcttgactgatgaaactgttcaagttacaatttttggaagattgactagatccacttcactaaaagaatggaaatttgaatctgtttttatggattttgagtctcttaaccatgatgagtgaatctgcttgttaagtttgatgttactaatttggatttgctgcacaatttctgtttggcaggtatctttcagagttacttgcagagcgtcataagc

SEQ ID NO: 40856 - DNA, 521 bp, Arabidopsis lyrata
  Intron number 1 from transcript 484115 (locus 484115) deri ved from phytozome v7.0 (chr-ID scaffold_5; pos 559473 to 559993 reverse strand)
aaaattccttaaagagccgtttagaccaaacccatgtaagagatttctctctcatcaatctatgtctctttctctctcttttaatttttcgaaattataattggctccttttgtactgtacttgtctttccatttctgcgttgttctcatcgaaatatcttatcatcaacatgattcatgaagattatgattctgtgcaaaaaattcgatgctttatgttctgtttctttagatctggttctgggtttgtcagatctgaagatctgcttatgggttttcagaaaaatttgattttgattttaaaatccctaattttcgtttctgggtacctcaaagatctgttctttcattagaccctgttactgaatcttagaaaatggattgatcttatgttaatttcatgtgaatttcgattaaaccgaggtttagagtcagattcaaccacaaatttagaaacttttcgattgcttaatgttctgttattgaacttttaatgccattgtttgtagtttataatcaca

SEQ ID NO: 40857 - DNA, 433 bp, Arabidopsis lyrata
  Intron number 1 from transcript 489545 (locus 489545) deri ved from phytozome v7.0 (chr-ID scaffold_6; pos 12586844 t o 12587276)
gattcctccgattcttcttactccgattcatccaggtccgttgatttcttatcaacttctctcaccgattgaaaaccctaattttcccgtttggtttcatttctggatcggagaccttgattttacattttgaattgttcgtcgatgttagggtttagggtttggtttgatggaaactatatgagaatatcgttaatggagctttatagattcattgaaacagaaactagtttgatttcatttttgaatcggagcatttggtttgacaatttgagtttgttcgtcaatgttagggtttagggtttcgtttgatggagaatatcgttaattgaactctttaggttgatataaacagaaattagagaaaacaaagagtaatatttgtgtttttgtcgcagtgagagctcagatagtgagcacgagaggtcacgaa

SEQ ID NO: 40858 - DNA, 320 bp, Arabidopsis lyrata
  Intron number 1 from transcript 919771 (locus 919771) deri ved from phytozome v7.0 (chr-ID scaffold_1; pos 3855628 to 3855947)
gacgtcgtccgagcttaccttggtatatgtcttaaagatcctttaattaacctcaaaatattaattacaatgttttctttctttaacctgtgaaatttagttttagtttttatattttttttaccaatatcctttatctttgattttcttcatttttgtcatgaagaatcaagggtccgaactagatccattacatgccacataaacattccatacggacacttgtagattatactacactgtatatgtttgtgaaatagatgaataattaacaaaaaataaaaatactataaaataacaggtggtaggaaagtgcagtt

SEQ ID NO: 40859 - DNA, 732 bp, Arabidopsis lyrata
  Intron number 3 from transcript 472968 (locus 472968) deri ved from phytozome v7.0 (chr-ID scaffold_1; pos 12130014 t o 12130745)
tgtaagcccacaatagtattctttgttgttttatcatctaggattaggaagtagtgtttgttctttggtttttttgctagacatctacttatgacatcttctttgtcttctgatatttcctgctacacttttttagctaaagagggtgcctaatgcatgacaatggatagcctaactgttgaattttgtcgtagggccactgtgggaggtggtctggaggttctccaactatagattctccatttttgtctacatatttatctcgtgaatggaagaattatgtaataatagtcgaaatttggtgtccatgcatcatatattgactcacttctcatcggcaatgggaggctttgcatctcttgtgaatttgcttgggagctgttcacctgtttagacatgaccttctgatatatgtctttgtgtttgtaattctctgctgggttatcaaaaccctcagctgttcctacctttaccaactgatgttcttagttttctgagcaagtgcacgtctctctccggcccactatttttgaatcatctatcataggtactggtgtatttttgtcttctgcattactcacgtgtgtcagaaaaagttttatgttataaatgctggtttgggtgaaagtgatgtctagctcttagttgctgctcaagatatcataacattgaccctgttcatgttgaaggtttttaacaatctcattgcttcaggtcccaggttacaatatc

SEQ ID NO: 40860 - DNA, 299 bp, Arabidopsis lyrata
  Intron number 1 from transcript 484082 (locus 484082) deri ved from phytozome v7.0 (chr-ID scaffold_5; pos 370977 to 371275 reverse strand)
tgcgcgtggaggacactctagagccaacggctacggtaatgtcttctttgctccgttgcttttgtttctcttaaggtttttatttgattttttatacagtatttaattaattataagtttttgtttttgtttttttatcttctcttattagtagaggtttctattttcaagattggttttttgtttatgttcaacttcttctttgcatagaatttatattttatgaatgtaatatttatgataattgtattgttaaaaatgttttatttttgggatttaattaggtgggagtcgtaaca

SEQ ID NO: 40861 - DNA, 631 bp, Arabidopsis lyrata
  Intron number 1 from transcript 330958 (locus 330958) deri ved from phytozome v7.0 (chr-ID scaffold_8; pos 3408469 to 3409099)
caagctggtgctactattggtgagctttactacaggtaatataaaagagccctgtggtcaaaaatttcagtccttttagatttttacagctgaaataaaatatctaaaaacctcttctaaaagaacattcaaaattttcatatttcttacattaaaagacccaagaacaacattttttggtcctaaagtctgcaattatattggcccactcttgtatggattttttaaatcaagtaaaatgtacaaatcccaaaatcctttttttttttataagaatataaatatcatttcaaaaaatgaaaatttaggatgttaatcctaaatactacatggctccatgaaaaaaaaaaagtaaaaaaaaacatggaaacataaaattttgggattcaaatcatcactaaatcccaaaatctttctatacacttttcagtatttcataaaatatttgtgtaaaatgcaaataaaaacggtaattaaacgattttttgttttctctacgctcaagggtgtgaaacatttggagcatatatatactacatgtaaaaccaaacaattgccacaagggtaaacaatctttcactactgaatctttggtttgttaactgtagaattgcagaaaagagcaagattc

SEQ ID NO: 40862 - DNA, 749 bp, Arabidopsis lyrata
  Intron number 1 from transcript 492082 (locus 492082) deri ved from phytozome v7.0 (chr-ID scaffold_7; pos 6379561 to 6380309)
taatcagatccacgaaactctacttttcggatcaggtataatttgttctttttctattcgcgtttgttatgttcttataagctgattacacgaattgcttctcgctgtttcttcgatttcggtattttcgaggtgaagtttgttttcattttccgatccataattttggagtttgtgattgatttgttttcgttcatcagctgggtaatatcgtttacgaatgtccctgtagactgtacgcgagattttgtttaggatctcatcggatttgcggctgactttagaaagttggatcttgctttgatctgctgtgaaaattaaacgtcaaatcatgtaattgagctagatctgcttaattagaatcctgggatttggacgacgaatcaatttgatgaagatgatatcttgctcatttcgaatcttatgttgcaaatggtacttctggagttggtttcttagttggggttgtagtttctcatctggtttatgtatcattagtctctagatgagcatggctcgtattggaattgtgtgtgtttattggttgttatcgtgttatgtgtttccttcagttctttgactgttttctaagacctagttaataatcattttgcttgtatggacgttgtggtttaatacttgcatcttctattatgtgtgctttatccttctgagtgtgccaaattcttttgtgacgttggctttcttgttcaggtctcagcttctttatcgtttgcccctcagatcaa

SEQ ID NO: 40863 - DNA, 642 bp, Arabidopsis lyrata
  Intron number 1 from transcript 332548 (locus 332548) deri ved from phytozome v7.0 (chr-ID scaffold_8; pos 20889438 t o 20890079 reverse strand)
cttgtaggttcgaccgtactggctgttttacttttgccgatccaagtaatggctcgtgtatctactacacttaaaaaaaaaaagaaaactctttgtgagtgtattaagattgtgctattgattgtttattttgaatatgtattttattttggtatagtgtatacccaaactaaattataaatataaaaaattgcatatgaaaattgcgattttaatggaataatttatagagagttattttgttgatttattaaatcttctagttctctctcgtcaagtcctttcccaaataagtacaaaagtagcgagagagaatctagtcttgtgtggaaaagtctttttgtatattttccatgtaactgcaataacgtaagcaacaaattaaagaaaactttctcaatacgtaatttccatatcatcgtgattccataatcacagcccttgaaatctttggttatagctctagatgattctccattgtatctctatataagaaaccttgtaagcacattgaacgataaacaaaacattcttacaaaatacatattaacatttctttatttctcattcaatgttgtcgcagcttctaacgctctttcttcttctatctgctgttgcgatccctgtcgtgactagcagaca

SEQ ID NO: 40864 - DNA, 354 bp, Arabidopsis lyrata
  Intron number 6 from transcript 476748 (locus 476748) deri ved from phytozome v7.0 (chr-ID scaffold_2; pos 16961949 t o 16962302 reverse strand)
gattaattaggcaaccagagcttcttaattcatcggtaagaaataagagaagatatgtttgaattaccaagctttctcttgtctaataaatccccaaaattgatgaaccaatgaaaatctcatgtttttttttgctatgagtctctattgttgttgcatcttctataacaatttgagctcttatgttatactttcaatgtcaagaattttgcttatggaatcagtcggataactcaaatatcattgtttctttgcttttatacatgagtaagataaagctgtgatattctgtatcttgattcttataaaatctaattatttcaggctgaccgggaagggtatattgcgataatc

SEQ ID NO: 40865 - DNA, 531 bp, Arabidopsis lyrata
  Intron number 1 from transcript 482040 (locus 482040) deri ved from phytozome v7.0 (chr-ID scaffold_4; pos 14701301 t o 14701831 reverse strand)
gcagcctttctcctgtcctctccccaggtatttttccacatgtattactattaagtattaaccactagagtttcaatagttaattataagaaaagctaattatttggattggctcaaacactaatttttgcgtctgtgtataaaatatatatattttttcttataaaatacgttagctattgtaaacaaaggcttgttggtgtttgcgttcacaattttaaaaaggagttttgtttgaagatagtaaagattatgagtttatttgaaaacaaaagatatacactatatataaacgcaaacgcgaacaaacaatcgagacctaaacctctatcgtgttccaaaacgtttttatttattttttggtatcaaatgaacgagtatgaaaagtctgactagtatcttgatcatgcagaaagttgaatattttggctttgaattgggtccaaagaaacataattaagtttataagatatgtttttcaaatgaggttttaacaatacattaggaattaaaaacgacttaacagattcg

SEQ ID NO: 40866 - DNA, 678 bp, Arabidopsis lyrata
  Intron number 2 from transcript 471996 (locus 471996) deri ved from phytozome v7.0 (chr-ID scaffold_1; pos 7493921 to 7494598 reverse strand)
tcactccaaagcctccttctttctctttatcacaggtaaaaaaaaacactaattctgttttcaacctttaataaataaatcaaaaactaattgtttttaattctcttctattggtgtgattttttttttccgcttacgagaatccgcgtcaaagcatattcgcatttcaactaatcattttagtaaaaaaaattaaatctcatgtttttagttaattacatatcgacaatacaattattattattataatttggtgaaattttggaataaggtcaaagaaaatttagcattttatgtccatttcgtgacgttttctttctccacgtggaaaccttacgacagcaatatctgtattgaaaatggcacagaaaaatcaaaatcaattagaaaaaatgtcttgtagtactgaaattggtttgaatattctggatctaccaaggtatatcctgtgtgaatgtgtcttcttcatctttaaaccattagatgactgtctctttcagcaattattgtaattaaatgtgcgattaactgcatgtggtgtagtatttattaacagtgttgaattaattacaatgcttttaagaagtggagtattaataattagcactaaacacatgggctttaattaattgtttaaaagctacttaaagtttgatgttaatttgcagagctgcaaga

SEQ ID NO: 40867 - DNA, 932 bp, Arabidopsis lyrata
  Intron number 3 from transcript 905006 (locus 905006) deri ved from phytozome v7.0 (chr-ID scaffold_3; pos 8756821 to 8757752)
gtactcaggccgttgagttcttctatcgttataaggtatatagtaacttaaataaaatctcttagtataatttacttgagaaataatagtgaaaaaatagtttaccattattcaaacctacgttgactctcataatcatcttgaaaagtgaaaacatgacatgtttttgatgttccattagaaacaatcaacttataaaaaatcgtgcaaaactttttgacttctcacataaaattactcaaaaattctacaacgaagctacaataatttctttcctttattttaaacacagttaataattaaaaattgattggattttataatcgtaattggatacatatgaaagtgcttattttgtaagttaaggtggaattatttatcttacataatgatagatatctcattattaatctattaaaatttaatacatgtatttacagataatgaaatttatatatatatatatatatatatattttttttttttctgtatatatatatatatatatatatatatatatatatatataactaataaaagatatcaagtattttaaaactaaacaatatgcaaaagagaaacataatatactttgattagaaaaatattacttattatgtaaatagaaattctaattttcttttaatataaagataacaattagtgttgttaaatatcgacaaactcatcttgatccgatgtgaattaatatatccagaaatcgatttatatcttaaaatggtttcaaggcttgaaatgatactttttaacttttttttgaaaaagaatttatttaatttttgaaaaaacgaaacgagaagacaatacaattaccacgtatatctactaaatctaaatttatatcccgttaatgagtctactaatacgtgatgttgcaattttgtctttactgaaatatgtgtgtaggaag

SEQ ID NO: 40868 - DNA, 474 bp, Arabidopsis lyrata
  Intron number 1 from transcript 482511 (locus 482511) deri ved from phytozome v7.0 (chr-ID scaffold_4; pos 16842957 t o 16843430 reverse strand)
ctcttgccttacgatcaatctaaagatttcataaggttagtttttttttttcttgactataattgtcttttattgatttaatctatgattctgtggattggtgtgttacttttagtcaaaattgttttgaattgtgttattctttagtgtcaattgatggttaacaagcaaattttattagggttttcgcaaaaaaagctgaaacagagtgctataatgcataattttctacttgacgtgttcgagttaggatctgcttctgtttagtcttcaaaagtctatacttttgaaaatgtgtgaagctttgcttttgtctaagcttctgttgttatgattcacctaaacataagagagcttgtcttgacagcgttgatagcctgttatctgtttctgtcattgcaggttaatgttttttttttttttttggcttgtcttacagagttgacatttgtgaagatcgaagaaagacggtga

SEQ ID NO: 40869 - DNA, 259 bp, Arabidopsis lyrata
  Intron number 2 from transcript 478291 (locus 478291) deri ved from phytozome v7.0 (chr-ID scaffold_3; pos 3831939 to 3832197)
tcaacgacgtctaagctgtttctgcgtcatttggtaagagaaacttttgtctctttcgatttctctaatgcaaaacaaataaaaagagagattttgattcgttattgaaattattctctttgggttttttaatttatttagaaagaagtaatttttaaaatagaaaaaagtgagcttgaagatcacgcttgtaaaggtgtcagtttgcagctcattctcgccatgttcttctctctcgcgctctttgtgttttcttctc

SEQ ID NO: 40870 - DNA, 754 bp, Arabidopsis lyrata
  Intron number 1 from transcript 322874 (locus 322874) deri ved from phytozome v7.0 (chr-ID scaffold_5; pos 3815367 to 3816120 reverse strand)
cataagaagcttcaagctagtaagtgtttccattttcagccgaaagttttggtttttactatccaaatttgtgatgaaccaaataagaagctttttgatcttcttctcttagtgttgattttcaattggtattgattgtgtttgattagttatggtttttttgataattttggtttggatcttcaagtaattagactatgtagtagataacattgatttaaattagatactgaaaagtttgaattttgaatacaattatctgccaaataagagactatgtagttaatcatggaagttttgttgtaatgtacatattggtattatgcttcaatggggaaaaagggaggatttttagctaatttcatagttttccttttgacatttgttcttgtggatctctaacttgtttgaggagtttttaattttcgcgattaagcgcttatttcgtaattagaaagtatctttgtagcggagtcgatttatcggtttatcttatggatcaaactaatgcaagcttatttcagctaggatagctttgtgttaatgcaactatatgactgataccaaatgtagtaaattaaaggagtcacaaacaatctctttttgcttgtttatgaattcgcgtgaccatcagcgtttgaatgatcttttatggaggctctaagactcatccacttggtaaattatctggctgactcgtgtatgtgtttgaaatgcagcgcctgagatagttgagaagcctggtgatacttca

SEQ ID NO: 40871 - DNA, 697 bp, Arabidopsis lyrata
  Intron number 1 from transcript 923999 (locus 923999) deri ved from phytozome v7.0 (chr-ID scaffold_1; pos 29063855 t o 29064551)
gttctaatctcaaggagattctcagctttgtcgaggtgaagaggatatatacattaaattctttgttttcatggtttatatttgacattcattagttagtttctctcaatttcttgtcggagttatttccttgggtctcattatactctttttttttttttttttttttttttttttttttttttttttttttctggatacaaaagctaagttttcaactgaaccaagtcgatagattgtatctttgtctgaactctgaagtgagtctataactgatcacaatggaatatagagcatacggatttttattatctgacagttagttgtgagtagtctaccacagccatgataactgcaaatattccgataccatttgattagcattaccaaccgcctgttggaacctatttgttgcgctcagttaccgcaactttacaaaaatggtcaagaaatgcagactctggaaaaattcttaaagtgtggtttccattttcctccttataacattttactccaagcatgaatcctttgccttcaccaatgctgctgcattacgttatattctctaggtttctctattgtatcctggttcaagctttgcaaaaaatcatttggatatccctcatatttacgttcaaccataacatcgaatccagttggaagttaatctttgtggttgatcaattgcaggaacaac

SEQ ID NO: 40872 - DNA, 427 bp, Arabidopsis lyrata
  Intron number 3 from transcript 470621 (locus 470621) deri ved from phytozome v7.0 (chr-ID scaffold_1; pos 2191857 to 2192283)
gggtggtctaccttacctaacttgcggcgtggtaaattctatatttatttttgttaactgtttttatcaaataaaaattggattgtgcataatgaatgttacactaactttttttttaacgttttgaaatataaattctaggatgctgcaaaaaaaaaaaaacaaaattcacataaaaaaaactcaagtatttggaaaacagttctgctatatatgtacacatgctaaaatatagttaataaaaataaaacattattcatctatcgaaactatcttcaaagctttatgattctcttgcaaaactattttcaaatcatttattgttcaacaatttcattattcatccatcatattaactatcacatatatatatgatgttttcttaacaacagggtgtgggaggagcaatcggttacaacgggacttg

SEQ ID NO: 40873 - DNA, 438 bp, Arabidopsis lyrata
  Intron number 2 from transcript 485541 (locus 485541) deri ved from phytozome v7.0 (chr-ID scaffold_5; pos 15823617 t o 15824054)
acacctctagctgagcgagttagctttttgacagagtaagttattatcgtcctacttatgttgtaaatatgagatattttcatagtatattactactatttattcttttcgacatttcattatttcgtattctccaggtgtcttgtcaacatttttcacagattagtgtgttggtttagtatgttttagtttattttataagtaattaacaatttgtagtgttgactaaatgatcaattatgaatcaaaatgattaattatgatcaacagtaaccacatgtttcaaaataatttgataaaagctttattgtattagtattagatacgaatcaaaatcatgtttcaatactctccgaccccttattaaaatagaacgtgattgttgtccttttaacccttgcaggcaactagctttctacactggtccaacaggtaacg

SEQ ID NO: 40874 - DNA, 729 bp, Arabidopsis lyrata
  Intron number 2 from transcript 486120 (locus 486120) deri ved from phytozome v7.0 (chr-ID scaffold_5; pos 18088525 t o 18089253 reverse strand)
gggagccaagacaagattcagggtaagtctcatcatccatctcattgatagactgttgaacacctctgataggaaggaatatatgtttttgcttatctaagtagtcaatgcatcattgaatggtaaagggaaaattttggtaaagaaggtagaaaagagagttcagagtgttcttaatgccatgccaacttaactaaacttgtattacatgttaattgatggtcttggtgtgtgtaagtagaggattgaacagctgcaggagcaggctgttctttggttattttgaggttgtttagggtgtctagaacacactctagatttctgtttggtttgctgattttttgtctttgattctgcattgaatctcttttttttttttttttttttgagaaataaaggagaaaatcactagtgagaatctatcataaagatgttcttgactattggacttaatatcatcagtcaattgctcgttgatcagtgaaccactaatcaccttctaagattgaaaaatcgagtttcttcctataagatgtttagtgatgtgacaaaataggcttatcttattattctaaccttttttcctgtgatgattgtgccctggttttccatttctttactgcacttgggtcgaaatgaaccaaaatcatcaatctaacattgtttattgacatatctatatgaatgcgtgcagctggaaaaccacgaagtcgataaaggttacgccga

SEQ ID NO: 40875 - DNA, 774 bp, Arabidopsis lyrata
  Intron number 2 from transcript 473143 (locus 473143) deri ved from phytozome v7.0 (chr-ID scaffold_1; pos 12946090 t o 12946863 reverse strand)
aaaaattcacttttcaagaggtattttcatatgaatttcacattgcttttgtatttttaggttgtagagactaggaaagcgaatacttgttgatagaagacatgcatatggtgtgtaatcttgtttttggttttttcattcatttggtgcatttggttccttcttcttatatcatttggatttggtaactatcttggctagtgtagaatagaatatcgtctatgtaaatgaatcgaacataactccttccagaaccaattaggagtccggcttttatagttttattttagcttgtttaaacgttgcactacatatgtagcctctcagtatctcgctgtttgttttcagaagctcattgaatgtcaaactgttgcatcgtgaaaggtttgtttgcttgcattaatggaatcttctgtgtcctacctacctatgttccataaggtgcccatggattagtgtcatctgtatctcgctgttacttttctggccaaagtgttctttgattaagttttcataagaaactgtagtaactccttatatgcacttcaccaagatcttttacccttactaccttcatatgtatttttccaatatatgctcttggtaaaaatttcatctttgcaactgccttcaccctgaactgtattcttaaatatttttgcagcattgtggcctgtctgtgtatagtgccagaatcatagtgcaataagttaattctgttaattccaaaccatttcaggtgttctgggcgttttctatctacttagaggcagt

SEQ ID NO: 40876 - DNA, 784 bp, Arabidopsis lyrata
  Intron number 3 from transcript 490251 (locus 490251) deri ved from phytozome v7.0 (chr-ID scaffold_6; pos 23284594 t o 23285377)
cttgccataacaagaagacattgcctggggttagtttttttttttttaattctctgacaattttttatttctttctttctggggattttttttgttctttcagatgcttgaatgcgatttgatgttgttttgtttttaattattgaatttcacatcccacatattttttttgatcatttagaatctcgaggttttcttaaaaaacatatcattcttaatatctgattttttggaactgcattgtacttgttttgggtttctgattgattccagaattagcaaatttctgatttcgatttatgttttgcacgaagcatttctttctgtttaggtgaacatcaatttcctttgcccgaatcagaatcgaatctttcgattttagagtcagctttgttggaatagtatgacattgttttgaaatggtttctttcttcgaacccaagaaactgctatcaatggtttatctaggaaatcgctagaattagatcaaatgtgtaaatacaagagaaaacacttttgtttcactcttgaattgaagcaaagtgttagttttgatccttgttcttatgaaaatctgaaaaatcttggcaaaaatgagaatgtgatttattgggatgaattctgtgtgtgttttaacatcttgaaaaatggttgtttcgatatttcttcggccttttgtcgataaccttcaggatcttatcaagcttaaatccttgtcaggtctctacctaatttaactttttttttatgattcttcaggcgtccagtctattgcaagtaaagt

SEQ ID NO: 40877 - DNA, 962 bp, Arabidopsis lyrata
  Intron number 1 from transcript 899503 (locus 899503) deri ved from phytozome v7.0 (chr-ID scaffold_4; pos 803477 to 804438)
gcaaattctgtctctaaggaagaaccatttctctggtaattttccaaaatgttagtgatataagattggaatcactccaacttaagatcactcaaggatcacgagattccaagcttatcacgcggaaggtgggattaactagctggctttaacgctctctctcgagaatcaatggatagaagttgtagatagagttttgtcgttgaatcacacaacaacacacgaaccagaatgtttgagtctcataaacaaacgagaaacgcaatcaaacaagactaaggaatcacaccaataggcttgaattgacaagaacacaaaagactacacgcttttgaagaaaacacaaggtttaataaaattacttgaatgagacttatttttacaatgggacaagctgagcttatatagagctctttctcaacgttctaaaagcgtagaataggaaatcaaatcgcaaaattaaaagaaaaactagcagttggcattttaatgcgcaatctggccaaataaggaaactgtcttgatgtcttgagcgttgaaagctttggtgcgaaattgtggtgtcttggaatgtctagatgcactgaataagcatccaaaacgcagcagcaatgaaaaggacagactcgaccagagatcgagtggaggtagctcgaccaagtagctcgacctagactcgagctaagcttcatttgggtattgcttgagtgatctaggcaatctagtggctcggcttgctcatcttcaaaggtagctcgatcattccagcttatagtgggtagattggggtctagaaagaacaaatcatggaagatcgtctcccctttatccatgatgtgttccccaaggaagatcgtctctcctttatccttggctagaccgtcatatccgttgatcctagctgattttgacttgatgtccacatcagttggcaccgtcagttcattctttgaggaattgac

SEQ ID NO: 40878 - DNA, 939 bp, Arabidopsis lyrata
  Intron number 1 from transcript 471053 (locus 471053) deri ved from phytozome v7.0 (chr-ID scaffold_1; pos 3650423 to 3651361 reverse strand)
aaacttcttcttcttctttcttcttctctttaaaggtagctactttccttttcccaaagtttcctcctttctgttttttttttatctatatatattgaagctcgcttcgattgttttctgcttagagcttaccagctactggtctcactcttcttattgagtaagagctcttttcggggtttgcgttttgagatttatccgtactttgaagttgattatttaaagatattctctcttgttgttgtcatagacaggtctctttgatctggcttgatgtgtgtgttttttaactcaacttttgtagtctgtgatcatttatgagaagaagcatccaattaatttcatccttttatcgctcttcactcttacgattgcttttgctgtttggactttatttctccttttgaaaggtatagctagctataaagactctttaagagtttatattagtctactttatgtatgtagctgtgtttgaatcttgagaggcagattagctcagatcctcgttgtgttagttttgtgtagtggattttccctgttaattgtcaagatcttgttgattttggattgtaggatgacttagagaggaagtgttcatggaatcttattggttcagttgctttgaaaatgattattcattgaaccttggaatatgacaggatgattcctgcatctgttgcgacctgtttctgggtttagctatgtattctcgaccgagttagtcaagttcatgcctctttttgctgtcaaaggaacttaagctgtagcagcgattttgtgttttgattggttcttagtgtttcaagtttatgcattcgtttgtatgactggtgatgaatgtttgtgttcatatgattacggcatgaatgttttattccttctttatcagagttttgctcttaaatctttttttctggtctctgtgtcaggaaaaaa

SEQ ID NO: 40879 - DNA, 569 bp, Arabidopsis lyrata
  Intron number 3 from transcript 347077 (locus 347077) deri ved from phytozome v7.0 (chr-ID scaffold_5; pos 3407042 to 3407610 reverse strand)
agaattgcttgcaggttatttatccttttaacctaaatttgcattcgtttttgtgtataagttttgattcaaagaaatcttctgaagttggttgttgttgctggtgattagggtttggttaaagcttctaaatttggctctaagttaagcatacttctctaggaaaatgcatcattgattctaagaaaaattcctcaaatctcgttttgtgaattcagatcaatctttaaagatggtagtagttggtggtgaatgattaggatttggttaccgcttcgagaatgttgttattttctggataatgcatcattgattctaagaagaacctaacgatcttgctataagatatgtattgcttatgtttggtttgttgggagggattaagagttttgaaattggttagttgttgtttgtgttggcgaaaagaaaaagatttcgacttttatatagttttgttaacttgagttgaattaacaagtgagctatctttatctgagtacttggttttgtttggaaaatgtgcttggttgttgctacatttgaagctcttcttttggaatgcagggagc

SEQ ID NO: 40880 - DNA, 627 bp, Arabidopsis lyrata
  Intron number 1 from transcript 948644 (locus 948644) deri ved from phytozome v7.0 (chr-ID scaffold_8; pos 3123566 to 3124192 reverse strand)
tcttccttctgatcatcaatcagccctactaaccggtttgtgtttctgttcatgcataatatccatgcacacaaatgtacatatacgcagatatagataagtttgtataattgttgattgatggagaagatccatgaatcatggtctaattacatggaaaatagtttaggacttgttaaaacattttaaagaaagttatagctagaaaatattttaggacttgttcaatattgtttatcaatgtaactttatactagttacttacataatccgtctgttttgaattacctgtcgtataagttttttgcacatgaattaagaaaacaattaatttttcaattttacctttattcaatatattttctaaatttttttattggtcaagacattaaaacagtgaggataaaactaaaatttttataaaacatctgcattgaaaatctaaaacgacaactattatgagacaaaatttaagtgctaaaacgacaagtaaattaaaacggagggagtagtacttagttttagatgttttgtttttctcaatagtgtctgtatatgtgaataaataagacaagtaatctcattaatctacaacgtctaactatttttaaatttgaagggaggaaa

SEQ ID NO: 40881 - DNA, 546 bp, Arabidopsis lyrata
  Intron number 2 from transcript 489473 (locus 489473) deri ved from phytozome v7.0 (chr-ID scaffold_6; pos 12006245 t o 12006790 reverse strand)
ttctaccaaaactttccacattggtgatactgtctgtgagttccttaatcttcttagctacattaacatgagcagatctagactgtaataattctgtcggaaaatggaccccatctagcaatcgtaattcttaagtgcgtaagctttaggtgtaaagtaaagagtacctaccactcacgcccaaaagggctatattaatatatataccaagatgatcaaaaatttaggataaatacaaaaagtgtcatttttgatatttttcatctgctaaaagttcaaatggttatcattattagttcagaactgagttcaaaaacagggtttttaacttatgaattatgattgataaattttgaaataaaacatgtgattgagtttttgggccaaaatatgttatgatttttctttggtttaaatatgctcacctttttttttctcaatgtatgcacatgtataaattgttgttacctctatgaaaatgtgagtaaaacgtaaactaatttgattttgatagtgttcgaatacaacccacaattccacaacgta

SEQ ID NO: 40882 - DNA, 281 bp, Arabidopsis lyrata
  Intron number 1 from transcript 485972 (locus 485972) deri ved from phytozome v7.0 (chr-ID scaffold_5; pos 17498587 t o 17498867)
ggttcttgtctcagttctcgtgttcttagtacgttctctacaactaaaacttttttcttcatctcccatttttgtgtttttcttgcatgtgtatctcttcaaatccgtgatctttttggttaattaataatgggttttaagaaaaggaatggaatttgcaagaatcttgttcccgtgatctaactaactaaaaaagttttcccctttttttttgtgtgctctcaattttgactctggtcaacgcttttgtgtttgtgcagataagagtagtagtggtctcg

SEQ ID NO: 40883 - DNA, 759 bp, Arabidopsis lyrata
  Intron number 3 from transcript 474175 (locus 474175) deri ved from phytozome v7.0 (chr-ID scaffold_1; pos 26325271 t o 26326029)
atttgcccactgggtatgatttctttcctcattagggatttctttttttttcttagattagtgaacattgattgagtaatgtgtgaaagatgaatcctttcttctgtttcttgtgtttgctttttgatttatcaagttttactcttctcaggttctttatgtttctctacattgcatgatccaaaatccttattcttactctttgtaaccatcaagtaaaatttgtttactaaatgttgagaaatcgttgttgcttgatacttctttagctctaaaatgcgagttacgagctctctcctggtcgtagtggctgtgactttgagctttagttggagccagggaattaaagaagtgtcagtgggtaccattttgcagggacagatcctttgattctgttctctctcttttttgtttatgtgaaatttacatatccggtaaaagctttaaggacttctcctctttttttttttttttttttctttctctcttatctcttacctttactttggtatcttgttcctttccactagattgctactgctcaaaatgaactggtttcttcttattgtagccattggattctctctttattttaggagatgcatttttcaatatatttgcaggtttttaactttcgtgtagactcatcattgtcacaacaagtctgtttgttcaaatgtttacatccaatcattgcagttatgtgttggattgcactgactgactgcttttatttcaggagggagaaaggtacttatt

SEQ ID NO: 40884 - DNA, 552 bp, Arabidopsis lyrata
  Intron number 1 from transcript 486090 (locus 486090) deri ved from phytozome v7.0 (chr-ID scaffold_5; pos 17959262 t o 17959813)
gctctcgccgccactccttccgattctcccaccatgtatgccttttacttcaattgttgattctttctctgctcgatttgtttgtggatcatcagtcaaagctgcgatttttatttgaattggatctagttgtagctttattgttcctcaattgctgcagttcccgtttgtttagctgaaaattttgtaaggacaaaacaaaagcaaaggctgtagtgtaatgtactagttgtgaagttggttcttccgacgaaaccctttctgctaactctgtaatgatggatgagtattgtgtgaatatatatttaattgagactgatcgttgtttggttgtagcgacttagagtttgtgagaagaagctctttttatagcttatatgtggattttaggtttatagtgatactgaggcttttctcggctgttagattgaatttcaagatttttagttttcttctattgacagattgtttagttgtgttgaattaattgttaacgtttatttactttatgctgcagatttgacaagatcatcagcaaagaaattccatcca

SEQ ID NO: 40885 - DNA, 487 bp, Arabidopsis lyrata; identical to SEQ ID NO: 39058
  Intron number 1 from transcript 943920 (locus 943920) deri ved from phytozome v7.0 (chr-ID scaffold_7; pos 561301 to 561787)

SEQ ID NO: 40886 - DNA, 520 bp, Arabidopsis lyrata
  Intron number 1 from transcript 495363 (locus 495363) deri ved from phytozome v7.0 (chr-ID scaffold_8; pos 15395928 t o 15396447 reverse strand)
atttcgtcttcaccagtcccaaacccagagaaaaggtacacgaacctcaaattcttcatcagatcctctttcaaattttcttttctggggaatttcgcatcaggctcattcaatctagaatgcggagaaatttgacctaattatattttgtttctgctgctaatagtatccattgaaggagattattaatatagatgagactgatagtgctcgaacaatccagcaacaaaagagattgtcttttggtagttgaaagaaattcatggaaattgtgtattgtagttttgtttgattcatactcaaatccaatatgcacaattctgtttggttgattggaagaattgagcataatcgaagaaacgtctctgcggttctattgagtgtaattcaaggatgcttctggtctcctttgtttgaagttttgccctaactatgtttaaacttgtctcgccatgtttaatttgatctgaattttctcttgatagagcgaagaactgaaattgagattgctaaagctcag

SEQ ID NO: 40887 - DNA, 399 bp, Arabidopsis lyrata
  Intron number 2 from transcript 925483 (locus 925483) deri ved from phytozome v7.0 (chr-ID scaffold_2; pos 8807869 to 8808267 reverse strand)
ggaagaagtggactctagaaatacttctaattgcggtaataatcaaactctatcaacctgtatcaattgttttcgttttctagaccgttcggcaattttttttaagatttttttttataaattggatttatgttttattgactcattttctatttttatatcagggtttacacggttaaccattcatggggtaacccctttcgaaatctgaagaagcttccatcgaattgggattatctgtattaaatggatcaaacaaacaaatgaaattgacaaagtatgtacatacatttcatattctatttcatttatattgacgtttataaataaaaagagagatataggcggattcttttatattaagatatttcacttgtatctttatacattacaataacc

SEQ ID NO: 40888 - DNA, 377 bp, Arabidopsis lyrata
  Intron number 2 from transcript 484318 (locus 484318) deri ved from phytozome v7.0 (chr-ID scaffold_5; pos 2269781 to 2270157)
tcgtcttcagctttgtagcatctcgccgaagcgtcgtaagttctcttcttctctaacctctttgctcttcagagtcttagatcgaatcttctcctcatttactgcaatctacgatcaaacacagtttcattatacgcctctaatggtttctccaagttcgtgtatgttgttgaatttgaaagcaatttcattttttgcaaaaaaatcgtgtcttttttcagatgggtcatgtagattttgtgtttatttctttagggtatttgaaaagtcatcgtctttgaacaaaagatcgaacctttaatgaaattcttggtttgtttgttgtttttgatctttgaacaggttgatttgagagagacccaatttggatttaggac

SEQ ID NO: 40889 - DNA, 425 bp, Arabidopsis lyrata
  Intron number 2 from transcript 479946 (locus 479946) deri ved from phytozome v7.0 (chr-ID scaffold_3; pos 11708947 t o 11709371 reverse strand)
tactcttccctcaaaccctcctccccaattctactgtaatcccttcgtttcctttctacaagcttttctcatgcgtgcgtcgctatgtatctccactctccaatatagagcaagttttgattttgtatctataaaaattccagtaatttttgaatactcaactttgttttttttttccctggttatgtgattggggacaagattagttcaaatttctcttccttttcttgtaatttcatacaaactttctctgattttattggctttagacctcaaatttccttgattagtgtgtttagttcttgttagttcttcctcattggactttttttcttatttatttaggttctccatagaaatctgttttaatatgatttactgtattgacagtaatagaaggtactctgagggaatatactgtctca

SEQ ID NO: 40890 - DNA, 441 bp, Arabidopsis lyrata; identical to SEQ ID NO: 39259
  Intron number 1 from transcript 358114 (locus 358114) deri ved from phytozome v7.0 (chr-ID scaffold_8; pos 18862737 t o 18863177 reverse strand)

SEQ ID NO: 40891 - DNA, 406 bp, Arabidopsis lyrata
  Intron number 1 from transcript 322683 (locus 322683) deri ved from phytozome v7.0 (chr-ID scaffold_5; pos 2095792 to 2096197)
ctcattgtccaactccggcgttttggcttcatcgggtacgttgttattgtccaattatttttgatcattttaaaagtaactattgaatatattactttataggaaaaaaaatgtaaaacctattttaatactccatccgtttcataatataaggcgttttagataaagtactttgtttcacaatataagtcgttttcgagtttcaatgcaaattatatattattttaatattttatgattatttatattatgcagtctcttttatgattggctgaaatttttaaaagtagatcttcttaatctgcgtgcttttacctaaaacaatttttattttgaaacggagggagtatatatgtgtttgtatattttacttttctttaacataagttgtatatgtgttacagtg

SEQ ID NO: 40892 - DNA, 636 bp, Arabidopsis lyrata
  Intron number 1 from transcript 476793 (locus 476793) deri ved from phytozome v7.0 (chr-ID scaffold_2; pos 17124094 t o 17124729 reverse strand)
tcagacgccggaaaattgacggatctgacgatacggtagttaaagagtataaaaaaaacaatctttttggaaaattcatttggggaaaaaaacttttaatttaggttttttttttaaagattttggcgcgttaattgaggttcgtcttcatgcttaaatatggttattgagtgagtgagtgatgagttttgactatttccccttttttttttgttggtgggaaatgggaattcataatttcagctttttctgtatatttatttttatttttcgactctttttttttttttgtcttggtcgagaaaatcttggtgttaatcttttctttttttgaatattatataatattgttttgattctggtattaattcatagttatcagaaaaattaaagaccgtttctgcactgaagagacaatcatgtgtctgagacaagttctcgctttgtcttttactatcagtttagtttcttaagtttccttaaaaattgtacttgttctcactttgtcataaatacagacacctgtttttattgtgttatgatttgatctttttaacttgaggttgatgatgaatgatactctgtttttgtatttctgcagggagaaaaggcttcgaaagcgacagacattcttcc

SEQ ID NO: 40893 - DNA, 650 bp, Arabidopsis lyrata
  Intron number 1 from transcript 319534 (locus 319534) deri ved from phytozome v7.0 (chr-ID scaffold_3; pos 20456064 t o 20456713 reverse strand)
aaacgatactaagaagaataacgaacctaaaactcgtcagcctcttgccgtcgcctgaggtaaatctccgattttgattggatacaataagaaactggatagtatgatactagtattggagcgtaattcatgaaaagctcttaaatactttctggttggctctgtttgacatggttttggttccagtagtcttaagctttattggattgttgacgtatgtgtcatgcttgagctggtactggttttggtgtcaattgtttaagctttaggtagatatatgattgccatatgtttcatttttgagctggtacttagtcattcttgtgtaagctatttacttgtatgaatacagaaaccgtgtttatccgaatattaacccattgagaggatccatctgtaagtagaaatttatgtttaaagttatggccgtgagctcttaagcttgatttctcctagattttgaaatttagaccatgttatgaaaaagtttacttgcttttcttgaatatttgttactcttctcaatacgacttgttggatgttaccgatatcagaattgtactcaacgttgggagagctatattagttttgtccttgagttaagatccaaaacaatataagcttttagtgttgttaacggtatgtagaga

SEQ ID NO: 40894 - DNA, 622 bp, Arabidopsis lyrata
  Intron number 4 from transcript 493891 (locus 493891) deri ved from phytozome v7.0 (chr-ID scaffold_7; pos 21895161 t o 21895782 reverse strand)
gtcgttttcttcttctaagagaagctttggtatacttgctttcataatctcttttttttttttttttttctttttccttttagcttaattaatctatatataacaacttgttataagtttattacttacctctttggattaatatggttaatggtactaaaatattataattgagctctttgtagtaagatattatcttgaattcttaacgttaatttaattgattttgtttccattaatagattagaataacgaattttgtttatatgaaaatcataatcatatcatcttcttaattggattgatctaatcattggcttttcttcccgacaaaatagagagattgagctttcctaattagaattattccactaatggatcatggatgcttaaatagtgatttaaattcccaaaagcagtgattatttcgggttttcatttgatgggttctagaaaatttgaattttattgcccggtgaattggagaattcatagtgaagtaagatttgtgttccgaggttagagctttagagagtggtttcttacacatgaattgtgttcatttatttttatgaagtcttgaaatgtttatgttgttccaatgtgacaggaagtagtaaag

SEQ ID NO: 40895 - DNA, 447 bp, Arabidopsis lyrata
  Intron number 2 from transcript 932978 (locus 932978) deri ved from phytozome v7.0 (chr-ID scaffold_4; pos 10154590 t o 10155036)
gcttgtatcagagtgtatttggagctcgctaagaggtacttagagtttcgacatcttaattcagtctatggtttctctgatgctcttgagggatctaaacagatcagttgatgaaaaatgttaattcttttgatcatttcagtttactctctgaagttttgtttcctgaagaaacggtttcttaatttttatctctttgattgtgttttggttaaagctcacttggacgtttgagaaagaagagactaagcttgagtggagatagaaatgtaaaccatcatatgattgtaaggagatcactgctgggatcttggagtttcttatggaggctaacataaggttaagtgtatgattcttatactatatgttctgtattttggggatttcttgtgatgtgtttgagaattgaaaagctatgtgtcttgctggtttcaggtccggaagaca

SEQ ID NO: 40896 - DNA, 510 bp, Arabidopsis lyrata
  Intron number 1 from transcript 487158 (locus 487158) deri ved from phytozome v7.0 (chr-ID scaffold_6; pos 1201492 to 1202001 reverse strand)
catcatctttatctactaaagtggaatctattcaggttagagaaattacttagaaataccaaaattattcctttcttcattcttcatctttgcatgtcttttcttctttccggctattttatttatttattttctattcttatttcttacaaacaaatatttattttaatgttgttttaccaacatatatcataacatttatcatttatgttttaaattccgtggtcaaactacagtcaactgtaaaaaatattttgtcaactagtcaaatgtgaatcttaattcgttttcatttaagaccagtcgccaaaaccgcaaaataaggaagcaaagattacagagaaatgtttttttgatatacgtagggacgggtgatataaatttgaactaattaatcaacaacaacacatatgtttttatttctttgaaagtaatttatttactgatatggaatcattctttaatttcatttatgtacaatagtctaaagaataacattgattcaacagg

SEQ ID NO: 40897 - DNA, 534 bp, Arabidopsis lyrata
  Intron number 1 from transcript 323049 (locus 323049) deri ved from phytozome v7.0 (chr-ID scaffold_5; pos 6887160 to 6887693 reverse strand)
ttctacaacgtttaatttgatttgaatgaaacatccaatctccataaagatgcatgcgtgtttggtttcattacagagaattctgtgtgtaaagatacattcccctcatgccacaatgtgaacgtaaaccacttcactttctctaaccggaacacattaattatattaattagtatttatttttcaacatgctcacactattgcgaagactaagactacacataaatcataacttataaaagacaaaccctttttcataaaaaacagctattcttcttcgaattatgtcggaaataactttatacgttagacataagctgtccttagcacatttaactaatggaaacacacgggtcttcttccacgcacatgcaattacatattatttatggtccacttatatatacactacaactatacaagtaaaacactacaactaaaacaaacatctctctctctctctctctctctctctctccctccctccctccctccctccctcctttattcaagattagggttcttgagtcgtcc

SEQ ID NO: 40898 - DNA, 670 bp, Arabidopsis lyrata
  Intron number 2 from transcript 926139 (locus 926139) deri ved from phytozome v7.0 (chr-ID scaffold_2; pos 13211698 t o 13212367 reverse strand)
ccgtactggtctttaggtaagttcatttattgctctgttttttttgtttgtttttagtctctcttgtcttaatgttttgtggtaattactaaaaggttagtgattatgtttgtggtcctgtagtactccattagttagtgtcttaatgatgagattagtatcgattcaggttcctatgagtttgactgttagtcaaacgaagagtcacgtgaatatagattttgtgtatcgtttctaatcactattttattaatgttccattagtgttgaaatggcacatggtggaagagaaaatttcattgtaaagagtatctgattttccgacacaacttttagattagaaaaaagctttacccttttttcgtgggatattgcaaaataatgaaaagtgtcgctttctaattatggtgtttccaattaaaagataagaatgagagattggtctttgctttccattttcgttgatcggttgaaaaattgaaatgattattgcgattttatttggtccctataggatcttgaaattggaccattatagacatggaccacggttcttgatttgagttgaaaataaatgcaaatcttgattttgccatgttctagatttataagcccatatttgctttatactaatttgtttttattaatttgtgtttgtaggatttcatca

SEQ ID NO: 40899 - DNA, 918 bp, Arabidopsis lyrata
  Intron number 1 from transcript 900503 (locus 900503) deri ved from phytozome v7.0 (chr-ID scaffold_4; pos 11924883 t o 11925800)
aacaaacaaaaagtaagattttctcccttttaaagatttgaaaagagaacagtgttggtctttctgagacagaggcttatttgccactgaaccgaaaatattaatctggcctgccattttggagtctgtataccactctaatatgtgttatttctattttgtccttaatgaatatttttatttaattaactattagaaattaaaaccaaaaaaaataaaaaagcaaaaaaaaatttgttcgcatcctcacctccgattctcccctcccaacaaaccagagctcacttcgccgatctcgccgcccaccgtttctggcgtctcatccttgcaattagtttgttctcctctctcctctgtcattgatgaaactaagagattatttcttagtttctcaatcttccgccatggaatcatggatatcaacaacaaccaccaccgctccaacgaggacaacgctctctcagttattagaggttttgcatcaacgattcgaagtttctgttaattgtatagtcctcttcatcttttgtccttcttctcgtttgatttgatttctcttcgaagaggaagaatttattatgcgtttataacttatatctaagatctcttgttgatacgtttagatgagtgtggtgggattcgatattgggaacgagaactgttaatttcgtaatcatgaattcttatggcaaattttacctcaaaattcataatttagtcttgtaataaattcaatctgtaagtcattgcttataattgtctcttgccatcattgtaatgtgtgtaaggcaaaatctgatttgctactatgttaggctggaatccctgactgattatggatttaagttagattggttgaagaagaaacttgatcaagtgatagaaaataaaaagaaagaggaagctggtgagactcgg

SEQ ID NO: 40900 - DNA, 486 bp, Arabidopsis lyrata
  Intron number 3 from transcript 485726 (locus 485726) deri ved from phytozome v7.0 (chr-ID scaffold_5; pos 16609497 t o 16609982)
gcgaagaatcttggcaggtttgtcttatttttttctttctaaatgtagctggtctgatgctgatatggttttgattatgtcgttgaataattggatagctctagtaagaatttcgatattgtttggttgtgtaatttgatcttcaattaggaaaaaagagctgcctctaacctagttcttagctattgactgatttccttgggattgtggtggtaatatagttttgattgctgagtctgctacagagatctcaggattgcctttgattttttttgtaaaccacttgaaactgctccgctataagaggtgtttagatcgaaatagttggtggaattgtttcttcttttgtgaaaaatctaattaacaggcaaacaaattggctgtcttatgttgaaggttagtattatcatcactgtcttttgaactttaagttccgttttgttttttggatatttttcagccattaaccgaactgaaaggaacaaa

SEQ ID NO: 40901 - DNA, 672 bp, Arabidopsis lyrata
  Intron number 1 from transcript 355565 (locus 355565) deri ved from phytozome v7.0 (chr-ID scaffold_7; pos 18620935 t o 18621606)
attagactagagacaaacagtttagagataattgggtgagaagtaacgaatccagacttaattaaattttcgacattatgctcgttggcccaagacattaaaaatttcagcccatgtttctaccgcttctaccctcacgcgcaaaagtcagacaacccaatttataactcattacattgaacaaaataagaagatatatctttatctcttcattcattttctctcatccatcctttctctctctccaaactttaagtctcgtcgtcttcttcctttgtttcgaggactgagtttgctccggtgagattgctaatcggcgtcgcctcatatcacaagtaactgggtatcccatagatccgaatccgaagaggcgaattatcactttcattctctctcaaaaccaattgatttttccttaattcgtttagatctctctgttttaacctctgctttctttttttcgccattacgattttatttctaatttaggctttcgtcctcaaatgtccttatacacatccttagatctgcatgtatcttcacctctttgacgtagatccactgttagacacccataattttatttggagcttcatacataaattgcatgtcatcatcatccgtttattgatctatatttctaataaattggctcctttgttttgtaggaaa

SEQ ID NO: 40902 - DNA, 633 bp, Arabidopsis lyrata
  Intron number 1 from transcript 909561 (locus 909561) deri ved from phytozome v7.0 (chr-ID scaffold_2; pos 18603510 t o 18604142)
gtgtattgttccctccgatcacaactacatcaccggtaactgatgaaaaaaatatttgccttaattagccctatatttacagtatttggtgactgagtattattatttttcaaaaccagaatatctttattttcttgacagtataattcggaaaaggattttgatatcaaatagaaacatttgtctaaaccaaaacaaatctttaatttatttttctaaactgttttttttctttaatattttttaagaactgaaaccggaattgatttgaaaaagacttgcatcttttggaaggctatatagtttgactaaaatcgaacatgaaccggtttcctaagaaatctatccatttttcttattactattcatctaaaactagaaccaaaacctactatttacatcaccggtaaggaaattacctttgcttttgtgagaattcaacttcaaaagtgttgacttactcatcaggctcatcaggtttttcatctactttcttgtgtgtatagttggttctgttctcagctgatgatatcagagaaattgtgagtaaggtgcccaaagactgctcctttacattcgtctccgattcttgtcatagtggtggtctcatcgactcagccaaaaaaagaatcc

SEQ ID NO: 40903 - DNA, 392 bp, Arabidopsis lyrata
  Intron number 1 from transcript 490668 (locus 490668) deri ved from phytozome v7.0 (chr-ID scaffold_7; pos 314867 to 315258 reverse strand)
tagggttatttttggggattctcgtgtcgataaaggttagtcatttctttaattgcttctttgaattgaatcatccagtaatccattcgacttattcatggaattaagtgtactcagaagaattttcgttttccttcttgcgtatttgacgtttattcactttgttcgattctatgtattagaacttgtgattttcgattcttgtgcgttcgaattttagaaattaggtatttcactgggaaattcgatgttttgttataattagtgattgaaaatagcgtcttctgctctcgtttagtttcaatttggggtttttaaccatcatcatatcgttagatgtcttgaagaatctatcttctctaacatgaaagatctggatgtgctttgtagca

SEQ ID NO: 40904 - DNA, 535 bp, Arabidopsis lyrata
  Intron number 4 from transcript 487179 (locus 487179) deri ved from phytozome v7.0 (chr-ID scaffold_6; pos 1270639 to 1271173)
acgcaatcagcatcaaagccacctcttggtatcatcatctctgttctctcctctctgttttttttttttctcgcatctttaatttcttgaatttgtgatttttgagttgttgaattatgtaacctttcgtcgtttgtgaaaatcgagttccttctgatgggaacgaaactgggtttacctctttgcgtccttaattagggtttgtgtttgttaagtaatgtcggtttttaagctcttctatgtattttaggttagtgaaattagataatttgtaatactaattgacttcatctttgttaggtttgtgaggttatgagctttgattaacttggttaatgaccttttcaatcaaattggtttggagatgatttgattcttaatcctctgattcttgattagtttattgttggtagctttttcttgatctgtaagttatcctttacttaaatttagcctgtgatcagagtttttaactctcggattgttatgtttttatgcagctaattgcaagctctctgttccggcgtgggagaag

SEQ ID NO: 40905 - DNA, 780 bp, Arabidopsis lyrata
  Intron number 1 from transcript 492979 (locus 492979) deri ved from phytozome v7.0 (chr-ID scaffold_7; pos 10601669 t o 10602448)
aaagcccagatttgggatactgctggtcaagaaaggtttaagctttttgattttcttccttgttttcgtgttcatttcttcatttcttgatctgggtttttagccttttgacgcattgttgagtcaaaaccaatcctctctgttattgagtctagagaaatgcattgttaggttaacgcaaacagatttagatttttttttcggtggacggtggaaattgtggctttttatggtttgttcaattgacaaaggaagtcaaatggagcttctaattttcattagatctggtcttagttgatggaatcagtttatcgtagaggaagcttgagaaagcaacctaccctgtgattctgtattttattactggaggtgaagtgatacattgtagaactcgacaattatgcttaaagttaccagcttcgtagaaattctgttgttttgctgattagtttgatcgatcagtgtttgatgataatctttggtatcgtaattgctctcgttggtagagaagctaattcattgtctatatgctctttaattctgatgacaataattaggactaagtttaatcgaatatcgatttctttaatgattggtttctaccattgaagctaaagaaagagcttgttgctttgaagtctttcttgtcgtttcggttcttcttatgtgttatctttcttatttaacagagtttccctgacaacctgactaaatccttgatgtgtttttaccgtctcttttttagataccgagcaatcactagtgcttactaccgaggag

SEQ ID NO: 40906 - DNA, 369 bp, Arabidopsis lyrata
  Intron number 2 from transcript 925353 (locus 925353) deri ved from phytozome v7.0 (chr-ID scaffold_2; pos 7756278 to 7756646)
caggtaattgtgttttcacaaccatcaaaaatcaccggaattggttatctaataccacattgttttaacatgacttggagaaaacatctaggcagaagcccgacttatcttctgaatcgtgtagtaaatagtgctttccggatgttttctccgtgttagagccattggattaatgcttgctcaggtttcttctctcaatttccataaatctttttttattttttcacaaaatattagggagctaaatgtgaaagtcttagaacctgatattgcataactttgattaaggtgcgtgttctgtttctgtgatgattcttcaactatgcaaactttttaatccttttgtgaaatggctaagtttgctaggaa

SEQ ID NO: 40907 - DNA, 384 bp, Arabidopsis lyrata
  Intron number 4 from transcript 316331 (locus 316331) deri ved from phytozome v7.0 (chr-ID scaffold_2; pos 16044891 t o 16045274)
gttgtgctatattctggaaagagaaactgtaagttcagttttttttctatttaggatcattttgtctctatatactggagtcaggaatctagccatttgagttttctatagggaatatcactctataggagtgagagaaattagatttccagttctctgttttgaatgtttcgaaattgttaatgataggtcacgttgtgttatgttatcagctttgaccttggcttcacaatatatagttaaaggcctaaagctttgctttctaattgttctcgatgttgtttattttttattagactattagtcttctagtttcatcatttatgttatatttctgctgtgaatgcagattcaaacttctagaccatcaacacatagagtttg

SEQ ID NO: 40908 - DNA, 314 bp, Arabidopsis lyrata
  Intron number 1 from transcript 899596 (locus 899596) deri ved from phytozome v7.0 (chr-ID scaffold_4; pos 1410887 to 1411200 reverse strand)
aaggtggtataactaatatttgatttcttttgttgttgttggtgtggttcttcttttgcgcaagtagctttagttcttattacaagtcggtttttattggttatgtgcttagaagaagtttgatcatttgttagacaattattatttttgaatttggattatcatgttttccttttcattgattatgagttttttcttctttgtgcttccttatcgcttcattgtcaatcaatggtagaagagtttcctcatttaactttactttgtgattgttatatgactgtaggagttttctccagctgcgggaaggtacc

SEQ ID NO: 40909 - DNA, 1051 bp, Arabidopsis lyrata
  Intron number 2 from transcript 907150 (locus 907150) deri ved from phytozome v7.0 (chr-ID scaffold_2; pos 1397788 to 1398838 reverse strand)
gcagcttgagtttagtatctctaggtgctaaatcggtatttaccgggtttttttttctctactctgttacaatatttctctaccctgggagattattagcgctgtatataattttcctctcttcaatacattgcagcactgatctcatcgttcgatgcacggaattatatcaacccaaactgttgtctgtcttatcttaccccctgatcttcttttcaagagttcattctccatggatgtgtaagttactttctcatgctgtagcatctcagatctctatcatgtttatacgctattgagtatctctgaattggtagataactaaacttaattgcttagatgattcaggtaacttctcttggagtagatttttagaaagtttatttttctctccagtttgtagctttgtatgttcttagtcaaagctttattcactcttctcatatctctttgtagggtgaaatcaatagaagaaaaaattactggggaggcgaacaagtgaagtactctctcactctcttacttcaatttgatgcataagtcccacactttcggaaaatacaaatacactaaaacaccacaaagcaaaaaaaaacaacaacaacaaactcaacactcataacaaatacttatcatgcacgaaactaaatacaatacaaacctcaaacacaacaaacaaaatcgtcaagcaaagcactcaaaagaaaagatccacggacagcacgctatacacaaacactgaaacacaactcaaatttgtacacgtaacagactttgcaaaaacatgaaataatttctaatcacgagaagttccttctggttttccatacatataatttcaagcatcattgatctttttatgattgttgtataattatttgatttgtgtatgataaatgccaaaatatatagttggagttctcatttttaaattatattcgtccttctcagtttttggttgacgagtacttgttgcatttaagttattttgtttaaatattgttgtataatgacaggatttattggttaattctttatcttttaagcaccc

SEQ ID NO: 40910 - DNA, 689 bp, Arabidopsis lyrata
  Intron number 1 from transcript 947419 (locus 947419) deri ved from phytozome v7.0 (chr-ID scaffold_7; pos 20566147 t o 20566835 reverse strand)
gctttgaagacaggtacagagcatactgatgaaacttttgattggtttgttgcactgctaaccacttgcatgactcttcataacaaaaccaagttagtaagtattagagaatgtatatagttgatttaccttggtttactctcttttatagttcggttagtatagtggtttagtttcaattgtatttaaccttgatttgtatctcattttacacttgaatgaagaaattatcttttcccagattcttgtttatctttcttgttcttgttcatgggaaaagttgaaatggtatcagagcctaatcaaaattcttcattccacttccgctgatcttcatcgattcatcaaagggatcgatcgtgttcttcggattttagttcagatttgcgattcagatttttttaagaaatgctgatgaagtttcttgatgagctgaacctgtaaagattaacattcaaataatgggactctctctaacacgtatgcagtagatggaaagatggactctctctaacaagtatgttgctaaatcatatggaggcttagagaaatgctcactatagttgaatcattcattgatgttgattaatgttcactagcgatgaaccaatttttgctcaaacaaggtatttggagaagacatggcggttttggccggtgatgcactccttgctttggcgtttgagcac

SEQ ID NO: 40911 - DNA, 1033 bp, Arabidopsis lyrata
  Intron number 2 from transcript 484160 (locus 484160) deri ved from phytozome v7.0 (chr-ID scaffold_5; pos 887640 to 888672)
aaaccgagaaataccaaaaggtataaattctattaactctataaatatcacattcatacgtacatagatataaccctagctaggtggtgaggcctttaaaattgaaattaatccctagactgtttgaatttctttatttataatttttttgaatttgattagttttttatttattttggaattgattccatgagatcaaaaatacttgtgaatggactaaatgtcaggcggcgtttgcgcttaaatccagaaaaatgttcatgtcatatgcgtgaactctttaaattgctagacatggcccatatgttatagtagagtacattaatagatagatgcatacacatatatacacacacaagtatcgcactcgacattcatataccttaattctgcagaggcatagttagtttttcttacaatttatcacatgaatgttgctgctctttctcacattaattcatgtcttctattcaagttacccaatatttttctaattatttggcatatatgaattataccaacatatctatatgtgaaaatttaaaatctatatagattgataacggtttatggagtagaccgaaaaatattatatatacggaaaatgacaatggatagagaaatacatttttgggatctttcgacttatgtgtcgtcaccatttgaaaccataaatttataaagtttctatgtataagatgtatgcataagacagctaaaacaacagggttgacataattaagtctaccaatctatgtgtatgtattgcacattcacttgtactaataaaactaaaattacacaattaaagatatagaaataaataaataaatataatcatcttaattatacattggtacgcatatgatagtagtctaaatttcttctaaacgtgctatctttttttttgctaatgctaactttacatagtttcatgtgattctcttcataaatgatacttttcataaatattgttagtctatatgacaatttgataattgttaaatgtataattgtaggctgaaatatcatt

SEQ ID NO: 40912 - DNA, 689 bp, Arabidopsis lyrata
  Intron number 1 from transcript 916348 (locus 916348) deri ved from phytozome v7.0 (chr-ID scaffold_8; pos 11720164 t o 11720852 reverse strand)
ccttgttgtccacaaattcgacgaccctcgcaaaggttaactattctgcccttctggagtcactgaccgcttcccagttctttggattggactattagagcaaccccaatgatatttctagagggtttcttaaccgtagaatccttaaaaaaaagccaaaaaataattcaaaactgacaattaatctaaggaacgtaccttaaataagagtttttagaggttgtaagagtccatacgtgtcactgtcttattgtgtttgtttcgaagctcgactctctcttctctcttgtttcatccgatggcgaaagcagatgagatatgtctcgatcatcatcatccaaagatcggaagagaaaagccaagcaactcgtccctcttccgctgtgatcatcatctcaaccgacggtgctcaccatcttattgattgtagaaattgattgcaatctatatcccgtcctttaatcatctattgcttgtagaaattgattggtctctcacttatatctctcatagattaaatcattgaccagtatttcgtatgattgatattgaaagtctgcacattgattttaggggttttgtttgatttgatgatttatatggtggaaaaagagaagacttttcaatggatgagaaaatagagagactgatattggttttactttacttttgatgtagctgttgatctt

SEQ ID NO: 40913 - DNA, 276 bp, Arabidopsis lyrata
  Intron number 3 from transcript 946115 (locus 946115) deri ved from phytozome v7.0 (chr-ID scaffold_7; pos 9605684 to 9605959)
tttcaggtcagttttgagtttactattattacttcatttcctatatgaaacaagtcaacaacacattagttacttagaagggaccttgtttagttttttcaagtataaaaccgcgcgaaacagagtgtttcagaaaaaggacagtttgctttgaatgttttgagattgcagaacttcaagaagaagacatgcgccgctcatagtttaactaatattagtttaagtctcatttggtgtacatgtgatgctcaactttactttctttatatgcagcaa

SEQ ID NO: 40914 - DNA, 775 bp, Arabidopsis lyrata
  Intron number 1 from transcript 938411 (locus 938411) deri ved from phytozome v7.0 (chr-ID scaffold_5; pos 17206380 t o 17207154)
accgcctcctattcaatataaataccttgctcgtattcaatttcagatcataactaacccttgttttttttgttctttttttcaaacttttttttgcttctacctaattttaatttttctttttattgtagggtggatgtatggaggggacgatgtgaactggtgtatggaaaatttggacctaattcaatgaataaacaggtgatcttatagtttatatgtacaaatttgatttttttttttttttgtatttatggtttcactattttcaccactaatcaatttttataatcaaaaagtttggtttcaacttttgagaaggtaatcatcgatggtttggtatgtttctttttgttgtaaaaagatgaggtacctcccgattttgttgaggtacatgttcttattattttcaaatatgtcttttttcagaagaaacactcaacttttgataacacagttgccacaaagtcagaaagatgacttatttcagggatgaatcttcagaggaggctaatttttgtcgttaatacaatttaagtattcctctctttagattagggataacaaacttgtctgttaaattcaggaattactctttgttgccaatctctctctccaaactaaaatattacatatatggaagtagtaacttaaagtttttggtatcgaggtcattctaaggcactgagattcggactttggtatgtataggattcgttttccatgcactaagatttaattattgtttaatttattggtttttaggtttctttcc

SEQ ID NO: 40915 - DNA, 680 bp, Arabidopsis lyrata
  Intron number 1 from transcript 927379 (locus 927379) deri ved from phytozome v7.0 (chr-ID scaffold_2; pos 18737937 t o 18738616)
ttgttgggaaatctatcaataaccaaggaggttttgcgaagatgtggtttcctcatggacatgtttcagatacttgtttttctaatttaattcattgatatgttttccaagtttgaatgtactgagaaggagagattggtgtttgatgggatagagtataaagatgccgtttcttggactttaatgttctcttgttatgttggccgtgggtcaacaacaattgtcattgtcttcattcttaccggcttgtgtagagctcggggattagatatcgggagagatagatccatggttttgtaatcaagcatgggctggagagaaaatatgttcgtgacaagtgcacttgtgaacatgtacgctagttgttcatgtcttaagcaagcttaactagtattcgaaagcacgtttgagccgggcactacattgtggagtggaacgttctgattgagattcatgggtatatcttcagaatcggctctcaggagatgtagcttgtatgactgccctttctcttatgtatgtgaaatgtgctggcctagaatgttcactgcgagtctttgatctaaatatctaatagagatgttagctgcaacctcgatttatggacacggaagataggctctatcattctttaacagaatgcaggaatcaggagcgaaaaccaaatctgtaacttttgc

SEQ ID NO: 40916 - DNA, 763 bp, Arabidopsis lyrata
  Intron number 3 from transcript 481966 (locus 481966) deri ved from phytozome v7.0 (chr-ID scaffold_4; pos 14236073 t o 14236835 reverse strand)
tcgtccgccgttgtgtcgacgtcgttggtgctaaggtatttaatcataagtcataactcattctcacttctttttaagtgctagatctccattttggttaatgtttaggtttttctttttgcatatgtagtagtaaccgaaataacccaatctagtagttagtacagttttaggtaagatccgatgtctaattaaaaaaattcaaagaaaatctaaatttttgttaatgcgaaaatataacaattaatatgtactctttaaatgacaagaatatatggttatatttcaaatattagtttgaatttgattttaaaaatttcgactatcaatttttttttcagaaaaatcagtttgatatcagtcagtgttttttggttttagtgttgcttatttaaaacaaaaccctattttaatattaaagtttagatctatgattactgtccgagtcagactatgattacgattaagattcgataggaatatttcatatttaattccgttttagtgtttctttcccttctttttacgctgctttttcaaataatttatttcgatttggtttccgattcttaaattgaacaaccatatacttctatctatgtactaattccagttccttgagtctcaagtatatgttaattcaaccaaaatgaattacgagtgtaatattataacatccatgaatttttgtaatgcttggttacataatctgatacgttttctatctattgattttgatatttaaaaggcttgcaacgaggca

SEQ ID NO: 40917 - DNA, 791 bp, Arabidopsis lyrata
  Intron number 2 from transcript 931184 (locus 931184) deri ved from phytozome v7.0 (chr-ID scaffold_3; pos 19182288 t o 19183078 reverse strand)
tgtatcagaaacgttctctgcaatccgaactggaagttagtaacttcatcgtatttgtatgttttagagtttaactaaataaattttgatttgcctttgaatacgtcatgctcaagtaatttgtattttcttttataggaaagatcatttagcggtgcaaacgtcagatgtctctcttcggtagtcaggtcatatttcagacttcttactagctaacactcatttcacaattgttgtttttttctaaatgttccataatctagtaatctaaaccttttgtatgatgtgcagattcttgcttacaagcttagcagcttaaagcttggtactttgaaatctatatataaatcaataacagagttgcagtttatatttctctgttggctctttactgtcttggtggaagcaaggtgaaaagacggtaagatatgcttgtctgtaagacttttcggttgccattatgatcagtcaagttgatattaagcttcttggccaataaaacataaagagaatcgtgttttgataaatttctcttacagaagatattgttactaggcaaacatattatctttaataaatgactggatgtatctagctagaatcaattaccttctaaatttttgaatcaacaaaaacgaaggagcaagtttctctctatctctcttctgtgtagtttcttatgttgttgcatttcagctcttctgagcaataccggtgtttgtttctagggctaccatacactgtttggtgaaagaggaggcttgcttagcggaggacaaagacaggtatag

SEQ ID NO: 40918 - DNA, 505 bp, Arabidopsis lyrata
  Intron number 1 from transcript 931184 (locus 931184) deri ved from phytozome v7.0 (chr-ID scaffold_3; pos 19183207 t o 19183711 reverse strand)
cttgccgaagagcttcaattaagaaagtaacagctgtgattccgtattttggataggaaggtaattgtgttttatatagccttatctagattagttactttgacttgatataacttgaagctatttggtaatctctgcttaacttatattttcttttgctacttgcagacacaagggcgtgtgatcactgaagccggtgcagatcgagttcttgcatgtgatcttcattcaggacaatccatgggttattttgattgacattccagtcgaccatgtgtactgccaggtacacctctttacggacaaaccaagctttcaatctgagtgttttatttggctattccataagattaccctaaacattaacatttgctaattttgtgaacctggaagaaatgtggggactagtttaactagtcctatttttagacaaagagtatcgtgttgcttatgcgttatcccttttgtagatttttggaacaatctgcattctttttactctatc

SEQ ID NO: 40919 - DNA, 142 bp, Arabidopsis lyrata
  Intron number 1 from transcript 912397 (locus 912397) deri ved from phytozome v7.0 (chr-ID scaffold_1; pos 11265966 t o 11266107 reverse strand)
aaaaaattgataagccacaaagctttgaaacagtaagtaacaattcttcttcctcaaaattttgattttttttcttgttggtttcttaatggataacttatcttcagttacaaggaggaggttctgaatccaaacaagaagg

SEQ ID NO: 40920 - DNA, 321 bp, Arabidopsis lyrata
  Intron number 1 from transcript 318885 (locus 318885) deri ved from phytozome v7.0 (chr-ID scaffold_3; pos 9508046 to 9508366 reverse strand)
gctgtgtggcaaaaactcccagaccagttcaaccggtaagtctctcttcttgaaattataaccacacttagtgtttttatacatatgatgtactaataaaatgacaaaaaagcttttttaaaaatgtgtcttttctatatatatatatagaagtagaagacaaaaacaaataaacattaagtattagttaatgtgcaagtactgttacatatagatttaactactacaccttttgatgctgatcatgtaagtaattacatcttttgatgctcttgtaattcacgtctacaagtgacgccacaacgcctgattgagttctcg

SEQ ID NO: 40921 - DNA, 687 bp, Arabidopsis lyrata
  Intron number 1 from transcript 934410 (locus 934410) deri ved from phytozome v7.0 (chr-ID scaffold_4; pos 17989905 t o 17990591 reverse strand)
ccagtcatctcactgccattatcacaggttctttcattttaccttttctttctgatattttctagcaaattcatgtaagaaaaaaaaagcaaatctaatattgccaaacaaatttattttacgttttgtcgtcgtggaagactttctgccaaaaacataattgaaaaaaaaatactaaataacactacaaaattagtcaaatttactttaaattcaatgaatgcaagataaaatgttttaatggtggaagaaaagtcaaacttttaagattaagctaatgttgggattttgaggcaattaaaggggattttgtttttgtatttcaaattgtcagtcattcaaacaccaaatattttgtttcttttttgtcatgaccgattctttgtccataaaccaaaatattcttagttctgtatcttctctctaactatttaaagactaagatagtagatcaaaattaaacacccatatgaatgttgttaccaaagttattttattaaaaatgaaagctagtatattttatatttgtcaaatatgttaaactaataaaatgtaactttacaagatatatgacataaatttggtttggtagtagttttaattggtactataactttttatctacttcaatttttgtttgagcaaaaaaaaggtggaacaagtgggattggattggaggcagcaaga

SEQ ID NO: 40922 - DNA, 594 bp, Arabidopsis lyrata
  Intron number 1 from transcript 481442 (locus 481442) deri ved from phytozome v7.0 (chr-ID scaffold_4; pos 5277109 to 5277702 reverse strand)
gggatttctacagagacgcagcaaaatgtaagaaattacttgttcttggttcacgaattcgaaatctaatgattccttttttggttcttttgccgaattttgtatcgatttagggttttgaaatcattattatctctatctctcgcgttctcgtttgtgtttttctctgctgttggtctgttttaatggtattgatgatctgggattatcgattaggttgcttgattttctttgagtcagaaagaatcacgttgcgttctaattcgatcttctctgtttgatttgagaaataattgctggtaagatttcgagaaatttcatgatatgaatgtggatttagcgtcgtttacagtgagaaccgaggattagggttttgggatctttgattttattttttgattcctgataatagttggatttaaaggatagttcttcgtttctagtgaaaacttgttaagtgtatgattaacgaaagaatttggttgtgaaaacagagtgctttctatgattatttgtcgttttgattctgagaggtaactggatttctatctttgagatattgtatcaggcggtttcagaggctgcacaaaagag

SEQ ID NO: 40923 - DNA, 448 bp, Arabidopsis lyrata
  Intron number 1 from transcript 482919 (locus 482919) deri ved from phytozome v7.0 (chr-ID scaffold_4; pos 18916814 t o 18917261 reverse strand)
ttctgtatctcaagctccttcacaaatcaaatcaggtttgacctctgattgttttatacttgatgataatgagctatgatttttccggtagctttgatttagatcgagttccaatacttaacccattcccagatgaattcaattagatgctctgcagtgtgtaattgaccatcccttatcgaaagattcaatttttaacgaaacaattgattgtagctagtcattgtacaggttttggtattgaatttgcatgtttgcttcattaagcttcaaaattttcaggcttttgcatgatttgggcaaatcaagtgttttattttaagtttagtgctttcattgggtatgagtttctaggcacagaagaaaggacaatcaaaagtgatgatagggttgattctatcagttttgttatttggtgaatatatttcttatgtttgtatgtaggagc

SEQ ID NO: 40924 - DNA, 428 bp, Arabidopsis lyrata
  Intron number 1 from transcript 945561 (locus 945561) deri ved from phytozome v7.0 (chr-ID scaffold_7; pos 7217696 to 7218123 reverse strand)
tttcaattcgatagaagtcctggtaagtatctctgtaaaaccttcgatgcttgtctgttgtaagtgtagcagttttgttagttatgtgactggaatggatctatgtgggtttgacttgtactatattggcataagaagataactttttgtgtcagaagtcataagctagtgaagagaaaggctacgactttaggggaagtagattagaatttgcccatcacaacgtttcccaagagctcgaggattagggagaaaaatgattaagtagaatcttggtcttgtgtttgtcttattgatcagttacatcttgttttagattgatatttgtctgccttgtgtatatatcttaatgttttgttgtctcgactttgattttgacttgtctggattcagttgataccaatttggcaggtgtaggaactgctgat

SEQ ID NO: 40925 - DNA, 494 bp, Arabidopsis lyrata
  Intron number 1 from transcript 484620 (locus 484620) deri ved from phytozome v7.0 (chr-ID scaffold_5; pos 4653712 to 4654205 reverse strand)
gacctgatcctatccacaacaggttctcaatcttctctctcgaattttaaccttctatagtcttttctttgagtttgtttgctatcagagatcaagccttttgagaatttttgtcttgaagttggtttaagtacgtttatacaaaatctattagtgtttcctcaattcaagatttttgggtgtcactttacacagataccgataattactggtttctaaaaagatcattagcatgcagaattcttgttctttccttcttttcagtgtcactatacattttgtgtccattaaagaactcgtcttttgaaagcagataatgttatcatgttttagtaaaagcttcttctttatctaatttttatgccttaagagaattaaaggcacttgtgaagaactttgaccactttagttaaagaactcaactttacttatacatttgtttcaaaactatttcttcaggaaaacagaaacatcgagacggccaccaagagtat

SEQ ID NO: 40926 - DNA, 676 bp, Arabidopsis lyrata
  Intron number 1 from transcript 486646 (locus 486646) deri ved from phytozome v7.0 (chr-ID scaffold_5; pos 20344947 t o 20345622)
aagattcagagacccacgagtatccatagtcgaaggtgtgtagtgaatagagatgggtttatgtttgatttcactctctgttttcatttctgagtggttcattgatctgttccgtgttcgtaatctatgattgatgatgggtttttgtatttatgctgtatgttgttatcagaggttcgattgatgtctgcgtatagcctaatttcattttcacaaaaaaaaaaaaaaaaaaaaaaaaaaaaagaagaagagaacgttttttttgtatacctaacatctaaattatgtattaattctcaccagtggaatctcgacgttgaaaggatgacaaaagctttctcctttattgttgttcttttgtctgaataatgtattgcaacgttagaccaagtcttaatattatctctcttcttcgtcttctgcattttcgatttgacactatgcatgtctgctaaaccaaatctggttgaaaaggttttgtcttgatttatgtaatgttgttcatttcccttacaaaaattggacttgaagaggttcttgtcttgtggaaatagatgatctgtgggattcagattcgtaatgctttgaatctttatgtgttcttttggtaatggatatgttaaaaaaaaggttataaattgatttattatttgtgttgtttcagtggctcttgaga

SEQ ID NO: 40927 - DNA, 753 bp, Arabidopsis lyrata
  Intron number 1 from transcript 947703 (locus 947703) deri ved from phytozome v7.0 (chr-ID scaffold_7; pos 22194865 t o 22195617 reverse strand)
tggtaagtcttaagaattaagattagtttaatttgatttacaaaaaagactagaaaacacatttaacataatttaagtcttcataaatcttctagtcttttaatgccacattgtgatataggggcaaattaaagtatatgatttgaggttgtagtttccttttagggtgatcattctacaagtgaccaataaaattgtaacaaaactagagaaaatagtgcaaaagcacaacaaaagatgctcaagaggtatttttaagaacatatatggtatagaatatgatgataacatgcaatttacaaatgtctcgtgtattacacaagtctataacctctcgatttcctacaaaatttctattcacgatcatcatataaaaataattagtgatttaaccaaaacattgtaagtaaaataattattttgatcgttgctatcagataataatacaaacaaaatagtcactcttaattttttggttttcgagagcttccactctttgattatattgctaagaaaatattgagaaattggtcagctaagttaataatggccattttgaatcctaaaaaaatataattgaaaaagaaacagaatgtaaattttttaaaaaatttgtagtgatctgtaagctttagttcagataaaagttaagttttggtaaaaattagtgtttataaaagaaactttctaaatcaattgaatggtgcatggacattagcctttgggaggcgattttttaggtctagccgccaa

SEQ ID NO: 40928 - DNA, 778 bp, Arabidopsis lyrata
  Intron number 1 from transcript 920195 (locus 920195) deri ved from phytozome v7.0 (chr-ID scaffold_1; pos 5509467 to 5510244 reverse strand)
ggccactccatttgcatctgcaaagaaaaaagaaggcgttactgaaaaaaaaaatctagtattttctataaagacaaatatgtgcattgagatatgcccatatctatttcatgcactaattctttttaaaaaaatagtgacaaaattttctgtatataaccaataaaacataggtaagaaaaataaaataataaaaccaccagctagtttgttgtgagcgtttgtaattaaacctcgtttgatcgttaacccttgattcccagagaaaaaactactaatctagaagcaatataacatctataggtggaaggacagaacccattttcgtctgtttgaaaaattctcaaagtaataattagataattacagctttgaaaaaaaataaaaaaaattattacaacttctttccaaaaaaaaaaaaaagagaattacaaccaaaatagataaattaatccaccacgtggcttgcatgtgtgccatgatacataccaacaacggggacaaatagggcatatatgtttgggggttttgtgaaactgtgaccatataaatcattcaatattcaatgataattaaattgcaataacgcaaaaaaacacacaagtgggtagtgaaaaagaagtgtgtagggtcacgtttcaatcgttctcttcttctataaaaaagactctcttcttctctgtatcctcattttcatttatcctctgttacatatctcaaaccctaagagaagaaaaatttgtttttgtttttgccaaagttgatcgatatatcgaag

SEQ ID NO: 40929 - DNA, 587 bp, Arabidopsis lyrata
  Intron number 1 from transcript 471056 (locus 471056) deri ved from phytozome v7.0 (chr-ID scaffold_1; pos 3655996 to 3656582)
cccactatctccgtcaaggtaagtttctccgattttctgttccgatcatctcgcttctcttccttacctgatcagtgttttgaatctgcattttgttactcgatccataattaggaaggcatgtattaatgcttgatccaagtttccttatttggaaaattatgctcatgcatgtttttctttgattgttatgatgaatttcggatttgtagcttaatccttatgaatactcttttgccgtaatacagtaattagctgtgagattgggacaaaaaattgaaatttatgtggtcttttaatgaagtgtgtgtgttttgatgtttgtttgggaataatgataattaatacttcaagtttattatcaacttggtatttggtaatcattgctacttgctagttccacatagtttgatggattgtttagatagtgtccttggattgagagcagtccttgaagtcgaacttgaacagatatcttatggaaactcgggaatactctggtcctggatagtattctctgttccttcttcttcttcttggctctgagctttgagaataatatattatggtgcaggtgacgtccccgt

SEQ ID NO: 40930 - DNA, 668 bp, Arabidopsis lyrata
  Intron number 2 from transcript 492324 (locus 492324) deri ved from phytozome v7.0 (chr-ID scaffold_7; pos 7290905 to 7291572)
caaactacgtcctcaagccacctccatacgcactggtttgattttttttttcttctttttaataaaaatcgaaattgtcgggcaaatggcgttttgttttcgttggattagagatttggcttttgaattactagatgctataacttgttacgccctcatagcccttaaaatatattttaatcctagccaaaggcgtcacaaatgaattatcatcagctaatgaaccaaaaaggcgttacaaatgaactcttctaatttcgtaatggaagaaaataaaaatcgaataaatttatgcattagtgattttcgggaaatggaaggagtcaagtagggtggtccatatcgggtaaaggccgtgaatgttctagtgggaaatttgggtatgggacaacatatctgaattgattttgaaaccatattccaaaactatctcagtccgacccgttactcaaactttattaaattgtctaaaacatattactatgtagtttgtaataaaaaactgcagtgtggtgtagtgttagatatataaatttttatataaatttatgaccattcctagttcaaattcagacgttccttggtctcatatttgtgttccttctagtggacctattggttaagtgagagcaatatgttgaaatgtttttgttataaaattggaaagg

SEQ ID NO: 40931 - DNA, 495 bp, Arabidopsis lyrata
  Intron number 6 from transcript 490678 (locus 490678) deri ved from phytozome v7.0 (chr-ID scaffold_7; pos 415423 to 415917 reverse strand)
cgaggagtgttctgagtggtaagtgttcacttgtttgaaactcttttttaatcttcttgactcaagtgtgagatgaatgcttttgtcacgcttttacttgggtgatgctcgtccttactcatgttcatgttttgtcttatctgatactgtggaattcgccaacgaatgggaacataagctgatactctagtctgaacgtttgtaataactgtgattagcatcctaatgtctaagttaggaaccttgtaagattacaagttactgatagagttgctgctaagatttgggtttttctgcagcttcttagtttgtcacactgaaacaaatattgatatttgatcttggaagttggaactgttaagtgttaagcctagtctttttacttttttgtaaaaaggttattgtttcaaatgtctttgtcagttgcctttgatgttacagcaaactaacattggctcaggtttcatccttcttgtataggaacaacaatagagg

SEQ ID NO: 40932 - DNA, 675 bp, Arabidopsis lyrata
  Intron number 1 from transcript 937014 (locus 937014) deri ved from phytozome v7.0 (chr-ID scaffold_5; pos 10649912 t o 10650586 reverse strand)
acctgctttacacgcaacttctttctcctactgcggtttgttcccaaaactctcctttctttgtcttctatcagattaggggtttctttttgggtcgttggtaggataaatccagtcttgtctatgtttaaaacacttcactttccttaaagtttgaatctttataggggcaatgcttcgatttaacactaattgctgctgctttcaattttgagggtaaccttagtctgatctattcaagaaaacctttttggtttgtcaagaaaactatcttgaagcaagtaatgagtaagggatcttactgttgaaaagattgtcttgcaacatgtgactaaatttgcctttttctcagacaaaaattcagtagatgctaaatacagtttgttctcttctttcttggttatgttattacagctttagcaatacctttcagaagagagaaacttcagttaatagcgttgttctctctgtttgaactgcattaagtttttcttttgcaggagaatttcgatttaccatgtttgtttatcaatgacacagattctttgtcttttgttttgcttgtcatgaactggattttcccttggtattattgttaagtctgaatcttattcataaactgttgctgacacttttgtagataagaggctcgatcccgttaaggtcacgggtgtg

SEQ ID NO: 40933 - DNA, 399 bp, Arabidopsis lyrata
  Intron number 1 from transcript 945121 (locus 945121) deri ved from phytozome v7.0 (chr-ID scaffold_7; pos 5482822 to 5483220 reverse strand)
gcaggtaagaaaattacagtttttaagtttttaaacattttctctacatatgtttcatgtataaaaattatgattagcttatgtttgttatgttactgaaaagtttgaccagacaaaacatatttgatttttttgttcgatccaaaattttcttatcttcatatgtatataatatgacacctttttttaatagagtttacaagctgactgaaattttgttatgatttattgcgtttaatgttacataataagtcggtttataaaaaaaatttggttaatttattttgattcgatccaatttagtttctaaccctaatgagtttgtactacttgactcactgatgctactataaatttttattttatttttgtgtgtttagggaccaaattacaaacact

SEQ ID NO: 40934 - DNA, 304 bp, Arabidopsis lyrata
  Intron number 2 from transcript 478767 (locus 478767) deri ved from phytozome v7.0 (chr-ID scaffold_3; pos 5598264 to 5598567)
agagcttaactggtgaatcttttttttggttctctgtattattattactatagtcttctttctctggcagtttgcgatgaaaataattaaatatatatatatatgtaaatctatcagccattcttattggtttattgttgaaatcgctgcgataattccttattattctcgtcaaaaattcgttttttgaggtttttaatcttcacccattgcgagttttcttcaccgtcttctttctttcgtttactcattttgtttctcgcaggtggaattttgagctttagagcgatctttttggtcttgc

SEQ ID NO: 40935 - DNA, 720 bp, Arabidopsis lyrata
  Intron number 2 from transcript 907276 (locus 907276) deri ved from phytozome v7.0 (chr-ID scaffold_2; pos 2268273 to 2268992 reverse strand)
taccttgaacttctccaggctgattacgctgaagggtaagcgattatgttttatgaaatcctagaatttgtgtgtatgaaagcctagaattttgaatgttttctgacaaacaatagacgaatacgataatgaatataattttggtggttttatgttttaattatgttcttgaatagtcgaagagattgcatcttgtattgtatagacgaatatacatgatgatgaattttgatggttttatgttaaaaaaagaggataaaaaattaagtacgaaactagtatccctagtcctctaaaagaaataatatgatggaatgatttgaatcatgtccttgtatatagtcgaagagattgcatcttgtcttgtatgaccatcttgaagttcatagatgttaccaaaagcatgatcaagttaggtcactgatagtgtttgatttggtaaacagttttgtttctcaaattgtgttttttcttttcttatagttgtaatctgatcagtgttgaagtttatagatgttatctttgttagtaaaggagcatgatggtaggtcactgagattatgagatattcctttctcttgtttatatctctagtgtaatctttagccctttaatatagttttaggcgttgtgctacatgatttggtatatgcataatttgtattcacacattgcattttgttgaactgcaatttgattattgtgttggaatatgtaggg

SEQ ID NO: 40936 - DNA, 736 bp, Arabidopsis lyrata
  Intron number 1 from transcript 925923 (locus 925923) deri ved from phytozome v7.0 (chr-ID scaffold_2; pos 12000615 t o 12001350)
tttggtctaattttcttacaaataggaacaaaaatgtaagtctttttttctttcctctaatacattacggattcattgaaaaaaaacaaaatcaatacagagagaacgaacaagaccttaatagtttctttgggaccatgtacgatgttgtattgttccatggtgccaccaacgctacaataattcaacttctaattgccattgagcgaaacggtattttgccgcaaaaaaagcgttggaatgtactccgccattccctatgcaatttcccatgttaaaagcattctaatgtttttttcttcatgtgattagatacgttgcttagagtatggttagatcacaatcagaactcaaaccaaaaatgaatctaaatatgttgcaggtaacagtgaaatcatgtataacatgatacaagtttacatgctaatcctttactcaatgatcggatgtgatttgattgtgaacaaattcttgtggttcttgactactacataacaagcttcatctacttcacactatatgttatgatgcttatggccttgacaccaaagtatcacattgccggaattctcatgtccttcttcctgagtctctagaatctcttctccgatttcttcattcctagaccggtaaattagtaaattacatttgataatttccagaaaaaaatttcttacatttgataacattatcttttggtttggaggaaaatgcagcaaataacgatttggtggag

SEQ ID NO: 40937 - DNA, 703 bp, Arabidopsis lyrata
  Intron number 1 from transcript 335316 (locus 335316) deri ved from phytozome v7.0 (chr-ID scaffold_1; pos 8865990 to 8866692)
caactctctctcttctttcaatcccctctcatcaggtaacacttctctctctaagtgtgtgttcttctgatttacaacgatcacgttattatatgtcttagatttttacaaaaagaccattgagcttctttgcatacggtagatgaagtgtgtaagaagaaagttttaaacgcagcgttttttgcgatgcaaacgttgtttccattcgtacacttgaaccactgagattttagtattataaagtgaaaactgtgtttgccgtttggtatacaactaacgaactcaaaacgctttttttttagtgttcgatgcataactttgaatcaaatttcataatgttttagacattcgaagacagtttacctaccgcttagatatcgattcatcattgctaaaaaaatttgttatttaattttctttattaaagtattgctatttatagatatagtttataatcgcttagactgatcaattcgatcaattatttatttttttctccaaatttaatccgattttgagtataatcacctcgtggccgattttttagaagcttggtttgaatgagggttattagtgttatgtggttttgataatacatatattgtacttgcaagaaacttaagagtcacgtcactgattttttctgtaatgattttgagtataaaaaggagtgaggccagtggttggcggatactttgatccg

SEQ ID NO: 40938 - DNA, 736 bp, Arabidopsis lyrata
  Intron number 1 from transcript 891202 (locus 891202) deri ved from phytozome v7.0 (chr-ID scaffold_7; pos 18873583 t o 18874318 reverse strand)
catcgcattgataagttcctttgacgtatctatctctcttgtctgcttataataatcctcgtaactctgattgattgaaacatccaaaccgacttcgaccaccccgaactaagaccaatcccaatcccaatcccagactcaatcaaccaatttactcggatttaatttatctggttcaattggtttccttaaccattataatagtttttacttgggattgggcttttattaaccaaccctttcaagagacggcaccgtttcaacaaggatccaaatggcctagtaaaagcccatcaaagaggcccaggttcaggaccaatttgtaaaatcgttggtattcagactatttttgcgcagttcctcaatcgaactgatctgtgtcatgtaagaactttattcttcttcctcctatttggctcagtaatttcgagactgatttgcttttgattttcttgccagcttcaaagagtcaagtcaacatgtcagggtaattaagcttctcttgctattcatctattttggattctcactacattttttaatacactgaatctgtcatcaacagtctttaaactttctagttggttattattggttacatgaaattggagattgtttagtattatgcttggcaaattttaatgcttatttattgttgatgatgtaagtataattcaagaattggtattgttgttgatcagtacagtcttgagaattcagaggatcccttttacgg

SEQ ID NO: 40939 - DNA, 633 bp, Arabidopsis lyrata
  Intron number 2 from transcript 480866 (locus 480866) deri ved from phytozome v7.0 (chr-ID scaffold_3; pos 23841548 t o 23842180 reverse strand)
tagcaggtaatcacatcacatcacagcttcgtttcatcgaaaatgcatttatctatccattgaagtttagctattgcaatggacatactatgaatgggggctgggaccattggaatagattcttgatctctgcaactgaaatttgaccttgttttgttatcaatgggtcgttgtttattgatgcaaggatcaacttagaaagacaacaaacgaaactcaacttctactgctactgatacatgtacctcagttaatgctgtgtccatatttagattttggcttgaagcttatggactgctttagtgaaactggttaagcaaatgaagtaaaaagatatgtagtctggtttctcatgtgtatttccgtctatcttgtgctagtgccgccactttacaaagtaatgatacttcttcttcctgtcctcgctaggaatcgagtaaaaagtcagccgtaatatccagaacaatcatcctttggagttctataggcaccattttgttattttgttgtgcattctatcaacgcccctcatgaatatctctatgctcttctccttgtatcatcaaatcaataacatggatttgcattggcgattactcaaaagtctttgtatgcttcattttcagcaaggcg

SEQ ID NO: 40940 - DNA, 939 bp, Arabidopsis lyrata
  Intron number 1 from transcript 913709 (locus 913709) deri ved from phytozome v7.0 (chr-ID scaffold_1; pos 23439240 t o 23440178)
cagtcactgggagaagatagagatacggtagatgaaccaaatttagaagctcaaaggttttttggtatgttagatgcagctatgcagccgctatatagaggttgtacagatggtcattcgcctttatcatctgcaagtagattgacagttattttttcgctgttgtgtttttctatcgtaacgcttcattataatattgacggttacttttttcctttgacggttatttttcggttatgtctttttatcgcaactttctgttaaaatatcgatggttacttttttgtttgtgtctgtttatcgcaacttttagttaaaatattgacggttattttttctccattgtgttttttttatcgcatcgtttaattaaaatattaacggttatcttttcgggacagttctatttgttcaattatagtcgtattttttcagtttacgattgtctgtataattgtatctattcatttaaggttacatctcttcgctatatttcattgcatttttttgtcacaactttttgaatgcaaggagcagaaaaataaaagattttgaaaaaatttatgtaattggcaatttatttgtattaaaactctacatttgattaaaaagaaactttgaaatatgagcatgggcactacaggaatatcgggttttaatagcactatacaatagcgtttgtagtcattctgctattgttagaggacctctgaactttcaatagcgtttctaccttgttgaaacgctatggatagtgtttcacaatttttactatgacgcggaagtatatttaatagcattaccatattaaaacgctattgaaagggttgggcgctaaaaatttcccattcccgctattagacttagaaatatttttgggcattacttttctttttccccttagctcatctttgtcgactttactcttcaatttttagg

SEQ ID NO: 40941 - DNA, 929 bp, Arabidopsis lyrata
  Intron number 3 from transcript 491730 (locus 491730) deri ved from phytozome v7.0 (chr-ID scaffold_7; pos 4860347 to 4861275)
gattcttctctcggtagatttctgggtttcattggttgcttaagatttatcgatatccgtgtctctttgtttttccctataataatgtttcaagaaaaaaaaaacatatttttttacttctttttgtttttagctggtgatgaatgaagaagctttggattctcaaatttgtgtttattttattcaaatttttttcgaaagttggagactttatgttttatactaatttgctactgattttagattactgggttctttaatctttctatttctattggaagttttatgttttctaattggtgattctaaatggtgggtctttacttttttttggttgattggttctaactccatattcttgtgtgtttgtgtgtgtttttttccactatcattggtttgatgaattgggtttttaatttaatcgtgcgtcagaagactatatgacttttgttatgtgtatagaataagattccatgatggcatgattgatgaatgtgggttctattacctaaaagaatcatgctttcattctctaacttgtggcttattctttgctttggatcttggtctattgcatcctatagaacattatctttgctgtcttattgtttggttctctctgactccttgatgtctattgatcaaaccttatcagcattgttgtcctgtggtggtagttgaactatctttgtttttaaatgaacaaagtgtttcacttttcagaattccaatttagttttgtatttgaatttgtatacattcttcttagttttggaaaacaaggttctaaggcagattcctgtattagtcttggatagtttgtgtgtttctggttaagacattgttctccattgccttcacttcgagccaaaaatgtaatttgacttccttttctttctatatacaggagctgcaggtgactcatcgaa

SEQ ID NO: 40942 - DNA, 260 bp, Arabidopsis lyrata
  Intron number 1 from transcript 475255 (locus 475255) deri ved from phytozome v7.0 (chr-ID scaffold_2; pos 2963628 to 2963887)
tccgaaatcgcggcctctattacccagctctcaaggtttcatttgcattttcgattcttcaagattagcttcacaataattttcagattattacaaccatttgctttaaccctgttgaatacatatagaaatgtagattcttaagtggtagtttgattctcattatgaacaatttagtaattgttgagtgtcttctattgaaattggtgatgattgtttttttagaattcatattttttggtttgtagctatctgaagtt

SEQ ID NO: 40943 - DNA, 362 bp, Arabidopsis lyrata
  Intron number 1 from transcript 942336 (locus 942336) deri ved from phytozome v7.0 (chr-ID scaffold_6; pos 12760888 t o 12761249 reverse strand)
aacgggccaagtggattttcactccccagaaactggtaatctcaatttctgaggctttatacatgtttgattttgttcatcttaaggattttctttgctttgattgtatcatatagattaccttagtgtgtgtatgtgtgtttgtattttacaaaggaaaatactttgatgggcttctttggttttcgtcttgtgtgacgcaagagagtcctattaaccgagcatttcgaactcttcgttgcttaattatgcgtgtttattgatattatcttacttgttgtgtagagatattggtattgcaactaagctgtaatgttgtcattgtaggcagacaaatataaagctgctaacaagagggcagt

SEQ ID NO: 40944 - DNA, 877 bp, Arabidopsis lyrata
  Intron number 1 from transcript 948553 (locus 948553) deri ved from phytozome v7.0 (chr-ID scaffold_8; pos 2672238 to 2673114 reverse strand)
tgagatattctatcctgggtgtgttcaatctgattgtaagctcaaatttcttgttatcttgccggaaaaaatcaagttttttgttattctgattattttgtaccgcttctttgatttcaattttgttatttgaaattctgattaaccgaaaaaatcaatttttgttattcgaaatcgtagtaccgcctcttagatttcaattttatagtgtacttgtatctagcctaaaactgaacgtagctaatctgatacagtatgttgtgagttggctagagcgattagtgaagcttgggtttatacgaatatctcggcagattattttactaattttcttggaacgatcaatttcttatgtcttatgaaactgaaatgggtcttgttttttttttattgtctgataaacaaaaaagttggctttcttctctatcaaatctgatatttgatttggttttctctgttattctcctgatctttttttctctaatatgatgttttgtttccatgaaaagtttcaatttttttttgtaactaaaacagataaatattgtgacttgctttgttttggatgtataatttggactttgattgtaacttggaagtggaagactcatagatctgaagacgttaacaacgacaaaaacatgtgattgtcccttttcttgtataaagtgttcaactttgattcggccatatgcaccttctatgccctacaatctagtcaacatagtcagaattaaaggtcaaaactatatgtttcttgtgtgttttgttgcattagaaaagatttagtaagtgaattgaaaaaaatgaagagagcttaaggagtatggaaaatgttgcaggtgggtgaagtgggagagctattagagatattcca

SEQ ID NO: 40945 - DNA, 241 bp, Arabidopsis lyrata
  Intron number 1 from transcript 492141 (locus 492141) deri ved from phytozome v7.0 (chr-ID scaffold_7; pos 6562536 to 6562776 reverse strand)
tcccacattttatcatctgggtcctctccttagtgatttttcccatcttcacaagtttgatgtttttgttcaaatctggcgttttttctttattgtctctgcccattttccgtttctcttcccattgattgttctgtttcatttctggtttttttttatttaaaaattaattgttttgattggatgctttgatgatccactgtcagatttgaagataccaaattcctatttgatcggaact

SEQ ID NO: 40946 - DNA, 566 bp, Arabidopsis lyrata
  Intron number 3 from transcript 480432 (locus 480432) deri ved from phytozome v7.0 (chr-ID scaffold_3; pos 20388395 t o 20388960 reverse strand)
cgttaaaagggggcacaagtttggtgcaaaagtatgtttcttttaatttgtctctgttttactgaaagctttgatcttaactgtggacaaagtacaaactttgtgaacgaaaatggtttaggccactgagtttatatatcctgacaagaaggaaagtaatccttcagtttaaatgtttacaaagatttatcaatgctccatgaattgtcttatggaaagtctgcattaaaattaattacttcatttgtttagcattccgtttctgcacataacaagagtctgaggctctgagcatttaatactcaagttaatttactttaatagattcttcttttggtaaattaggttgcttatttttgtttcattaataataaaatgttgggcaagctatgtgtcatttcctgaatacaatgtttgccgatgactggtgagactggcttattgaatccagaagtcgtctgtttcatgagtacagacctgttcccctacgaagaagatcaagttattgatgctccactattttttctgtaggcttgaaaacagtgtcgagcaaggttcttctccta

SEQ ID NO: 40947 - DNA, 417 bp, Arabidopsis lyrata
  Intron number 1 from transcript 919594 (locus 919594) deri ved from phytozome v7.0 (chr-ID scaffold_1; pos 3203487 to 3203903)
gacccaccgtaattccaccctctctctctctctctctctgtgttttgttacctatggatgtagtttgattcgttgtttgatcctttatctatggcttagctggtactcgattttactcttgctctctgattgcttttctcatttaatgttccattgggaggtttctgtttgtttgtgatttaataattcttgtggtgcttgtatatcaaaatataagagaaagaagcccattaaatcctcttcggttgacattagaaaaataacttgttaacatatatgagaacaaaactggacttgtgatttggtacttggcattcttactcaagatatgttgacgttttaagtcctagccaagttttgctaacattgtgtatctatccagctgaaaactgctagggaagctgtgacgttcggtgt

SEQ ID NO: 40948 - DNA, 305 bp, Arabidopsis lyrata
  Intron number 3 from transcript 478844 (locus 478844) deri ved from phytozome v7.0 (chr-ID scaffold_3; pos 5950519 to 5950823)
cttgtgatcagttcctgttaattattggtttttgcttgattttttgattctccgttacatattctggaaaagatctagcttgttcatgaaccaaattttttagaaaacagaaccaagttttctccgatcgctcccagaattgtatatatatttttttttctttctgattgtaattcgtgttaatccggtgataattgaattagatcgtcataaaccatgtcttcttgttgacactaattttagcgtttttttttaatttattattttttcagtgagaggttaagctcaaggtctctggatttctc

SEQ ID NO: 40949 - DNA, 772 bp, Arabidopsis lyrata
  Intron number 3 from transcript 315794 (locus 315794) deri ved from phytozome v7.0 (chr-ID scaffold_2; pos 12731888 t o 12732659 reverse strand)
tgaaacaaatcccttatttcaagcaaacccagcgggtgcattttttcacccttcttctatcttctctgcaaaatgaaaaacaaaacacagaaattgttacctgcattttagcagtcaacattgagttttctcatgactagaaattctctgaaatacttaggcaacggaatcaaggaaagcagcatgggaactttcaacgaaatcaaggagagcagcaggggaactttctagtttgggatatcagttgctacacataaacacccgcctcaacaagcaagtagaagattgcagcacacaaataggtaactttcaagtgctctgatgtcaagttccaactcttaaaagcaaagctcatctctgatgttgtacttctctgatgttatgtctaaagaggaaaaaatcaatcaaaggcttagaaacattaactcagggactcatcaagacaaccaagacgtactccacctacttttttctctacaagatgatttgccacttcaacagtactccagacaggtataaagaacaatctattcttctttttccatgttcattctttttatttctttcctgtctcgtctttaactttacataaagatgagggacgacattcagtatgacgatacatagactgattcttttacctttcataagtgaatacattctgtgagcagttgttccttctaaaatggttttaacctttgcaagagcattgaatattctttatcaccaaatggcagatacctataactgagctacaagaaaaggtaataat

SEQ ID NO: 40950 - DNA, 379 bp, Arabidopsis lyrata
  Intron number 1 from transcript 494160 (locus 494160) deri ved from phytozome v7.0 (chr-ID scaffold_7; pos 24313426 t o 24313804 reverse strand)
caccgttcgtaaaaacaaattcgtcgatttcgttggttcgaacaaaacataactctgtgtttgttttttttttcaatcatgcatggttctgttttttttgtcatacaaatcagaacctttttcttaatggattctgatttttttaattacaaatcgaaacttttgattgttttctcttcataatgcaaatggctttcatgtaccactattttttacagttttgcactattccgtaaaaacttacgcctctagtttacagctaaaatttttgtacaactagtgttaccaatcggacctagtttttgtggttatctgatttcaaaattgtgtgttttttttttcaggtgaatatcatcttgatttgatagtacgttacgga

SEQ ID NO: 40951 - DNA, 811 bp, Arabidopsis lyrata
  Intron number 1 from transcript 486004 (locus 486004) deri ved from phytozome v7.0 (chr-ID scaffold_5; pos 17634174 t o 17634984)
tctgcttagggataagggatacctccctatacaaggtaaaacactacacttctcttttttctttttggttttaatgttaaagatttttcctatataaagagttactgcaaaattgtacttaaaatttacatttacctttttgattttttcacctttattttgtatttatcgataaatcataaagtcattttaggtaggcaatttttttccaccacttgcacttatttaattataaactaattaagtcactatcaaaaaaaattataaactaattaagttggtgtaattgatgatgggatagatataactgcagtgttcaagaaagcgttaggcgctaagttatataaactaattaagttggtttaaggcggtttagacgtttataacataaaacattataaatatgatattatatataaaagttatataaaatatatataaaactaaaaattacgaaattataaacaaaaactaaataagacatttatttatatctatattaaacaatatataaatatttataactatatatatataaaaaactctaattgaaattgaaaaaatacattaaacaaattctatataattttaggcggttaaggcggttatttaggcgtcgcatgagagcctagcgcctagtcggggcctaggcgaccgcctagaccgctttttagaacactaataattggattaaagaaatctaaagttttcttccacgaaggattagttttggtatcggtttaggattcctggtaaaaaaatcttattaaagatttactaaacattattttttctccagattctagattag

SEQ ID NO: 40952 - DNA, 268 bp, Arabidopsis lyrata
  Intron number 1 from transcript 324948 (locus 324948) deri ved from phytozome v7.0 (chr-ID scaffold_6; pos 789471 to 789738 reverse strand)
ttcaggttataatacaattccattatttatgagatttatcaaattttaatacatatatatatagactataattaaaaaaattatttcaataaaaattctcagacttattatcaaaaaaaaaaaaaaaaaaaaattctcagacttataatgaatgtttaaatttatttgttttttggtctaaaaaaatttcttcatatagaaaaatattgaggtttttatatatttgttaataggtgactaattttgagagtggcgggtactcaattgg

SEQ ID NO: 40953 - DNA, 975 bp, Arabidopsis lyrata
  Intron number 2 from transcript 333008 (locus 333008) deri ved from phytozome v7.0 (chr-ID scaffold_9; pos 748884 to 749858 reverse strand)
aaagacccagaagaaatagcagcactggtcgatatgtgagtctctcaatagtcactatatacatataacaaaaaaaaactattttataaaatataaaaaaaaaaactactttattaggtatatatttcgtattagtaacgttttagatagtcaaactagatgatgctttaacattactaaacctatttgtagaccaagaaagtatgttttaatttcactgatgactatgtaaaaagttagttttgtctagtagtattaatgttctctataagaacttttttttaataagcattgtgatccacaaaatttaaaattatcaatataaatgactgaaatgtacttttatttccacattcttgttctgcgaggaaaaaaattaaataaacatgtgaaacacttctgacataaaaacagtagttttattgaataaaaccacaaaccgtgattcctatttaaacctcactggtgcacaaaaaaaaaaaaaaaaaaaaaaaaaaaaaaaaaaaaacctcactattttcttcttaagatccaccgacgcataatttttattatttaattgtttaatatcttctatatattaatttatatttctcacttactttaagattcaaattttcaatgatttataaatctgaatctggtacacaaagtttttgcatttaattacggaattatagagaaatatgaccccaaaagtttcctatatggatcgtatcccatgatcatgaaaacattaaattacccacgtggggccacctcaccgtgtcaaaataaattcaatgctttcttctattttgcatcttcctgtctcctatatcttgaccttttaaacacactcagggtaaatttgcaaatcccaaaactcacgggttaatttgatataatctataactttgttctctttttgtaatatcattttattaattggagcatgcaggagtatacgtaacagtacgtatcgtagaaagctag

SEQ ID NO: 40954 - DNA, 618 bp, Arabidopsis lyrata
  Intron number 1 from transcript 483266 (locus 483266) deri ved from phytozome v7.0 (chr-ID scaffold_4; pos 20470602 t o 20471219 reverse strand)
ggggatctaccaaaactctcggaaacttcgtcaaggtttgttctttcttcccttttagttacctatacatgagtttcgtttgcttttgagtggtttctggtaattgcttgtgaaatttgatcatttcctgtcattttagtacggtaattgctacaaaagtagttccaggagtccataaaaactgacttccatccttatttgatgaaatatctctggaaatgtttttataggtctattgatggaagtaaagatagaaagtgtttctctttggtctagtgattctcttaagctgtattgaatgatccctttgtatcatttttatggctaatttctgaagcagtagaaaacattgtatctagcaaatgaagagtagattcagtttggcttgtctttatttgttggtagtgtatcatattgattgatgatacttgactctgtttgtattttactctctaagttatttctggaagtttggtagtcaaatctgtaatgagtcttcttatgatgctatttgttttcttgctaaaattgggagttttgtatcttgaatatgaaaaattgttttcatgatgttggttatattattgcaggctacattcgattgccttcagaagactt

SEQ ID NO: 40955 - DNA, 939 bp, Arabidopsis lyrata
  Intron number 1 from transcript 927383 (locus 927383) deri ved from phytozome v7.0 (chr-ID scaffold_2; pos 18750747 t o 18751685)
tcgagcaaaaatagacaccagcctgcagtaccgtaattcggttccaaagaatgaagtggccggtgtgtatgtgagtatgactctctttgatttggattttcttagataaattcagttatatgtttttgtttgctgggttctttagcttgcagattgtgtaaaaactaccctatatgcataattatgagcattgacggtcatatattcacatcatttcagcgataatgtcacatgtttctggtgttgtttgctctgttgcttgaaagtgccttacaaagttaagttagtaaaatgatgactttgttttccactcaggaacttgctatttacacttttggctgatttggtgacttccaaatcaattctagtgttccttaacagaggagcaacttaaaaattttaattctaatccatagtgtggaactgtgaatttacagtgaaacaccagaagttaaaagggacaagccagctaaatccacataattagtgaagacattccattaatctcagttatatggattagatatcgaatatggactactatgattagaagtgttgttgattcggtttttagaaaatacagtgaaggttgtttaaaaattcattttggataggtttgtttatctgaagtgatgacttaactattggattttctgttcatttgattatgatgaaaagtaatcatatttaaaaaagggctatttaacacctataaggcttccgtgtatctaaaatcaaaacgtcattacctatctttttccactgtgaagtatgattttggtatcttcataaaaaacttaatcgatgtgacgtattaggatcatgtgggggattagtgagataattatggtgcataacaacatgattcccgcatcattaacacttaacatcttgatttgtgggaaatattgattttgctttgtgttaggtttgattggc

SEQ ID NO: 40956 - DNA, 946 bp, Arabidopsis lyrata
  Intron number 1 from transcript 314177 (locus 314177) deri ved from phytozome v7.0 (chr-ID scaffold_1; pos 23470978 t o 23471923)
tccatcagtaagtagttttcatttgtaggtttgttcattctcttctatgtttataatatttactttttcttgtaaccgtaattcgtgtttcaatcagactaattaattaattaattttaagcattccatttagagcttttcggtggttctatattttttttatataatttcatttccgatttctgttctaataaccgacgaggaagcatgaaaagcaaagtaagttgtacagacaaactaaatgtcggttgatgactttatggctttatatgtcttttacgatttcaacactaaagtaagaaaagtaaaacacttacttttttaaatttaaaaccaaaataaaagaaaatgaatttgaccaaaataaaattaagaaaatgaaagtacgaattgtgttaacttttctccacaaggaacaaaaaggaaaacaaattttaattcaaactaaataggctgcattaactggattcctttgaaaagaagaccatcatttggagtatatcttgttcttaaacagctcttattcaaaaaaaacaaaaaagtatttgctcaggatgatataaaatttccccaataattatgtaaatgacaagattataccttcgtctaataatatatttaaggaataaacacacattttacttggatttgattttgctttaatttaaaagattttgctttaaattatagtccattaattagataaatgataagatttgatgaaaatacactttaaattaatgtattagacttttattgcataaatttataaactttttttttggcatgacctttcttgagtttatatatataacttatataacttaataatctatgaacctaaagaataagaagcacttcttaaacatatcaaaattttgtgtatttagacatgatcaatcaaacgaaagtgagttttgtgctcatcattctaaccatagcagcg

SEQ ID NO: 40957 - DNA, 892 bp, Arabidopsis lyrata
  Intron number 1 from transcript 932184 (locus 932184) deri ved from phytozome v7.0 (chr-ID scaffold_4; pos 847792 to 848683 reverse strand)
caattagcaaactgtcagattcttaaagtctttttattttattttacttttctctgcaacttgaaattttaacaagttacagaggattttttaggtttgaatctgtcctagttttctttgttggtcgctttagagttttactatatatgatctccatgttttgtctggcttggtaagttttaaggtcctcgccttacacaaaccggagaaactttacgtattcaaaagctaccattatgtattatatgtcatcttcacatcttcttattagactgagataaaagtttatgaaatgaagtcttgatttgttcttttagttcaagtaatcgactaaagatcttctcttgttaattgagtaaagtcgatcaagacattctaaattagggtaaagatcttctcttgtttactctaatttccttgaaacaagagaacatctctcgactagagcgaccaaattttggttatctcttcacatgtattttcttatattttttgctaggattttattttcttcttcccagatattttagcctaaaatttttaggctttgcaaatattttttagactgtgataaaaggaacaattcttgggtatattatataacacttaaatagaaattaaaaattaaacaaacaaataatgtaaattaagaaaataaatcactaagaaaaagattgatttacttaataaaaagattgattgattgaccatgtgagaggagatacggcagcgacggttgatgaggctaattgtattgcgtgattgagacataaaagtatatgtgaccgtcgccccaaaggcagtaactatttcatcaccatggctgattagcttctctagctcttatagccttctagggatagtgtcacaacatcgccatcgccaaggtcat

SEQ ID NO: 40958 - DNA, 240 bp, Arabidopsis lyrata
  Intron number 1 from transcript 887756 (locus 887756) deri ved from phytozome v7.0 (chr-ID scaffold_871; pos 563 to 8 02)
ttcatttgaatacagccgaatattctggtcaacatgtatgtcttcttctaatttttgtttttgaaaggagttacaaaatctcatttagctattaagacaggggactaataatatattcgttatatgtaaactaatagagaaaataaaaaatatatgattgttatccatgcaaaatatatattatagatgaaaattatactaacatattgataaaatttacagttcgcaacaattgagacc

SEQ ID NO: 40959 - DNA, 729 bp, Arabidopsis lyrata
  Intron number 2 from transcript 480519 (locus 480519) deri ved from phytozome v7.0 (chr-ID scaffold_3; pos 20996679 t o 20997407 reverse strand)
atcttcaatcttggttttgcaggttagaaagtgcattactttcttactgggtttttagttttacgtccgtaatgtgtttgatgtaatgcctagatgagaaagttctttccttttattttattaatgtttcaagaaacgaatcgaattcttgctacaatttatcacttggaccgttgttgttgtccttgctttgattctcgaagaaagctgattattccatggcattactttgattctctattctattatcagatattagagcatgctcattgaacggacattttcttggacctgcatctcagttactcagcgatacgaaaagacattgatttaagcaaatgcagtatttagaaactatctatatctctttgtgtgtgtgtatatatatcttggataagcagctgcgttgaatagaggatgcacacaggttcttgtaaattttctggttcatggacatgattgcacatcttattgtcttgtactctattcttttgaattaatgtttcagcattactccctgaactaggtttctgtatcatactctcactaaatccatatcgattttttttgctggcagaagaactataagcgtggtctaaatcagaattgagaaaaacatgcttgatttcttatgttatagcattcatgatagtccacttcaatgttggctgattttgatcctttgtttctgcagcttatatatttgcgataaaacgagaaaaggatatt

SEQ ID NO: 40960 - DNA, 852 bp, Arabidopsis lyrata
  Intron number 3 from transcript 476056 (locus 476056) deri ved from phytozome v7.0 (chr-ID scaffold_2; pos 13683528 t o 13684379 reverse strand)
gcctccgccgagaaaacaccaccaccggagacaccgtgagttttttttttactgagacgagaaacacgtgtgtgtttttttgtttgcaggggtccgatcgtaatttacttcatcatcttggtgttggtggtggtggggagggttttagttttaccttgggaccaaagccaaaaaccccaattttctctcatttatttttctccttttgagtcatttctttggcatcacaagaagatggagagtgacgagttcgtccgtacagtacataagaatttttggagagggaaggagaaattagtaattatgtaaagaatcgtcggtggcagttggagtaaataatgatgaatgggaggaacaactccgccgctattgcggctgtgatattagcgtgcactctacatcttctttttctcctcgtcctttttttttaattatactaatgttaggtcaaaaagtgtctaacgttttaatgatgtttatcctacatagtgtctatctagcaaagttattaaaaagacactgatttttttaacaattcttgtctcgtcgatcgtagtttcataagatgttccttatgtagggttttaacttaaaagatgaatgaaaatggtatagcaatgtagaatggatgattttaatgaaaatgtttgaagtcaagtaacgttttttttttcccgtggctgtttgactgtgacaaatattaggattagaatccatgttttgtgagatctcttagaatttgatggcttgattcattggttactctgtgattctgatgcatggtgatgtactaatcttttgatgtttttttttgtagagtgaaggagaagaagaaggctcaaaagcgaattc

SEQ ID NO: 40961 - DNA, 514 bp, Arabidopsis lyrata
  Intron number 2 from transcript 487803 (locus 487803) deri ved from phytozome v7.0 (chr-ID scaffold_6; pos 3870830 to 3871343)
gtctctagatccataatcgtttgattatcttctggttattgttgattctccataccgattttgctagatctgtttagcatgcgttgagttttatgagaaaaatctttgtttgggttttttgcttgttctgtgattcgatccatgcttgttggatcgatctgagctaattcttagggtttatgtgttagatctgtggagtttgaggatttttctcgctcgtatcgatatgtcgctgttaattttgattttatttttcagtgaagtgaagttgtttagttcgaaatgattttgtggtttgtttgtttgctcgattgatctggttttaatcttcgatctgttaggggttgatgtttacacgtgaattctagtgttttctctttgagatctgtgaagtttgaacccagctctctcaatttttatctgattcaactctatacctgctgtgatctgattcgtgtttactttatgattatatctaattgccttcgtttcgttttgttttgtttagtgaaaa

SEQ ID NO: 40962 - DNA, 676 bp, Arabidopsis lyrata
  Intron number 1 from transcript 474896 (locus 474896) deri ved from phytozome v7.0 (chr-ID scaffold_2; pos 169941 to 170616)
aacggcttggtcttacccagaaatacgaagaggtaattaaaaagtctccaaatttacctgtttttctgtttcatgtcagagggaaagttaggtaatttgagatggggttcaattagaaactgatcttacttacatttttctgactcgaaaatttgtgtcatagtataggtaagagattcactaaaagttgcatcttgtgtctgttcttacacgttaatgacaaagcaagagaaaatggtttcaatgtagagttgatagtaatttgcagctattggtttcttatcaattgaatgtttgtgacaactcattgttaaaattgaagtaaagagtttagctttccaagagcaatctcatccttctgtgggctgtgaattctttaagtctcaaccactggaaactagataggagcccttaatgcacttcttagttatgttttaccttaacatttttactcaattcttgaaatttccagatgatttgatgctcaaaacgagctaatacacagttatcatttgtggattctttacgctatatcacatgtttaatcaaatcagaattcttaaatttgtgtcgggttcgaagtagtggaagttttttacgtggtacagactctgaaagatttgttatatcactgtttttctggtgtgtgtggcagttgcttgtggcaggaggtgga

SEQ ID NO: 40963 - DNA, 528 bp, Arabidopsis lyrata
  Intron number 5 from transcript 487498 (locus 487498) deri ved from phytozome v7.0 (chr-ID scaffold_6; pos 2601578 to 2602105)
tgcacatagagccacctccttcttctacacacaatgtaataataataatgattacttttatatttctatatatatgccaattttagttggtttctgtttctaatttaatataatgtcagcgcaactactagctatttcatataatatcaagtcagaccaattattatacgtttctcatttttctattgagtagtgatttgattgtttttttggttcttttatataatgtgtttggtaagaccgatagtacaagattagttccggctgctcaacctagtggttccactcgaccatcttctgacccgtccatggacttgaccaatcattctcagtttcaaactcctcaagcttctaaatccatcaaggtctctatccatttatatattttaaatcatttaattactttgtcaaggtataaatcgaatatagtttttagacttcttgttgtggtcgttttgtaagttaatgggtcatatctaaaatgttatggcagaaggaaggaaaccgcaagggtcttgcctcatcgga

SEQ ID NO: 40964 - DNA, 470 bp, Arabidopsis lyrata
  Intron number 1 from transcript 487692 (locus 487692) deri ved from phytozome v7.0 (chr-ID scaffold_6; pos 3544888 to 3545357 reverse strand)
ctgtacgactacttctcggaaatttcgtctccgtaagcaatctgttttcgcgcactcactttgatgatcttcgttttcatttctaggttttacgatttttttctcgatcgcatttgttagggttttccgaatttaagactttgattgtatctatctcgaattcagctgaatgatttcaaaatgcggcatcttcttagatctagctggttatgattgattggaattttgatctgctcaagattatccatttagagcgattgggtttattcacttcctttagtttggttttctcatgttgaaacagcgatttctctgcaattttactgatttcgtgcttcaattttttttgcttttaaagtagatcatgtgttccattgtttgttagttggaattaatttgccattgaacgtctctgttatatgggtttgatgataggcacccgtgagggggattcttggcttgcaaagggc

SEQ ID NO: 40965 - DNA, 964 bp, Arabidopsis lyrata
  Intron number 1 from transcript 906697 (locus 906697) deri ved from phytozome v7.0 (chr-ID scaffold_3; pos 22787094 t o 22788057 reverse strand)
catcagaggaagaggaagagaccgttactgctcaggtatacattagtttgagaatggattaatggtattcaaggtacaactagttcaactagtgaattaggttgtctttgaatatgagtatatatacttttgatgctggttcttggtataattgaatcggagaatatataggtttgaatttatgtgtcttgatacaactagttcaacctctcccgattatatatttgtttgaattgtgtgttttgatataagtagttcaacaacttaaactcagcgattgtgttttgaatatgcaggatacatatgaggaagaggatgatgctgctggtaatgctggtgaagaggatgagcatggtgatgttggtactggtaaagatggtatagaggctgaagatgaatacgcacaaaggaaagaaaattcaactttccttaaaaagctccgggtaagtgatggtaagagtgcttctcgaccatcaacgactctaactcaatcacacataaatgttcctcgccatgtcttcataaaataggttgttggtcggtgaatcttcaatatggatcgaagaaatatgtcgtttgatcggtaaacttgaacttggaggttctagtgaggctcccgtggtaaccaggtgaattggtgcaacaatattcctgctccaccaatatttataaattgtccataatatcggtgtatatttaataaagtacgaggaaatgtgactttgggttgatgataatgaagatggcttgatctgggtgggtcttcacaacgttctggttaattggctcgttggtttatgatcctgactcgatcaaagatcttaacatatgtgttttttttttatgaatcttcactttggttcaattgtctgttgctccaattgattacgggaaaaattaaagttgaagtttaattgtttgttgctccatgtaggaaagagaaaccttgttttttattctttga

SEQ ID NO: 40966 - DNA, 527 bp, Arabidopsis lyrata
  Intron number 1 from transcript 488788 (locus 488788) deri ved from phytozome v7.0 (chr-ID scaffold_6; pos 7994223 to 7994749)
gagttttgttcaaatacggtcccaaatccatccaggttctcttctcgatatcgatttcttaaatatgattgcttttgagttacttggaagcaaaaagggaaaaacttgaataataaatttatctttcgtaattctagggttgcttaaactaaaaactatagcttcttctggatttctaagtaatttaagcatttctgtttgttatattggttcgggattgttttagcacaagcttgtttgctgatcatgtttatgattcgttgaggaaagacaatttaggtcaacgtagcaagccatgatgttagatgattttagttgaccacttatatagcagcagtgatcagagttaacaaagatggatcctttctgaattttcagaatggatttactagagattgttatatgtatgagtatctatggctagtggttttttcaagggtagatttctggtagtaacaacagcttgcttttctgtttcatatgtatctccaggttgcttttaagaccggagagtataaacaacaagt

SEQ ID NO: 40967 - DNA, 460 bp, Arabidopsis lyrata
  Intron number 1 from transcript 482295 (locus 482295) deri ved from phytozome v7.0 (chr-ID scaffold_4; pos 15879149 t o 15879608)
tggttcagaaggacgagctagcccaagcttcgcaggtgccaatctctctctaattcgaatttggactgtttttattttcttcgtgttagctgtttgatgatgaggcgattatcaatcatatcctcgctctaggtgaattagtttccaatttaagcttagtggcaacgatttaggaaacggtgtagattcagatgtcgaattcacgaaaattgtggtggatctagagctttaatcgatttaatctgagctgctcttgtagcttttacgttttctatctggttaagttaggtcatctctttcacttgaccaacctagttgactggttgcagttttgtttgtggagggtgtttaggtgtttcaatttggtgttctctaatttacgaatgagattattgagatgttgatgtaactagtctcacattctttagcttgtttttgattttcgcaggacgtagaagac

SEQ ID NO: 40968 - DNA, 374 bp, Arabidopsis lyrata
  Intron number 2 from transcript 482295 (locus 482295) deri ved from phytozome v7.0 (chr-ID scaffold_4; pos 15879643 t o 15880016)
ccgctgctgctactgccaatagtgcatgtaatctattgtttcttttgctttggttggattaaagtaaccagctaacttcataactatacatactattcagaatggattatgctagcggataatggtgtttttttttaatttgattgattcttaaatttggctctaatacttaagagtgttgcattctcattttactggttcaaacttataggtctataagaccttcatttttcttttataactcttaagtgaatctcttgcatctcaatttatggagataaacatcttcttggtaataaatatatattcttatcatttgcagatttcgtttgcttgcagaattttctgaatctttgcgagaactaggtgcttgt

SEQ ID NO: 40969 - DNA, 903 bp, Arabidopsis lyrata
  Intron number 1 from transcript 924948 (locus 924948) deri ved from phytozome v7.0 (chr-ID scaffold_2; pos 2819441 to 2820343)
agatttcttcaccttacgccgtatgaatctatattcatcttcttttccatcggtttcttctctgtttctcttgcaccgattcggtttctatggattatcttcgagtttgtaataatttacatgcatgcgataagtaacaaatttcagattttgtaattcttactttgacagcgagtttgtgaaatttttgaagggtagttcgaagtaattaacaggatctatagatacaatcatctaagatctttcgaaaacttgtcatataataaaaatttaactttgtttagaatgatcgtgaatagccaaaaaaacaggagtttaggctttaatttgaaagcagaggagctagtttgagttggtaatcttgtttgactgattattcttcaaaatcttggtttttttgttaatggtttagtattgttcaacatgtgtgtagtgccgcattggttttgtttctatggcatgtcatatttttagataagtttggaatagaagcaagagtgttgtttagcagtttggtttcttaagaccttgtatatatgtttatgattattatgggatacatatggcacatttatttgatcaatgttttagggttatgaagacattttctatgaagttcgattccatgccattagagtagcattagtttgatagtaacctccactttattgttcaggtgaaatgttataaaatacgcgattgtcttgatatttgattgaacttacgcttgattctcggatggatatttacacattagctaattgtacaatattcagaaagagattgttactattcacagattcatgttcaattactttcataatctcataatctttatgctttcctgtgtttttatttttacatttaggaattacccccaaaagtgaaaaacatcttgctttt

SEQ ID NO: 40970 - DNA, 502 bp, Arabidopsis lyrata
  Intron number 3 from transcript 950538 (locus 950538) deri ved from phytozome v7.0 (chr-ID scaffold_8; pos 18534022 t o 18534523)
tggagcagcaagtatttccgaagaagcaaaaaaaggtaatattatcttaagcttttgtacctttttattgaattcagtagtacttttaagagctttgtattttcttataaaccagaaaatattaacctactattgaaaatgtctttgtttttgatccaaaataaaaaaggtggaagaatataaatgcattttcgaaaataaatctgcatatggacacagtcacagaagcattctcgttcagggattagattgttcccttcctgtggctgatatcaggagcgcattgagaaaacacttcggttcatgtggacatatcttaagtgtttttgttccgacagagtgtaaaaccggttctctcatcgggtttgtgacttgttcctccaatttaatttgacaacttgaagttaaatgcaatctaaattttttacttttgtttttgttttcaggtgcgctctcattaaatactataatccaaatgatgaaaagaaggcattagcactcg

SEQ ID NO: 40971 - DNA, 510 bp, Arabidopsis lyrata
  Intron number 1 from transcript 925011 (locus 925011) deri ved from phytozome v7.0 (chr-ID scaffold_2; pos 3135824 to 3136333)
aggtcacggtcgagaaggaaacatctaggatcttggtaagactaatcccactagtctttagttttgattagatttctgaattctcttgttcaatgaactgatggatttaaatgtgatgttacaacagctgaagctgtgtatcggtaaactcaagtgatagagccagatgcaaacaaggcttgtaaaaagttggcaaatataaagtgcatggtcaagtcttactaaagtggctagaaggaatggagaaaaatcttttcaaaggaaaggtttataaaatactgttttataaacgtagtatgcccaagatgcatctttggtgcctcaaatctaaatttcatattttcgcgacttcatcttctctcaacatgcaaatagctcttgctagtacattaactttattgcgtttctgcaaccatacatactaattgtgaaatattaagatttgtttctatgtattcttgtctttttttcagagtcaagttggtattatatttgaggcttcggttggag

SEQ ID NO: 40972 - DNA, 770 bp, Arabidopsis lyrata
  Intron number 2 from transcript 925011 (locus 925011) deri ved from phytozome v7.0 (chr-ID scaffold_2; pos 3136394 to 3137163)
aaactcttgataaacacgaaaggtttgcttacaatgttcaaagttgtatagatttcagtatttgtgttaactcacatctctcttggttcatctcagattaaggaaggtaaggagaaactatatatgcagctggctctaacataagtagatcggaacattcaaaagaaacttcattaaagtacctttccaactcgattgacaaagtctctcatagaagtttctgagtgctcaagtactgatgttcttggtatctgttttccaggactagtgggtggaagatattttggatgaggtcaacgatggagacagtaggatgcgagttgcgtggccatacgcttcctctttttcaaaatataatgcatcgctttgaggttggttgttatatacacattttggcttgctattcgtttggatctatctatggttgttatctattcgatcaacgttttggtgccatattacagattcaagtatattcagaaccagagtcttcttgaagtggattagtcagacgatgaaccactttgaacaagtgaggtatgcaaatgagttagatgatcaacctctttgaataagagtttgatgcggaaggacttctaatcatttgtgaagatctcatggcaagaaatttcaggtcacggtcgagaagaaaaccactaggattttggtaagattaatctcactagtctttagttttgattagatttctgaagtctcttgatcaatgaattaatggatttgaataaatgtggtgttgtagggaactttgg

SEQ ID NO: 40973 - DNA, 615 bp, Arabidopsis lyrata
  Intron number 1 from transcript 347417 (locus 347417) deri ved from phytozome v7.0 (chr-ID scaffold_5; pos 9644209 to 9644823)
ttcaagaagctgctattggtgttggcataagtgtcgttgtgatataggaaaaagatggtgataaatcaatgacacgtggacggtggtaattgaagattaaaagaaacggtcaagatcttttgaagattaagaacagaagaatgaacctaataagaagttgaagaccctttattctctcattatgcaaaaatctgagattgtatcttcttctccatttggttctttgtttgttcttgagaattctctgaaattctcaagctattcttcattgttgctggagctttctcgttttgagactcttgcttatgagaagcgaattgatgttttatgaacataggtttgattatctttaaaaatggtttgtgtttgaattagatacagttttcctgtatcacgttgaaggtatgcaagtgctttaaaaaagtattcttcagcacaatgagatataaaagtaaaaatgtagaattgcaattttacattttcatactgatgcgtgtgagacttttttgtgtgcaggatatctaacaattacaaaatcagagaattggagttttggcttgtgtcttgttgtgggtttcagatcactcacttcacttggtctcttggatcaggatc

SEQ ID NO: 40974 - DNA, 755 bp, Arabidopsis lyrata
  Intron number 1 from transcript 917300 (locus 917300) deri ved from phytozome v7.0 (chr-ID scaffold_8; pos 17325759 t o 17326513 reverse strand)
aaagaaacgagtaagcataaatatgtcataaaatcaagagtacgacaaaacaaagaagatgggcctaaagaccgagactggacgtgggaacccatggacagtggcggtcggggcgttgctaatatattgttggtttaaatatatagattttttatatttaattctattatatatatcaagatataaacactaataattgtttgtgattcaaaaacactattaattgttgattactaataatatatatcaaaagttatagcgttttaccataattctatattaatgtcgttataaaaattagactcttgacaaaattaattcaataaatatccctaacttgataaccctaaatattaattattaattctggtcttaatcaacatacaaccccgcgctgggcgcggggacctcccctagtacaattatatatgtattatcttcttcatcgtaggtttttttttttctgttggttttctcttcttctttttctttaactgagttccaaaaatccccaaatctaattctatgaaattcaatccaagaccatttgagttaagaatcgaaatcagagtttgggaaatagttaatctcgattaaaattccttcaatttcggcaaaatttctcttgaaatctgattcttagattcatgaaaagtttttaaattttgaaatcgtcgtatgaacctgttttacgatctaagctatctgcggcggttacagtttcaccaccagctccggaagagagagagagacag

SEQ ID NO: 40975 - DNA, 570 bp, Arabidopsis lyrata
  Intron number 1 from transcript 920240 (locus 920240) deri ved from phytozome v7.0 (chr-ID scaffold_1; pos 5701373 to 5701942)
cgattttcgattcgaaatcggaatctctgcttcaggtctatattattcaaggtatgcatgtctcatttggtgtctgaattgatgtattttgcgtattaacaaattagggttcttcggattaacaaattagggtttcgggatttggggataatcggtttttcgttgttaagtctattgtttgccttattagaagcatgtttgagtgtgtgtgtgatgtattaaaagagttttcaaattagggttcttcagatttttgaaattagggtttcgggatttggggaaaatatgtttttcgttgttaacactaatatttggctaattggaagcatgattgagtcagtgttgttgttgtttaagtaatttctgagtagtgttctttggatttgttaaataagggtttctggattttgagaaatagtgttctttgttgttaagtgtatgaatcagatgctgtctaattagaagcatgattaatctatattctgtaatgtttaagtcattgtcaattggaagcatgttctcagactataaaagttgattgtatatgcttaatattgtaggttcttcaac

SEQ ID NO: 40976 - DNA, 983 bp, Arabidopsis lyrata
  Intron number 2 from transcript 312861 (locus 312861) deri ved from phytozome v7.0 (chr-ID scaffold_1; pos 8135425 to 8136407)
agcttcgacgcccgtcttcaaattttcttcgacatgtacgtgtctttgattctctctttctattttattttaaagtcaagttttgttttgtctttacgtttataactgttacgggaataacgcattgcaattagcaaaagcataagaaaacaagtgtattgatccaagtgcaacgaatattaatcagttgacgttaatcattgaagaaaactttatctgtaattgataattagttttttagtattccgaattctgaataatgtagatgaagtttgatcaacttgcagttttataagattggactaatttttgttttttgtggtattttatcaagtttagctgattaaatcaaatattgagtaaaaaattaatgttgttgattaaagataatgttagcttaccaatcatttctttgattggaatttgttatctctttagtgagaactaccgcaacttcacaataattttctacaattttgggaattattaggcataaattaaaaacatgtgttggttaagctgaattgtgattgtttcaaggcaaatgtttcactgatatcatatttttgtagagagatagatacatcatttaaatcacgtggtgtttttagccgttggatctggtagttcacgcaatcaacggtgaaaatggtctaatgtgtttaaagaatgggctgtagtttacttggcccagtaaaaccaacttttaccaaatttccaaaaaagttttcttctttcagctttctccccgcaataagttacttgcaagtcttaaactacacaccagatgccaaaatgagttttcaatttttttttgccaaacatttaattcagtaaaattatggttactcaattcatttcgttattctgtcattttttttggtttaacgattatacaattctgttataattgcagtgttactaatacaaaaaagatgctaatatctagtaccggttttgtcacagggctgatagcaacgaag

SEQ ID NO: 40977 - DNA, 728 bp, Arabidopsis lyrata
  Intron number 1 from transcript 942118 (locus 942118) deri ved from phytozome v7.0 (chr-ID scaffold_6; pos 11428588 t o 11429315)
aaccgcctctaagtccaccgtctccttccgtgacggtaactttttttacacccatacattcacaaaaattcattacataaatgcatttttcttccccaattccgatttactactttaaagtatcttaaaattactttgaagaagaaaaaaaacttaaattgtaccccaattccaatttccaacctttatgtacagtaaattatggcaatttcatttcttttttcacatattttcttttctcacaaattaatgggaacaaaaactcatttactcagaattttataaagaatcgagaaaagaaaatcttttgattatatttgtgatatgaataatcaatataatgctggaaaccaaaaaatttcattaaatttcttcaaagtggttggttacgatgatatcactcgtacgaacctgcctctgctagcgatagtacttattttaacaaacaaaaatgaaaaaaaaaaatcgttttgttacgctttagaatttagattttttaagaagccaatgtaataaaaattacagttttggcccatgtttctgacacaaacacaacacactaaagtttttggacatttccaatcaatgaagttgagagtaggtcctttagttcatgttaccttaggaccagttaggctgtcttcggacacacctcacgtgctctataaatctttttcttttttaaaattcctaatattcacaaggacaattcggtcatttccacaggc

SEQ ID NO: 40978 - DNA, 534 bp, Arabidopsis lyrata
  Intron number 1 from transcript 479525 (locus 479525) deri ved from phytozome v7.0 (chr-ID scaffold_3; pos 8772576 to 8773109 reverse strand)
actaagaccgtcgatagtcaatctgtcctcaaaaggttctttcttttctacacttttccgatcttggaatattctcgcctccatttagaggaattagtctttagcctctttatgattataatcgctgcgattgtttatagatttattcatgtttctttaggtagattagattaggttttggctctacccatatccatttcttgtggtctacatgcttctgtatcatttttagagtaaacgatggatccaaaactgattgtgacttctcttgttctcttctgaaatgatgggttctcactttgtctaccaactgtttgttagaatgtctcggagagaatgatacatcaaagtttatatgtacaatcacatttcacgatggttttccttatgttggttctgaatcagatttcaagtactctctttgatgtaccctttcttgctcaaatcttggatcatttttttctttgttaagcaaacaaattctttgttttctatccattgttcttccttaatcgcaggctgcaatctgaactg

SEQ ID NO: 40979 - DNA, 722 bp, Arabidopsis lyrata
  Intron number 1 from transcript 927285 (locus 927285) deri ved from phytozome v7.0 (chr-ID scaffold_2; pos 18323431 t o 18324152)
gaactacttaccgcaaggtttgcctctccaatccggatctcattttttgttctttatacacttgaagaacatggaaattttgaattctggatacagatctttttgttaaaagatcaattactgattgcatctaacatgcgccggagcggataagtcgccggattgctaacgtgttcctctgcgtaggttagctagccttagaggagcgtttagtcaaatgttagattctttttctgtgacttttttttttaatgcgtttctctaaaagcagattctttctctctctgtttcatggtgtgtgtgtgactgattcacttgtgtccaggtctagtctattctcagatgatacccacctacaaataaaaagagtagcatagatctcaataaaaactgataaaaacacaatgtcctcttgcacagaattcaaagtgtacgttttgatctgtagattttttgggaaaccaagttggcacttttgcttttatgtctcaagtctttttactcaaacttcgagaatcgagtccaatgataatctgtcggttcacgaatccttgacctgatcactgtctattttcagttgttttcacattgatagaataaaaactagttctacttgtaagccttattatcactaacacattcaacagagtaatttcttggtaattcatgtaattacaaggattatgtcccattgatcatttttgtttgatatgttttcaggg

SEQ ID NO: 40980 - DNA, 432 bp, Arabidopsis lyrata
  Intron number 1 from transcript 313132 (locus 313132) deri ved from phytozome v7.0 (chr-ID scaffold_1; pos 9878544 to 9878975 reverse strand)
gtcaaaaaacaaagcttcctctctagattatttctgtaattatttaccacatttttgtatatatccatttgtttttctcacttttttcaccccttgaaaacagtaaaaaatcttgagcaagaaaaagatacagagtaaaagtaataatcacaagatgataagaagtaatggttatacgagaaattttatttacatgacaattacatgcatttgatttctaaaaaattataaagattttaaaaattgttaaagaatgttactccaactagaagtctagaaccgattcaatttaatttccctgaattcacggaaaatgtgattaatttacagtgacattttgtaattctatatgtaaactatgtgattttttttttttatcaaaaaaaaaaaaaaaaaaaactatgtgaattttttttttaaagcaaacagaga

SEQ ID NO: 40981 - DNA, 970 bp, Arabidopsis lyrata
  Intron number 1 from transcript 337131 (locus 337131) deri ved from phytozome v7.0 (chr-ID scaffold_1; pos 25875652 t o 25876621)
ctttgcttcctcaacttccccctaaggtattgatttaataataagaatgtatgatttaattgaaagatttctttcctagtcggcatgaaattcatatattcattatcatcgtttttaattggtaattcatatgcgaaatatcaaagttgtgttttataaaacgattatttgtatgaattaccaatcctataatattacagatatgcatatacatataactaaaaaacacaatttcatgcggacataatatttgatttcaaaatatgttttagtcttatccaactgcaaaaaaaatgaattttgtttcatcttgtgaaacgaatatttataaaactcattaattttattttctacttctattttttataccgtgtcattccgtttattaccaatcggaaaaaacagatgatattattacattttaggttatgttaacataagattctctcatgtttctttctcttacggattgccatgttttaagatttcaatttattcaaatgcttacgcttgttccttttcaggttctgtttcacatcttttcgctttaatataaacaattatatataatctagctatgtcaattaaatttggtgtgatttggcaaagccgccaggctttcgatttctctctctctcttttttttttgccttgctcgtctttgtcccaatgtttttcgtttcataatttttcttctggatgttatgtataatttgatatttttcttacaaatattatagatcttaactaatatctctaaatttttctttttaaaccgagtcttatttgaatccaccgattacacatggtgaaaaggctccggttttaaagcactataaaagtacatataataaataataaatgacaattaactaatatgtacatttatgtgtcggatttcttacgttatatagaatcatattttctaatattttatttgatccacaggcagacaaatcaacgatagtag

SEQ ID NO: 40982 - DNA, 954 bp, Arabidopsis lyrata
  Intron number 1 from transcript 473884 (locus 473884) deri ved from phytozome v7.0 (chr-ID scaffold_1; pos 23609353 t o 23610306 reverse strand)
ccgctgctcatccgtctccgccgttggtaacgtcggtgagttttaaatattctttgtctttccttctctaaatttctcttatttcgtgaagaaaaccaaaaaaatctcttttatttttgattccctcttttaccttttacgttttttcttctaggaattatgtttccgactcgcatttttctgttcaaattttgtctctgttacattctttacaaaaaaaaatctcttctttttcgattattttctctatttacatctgctcttttcttctagggtttaagtttcagagctcagattttgtctctgttacattttcagtttcacaaacagaacttcaataaggtgtttgatttaccgagaaatccaaaatgttctcaaccttggtcattgtctctagctttaagttatcatttttggctattgtagctaccttaagctttgctatttggttaaagttatgatttttttgttagtgtagctatctaaagttttgatttttggttattgtagctatctaatattttgatttttggttattgtagcttcctaaagttttgttttaggtaaaagttatgatttttggttattgtagctatagaatattttgatttttggttattgtagcttcctaaagttttgtttttggtaaaagttatgatttttggttattgtagcttcctaaagttttgatttttggtaaaacttatgttttttggttattgtagctatctaatattttgatttttggttattgtagcttcctaaagttttgtttttttggtaaaagttatgatttttagttgttgtagccagctaaagttttgatttttcgtttgaaatgctcttgttttgctgtagctctctaaagggtcggatttcagttactctctctagttcttaatatgatttttaacatatctctctctttgtgttggatcagcgaatagatcgatc

SEQ ID NO: 40983 - DNA, 421 bp, Arabidopsis lyrata
  Intron number 1 from transcript 485408 (locus 485408) deri ved from phytozome v7.0 (chr-ID scaffold_5; pos 15196863 t o 15197283 reverse strand)
gcggagtatatctgtttattcggcaaggttcttctctttctgtattttttgtgaattttttgtgattaagcttctgggtatctttgcatgtatgttttatcagtgaaatctaccaaaaaattctgtttattggatttcatagtaatgaaagtaatgatttttgaaacaaatcatctttgttctctctgttttagataaatgcgtggtttagggttcagtactgattcttgtctgatttttgtgttttcatattcttgattcgaacctaagtgttgagagagccaaaaaaagccctagcgagagcaattaaggatataatttagggtttaagatcaatcctctatgcagtttaagactctgatttgattgttttattgtaattacaggatagtgcagcgattgttataaagcaaccaaagaa

SEQ ID NO: 40984 - DNA, 454 bp, Arabidopsis lyrata
  Intron number 4 from transcript 324045 (locus 324045) deri ved from phytozome v7.0 (chr-ID scaffold_5; pos 17360881 t o 17361334)
tctcttcacatttcaccaaaatatctggtccatctcttctttgacctcattacacattgacattgctggcttgtcataacgttagatataagcctacactgtttcaaaaccaattttctgcgtttactacacgagaaaaaaaaatataacaaaattatcagtttttttttttttgcaaacaaaaaggttttcttaaaaaagttaaaatgtttttatttttaaaatatccactagaagtaaatataaactcaaattatttggagtttcattgcaaatctatagtaatatatttacatggtaaataaatcttaagtaaaactcgagatcctgatttatacatattcaaaaataatttgttctaaaccattgtccattgtctggtgcaaatgcactagttatccgcgatactagctaaaccgtgtgacttggattttgtttgttgtgcgaggcagag

SEQ ID NO: 40985 - DNA, 886 bp, Arabidopsis lyrata
  Intron number 2 from transcript 952276 (locus 952276) deri ved from phytozome v7.0 (chr-ID scaffold_52; pos 8268 to 9 153)
ggtctcaagttcgatcgaattaagtatgttttttctcatctaattctccactttcttatgcttttccgataaaatcaagtagcttttgggttgaatttactcagaaagaggtctctgaatggtgaatgcttcactagatgatttaggctacttttgggttttctgcatttgaagtgttttggttaattgctaaagttagctctagatatcagtcagcgttttagctgcctctagtaatcttaatgcactgttatgtagtcaacattgtgttatagttaactgtcttttgatctgatacaaaggagatgagttcagtcttgaatggtttttattatctaaaggtgaatgaatgtacatgtttcccatggttggttttgatcactttctttctcttcgtgctattcaaccattagttgaagcaattttctacctcattgaatcccatttaagaaaggaaaaaatgaaatatttgtggaaattcatctacaagttttagtatataacaaatgaaactactcaaccactcttgagtctttgtatggaacttctgctctgagttctggaattgcttcctattactgtaagatgaagaacctgttgattttctattcgtatacacacttacttatattcctaattatacaacctcttttgcgtaattctatggtcatgtagtattagaatcgtctaaaattatgtttatgacgtctggatagtagcagaacacatgccaagattacttagaacctggtcatacaatcgaagtttttgttctgaatgactagtttcaatagaggatgcatatagatttgattaatggacattttgtttgcctttcttgatctgtacaggtactggttatctgttggtgctcagccatcagacc

SEQ ID NO: 40986 - DNA, 482 bp, Arabidopsis lyrata
  Intron number 3 from transcript 487099 (locus 487099) deri ved from phytozome v7.0 (chr-ID scaffold_6; pos 927447 to 927928)
ggtttttgtagcttttgcctcggattttgtgcaaatgagactttctgggttttttttttcctgctcgttttcagcttttcatagtttcatcacaaggatcgaattcttagtttcagcttagatctctctccctctccaattttctatggattttccagactttgagttcttcgcgactgcttctctcatgtttggtttctgggttttgttttaattgagagatttaagctttttttcattttttctactatacttggtttgtggttgaccttatttttctcgaagatctgaatgcgtagatcatacgggatctttgcatttttgtatcttttcgtcagcgttacgattcttttagcttcaatttagttgaaattttgtaaattttttttttgagcttatctcctttttgttgctgcttcctactaagatcaattattgattcgaaaatctataaattttttcaggtctgaagctgatttcga

SEQ ID NO: 40987 - DNA, 471 bp, Arabidopsis lyrata
  Intron number 1 from transcript 941582 (locus 941582) deri ved from phytozome v7.0 (chr-ID scaffold_6; pos 8591045 to 8591515 reverse strand)
ttttttccgtgactctcaagaacaagataaccagtgtaagatatctctcttccttcctcctgaacgatgagtaatgcccctgatttatggctctatatgttacaatgagaacaacatcgtgagatgggtgtgaatatattacctcttaaactgatctacttaacatctctttgtgctctgtgaccatatcttctttatgccagtcactgtttttcttggaatatcaaagaagtacttcctgtgttttgctctaatttggtctgaagatttcgttgctatgtccattgcttttcaaattgaattggacttttctttctgatactttagccaattgctggtactattcagcttgattatttgatcaatctctgcagtttctcttcttgctgttttcttaatgtattctttgactaataactttcagttttatttttagctcaagtacctgctgcaccagaaccagtgacaagt

SEQ ID NO: 40988 - DNA, 801 bp, Arabidopsis lyrata
  Intron number 1 from transcript 492147 (locus 492147) deri ved from phytozome v7.0 (chr-ID scaffold_7; pos 6590079 to 6590879 reverse strand)
tctgtgacaagatctttcaatcccaaagctatttcttaaggtaatgatttatgagtatatctcctcaatttcatttcttcattttcttttgtttctatgagtctgcctagatccagaagagctttgtttgattgttcttattagtttcctgagatctgtttatacttggggaaaaaagtctacttgcatgaaatgtgtgattagggtttatgctaagtttggttaattggagaatcatagggtttataagtgttccctgatttggaagtagtgaattactttgggttgagtaaatttatgtttcttaattgattgtcactgggatccgtaacgcgggttgagctaaagcttctttctttcgatatgttctctatatggaaattatcatttctttgactcaaatatttttcttaatttgatggataacgctcgatcttgtgattcctactgcaatcccttggcaacgattgagctgtggcatcagctctgtggttatcttctgtttataaaaatagcaactttttagtgtttctgtgttgatctgctcaactctatagtaaaggatgtttctttttttatggggagaaaagaatgagagctgtgattctatctcttgattattgatcttcccatgattctacttttataaacgagctcaacattatgttatctgaatctcaagtgttttaaggtttcttgttctagtcagccgtctttttctacacgataaccaatagtacatgtatttttgtttcttgtatgttctattgagctaaagtaacggaccctatgttttgctca

SEQ ID NO: 40989 - DNA, 590 bp, Arabidopsis lyrata
  Intron number 1 from transcript 474651 (locus 474651) deri ved from phytozome v7.0 (chr-ID scaffold_1; pos 29552875 t o 29553464 reverse strand)
ggttcctctggatatcacagcagcagatttcaagagtaagctcgagaccaccctctaaagaaaaactctttttccgcactgatttctctctcgattttgtatttccgtagctactgtttctataaagttttggtctttctcggtttctcaatttcgaaacttagcttataggtttactgataggattctctaatttaatctttccggatgtataatgtgttttggtctgtgacgaaactgatatgcatgcgtattttgagatgaaaattttgctgctaagtttcaaggttatgattcctatgaaagaaatgttcttttcacattatcttctccatcaataatgtttagtcttatcacacacttgaagacctcctgcacagtgccttgctcagttcttttgaatgtgtatcattgcacatgtattgttgtgtttctctttttttgtcttgtgccttcaaattgatgtttgatgatcttttgtttgtgttacactagctcactatctaccttctactattttttatataagaatatcagaacatgtatcaatgcaacatgttttgtttttgcaggaaaactcgagaagactc

SEQ ID NO: 40990 - DNA, 554 bp, Arabidopsis lyrata
  Intron number 2 from transcript 491044 (locus 491044) deri ved from phytozome v7.0 (chr-ID scaffold_7; pos 2092429 to 2092982)
ctctggatttaactctcttctcttcacgctgcagagataatcttctctcgaacaaatctccaggtggttttgcattttcctgcaaacttaattcccagacttcaagtagtgttcttcttcttcaaatcaaatattctagcattttctttttattttggtaatttttagtttatagaaatccgtgaagagaaaaagtatatctgttgccttcttcaatgccatcatgtgagctttccaatattgtttcctcctctctcttcattttttttttttaatttatttaaaagttttctgtgatttttccatttgacttgactctccgcggaggagtttgtcgccggcgaattattcaatcgtcggaggttgtaactgttcatagttttccttcttttactttctggtctttggatttttactctttcgctttcgtcagcttcaagtcttcaaagagaaatcttctttagggattttagtttttttaattctttttggttttgaagatctttgacgtagaaaagcctagagacctggagaatctctttgattggtatctt

SEQ ID NO: 40991 - DNA, 754 bp, Arabidopsis lyrata
  Intron number 2 from transcript 939605 (locus 939605) deri ved from phytozome v7.0 (chr-ID scaffold_6; pos 562111 to 562864)
tataaggccggtatcgttcccgtctcctaccgcaggtaaaactttatttctctcttagtctattctctgttttcgctaagttactcacaatactctctttatgtctcttctctgttttttttattatctatactctgttttgcctactttgcaacctctgaacattttccggaagataggaagagaattatcgagtcttgataattaaaaacttccaacttaaaataaacattcgtgtttttttagagaaaatcccgtattttttggttagcttattttcgagaccgatcctattaaattgcctaatgttgttgcttcagtcaaatatgttaaaggtatttcttttgcttcagaagtaactttttatccaaagtaattaagaatctgtgagtctgaagattttcagagccttggcatgttcactctattctttattccattttttcttaatttcccgagaaagttgcttccttttcttttatttttatcgggaaccaaacatgaaaagtgttcaccaaaaatcaaataaaaaaccaaacatgaaaagtttttccttctattaacgtactgttttagttgagcctatgcaatcaccttttctgtcttttagtccctttaaagccataccttttaaacccgggtcggttattttcgcaatttttttatacagtatcaatttttttttggtactgaatacattatacataagtacataactaacaatatattatttttttgggtgttgtaggatccc

SEQ ID NO: 40992 - DNA, 726 bp, Arabidopsis lyrata
  Intron number 2 from transcript 489606 (locus 489606) deri ved from phytozome v7.0 (chr-ID scaffold_6; pos 13205320 t o 13206045)
caattgctctagccttggggaaagctggctgcaaggttaggcttaacactatcggaattttggagtcattggtgttagatttgatctgtatatatactcttcaagcattcaatttgcatcatattactagtcttaaaagtttttgagttatgaagattttagctcaggattgctttcagtttcttttgtcattatagtgatggagacatcaataggtttatctccgtaattgctacacataagtcttacttttctgatctggaagtaaacactctgtttctgctgcaggtcctggtgaattagagtgcaaattacatgattcatgcaccaagtatttagaatgtttttgatcagctttggttttcagctcttaccttgtttttctgcttcgggatatcgctttagaccaaataatacataggtgtttggaatggaaggatgttgttattggtacgaaaacaaatgtggtacctttagagtttaatgatgatatttcctttaaacagttttggtttctgggacaagaaatgtaaacaattgaatgttatggcccttgaaactgtttcttcttgccatttgcttctcaaatgcgtttgtgattttgctcttgatccatcttttagctaacaaatgtcatctgcagtcaatagtgttttcttctacaatgtcacctaactccatgttatctctgacatttcttttctatgggaccgtagattgaagaat

SEQ ID NO: 40993 - DNA, 546 bp, Arabidopsis lyrata
  Intron number 1 from transcript 470987 (locus 470987) deri ved from phytozome v7.0 (chr-ID scaffold_1; pos 3458191 to 3458736 reverse strand)
cctaatttcaggttttgggttttccttctttcactgtaagtatgagcaattatttttaatgtacctatatatatatatatatatatatacacatcgacatacacatatacttgttgaggagcctctcgaattcccaatcctaaacactcttcttcaattattcgttcgatttgtgctattagcgatttcggagctctcttcttctgtctttgaatttgtacgcactttcttttattgtatacgtatatcgatcggtatagagattctgttatagcatgtgtttgtagagctcttaggctcagtgattgatcatgtgtgtgcaactctctttcgttttggtctctctctttactctccttagcttattgtttcgtttagagattgaatgtgttcgttgaattgggggattttgctagaaattttggattttgggattgtaatttggttgatcgtctcactcaatttagtttttttccccttagtgagtgctcaatttgtgattttagtttgaaagatctagtgttttaacaatgcaggttaattttg

SEQ ID NO: 40994 - DNA, 646 bp, Arabidopsis lyrata
  Intron number 1 from transcript 891423 (locus 891423) deri ved from phytozome v7.0 (chr-ID scaffold_7; pos 20968307 t o 20968952)
gtgttgtggcgcaacagaaggaaagtgaaatatttgtaatcttcttgttagcttttttaaactcaacgtgtaattactttgagtatatttataaatctcaaattggttttaaaaatccctatttatgtgtgtcaatattctcacgattcacaccaataaaaatccctagacgacttttggcattcctctcttatattcaaacaaaccacagcagacgctctctcttctcacttctcaaacttctcaagttttattctaaggtaattcattcttcctttgtttattctctttgacattttgctatgtttttctcaagtctgtttcaattttgtttagttctcatgttctgttttaatttcttttagattagtgactttgttttgttctcatgttttgtttaacgatttcgtgattttttcaaagccatcactgttcagatttgtttgctttttacaattaacatattgttggatcgactaaataaaaatccaacacgtcgtgtgcttatgctatcatattagtctgaatcatgttttcataatttgtcaatcgatatgagtacgtaaaacaaaatactcacgtccaaaaatgtcttacttctgtttttttagataagtgacaccatagctgatcatccaagccaaga

SEQ ID NO: 40995 - DNA, 886 bp, Arabidopsis lyrata
  Intron number 2 from transcript 316871 (locus 316871) deri ved from phytozome v7.0 (chr-ID scaffold_2; pos 18841213 t o 18842098 reverse strand)
ttcttggtcttcgtgtttcaccttcccatcggttagtaatttcctttttttcattctactagatccattaatttttacataaaagtataattactcatgatttgtaattgtatgtcttacggactacattaatttgttgacaaaaaaacaaatatgtattttacattaacttcattaattggcaaacaaattatagaagtcaaaagtcactctcatgcttttccacaataatcatggacgagcaatttaccattaccgttatctaatgatcataaacgtgacaaggacaaatttgttcacaagtttttttcgctatttgttttcttgaagtcattgtttttacaaaatacaagatgcaaaatttacgtgtccattccatgtttacccgtttccttatctaccttccacatatatagtcacatcactcacatagatatatgataaataatttttctattcatgatttcgaaatagaaatttcttagtactagaagagatatacttttacataaaactcacttaacttaaaaagcattaacatcatttaaaaatattcattttgctatagattataatatatgacaatatatgttctgctattacaaaattcgattcaattccacatattaaataaactctaaagataaagttgatgatagattcagttaggtattattcaaaagaaagaagttgcccttagtcgacacttgtatccacccaattaatccttcctctcacataattaatctcaaaataaactaatctcttttctacaaatcagacttaattttaaagtataataggtcaagcactaatccttaattaatttttgaatttgatttcttgagcaggaacttaggcataggaacgaaattggtgcaagcac

SEQ ID NO: 40996 - DNA, 449 bp, Arabidopsis lyrata
  Intron number 2 from transcript 944205 (locus 944205) deri ved from phytozome v7.0 (chr-ID scaffold_7; pos 1714313 to 1714761 reverse strand)
ccacttagttccaatatcgtacttcgcacagcgtgagtttttttttcttctttagttgtaaggtgaagaaagctatcaatggaatattattggaggaatgatttgattgggtaggtgatttatgatgtttatgatctgattgagtgattctcattcacatgtgaagcaatgcggtagggagggagttttttttttggtcatgattattaacttagccgagtggacaagagggttctacaacttgttgggatactttagggtatcttttgaactagagtcaatctaatgttggggaatcttggattctttttgttttagccgagtttttgggttcttttgttatagctgtagatgactcaaggattcggttataaaggacacgtttgcggtatgtctgaatcttgtttcttgcagctgctccattggcatcgggttgcctgtgtactcta

SEQ ID NO: 40997 - DNA, 362 bp, Arabidopsis lyrata
  Intron number 1 from transcript 940653 (locus 940653) deri ved from phytozome v7.0 (chr-ID scaffold_6; pos 4753325 to 4753686)
gctctgttttctaccggaggcagataccgagccaggtctggttcttttaatcctcttctgttacatggataccaattacatattgtatgagaaattggagctcttggtttcattagaagtctttttggcatactgcctcgatagcctttttggatgtggtgtagtcattccttttgaaatatataactgttcattgagtgattattttacactgagtgttagacaatgtaactcttgaatcaaacttggtttcttaagtagtcttttgttcaagcagtttttctgatcatttctaagctagttggttatgtacttgatttgattgtaatttggatcatctgcattattgtgcaggttgcaga

SEQ ID NO: 40998 - DNA, 333 bp, Arabidopsis lyrata
  Intron number 2 from transcript 914795 (locus 914795) deri ved from phytozome v7.0 (chr-ID scaffold_1; pos 30509686 t o 30510018 reverse strand)
tggaaagagaggaagaagacgaggaagttctaaatgtacgtggaattaaaagagaagatcatgttggacgaccaaagaaaaaaaaagtcggaccccacggtcgatatttgaatgcttttgaaataaaaaaaaacggggtacatcaaagagaaaattatcgtttcaggtatttgataaataattcttcttttctgtttatgtccaatttccaccaaaacgtgacttcgtcaatatatgtatgtatattaattacaagataaaatcaataaatatttcaggattcaacttttgctaccagcaaaccgacattacagacagagccattttactcac

SEQ ID NO: 40999 - DNA, 619 bp, Arabidopsis lyrata
  Intron number 1 from transcript 343263 (locus 343263) deri ved from phytozome v7.0 (chr-ID scaffold_3; pos 21135009 t o 21135627 reverse strand)
aacagaagaagtattataaaacaaaaacaaaaggagtaagatttgattttttaataggtaatatctaaatgattttatatagcaattatatacacttgttgcgtaaattaaatatcttaatgaacttttctattaatggtaccaattttattgataccaaatgatttactcggatttttagattcattggctttcaaatctttatgagtttaattgaaggagcggatggttttttttgtctatatccagcaaacttaataaaatcacccaatacggtgaaacaaaatatcaccttcaaaccagatatagataatgttataatatacttagaatatagtttttagagcatcttcaatgctcatgtttatatttattatctattttagagaaattctattttagaggaaattttactccgatgtatttctctaaaatagagtttcatctaaggagagacataattggatcatacgagatacaaaaagtcaggaatcaaaccggtttctaatcataagaaacgtgactgggccttagattccgataaaagcccattaatgaaggcccaatttctgttctttgattaggaaaccggtttgattcctggaagaggaaaaaccga

SEQ ID NO: 41000 - DNA, 264 bp, Arabidopsis lyrata
  Intron number 1 from transcript 359368 (locus 359368) deri ved from phytozome v7.0 (chr-ID scaffold_159; pos 1140 to 1403 reverse strand)
ctattaagaccaggtaatctgtgtatgcgcatttcagtgtttgatctgctagattttgagctgaattctggtcgtttctttatagtattgtagcttatatattgatgaatcctatataaactattctatggtgggattcgcaagaacaaaatttgtttttgtttcttcgctcattagtagtataaattagtttgatcctcatttgtgttatttttttcttacactgcaggaattatattccatacagatataaaatcatctcgt

SEQ ID NO: 41001 - DNA, 536 bp, Arabidopsis lyrata
  Intron number 1 from transcript 923946 (locus 923946) deri ved from phytozome v7.0 (chr-ID scaffold_1; pos 28823496 t o 28824031)
ataggaaagttcgtaaggtgttattgaagggccaggtacgtaaatatttataaaagtttagattatatattatagtgacaattataaactatcaaatgataagaaacttttttttatctactttatctctatagtcaaatttagttcgactgaaaaataaattgcatgattttaaaaatgtactaattaaggtttgattttattcatagataattaaaaaaaaaataactcaacatttcacgaattttggtattaattcggttttcaacacatgatctctcgggttatatatgcataaaaatcacaattcattattaattttgtgtagcttacttaagagttaaatcatactagtattatctttgacatacgatttactcggtgaaaaagagtattgattaattgttggtccacaattagaacattaactctttaaattaaatacgtacccaaaacatttgttttactaggaaaagtttagaatagatgtaacagctttatattgaacggtatcaaaacaggtacacgtggagcac

SEQ ID NO: 41002 - DNA, 488 bp, Arabidopsis lyrata
  Intron number 2 from transcript 487104 (locus 487104) deri ved from phytozome v7.0 (chr-ID scaffold_6; pos 952219 to 952706)
gttgcagagatttagtaagtgaaaggtcagtttcttcaacttttgatctaacttcttcttcttcctttaaaccatttattttctcagatctaggtcgattttattctcgattcatagccaaaaaaaaaactccttctttgagttcattactaaatctccaagttggtctctttgttttttagttctgattgtgataatgactttagttactgtgtctaatttaggaaaaaatgattggagaaattttggagtagcaacaacatttttgttaattctttagaagtcacattttcgtctttgttgaaaagtctctgttgtttaattttcccgtcaaatgcccagagaggtctcccaagatttacgcaactaaaataaattgattttttttggagtgttaattaagtcattttggagtatttgatttgatttgttatggataagctttttgatttcttgataacgttttttcttggcaggtgtttttgaag

SEQ ID NO: 41003 - DNA, 881 bp, Arabidopsis lyrata
  Intron number 1 from transcript 925829 (locus 925829) deri ved from phytozome v7.0 (chr-ID scaffold_2; pos 11427436 t o 11428316 reverse strand)
ataacaaggtttgattgatataatctcttcttctttatgaatttcttgaaagtgttcttgatgatgagtaagtgatgatcattatatatatatatatatatatatatatatatatatatatatatatatatatgtttttttgtaacagttcattttacatgaagcttaacaaatatttaggagacatgaagctttgttacatatttatggaataaagaagagatttttctttatttcgagaaagatgaaacttaagatatttttggaaaggggataaaaaagagagatctttgagagatttgtcagattgttgatagaaaaaaaaagatgaattggttttagtgagttagacaaaaccttttgaaaaaacaattcaggttaatggttgaatttataagaccttttgacttgacttgattattcatgtttttgacaatctttggtttatgataaaagctgatgattttctgtgtatggggcagaacacgagttgtgcagaagctgattgagacattgagtacaaaggagtaaatcagtttggttaagtcagctcttaaacagggatttctctctttggttaaagaattaaatggaaaccatgtgatcccaagtttcttaaaatcttttggtcctaatgataacaaggtttgatttttatttcgagaaagatgaaacttaagctattttaggaaatgagaaaaaaaaaaaaaatctttgagagatttgtcagattgttgacagaaaaaaagatgacttggttttactgatttagacaaaactttttgaagaaacaattcaggttaatggttgaatttataagaccttttgacttgacttgatgattcatgtttttagcaatctttggtttatgataaaagctg

SEQ ID NO: 41004 - DNA, 402 bp, Arabidopsis lyrata
  Intron number 4 from transcript 476826 (locus 476826) deri ved from phytozome v7.0 (chr-ID scaffold_2; pos 17282878 t o 17283279 reverse strand)
gcactgccgttttctccacttctctgcagcagattgtaagtattcatcacaccatccctttgcttatgttagatctggagtttctttcatctttttacattctttgaaacacaaaggctcaaactttatatagatcagtggtatcttgaggaccttttgtctctttgatttcgatttatgtctgatctgtatgttaagcctcccagatctgaattcaaaggctatgtttgttatcatccgtaaaactgggcgtacacatttctgttgtgcttgctggaatcctgaaaaggtctctggcaagttcttagatactatgttgtgtcaagtgtttgttctgatgaattttcctttcttcttttggttacagtctataggctctctgcagaaaaaatactcagtagg

SEQ ID NO: 41005 - DNA, 266 bp, Arabidopsis lyrata
  Intron number 3 from transcript 919404 (locus 919404) deri ved from phytozome v7.0 (chr-ID scaffold_1; pos 2494095 to 2494360 reverse strand)
aagtaagcattgcattattttctatggctccaatggtttggcactatttatagattttcatatgaaaataagtattctgctaacttcataatttttttatctttgaatcaagaaactaacccagttagcatgattagatatatcagtaaatcttttcggagcttggatataatggattatggttatatcttttcaacgtttaatatggacttcgttttgttagcatgatgtatttttgaattcttccggttttgacttcttgcagt

SEQ ID NO: 41006 - DNA, 606 bp, Arabidopsis lyrata
  Intron number 2 from transcript 926966 (locus 926966) deri ved from phytozome v7.0 (chr-ID scaffold_2; pos 16885937 t o 16886542)
tacgttatcacgttttgcccaactcctaacaccaggtgataattccatttatacccttttgttactattaccatgctttgattagggagggtagtttcgttaatatacaacggatctatcttcttcactgtcgcactaaattagcatgaaatcatgaattgtagtttatgactatggtttggtgagagaaaacgctattgagggtatttttgtcaattacagcagacaacatatttactaaccattaattacctttttttgcttaccttgtaatcgaagtaactcctagaaataattactgtaggattttgctttatgctgcaaaaagaaatgtgtgtttattacgatttttctcttttcttgccaaatttttgatagtcccaattttatcctcgagtagagatagatttattgggatgtgcatctttaacggctcattgagatattttcctcattatcatctctaatctgtttgacaaaaaaaaaaaaaaaaatcatctctaatctagaggagacgcgtggcagaaacttgtacacattacttaacggctatgatttttttgttttgtagtcagaaatcatctcaagatcagagctcagatccga

SEQ ID NO: 41007 - DNA, 440 bp, Arabidopsis lyrata
  Intron number 1 from transcript 323917 (locus 323917) deri ved from phytozome v7.0 (chr-ID scaffold_5; pos 16735622 t o 16736061 reverse strand)
agagagaatcctcttttgggtccttcctctctcacgtaagcaagcttctactttgtttcaaataaaggtctgatctatactgagtcaagtgaagcacaaatatccgaactttgttagtatttcaaggaaaaattctaaatttcttcagttttggaacaagtagctgattggttttaatgttggttaacgatgtagtatatattagggatactattatcccacattggaaaggacaagagatcttgactagtatataagatatatgggtcactccactcattgccaattggttttgagttggaagcccatattctaatagtataataggtgtagagtaaagagattgtgtgtgtttcttctctccacttccttgaattgtcctgatgtctagattttgagattgatttttggttacttttacttgcaacaggttacaaaca

SEQ ID NO: 41008 - DNA, 352 bp, Arabidopsis lyrata
  Intron number 1 from transcript 944778 (locus 944778) deri ved from phytozome v7.0 (chr-ID scaffold_7; pos 4083148 to 4083499)
ctcctccgcatcaggtattatcttatttcgttaataaatcactatccagaccttaaagcctgaatctttcagctggaatccgatgtttttgctagtcttagatttttcgaatttgtgtaattgttatctacgaaaggaagtattcgataattcagttgttctgttgatgagggagacattaacaaagacaagaatcactgtatttgaatcaatttgttcatcaagaatttgactttatttcttcaagattcaagcacatggaaagaagagaagagagctgatgagtttttttttttcactttaaaactataatgcagccagcgactgaattcaaatcgttctctgtcgagga

SEQ ID NO: 41009 - DNA, 442 bp, Arabidopsis lyrata
  Intron number 4 from transcript 484544 (locus 484544) deri ved from phytozome v7.0 (chr-ID scaffold_5; pos 3905692 to 3906133)
tttgtggacaggtttgattatttttacacaactgaaaattatagtattatttttcttattgaaatttctctttttgaaatcgtttttctgcaaaattcgttatgccctctgaaaaaaattgtaaatttttgaagaaatttaatcgctagagcttttttggggtttataattcaccgaaaaagattcaaaatttcataaacattattgacgataaattatgaaagctcttttcttttgtctaaaagaaatgatttttaattggtcagattgttttctgttgcttgaaaaaatctttgaatttttcctacactaatatataaagtaacaatttttaaaattgattttatctttcttgatgttattgttaaattgtttcatctcttatgaattgttttttaattttgcagggatcaaaagcagcaaaaacaatctcaaggcttaa

SEQ ID NO: 41010 - DNA, 737 bp, Arabidopsis lyrata
  Intron number 2 from transcript 922300 (locus 922300) deri ved from phytozome v7.0 (chr-ID scaffold_1; pos 14675462 t o 14676198 reverse strand)
tcgtttttgctgtcttcaccgctctgattcaggtacatactctaatatcttcgaattatggcttcctagatctgcgattctcgagtcattgtttacgaaactttcgatttatcatggatctgttgtttttttcacgcgtcaatggtttatgaaatttggtagaataggtaatcgatttagatcttaaaatctgctttacgaacctttaacttcaaattgcaatgtagtttcatagcattaatgtgcaaatgggtttgctctgttacgcatctgtgtattttttttctgtgtgtttgttaaggaaatgaggtaatgaagctttcctgttttttgtttcttgacttacttaagcttcatggataagtaatttgatttctcggttactcatagtagcatttcagttgaatgccaaaaggctaagcatctggccagtgagttttgatctctagagctctgccttgatttttcgccgaataggtagcttatacttgtgtgaaatggtaaatgtttctgtttgtttcgatgtcgtattcaagaaaaatctctccgcttcaatcatctgtggaaatgagacatttcttgttctttttttcttgacttatttcagtactaaataaattcatgatggataagtaatttaacttccctgttgctcatgagcagcatttcagtaaatggccagtgaggtttaatctctcgagttttttcttgatttttcactgaattaggtggcttat

SEQ ID NO: 41011 - DNA, 580 bp, Arabidopsis lyrata
  Intron number 3 from transcript 948246 (locus 948246) deri ved from phytozome v7.0 (chr-ID scaffold_8; pos 648522 to 649101)
gagaggtttgtttgttacattacaagtgatatatatgttggaaattatgttaggttccatctctttcttgagtagtctttgactttgtttgttccgaacccctctttattctcaccacctcctctctttcccaattttttcataaaccaattttagtgattcattaggaaggaaataaaaaggtggggaagaaagagcaacatttgcagaagaaaaatgactctactctgctgggtctggacagaaagcacctaatcttgtccgaatgataagtgagaaaaatcatgtacaaaatatgttttttcgtgactgaaacgatgataaaataggccatgttgatatgcagctctatggactcccaaatgaaaaagaggctgtttatggacctttgaaacagatgggtaggttggacggcatattttcccattattgttgcagctaaggttttgcaaatctttaagtgaagccagtggcatcgtgtgattcaagtaaagtaacatgacttcttattttcaagtgtaagttttgctaaatatgacgtcatgagttgataagtttagtgacaaatataggtggctaa

SEQ ID NO: 41012 - DNA, 816 bp, Arabidopsis lyrata
  Intron number 1 from transcript 325337 (locus 325337) deri ved from phytozome v7.0 (chr-ID scaffold_6; pos 2776336 to 2777151)
cttgagaggtccaaatacataggtaaaatcttattatcatatataatatgttattgattttttgtttgtgatttcatttagatttttttttctattatttttttagcatgaaatacaatgtttgtagaaacaactagcatatttaaaaacaaaatttgttgaaatttaacaattattcttctaagtcatccggattcgaattctatttacatgtgcacatccacaattttgattgaggtattcttgttttgatgactttgaaacgaacagtttgattgataaaaaattctactaacaaatatgccatgtaaagtttcttttctttttgtcaaactatactgtatactatgtaaaaaaattgagagataattgaacaatgttttatttagaaaatagaacatagtgttgaattaaaaagaaattatttgtagatcgtgtttgcatacgcatgtgatttttcttagtttaaaaatagctgatattcttcaaatcgacttatgagtaatcaaccaattagcctttcaatcacaagaatttgtaaacacgtcaatgaaaatgttgtgataataaagaatatgctttacttatgctatgaacttttctcaaaatttgtaaaatatttcatagctaatgtggaaaacttatgtttcgtatataagccctccatacaaaacataagtagaacttatgaaaactaattttttttaaaggttaaaccaataaaaaaaaaaaaattcttagtacttgcaatatttttcacattatatttaagtttattaactttatttgggttaaatgattttagatccatcggtt

SEQ ID NO: 41013 - DNA, 507 bp, Arabidopsis lyrata; identical to SEQ ID NO: 38252
  Intron number 2 from transcript 922221 (locus 922221) deri ved from phytozome v7.0 (chr-ID scaffold_1; pos 14256757 t o 14257263 reverse strand)

SEQ ID NO: 41014 - DNA, 569 bp, Arabidopsis lyrata
  Intron number 2 from transcript 484528 (locus 484528) deri ved from phytozome v7.0 (chr-ID scaffold_5; pos 3722726 to 3723294 reverse strand)
tttcattggattgctatttctgggtttcatcaaaggtatgaactttagcgtgaatctttacttcaattattaacatttgtttctacttttggtacttagatttgatgatggtcctcttttaagaaccagacacttttgattgctttattgggtgtcactaaaggtctaaacttttgatgaatttttacttctttaagcccaatttttcattttattctgacagactttattaggttttttcttttggtaagaacataactcaccagaagatttgacttcttgtttacatggatgttgacttttagttggttctttaattgttctccctaatgacttttctttcattggttaggcctctttcaattacattgactatgtggacactaaagagcaaattgagttcctgaaagttaaactcatgcattttgattttgtttagtcactgtttcatcttttagtattcttgtcactgaaacttataaacttgatttttaaagattcactggatttgttttctgatctgaaagactctttctttgttgcttaggtattgttttgtgcccacttgt

SEQ ID NO: 41015 - DNA, 363 bp, Arabidopsis lyrata
  Intron number 1 from transcript 484528 (locus 484528) deri ved from phytozome v7.0 (chr-ID scaffold_5; pos 3723401 to 3723763 reverse strand)
atccttctttggttcttcttcggacaaaaaggtcagtttttttgctttttggttctcgtgctttgattttttaatttgtttatcgagtagagaaacagtttcttaaccgcaaatctctctactcaaacccatgtgaggacttttaaagctgtatcagagaaagatttgtttttgtttgttaatagtgattttaaaagacttgtgtgttgcatagagcttcaaagttttcgtaaataagaataatctccagctcttctttacttatttttgagtttaattcaatcctctgcttccatgacttctgattgataaccaaagttgcgatttttataaatctcaggaaggtgttgactgattcttgag

SEQ ID NO: 41016 - DNA, 919 bp, Arabidopsis lyrata
  Intron number 1 from transcript 475859 (locus 475859) deri ved from phytozome v7.0 (chr-ID scaffold_2; pos 12602834 t o 12603752)
gttgattcagcttgtcagtgaagaaatcgatcctggtaattcgagtttccttttttagcttttgataaatcagtttgttactattttgagctagagaacaaagctaaacacttagatttttgaattacagtttccaatttgttcgtttcttctttggattttattgtcttagaattagcttttgattcttgctagcatttcttgttttcttgaatctttgttgattaccttttcttttttttggttaggctttaagatgacagctattttactagtgcataattaattgataattcaaatggttacagatttgattaattaaagacccatcggccaatcgtaattctaattatatccctcctttgctatcaatgaccattcttgcttgaacaagttggtcattctaaagactgtatatttcatttctatataatatattactaccaaatgataaaccgaatctttcttcttccttgctagatctgagattagacatagcttgcttaccttacaccaatttttgcacattattgttttcattcatttatgaggcacatcgtcaaaattatcaatccgtttttattttcttgctagtattctcggtaattggcccatagttttgagtactttgtaacacaattattaaatcaaatttaatgcgtggggtctctagtatatacttattgagaatttgagtcttaaagaatgtaataaaaaagactcttgacttttcataatttcatcgtctcttttttggtgagatcttaattccacgtcaccgaatgtacttcatgtatatttttttcttaccactttttttagttaagaagtaatgttacgtagagattagatatgtatatgaatagcttcttgttattttgcagacactggtaaaggtcggaggagtttagaaactccg

SEQ ID NO: 41017 - DNA, 531 bp, Arabidopsis lyrata
  Intron number 1 from transcript 477742 (locus 477742) deri ved from phytozome v7.0 (chr-ID scaffold_3; pos 1636910 to 1637440 reverse strand)
aaggagaaggtcgtaaaaccaccagccaagtaagaaccttaatttcaatctctatttcaactaataatattttgtcttctagtggattcggaaaaattagctaggttatactagacggtaatgatttagagatggatatgcatgctttaacacgattactagctaggttagggaactcgattggaataattatgctaatacttctcctaagatctttgattttttattgtttttatttggttttgctccatgttttcaacagccttacatagttaggtttgagggttctgtttgatttattttttttgtcgggaagaactaagaaaaatacaaaacataaggaatctttctttatttaccaaaaagattaaagattaattaaaatttttggacaactacagccaccgaacatccgacacgtgtagaacaactagatcattttcaaacttttttttctcttacaaacaaattaattagttttattgaaaaaaataaaagatctttacggaatttcagggcacaagttgtggg

SEQ ID NO: 41018 - DNA, 531 bp, Arabidopsis lyrata
  Intron number 1 from transcript 315473 (locus 315473) deri ved from phytozome v7.0 (chr-ID scaffold_2; pos 8101655 to 8102185)
gtttctctgccgatttgagtagaaatttccctaaggtatatacttatgaaatgagtttttgtttgaacttgaactgatagtgagaattgagaaagaagatgaactcaatttcatgtattgattctgttatctatgtgagaggacttttgattgttgctattgagattgttgctgatgtcacatatcaaatggagcaaaattggaactagccatttgaatcctacatattggaggacatgtcttttgaaaaggctcgttcttttcgaagtaaagagatatccatttagttcatttttcgtcatttgttttcgatttagatgctcaggttgattaggatggtgaatcattcctgggcaatttagttggttttatagagttatctattttgtgttatgtgaatgacaagagttgaccattgatatgatttggttgtattgtacctacatgactctttctttgctttgtgctgatttttcccctttgtttttgcttacagtacaggaagcaattcagtgctttcttgaatacacc

SEQ ID NO: 41019 - DNA, 595 bp, Arabidopsis lyrata
  Intron number 1 from transcript 494088 (locus 494088) deri ved from phytozome v7.0 (chr-ID scaffold_7; pos 23566352 t o 23566946)
ggattcacgatcttcttcctccattctttttccaggtaaaccaagaacacaatttagatcatatacatatgcttagatttgtacaattaggacatgtatatattgttcttctaatattagagtttttatctaaacaaactagaaattaaagctcatttcttggagaattttgaagagctgaatttttcaatttcttgtttgattaaagatttgacagaactacaaaatagggtggatttgagaaagtttgatgttgcagattaatcaaattcataagtttttgtctacgtgtccaaaaatcctggagagtccaatcttaagagttttcagaggcgagttttgagatgttccttttgatgtgaacaattatgttatttgaacactttgaaccacctgatattggagatcatgtttttgttcagtttctgagtgtaatgaattcttgaattgtcaaatttgatttccaatctaggagttccttttgttgtcttaaattgaagatcaagtatgtcttgtttttgttcattttatgagtttaatgaattctttaatttgatttctgagttgtgactgaaattggttaggaacactcata

SEQ ID NO: 41020 - DNA, 386 bp, Arabidopsis lyrata
  Intron number 1 from transcript 477508 (locus 477508) deri ved from phytozome v7.0 (chr-ID scaffold_3; pos 708520 to 708905)
ggtttggggtctctttcccgttgatcctctttcaggtctttttctccattagaactcgattggatttgcaagtgaaccactttgattgtctcctgttcaatttttttcttcattacgagaattttgctccatcattaattgcaattctcaactatgttatcaacttggaatcgtgaaatttgttatcaaattttgttttttagttgttttctacctttttaacaagtgttttctgaggaatgtgtaagaaaaaccccaaatttcttatgggtttatgctagaggagctttttacgaatctctagttttgttaccttaattggctgtaaaatggtttgaatctgtgtctcaggtgaagataaatactacatcttttcaaagggtatt

SEQ ID NO: 41021 - DNA, 505 bp, Arabidopsis lyrata
  Intron number 2 from transcript 487685 (locus 487685) deri ved from phytozome v7.0 (chr-ID scaffold_6; pos 3333407 to 3333911)
ccggaggaatcttagaggaaaccggtcggcatctggtacttcttcttttttctttctaaatgtttttatttttattgttcaaaacattattgaaaaaataggatatgttttttaccgtgttagttcatcatatcaaaaaaattgtttgtcgaaattggtcttatcgattgagcattcatataaagaatccaagttcgaaatttccaaaagtaaaactgataattgatttgtactatgctttttgttaataagcacatgcatggttttcgatattgaaatttatctttggctaagtaaaaaaaaaaaaaaaactgaattggggtgcatgaagtccgccggccggagcagttcgaccaatagaactaacgaagagtatttaatgtagagtgactttgatagggtgcatgaaaaacttttgcctagctacgagacttgagtatttaattacccaaaaaaactctaataaatggggttgcatgcatgcatgaagggagagagattcagc

SEQ ID NO: 41022 - DNA, 722 bp, Arabidopsis lyrata
  Intron number 1 from transcript 493322 (locus 493322) deri ved from phytozome v7.0 (chr-ID scaffold_7; pos 12761187 t o 12761908 reverse strand)
acaaccgccaaagcctcttacttgtctgcttttgtgtaagcctctctcttttctttctccttttcacaaacatgcatgttttgtctcagatttgggttgtttcgaacgccatttttgcgttgtggttgcgtttacacatgaaaaaaaaaaacataaagagaaatgtagaaatttattatttaaaaaaaatattatcattttctttgacaaaaaaacaaatttataataaaatacattttagaaacaatgcaaaactacaacataaaattaaacaatacaaaatatcaattttttgtatatatgtttaatttatattaaaatgctagattattgtgtgtatattttaaataataatatcttatagacagatcaactcgtatacaataactttaatacttagtaatcctatcatcataaatgtccaacaacaaactgtattacaacagtgaaattggtccatagcaaatctttctctgacctttcccaactattattttagcttataatttaatttacaacagttctagctggcatgacaagaaatgcatggtatgaatatatataaaaaaattaaaaaaaattagacattaattcatttttttttgtccaaagaaaatttattcatttatattttatagattgcatgaaattcaaaaataaagcaatatatgattacaaatattgtaggtacaacatttgtgcaaacgcgatagcttgcggtt

SEQ ID NO: 41023 - DNA, 866 bp, Arabidopsis lyrata
  Intron number 4 from transcript 493716 (locus 493716) deri ved from phytozome v7.0 (chr-ID scaffold_7; pos 20097679 t o 20098544 reverse strand)
ggaatcaggtgcgtttcgaatcgaattttttcagaggttttaagtttgtgagatttctagggtttttagatgaatctaggtttcgatttcgctatttacgcttggattttgatgggtttttcgaattttgggtgaaaaaaatctgaaccacattcattgtagccatttttaagctttgtttttctatgcttctgagaattatgaagatttttgatagcttcatagagataatttcttagtgacgcatgattgagagctgtttctaggtctctaatgtagatttctctttttgctgtttactcggtagcttgaaagctttttgggaagttctatgtttgagtttcataacaccaacagcttcttagtgtagggaatgttgtgttaacatttagctattctctgttcgtttttgtttatctcctcaagctgctgaatccagtaagtttgacaaagtttccttgagttcttagcttgttatatagtttcacctctggtttgtggatttccaattggagttaatgggttttttgttcttgtagcataggcttgagcttggtgtctctggtttgcatgttaatttctatgtgttggtggaaatcactatttgcacggatttttggtagctaggctgcatgtgtgtagaagatgattgcagaataaccattgacatttgtgatgcgtttatctgaatctcacatatgttaacacctccgtatctaccctttttttgttttagccataaaagtagccatccttgaagcaaaacatagcccagaagttggggaattgctcaaatctcggagaacttcttcggcattgagactttggtcattagaaaaattgaatgatacggatacacgacaggc

SEQ ID NO: 41024 - DNA, 572 bp, Arabidopsis lyrata
  Intron number 2 from transcript 471187 (locus 471187) deri ved from phytozome v7.0 (chr-ID scaffold_1; pos 4175410 to 4175981 reverse strand)
aatctctgaataaggtataatttttatttcctcttcttcttgctatatcattcttttttggaaaactacaatatttttagggttttctgtttctgggttatgatttttactttgaacttttgttaatctttccatgtacctagagatttgccttaaatcagtaccagttaagttacatatttatatggaactttgacttttgaaccaatcaatcaatctcttttgtatcccctgtttatcaggcaaataattcatagaaaatctaatttcttaggtaaaaatggttataattctcaatcaacctctctttagattttggtttattatatagatttagcatcatatctgtttttatgatccagcattgtctcgttttactcttctctgctttgtaagtctgtttggtattttgagttcgaaatgtatatagacaatgattcatgtttttgatttcagtatttgtgttagattatttgcttaagacagacaggtcaaatcttgatttgtctcttcttcttccttagctgcaggtgttagttagtactctaattcaacagagagagtcgaattac

SEQ ID NO: 41025 - DNA, 364 bp, Arabidopsis lyrata
  Intron number 2 from transcript 488427 (locus 488427) deri ved from phytozome v7.0 (chr-ID scaffold_6; pos 6451071 to 6451434)
acaagaagaaccaagtcttcttcaacaaagctcaggttttcatttttgccttcgtttttgttcatataggttttgaattgctgcaaaggttcttcctttttggtgaaaattgattgaattacatcaagggcaatcttaggaattattagtttggggcattttatcttggtttaagatttcaaatttagtgttttttttttttgtgatagattagtgtcatgattgtgtgagtgagaaatttgaagacaaatgatcccaaatccttcttagcaaatatgttctcttgtgtgaatccatatggatatacgtgtgagcaggctaaactaattgcttattgctttatggttaggttaacaatagggac

SEQ ID NO: 41026 - DNA, 418 bp, Arabidopsis lyrata
  Intron number 2 from transcript 941761 (locus 941761) deri ved from phytozome v7.0 (chr-ID scaffold_6; pos 9430420 to 9430837)
aatcctgcttttgttcctaacgcaagcacttggaggtatctttatatttttgataaaattttcaatttggaggttatctaccgaaataaaagtctttttttttttaataacaattaaagtcacttaatgatttagaagaaactgaaataacttaaaagaaacaagaacaagattcaatttaagattttggattaaatctacaattgagagttatttggctaggaaattattgaagaaattgtttatataatttaaatatacatgtgtctgatttctagacaaaaataaattcaaataagaaagctattgtcagatatttatatgttatagtttaattttgtatttaattatgagtttacctccgtcttgttttcatatcttggatcataatcttgtaatggcttttatatataagcaa

SEQ ID NO: 41027 - DNA, 290 bp, Arabidopsis lyrata
  Intron number 1 from transcript 481876 (locus 481876) deri ved from phytozome v7.0 (chr-ID scaffold_4; pos 13662798 t o 13663087)
ctcgaccagatcagattcacagcttcctcttccaggtttgattccttcttctccacgattcctctgttgatttcacgaatgtccatggaagtccaacagttttttgatcggattttctccgccaaaatttgttcttgagattatgtgcatggaatttggttttttttccttagattgtgcgtttagatgcaataatcggctctttgttgttcgtcaatttcgatgtttttgttaatccatggatcgtatcggaaacagtgattgattcatatcgtcgtttgtctccagct

SEQ ID NO: 41028 - DNA, 927 bp, Arabidopsis lyrata
  Intron number 1 from transcript 949776 (locus 949776) deri ved from phytozome v7.0 (chr-ID scaffold_8; pos 15005810 t o 15006736 reverse strand)
gccgaaccaaagaggtaacgaaaatttatcgtttttgattgcttttattttagtgaatctttgatgatggtcacaaaagatctctctttgattttagttttggattttgtagaaccaaacataggctagggtttcttacagtgtgttttgggatatgttcttaatctgggtgaaggattgaggaaagtgatatgcttttgatatcaattggttctttcggttaaaccctttttgattgttaccattactcagaaaatttgagagatttaggagatttttgctttatagattttaggatactttagctcaatgatcatgacagaggtagatactgattcctgcttcatcttctttaaaggtttgtcgttttgagtggtcacttatgccattgtgttcatttctttggaaagttagcagattggattgattagcctgaaccctgaagtatgtttctcttttttggaattttctttcgcttgtgtctatagtttcctctattagagttgtgaatgcttgctgcatcagaacggtccttcaatgtgtttataagatcaattctgaagtcaatgggctgtgttaattttgtggagggatgtatattcatagatatgaagttctaagccttatatggcggtcttttatgaaggaagtgtaaagcagatctttctctactacacccattgaaaaaggaaatggaagagggaggtctaattgtgttaatgttcatggattttcatattccagcagaatttttaataactgtaagattctgtgaacgatattgtctttaggttaaggcgtagatattgactttcttatgtaaagagaggtgaccctcgtgtataatctagtatagtttctcatgggattagcctcttttgtgaaacattaaggatgtttgtttttttatggcagggggcgtgttca

SEQ ID NO: 41029 - DNA, 678 bp, Arabidopsis lyrata
  Intron number 1 from transcript 950420 (locus 950420) deri ved from phytozome v7.0 (chr-ID scaffold_8; pos 18054096 t o 18054773)
caagcccaagaagatatttttaagcaacaggtacgttatacttgcatatcgttatctggatttggtctttcaatccagtttcatgtttggttttggctcagatttttgtttttatttttctcttctttggttgaaagtaaccaaactaaaaaggcaaatctagtatcaatggatcagctttgaatgatccattctatttattaatgtaatttgaaagatttagaattatgttttgttttgagtctagctaatttccttttttagtttaaatcagctttagctttttggtttttgaaaaggatgatcagatttaatgagtttttgaatcggttttcttttactttagtttagattcgtggaccgattcaggttataatccatagcaaatacctttaaattgaaaataatggtattgatataaatacttaacttagatttatatttgagtttatgtttcttatcctttctggtccaattaagattatcttcattaaaacgtaaaataattttaaaaagtatcggattagtttttcattccttttttcagcttggtttggattggaccaattcggttttttcacatcgaacataacattttgaacttgtgaagataaccatggatataacaaagtgataatcgcaggtacgagagctacatagagtatataatacacagaa

SEQ ID NO: 41030 - DNA, 574 bp, Arabidopsis lyrata
  Intron number 4 from transcript 915734 (locus 915734) deri ved from phytozome v7.0 (chr-ID scaffold_8; pos 3169164 to 3169737 reverse strand)
tggtagggctattgctattaagatttttagtaatagtattttgcctctttgtactggtgttgttaccattgctcttgattgataaactaaacactcaattcttaatctcttaatgtgttaattgacccattagctttgttaaattcttccaaaatctcatctttagacatgagctttttgttgttatgtgtctccttgtgtcaattatttatatgtgtgttttggtaaaagttttgtctttttgattgctgttctaatcgcaatttggctaatctaatctatggattgtttgaattttgtgttgagtttgttgctcttgcctccaccacttccgtttcctagttgtttccttctttgtggaactataacttgttgtatacctctatatattctctataaatctctttgattaagtaataagaaacattatttataaatttgaccattagctatgttactttcatcttcatgagttgttttcactatgtgcatgtctcctttaatttggtcattgattcatatgtgtgttttggccacagttccgtctattcaattgcggttttctttgtctagg

SEQ ID NO: 41031 - DNA, 744 bp, Arabidopsis lyrata
  Intron number 1 from transcript 493420 (locus 493420) deri ved from phytozome v7.0 (chr-ID scaffold_7; pos 13658877 t o 13659620)
tcagatcggaactccaatttccaaatccagatttgaggttttttcttctccttcttctttataaccctatcattgttttggtcaaagttctgtgttgttttctttcttctaatgaatgttttgctgttttttgtgccaattctcaaagtttggttcccatctctgaattattttctgttttattgttagagaaattcagatttcataggtttgatgctaatgcaccaatttattcaattcattgttttttacaaaaaatattactttggttttgtgtttgaagtcaatgcagttagttcaaagacataacacaactgtaactggtttttagatttgtttgactttgacggttttaagttgtgaagtgttaattatgatcagttatctccaattcactacaaattctgtacttctttttgtttctgttctgtttcttaatattctttgaattggaatcggtaaccttaatcagtacaaaaaaaaatccacaattatatgcaaactatagttgttttaatttgatggtttagttgttcacatttcactgtgaagtgtcagttgtgattatgtttccctaattcactaaaagatctgtacttatttgttctgtcctgtttcttaagattctttaaattggaatctgtaaccttaattttagtacaaaaaagattcataattttttccctttttttgtgttgtctgaaaatgcaggattctccagtgttcaattacataaacagtttg

SEQ ID NO: 41032 - DNA, 520 bp, Arabidopsis lyrata
  Intron number 1 from transcript 474164 (locus 474164) deri ved from phytozome v7.0 (chr-ID scaffold_1; pos 26286235 t o 26286754)
tctctgaagacgagcttcaacttctctgcgaatacgtacgccttcttcttcttcctttcttcttttgcttgctttctctccaccgaagattcatgcatctacaaaacccaattcttcgcgtcctcttttgagtctctagagcttgctctgtggaactttactttgaatctggtctctctaccttactgtttcctttgtcattttggtttacggattttagggtttttttcaatagaggatttattgactttggtgtacggagatgggttcaatcaacttgctaattcgcttctaaattctaaggaatgagggataactttagctcttctttagccaatttatggatgcacaagtccacgctctcgcaaactgtttatttgaggatttattttagtaattttagtgttgaaacctgtagtagccgccttttcttttcatgacaatgatttgctaagatacactggtaatcacaagatgtttatactattgtaggtgaaagaaattcttattgaggaatcta

SEQ ID NO: 41033 - DNA, 521 bp, Arabidopsis lyrata
  Intron number 1 from transcript 909433 (locus 909433) deri ved from phytozome v7.0 (chr-ID scaffold_2; pos 17986339 t o 17986859)
gttactttgttttttgttgacggtgaagaaaagaggttcttacgatagcgctggagagagagagcagtgaaagccattgatgaaagatgtgcagtttacttagtacatgtgtacatatattattaacgttctatatatgtgtttacatttatacaaatattaataatgctctatatatgtatttacatgtatacaaaatgttaataacaccttatgtatcatgtaatatacatatctttttttttttttcgtctgaatgattccattatattatacgagggtagaatacggttttgaaatacaagaccgacaagagtcgaaactctttcggaaactaagccggcggaagacataaatatccccgggaaactaagcccaaaagagggaagcaaactataaacaaaaaggtacaagaaggtaaactcaaaaggaaccaaagaactaaatctgagactcgaaaccatcataacccgcaaacaatcccagagaaacggttggcgtcggagttgaaaccaagaaac

SEQ ID NO: 41034 - DNA, 664 bp, Arabidopsis lyrata
  Intron number 3 from transcript 932366 (locus 932366) deri ved from phytozome v7.0 (chr-ID scaffold_4; pos 1994290 to 1994953)
tgttctcaggctttttttaccaaacaattttcctggtacgcaatcttataacgttgagaacaatattaattacgacgttattaatcttcaaatgaagtttctaatatatatatatagtaaagcaagagaacagtttgggatatcctataaataatcattcgatcaaactgtagaggtggacaatccagtatacggtttggttcgggatttggttttttgttctgacataaagtgaaccatataaaaccatttgtaattcactatggtttgatgtagttaccgttcaattttgtttaaaagtaactttaaaattgcaagaaataataagttgttttagaaaattattaatttgattgtatctatttttggtaaaattttcattttaaagtgttaaaggtttaataattttggtttctttacatttgtttggtttgggtcagttatacaaaacgatggtttcagttcggtttctgttgtccagatcttacaataatgaaacagaacgatttataaacagcttggttcagtttcggtttggtgcttacgctaatggtgttttttctcaaccctaagaattggttcaagtctttttgtgtattgtttaactataagttaataacaacttgcagaatcgctagatatcccaagtgcagcgattcttctt

SEQ ID NO: 41035 - DNA, 790 bp, Arabidopsis lyrata
  Intron number 1 from transcript 482282 (locus 482282) deri ved from phytozome v7.0 (chr-ID scaffold_4; pos 15841413 t o 15842202)
aaccaaggtaatttcatccctaagaacacattctctcttgattgtttatgttctttcaagtttttttttttcactgtaatgtgattctcttctcttttatttggtctagctcttgcttaaatgttaatgatatcgcaaatgcgagatccatatcgtaaaccttaggttagtatttatttggctatttccgtgcttttggagtggtcttcttgatctttgactggcggcctttttgtttagggatggtttccatagagaaaatcttgtagttgctcaaaccgtttctcatgatttgtcagcactgacctggaactcgtttagcttactatttttgttgatgagcctataagaaacaatttggcttgcctttgtaatgtagctgataatttttttagcgtttgtgcacctatctgtggcaacggtttagtgcactaactgatagacaaaacaaacctgtaagcctgtttctcacttcaatttgggggtcgggaatctgaatttagcaaagaaccatgatgataatgtacttaatacaactttttcctttgaccggtctagaaacattaacgaaatccgtcgaaaaagcttgtcgaagtcagattaccgtcgacatctttttgatgttccatattggtagtccctctattataggtccaatagagtagttatcttctgtttaagaacttaccctcttacattattgtttgtccccttggcaattcaaaacaactatatatctcacgtctgccttcattttatgcttgcagcgaagttagcgatacagaggacg

SEQ ID NO: 41036 - DNA, 820 bp, Arabidopsis lyrata
  Intron number 1 from transcript 944202 (locus 944202) deri ved from phytozome v7.0 (chr-ID scaffold_7; pos 1694445 to 1695264 reverse strand)
actgggactcaaggaggtggtcaagagactactgcgtaagctctttcttctttcttatactctttggtaccatttgcattggtgcttaagtaaagtagttgaatttggagtacaagtattcgattgatattatcacagagtcacagtgtgaaataaatgcaaccttgaatttgatgtttataggtggttgctaaaacctgaaaggttcttgtggttaggactttgtctactactttagaggaaacttgtcagagattgctataattctggtgaatcttgcttgatgtttgagtgctttattaactacaccattcttcaatccaagggaagttttgtttcagaactcaattgaattggagtccattctgagtccaatctggtgaccattgaatagtaacctggtctctctttccagtatgatagtaaggggagatttttaagaaaatgtaaaatgaacttgattagattagattctcacttttctcagcaccgataatttgcatgtgtttaagctctgagatagatttgtcaatgtatctggactgtcatcatttgcacttacttagaggtcccttcaactgttttagtccccaagttctatggaattgactcccttattttgttttttcactcggtttatgtgatagtttggtccctttacacaaagcattgtagagaagcgtaacaatgcggaatcttaaagcttttgcggatttctccaagtgtgcaaatttggatatttttatcaacattctttccacattaagatctgaaaagtgaaaacacttgctgattccatttttgtgtgtgtttgttgcag

SEQ ID NO: 41037 - DNA, 306 bp, Arabidopsis lyrata
  Intron number 2 from transcript 912583 (locus 912583) deri ved from phytozome v7.0 (chr-ID scaffold_1; pos 12093829 t o 12094134 reverse strand)
ccacatttttcaaggactgtctcgtagaattgagggtatgtttttatcatgttaccttagagattttctattttaatgattctgtgtgactgaaaaattgcacaaatcaaatagattgcaaactcccaatatatatatttccctctccattatgacatttggtatctgtcttcttctatcttgagtttgttctataagcatcaatcaagggttaccagagaagcctagtgagatattaaaatttggttccttttggttgattaaattgcaggagctgaatacagcatcagattttattttgtttta

SEQ ID NO: 41038 - DNA, 986 bp, Arabidopsis lyrata
  Intron number 1 from transcript 903313 (locus 903313) deri ved from phytozome v7.0 (chr-ID scaffold_3; pos 1694610 to 1695595 reverse strand)
gtttgtacttgaagattcttgaattgtgtgaatcagtaagtcatgtttcaagttttcacatttcaattatttccttgctttggcctgttctctagccatcctagactgttgaaacattttcaaattataatagcatcatcatcttgttgtttagtgtttaggtagagttttcaacttgcttcagacaatactatctatagttgttgttcctgttcctaagaaaagctgtctgaataatgtttgttggattgttgagcttggccaaatactgttttaaaatcttctcctagaagctgttcttgtaacaagaacccgtgacatgagagagttttgcatagtcttatcatgattataaaagtgtacaacatagcactcttgcttgtaagaacatcaaagttttcttggattgtcaagtcagagaaagatgttttagagcaagccaagttactttatacgtcaattcaaacttttagatttggatatctcaatgggtggggggacctgaacacaaactgcatacagttttgcaaagaatctctgaaacagcttgccgtttgtttgatctcctgcactctttttggctcttattgtattgagggaatcttgaaaaggttaatgagaaaaggagagacatatagatgggtcctttagaatgcttcctatggctacaacaaaatttcttttgggtctatgtggaatcatcacatgtttgcctttctgtctggttctgtaataataatgccatgacaaatacagtagcatcactctcctagaccatgccatcggaaaccggttaagaccaatttttatggtcttttgttgttttggttgttttaccaagttttaggatttccatgtattaaatttggtatattatttgtaaaaatactaacggagcgaagcatagattttgttggtaaatgaagtacgcacttgtgtcccttaaacatcacagttttggttattcttgacgtttgcaggattat

SEQ ID NO: 41039 - DNA, 195 bp, Arabidopsis lyrata
  Intron number 1 from transcript 471317 (locus 471317) deri ved from phytozome v7.0 (chr-ID scaffold_1; pos 4734974 to 4735168)
cggaagatgtatgattggaattagaaaaaatctcctatgttattcaatatttataatgcttactcaaattattgatttgatatagttgtaaagtatttttattatttgtttcatggaagaatcactctttacattaaaagaaaagtgaagagagacatttcagaacgatttttatgaaggacaatttgtttctgt

SEQ ID NO: 41040 - DNA, 636 bp, Arabidopsis lyrata
  Intron number 1 from transcript 495661 (locus 495661) deri ved from phytozome v7.0 (chr-ID scaffold_8; pos 17158519 t o 17159154)
caaggtttctattttttgtttctttctcctcctgggtttttgtgggtttactcagttttgctccagattctatgtaatttcacgttgcgttgattattgtctctggattgattgcataacagtttagattcttgagttgatcctcgtagtgtttgattttggatcgtacgctcatattacggctttaagctttgatatttgtcttttggatggttattgtaaatttggagaatgattagtacttgatgattcctataatatagtttaggttttttttacactacttgtttttggacttgcattgtgttaattaaagaatggaattgtgtcataactaagatgagctaggtcccttcagtccttgtgggtctcttaaaaaaatataatccatagacaatgtgattgatttttatttactgatcatgtgaaaagccgttgtttgaaatcagatttgtgtggagaatttgactgtttgtgtattgaaactacctctttttgtttatcattgttttagctaaaggatttggttgctagatcttggcgtgtttcttgtctatttcactatcgtgctaactgctggtgtttgtctttggaactgcagattgaagaacttgctaagttgattcaaaaggtttt

SEQ ID NO: 41041 - DNA, 988 bp, Arabidopsis lyrata
  Intron number 3 from transcript 906144 (locus 906144) deri ved from phytozome v7.0 (chr-ID scaffold_3; pos 18711131 t o 18712118)
gttgcagctattcctgttcaagttcttctcactgggtatcgttcttgttctgtttctttgacattattatagcttcatacgcttgaaaggaaggtttttggttatctctgaaatatgtttcagaactaggagtaaatgcagtgttttcacgcccgacccgaaccgcccggtccgaccggttaacccacgacccggacactttttggtttgggtttagtgctaatatccgccaatttcaaaaccaaaaaaacccacaaaaacccgccattaacccgcgatccagtgaaccggttgaaccggttgggtatgggttttaaaaatatcatttgattttggaataaaatagactctattcagtcatttttagaattttttttagtttttagacacatttgatgtttttgatttaaatgaaacttcacagtgccgtctaaaaagaatgaatagaatggtgagagaaataaccgagattagttgttttgaattcgcgatgttttattagtttatttctgtcattcgcgatcttctactattttaatatttgttacggttttaaacttttaagttggatttaaaatttaatttgaatcactttattattattgttagacttcatattttgtaatatagtatgaatattttttatttttatacttataaaaactataaaatattaataaatattatatatattaaataaaattttaatcaattgacccgtggtcaaacccggttgacccagtgacccggtgacctagaaggtagtccggttcaccgtccgggtcgggtttaaaaacattgagtaaatgacattcataactgaagaggccagtgagagaaaagaattgagaggtcgtattatttgctagcttttacttattaaggggagtacaatactgctctctgaatgcattagcatagacaaaaaaactgtagaaacttagaaatctattttattgatcttcttccctttttttctctttagaat

SEQ ID NO: 41042 - DNA, 417 bp, Arabidopsis lyrata
  Intron number 3 from transcript 492039 (locus 492039) deri ved from phytozome v7.0 (chr-ID scaffold_7; pos 6176221 to 6176637)
aggaaattctctatcggtattggacagtgcggtgagttttcgatcattttgttcctgtttgttgcttattgaagatagggccatggtggtatttgtagttctgcaacttgttttatagtcacagaatgctgaaaacgttttgatatgaattcaaaagagagagttttgggttctgggaatcttttgatcaaattgttctgtcgatttgcttgtttagttaaatcacttgagctcttattatcactccgggataagagtatgagctcattcgatgtaatgttttgaaagttccaataggatcatacatggtattagcaaggaactgaaactgttaatggattatatagtagaatggaccttaactcgtttccttgcttcttctacttgcagtaacagcggttcttctgacgtttttga

SEQ ID NO: 41043 - DNA, 567 bp, Arabidopsis lyrata
  Intron number 1 from transcript 482416 (locus 482416) deri ved from phytozome v7.0 (chr-ID scaffold_4; pos 16360093 t o 16360659)
ctttgccttcaaaggaagatattgattccattaaggtacaatccgcaaacttataaatattatttccaatattttagtgtcacctgagttcatgatcctctagaccaagactagctaggcgtgttgaaccaattcaaacggccggattattcggttttgtttttcttattacccaaaaatttaagttataaaaatctaatataaaaaaattgaaaccaaaactacatttatttaattatgtagacttcctctaatctcagttcggtcttatcttcatactaaagtgaaattatgaaaatatgatgtaagcttttacaatttcgacgcggtgatgtaagcttttacaatttcgacgcggtcggatgtaagatgtttacaaattataaaaataaactcaaaatgttttttcaaaacaaaaaatttgacaccaataccatattcaagttaaaatctcataggatgcatggaaatgtagcgtgctatatatacccataacatcaaatcataaatttaaataaataaaataaaaaaactaactcaatgaatttaaaattgtgggaaatatag

SEQ ID NO: 41044 - DNA, 278 bp, Arabidopsis lyrata
  Intron number 3 from transcript 471723 (locus 471723) deri ved from phytozome v7.0 (chr-ID scaffold_1; pos 6456681 to 6456958)
tctgctggcggaaacaggtactgtatactctctttactgtgtttgtgacttcgaaatctgtctcaaattgtattcagaggagagataattgactcaaaggtggagttattgacctcttattatcttgaaattttatcaaccatgaggggtttgagtacctgcattgggggttagttcatactatagggaatattaattttttttcctgaatatagctcttctctctatattctatctgtcgattgatataattctctatcttttgctttcgtaggcga

SEQ ID NO: 41045 - DNA, 311 bp, Arabidopsis lyrata
  Intron number 1 from transcript 478564 (locus 478564) deri ved from phytozome v7.0 (chr-ID scaffold_3; pos 4885576 to 4885886 reverse strand)
acttctgttcaggtaacatccactttatgatatgatacatgcttgcttaacaaattgctatagtaatctaatatatttcttatcatgataaactaagcctttgattttatttgtttctccgtttctaatggcgtgtaaagcaagcatgtgattaaaattttctctttccgtatgtgttttgttgagccgtacgtttgtgttttgagaagaaatttagtttgtgcttggcgtaaatataaatatagtattctttgcgaataaaagcctagttaagagttaagacgtgactaatacaaaatattgcagtcggg

SEQ ID NO: 41046 - DNA, 254 bp, Arabidopsis lyrata
  Intron number 2 from transcript 490014 (locus 490014) deri ved from phytozome v7.0 (chr-ID scaffold_6; pos 21671827 t o 21672080 reverse strand)
cttattgccccttaaagcttctactgatcaatcaggtctcgactttgatttccctctttaaagtttcatttttttttgaagattgtgtgaaaaaaaaaagttttgattttgcctctgatctttgtttgtgaacaaaattggtctgaaaaagttttgatctttttttaatcttatcatagaagataattaggttaaaatctttttatgacttgtcttcaggtcaggttggtggggaagaagttgatagcaagatt

SEQ ID NO: 41047 - DNA, 731 bp, Arabidopsis lyrata
  Intron number 4 from transcript 320885 (locus 320885) deri ved from phytozome v7.0 (chr-ID scaffold_4; pos 14834463 t o 14835193)
gatactcctggccacacaaaaggttgtttataattctcatatcaacttttgaagctttgaatgttattttattccctgcatgttcttgcattccaattaagcctttgcttagctaaaaactcccactttcaagtagttcgagattcgattatttcagcctatgtttagtgtcttcattatatctaaataacgtatgagattaagctgagactgtagatttggtttagtaagggtggatttccatacagattagagactgtgttgaaatagatactgtatactccttatgtggtcgtaactcttaactcgtcacagtggatagagttgtatctcttgctcaaaaaagtcaagtggacatgtaagcgtacaggagtttgaatagttttcaacagacttgtggattatggggaattttggtgagtaaagggtctctggaaaagttggagtttctctcgaataatccctggattaagtttgtacctgcattgtattgaggaaacatgagagttctattataaattatataacctgagtcttgttcgtctcttcttcaaattagatatgcatatggccaacatatatgaggttttgacggtttctgttgtgcaaatgaaaaccatccaagttatatacctcttaagccttgttgtcccacgttttactctttgtctcttatcatctacattctacttgcaggccatatcagcttatactttccaggatcacgagct

SEQ ID NO: 41048 - DNA, 973 bp, Arabidopsis lyrata
  Intron number 1 from transcript 890612 (locus 890612) deri ved from phytozome v7.0 (chr-ID scaffold_7; pos 12159775 t o 12160747 reverse strand)
gtattaaaaataataattaaactactacaaaacccaaaataataagaaactttagtgagtttttgatttagagttttagggtatagatagggtttaggccgtatagggttttgaatagattttttctaattctattaacaacaagattttaattaattttatggatttatgaagctttagtttaaggtttataaattcacatttttttttgcaaactatcaacgaataaataataaaattataataagtttttctaaatcctaaactcttagtcccaaaacaaattctaaaccctaaacttctaaccctaaaccctaaatttctaaccttacatcctcaacactaaatttttaattttaaattattaaaaaattaatatcaaaccttatgccaaaaaatctaacacataaatactctcaagtagaattattttgtaaatcctaaactttaaaacctatacacttatactaaactctaaaaccaacacttatacaattataattatgtcataaaataatttgaaagtagttttagaatttataatttattttcattaatttagaacatatttcgaaactaatttactaattaaaagtgaaaataacaaaaaaaaaatgccaaacttgtaaaacgcaaatagaaaaatctgtcattggttaactcatcaagataaagatcacaccgtttttaatatagaccgttgattagagtgaatccaagggataaaaaatataacctttctttattatttcattggctaagccactaaagtagggatcacattatttctaatatgaaccgttgattaaaatgaatctaacggacaccatttaatatattttttattcttttcttttcactttttcccctcatcttcttttagtcatctctttcatccaactaggtttagccgtcagacttgagaatctgatgacgagcgaagccttactcggaaccaaaaacaaggcgacca

SEQ ID NO: 41049 - DNA, 183 bp, Arabidopsis lyrata
  Intron number 5 from transcript 949110 (locus 949110) deri ved from phytozome v7.0 (chr-ID scaffold_8; pos 7473497 to 7473679)
gaggcctttctattgctgtaagtaataagcattcctaaagctgacagcgacaatattattgatgttgcaaatgtatttctctcttctcaaaataagtctcatttagattttcctgaactttgttttgtttcattttcctcatttccaggacagcagagacttgacattaagcagtcctaccaa

SEQ ID NO: 41050 - DNA, 757 bp, Arabidopsis lyrata
  Intron number 2 from transcript 912489 (locus 912489) deri ved from phytozome v7.0 (chr-ID scaffold_1; pos 11689421 t o 11690177 reverse strand)
ggtcactcctgtgactgtggccgcgttttctccaggttcttcttcatcatcatcatctctcattgttttttatctataaaaaaagtttggttaatttagtcgatcgatgttttgtggaaaaccctaactattggctctaatctatgctgaggattagttttccttggtttttccaaaaaaagaaaaaaaatcttgagattttatttatacaattaaactgttcaggtaagattataattggaaatatggaatccttaaactaaaccaaataatgttttataggatggtgtgtaatattgttacattacaggtatatttatctatagggcatatagatttgttttttttttaatgtgcatatagattttgacacagcctagcttaccaatagaagctcagtgcttgactgttgccagattaatttaatttacatatatgaagtcacgttgatacccattatggattccattaccaacactttgttgtattttgttaatacacaaactaaaaagtcttataatcacataatacctttccagagatatctaaactattctaaatccataactcaattttatattattgcttttgtcatttgattacgtacgtacaccatcaaacactctatttttatcatttagttcaattcttttggttatcaaacaaatatttatttccactactagctcattcttgattctcttctcttgttcttttttcagggttgagtgtttcatagagcatcaagatacttgca

SEQ ID NO: 41051 - DNA, 562 bp, Arabidopsis lyrata
  Intron number 2 from transcript 906036 (locus 906036) deri ved from phytozome v7.0 (chr-ID scaffold_3; pos 17581631 t o 17582192 reverse strand)
aagcagtattgagtgaaaacatcttcattggtactatatctatcttactttccattgtatattttctttttctattataataggaacttcttcatgaaaatataatttattactctcttattttgcagatgtacttggacaggttgttagtttcaatgaaatgaaaattcatgatgttaacaacaagatcacaaagaaacttgagtgtgaactcagagacacaaagtaagtttagtcaatatctaccttattttatataatcttacataaatctaaactcaaaagtttctcacaatttttgttatattgtagtgatgaaaggctgaaatgcactctttgggggagatttgctgaggcaatgtataatgcatgtcaaaatgcagggactgagagagtgatttgcttgcttcggcttgcaaagatcaacttatttaaaggtatagaatgttgttaaagtattctaaatgcatgatttgataaatcgaaatgaaaccagaacatatgtgaaaatactaatatcatgctgtttttaggtgaaagagttgttttaaattcatttgat

SEQ ID NO: 41052 - DNA, 970 bp, Arabidopsis lyrata
  Intron number 1 from transcript 947442 (locus 947442) deri ved from phytozome v7.0 (chr-ID scaffold_7; pos 20726197 t o 20727166 reverse strand)
gcggttagtctctccaaacagatctcgcattttcctttttcgtcttcaatcgatgctttagaacgctgtatctcgtcctctcgagctttgaatatgtgttcatgtttcgctaatcgctttagattcagatttatcaacctgttcgtattctttcgttcgttgtgtttttgatctttgaccgattatttttcgctttttcgatcttctctggcttttcgtttctgattgaatcgtctccttgttgtcctgtttcgttgatttgttagcttggatctgagtttttttttttttttttttcgtttcacacatttttggtctttgaatcttttgtaatttatttacatctgctatgattgtttgatcattcatcgagtttgctctttgttgatgaataatgtgtgattttgtatcttttagaagctttgatggttcttcttgatttgtctttggcttgttgatcaaggctttgtgctctttgagctaggagtttgatttaaaccagattcataaattgttttgaaatgattcttgacttgtctcattaaagatgtaatcaagcttaaagtgcagttttatgagattagcaaaaactggttcatctttgattcccattgagccttgagtgtttgtggtgggttctaaaatgtaatgttctttgaactcgataatcaagagaacaatctgaacatcaagaccttaaaacgaagttgaaaattattcttcagttgcctcaaaatatcactctgcacacttattcatcaactgtgtagatttcttgaagcttaaagtgcaattttgtgaagatttgtttgctcatgtatactttgagagattagcgaaaataggttcatgtgcttttgcttataggtgagaaatgatccttgtgtatgtatctgtgatgtgttctaaaatgtaatactctcttaattgtggcacaggttgcatcacaaccaaagagctgggaacagtg

SEQ ID NO: 41053 - DNA, 650 bp, Arabidopsis lyrata
  Intron number 1 from transcript 311691 (locus 311691) deri ved from phytozome v7.0 (chr-ID scaffold_1; pos 2206743 to 2207392 reverse strand)
acaaacatcccaggaggttcgggcacgtgtcgcccgtgagcggtcacgtgagtctgggtttacatcatggttcttttaatttttttttaaggctaatgtaataaacacaatatcgttttgtgtgttggttctattttgacgcagttgtagcacatatgaaagcaaatgtatgtatttattaacttggtaaaatctgccaaaactagttgatgagattagctattctttgatttgttttatgaactttaaacatgtaactttttgctttatattttttattttaagaatctttctgttaatttattaatgcaagtccagattataatgccggtcaagatggcagtattatgattgcagtttgtgaaattatatattggtaaacaaaactaaaatctttctgaagttattaattgtctgatcttacttttcttgaagaagctttttcaaaaagaaagtattctacgatcgcagaaatatgattgtgatcgtaattaaaaaaaaaatgattgtgatcgtaaccaaatatgtggtatagtatagtgtagacagaactaactctcttttgaagagaatttttcttttacttaaagagttttgattgggacatgacgattataattcaattttatgatactctcatacaccaagtt

SEQ ID NO: 41054 - DNA, 399 bp, Arabidopsis lyrata
  Intron number 1 from transcript 938383 (locus 938383) deri ved from phytozome v7.0 (chr-ID scaffold_5; pos 17082695 t o 17083093)
gcagctcacgatctccttggcctcgaggcatttctctaatctttcactttttcttcatttcgatttagcccttccaatcgttctttgcatatttagtaaaacaaagcgatcaaatgcaaatagttcacatgcatatttaaactttcaatcaccaaacagatgattcatgtattcatgtgattactcaatccatacttttacccgtttgaatttaattattttgatccaaatggatatttgatttctattatctttatccaaaaagtttagataattgggtggtctcaacccaaaatgcatgggcctactctttaatttctagtaaaaaaagaagagtaacaatttgatttttaccttttcacagatatacaccgaattggtggttgaccatctaacact

SEQ ID NO: 41055 - DNA, 670 bp, Arabidopsis lyrata
  Intron number 1 from transcript 899946 (locus 899946) deri ved from phytozome v7.0 (chr-ID scaffold_4; pos 3906150 to 3906819)
aggtattacagaggtaattttttccggtttgaccttattttaattgtcgtttggtgatttgttgtttggtcggctatgtgtttttgcttccatttcttttatgttcccaccgtcgctattgactgttggcacttagcattgcgattctgatgcttactcttaaagactaatcaaagaggattaaaaagagggatgacgtttttctagtttcttctaatgtttggttgcttacataataatagttgaaaaaaatgatcaacccactcaaaatacataataattaacaacgttgaataaacgcttcttgaaatttatacacaaaagttgaacacaagacattaccactcatgaatgttataacaaggaacaagtcaattctaaaagttaccattataagttgacaaaaataccaatgtagcatcattcaaatcaacacactttatttctctatatatattacacacatagatgtgttgtatatacatagctagttccatcaacgttttcttctttcattttcattctcaaaatatccattttgttatctagccttcggtattatagttcaacatataaccactaatccttattcaactaaagaatgtggagattcattttggtgatgtatcttctagctttggtcggaaggggaacctcgggaagactgccg

SEQ ID NO: 41056 - DNA, 436 bp, Arabidopsis lyrata
  Intron number 2 from transcript 495284 (locus 495284) deri ved from phytozome v7.0 (chr-ID scaffold_8; pos 14985309 t o 14985744 reverse strand)
tgaaggattggcaagaacgttgcaagacttggagggtaatatatctttttatgcttttatatactttgttctaaaatccctatacacatcagagagtatatcatctttataacgtaataattttgagtattattttttattttagtactatagttaggtgtggaagtttcaactttaatgtttccctgatgatgaaaaccatgatatgcctttgattaacttagttagggcgaaaaaaagaagaatcataaacacaaaaaaaaaaaaaaaaaaaaaaaagaatcataaacgcttaaactaattaaccataatttatgtttttgtaaaactaaaataacatacatattccaaagcctttaattagggacctataaatcgtttaatggtatttcgaattttatatgttttccaggtaatctgcagccctctctaagcg

SEQ ID NO: 41057 - DNA, 921 bp, Arabidopsis lyrata
  Intron number 1 from transcript 921768 (locus 921768) deri ved from phytozome v7.0 (chr-ID scaffold_1; pos 11966327 t o 11967247)
tttttagttctcaaccatcctcagtatcagaacgggtgaatatctttctctctctctctctctctgtctctgactagatctatgtgtgtggggatttttgcaaattggggcaacctcgtaatgtgtttagggcttttttgattgctccgttttgtttaggttccaatttcgattgtttcctagaatcatgcaatccccatatgtctaaggtctgatggtgattcttttgtttttgcttttgtaattagctgaaagaggaaaattgatctaggaattgattcgatttggtcatataaagcgcatcgttttgtcattatgcttgttaaaaactctcttcattctattcttctgcttccccgaagcctccagtgtttgttatttcatcgaatcttgtgcttactattacactagtctgtcattgtaggtcaatagataagtatttccttaaagccctccttactttgatattcttggcaaaatttgctgtgcatcatttgaaagcaccccttttatttggttgtttgtcttttagtttagtctgcttgaaagtgtccccctttgcttaagctcgtgcacatcattactgtcccatgttaaaaatacatacccactagccacttgtgacgagtacctgctgattttctatttttctttgaatcctgactaaaagcttacccttcgcatatactcgagcttcactcttgaagcatctaattgtacgtgtttatgtgccacttttctggactagaaaaggtttattcttttagctggtttactgctcccctcttctctggtatacttatttgttgttgatttgatgggaagtctttgtttccagtgtaatgatctcctttttagaaaagaggatactatgtcgttttcctgacagatagtaccatgttttgttttctgttatggcag

SEQ ID NO: 41058 - DNA, 722 bp, Arabidopsis lyrata
  Intron number 3 from transcript 911335 (locus 911335) deri ved from phytozome v7.0 (chr-ID scaffold_1; pos 6475327 to 6476048 reverse strand)
gaaggtactcaaatcaatcccttttgcgtgttatgagctctgatttttgtctatcccctttgtatgaagatttatatcttattattcagctttcttcttgctttctcgtaagacctttggtgtttgcatttccaaaggatattagctcacttacaaaagtatctgtttaaaaatgatggtatttgtgatggtagaggtcaatgtacaaagtttatgaaattgtttggtttagattcgaggtttattttaggtcagtagctgcaaaaatctgcactcaaaaggactatggttacttactatgtttctttatcaatcatctagtaggtttcatcatatttatccagttctttctgtgccacttaccttttgagtttctttaaacccttttttcttgcgttgtcttttgtttgcaccttgggaaattctatcaaaggatctcacatctttgtcaaagagctcaacagtttaaataaatggatcttttgaggtcttgtgttatcttctgtttctatttgcaattactgcgaatacgctatttgtagttttggattgacttcaatgacggtaacagagggaaatgaaaaaataaataagatattctggattaaaactattctctagaacgtagtgttgtagcataatgtgctaatgctgagagaaaaaatgctaatttgtgattctttgcagctacacggaatccgatcctgtgaaaattgctgctg

SEQ ID NO: 41059 - DNA, 598 bp, Arabidopsis lyrata
  Intron number 1 from transcript 949430 (locus 949430) deri ved from phytozome v7.0 (chr-ID scaffold_8; pos 12991449 t o 12992046 reverse strand)
ggaagagatcggacgggtgaggataatttacggatattactttttatatacattttaaaaaaataaaaaataagagactactaaattttatgatatctctacgtgaaaaaacgacatcgacatcgtagcggtcatacactagcgtttgattagtgggacgttctatatttaatatataaatcttgaaaaatataattcacttgaattttatctgactacgacatgagtctatcgaataagtcagaaagagttagtaaaaatccaaataacgatatattttcctttagacatcaaatccaaaaccaatatataaatttatgggttaaaccaaactttgattttataaactttatgatatattacgtgtatatatatatatatatatatatatatatatatatttttatgtcaattaatgacgtctatataaattaatatgatgatgggcaagctagctataaccagtgaatataaaaaataatattttttaacatatggtttatatatgaagaatatttatacctttcaacaaaagcaaaggtatgtggagaatatcttaaaattgacatgatttaaaatgaataaaaggtggtgtctg

SEQ ID NO: 41060 - DNA, 626 bp, Arabidopsis lyrata
  Intron number 2 from transcript 471493 (locus 471493) deri ved from phytozome v7.0 (chr-ID scaffold_1; pos 5621234 to 5621859 reverse strand)
ctctcttcttcttctgctcaagctaagaacgatctctgcctcttcttccacctacaggtatctctcaatttcttttgaatttcggatctggatctcaactatctctcaagatcatcgttgtgttttgcgtttatgattatcgtataatttggatcttgaaacaattctttttcgaattcttgaattctttatgtgttttacctcaaaagcatcagttttcattttatgttaattcttgatcatctttatcactgtttaatttaagactttttctcatttttctttgttttagagtttaattattcttgaaaaagaagaaaaaatctgtctctctccgctataatggaaaacattactgtattttattaaaataaaataaatttaggttgaatttttgtcaagtggctaattccttaccattctttattttactcttaattaattaattaatcaaccttaataaaattaattaaataattctcttatgaccagatctccataagaaacacgttaccatttgaccacctcttctctccttcccttatcttttttatactattatttatacaacaattttattaacatcttcttaattcactattttgtgtgtttgattgattctttga

SEQ ID NO: 41061 - DNA, 372 bp, Arabidopsis lyrata; identical to SEQ ID NO: 38737
  Intron number 1 from transcript 931931 (locus 931931) deri ved from phytozome v7.0 (chr-ID scaffold_3; pos 23904172 t o 23904543 reverse strand)

SEQ ID NO: 41062 - DNA, 608 bp, Arabidopsis lyrata
  Intron number 3 from transcript 482299 (locus 482299) deri ved from phytozome v7.0 (chr-ID scaffold_4; pos 15898397 t o 15899004 reverse strand)
ataagatcactggtaaatttatttaactgaaatttctctattgcattcccaattataactcaaaaccctataaattttctctcataaattagtctactgatttaggctttgtagaagaaacccaaattttgtgtcttttgtccctttttttctacttttagtaaaaagttaccaaaattacttgatttttgtattcaccaggtaacagtagtaaacctattttcagacataaacttaaaacttgtctagataattgtgatgtttctagttttacatgttccaagttttttttttcattgtttttggtcgagtaacaaatgagtttaattttgtcatgatgatattggagtgcatgcgatctgtttcttatttgatcgctttttaaaagaaaataaatactaaaaatttcagcttttgtttgttgttctttctgactctgacaaaaaaatcgacctttttgctgaattcagatcacatctgagggattattctcttcttctttgtttctttttgtttgtcttcacatatcaaacattctaatctttgtcttttgtgtccattttcgtataaaaaatttcagcaaaagacaatcttgtgttcttgcaaaa

SEQ ID NO: 41063 - DNA, 373 bp, Arabidopsis lyrata
  Intron number 1 from transcript 943455 (locus 943455) deri ved from phytozome v7.0 (chr-ID scaffold_6; pos 23556438 t o 23556810 reverse strand)
tcagctcgctaatctccctccaatccttggtctttgtacgctttcttcctcttgtgattatttttcacaattgcaagtctctttttcgctatatgtgaggattttactatagaacaataactcttgaagaaaagtattcattaagaatgataaaaaaaaaaaaaaaaacatttcagttttggttttgagttattttttgtttgagtagaaaaccaaactacaatttaaattgtcttccatttagtttggtcctaaatttcatatataattgtgtttgtgatttcatatatatacactataactaactatataattatgttcatatggaaaataaatagactcgagcttggtgccgccattggtatacgcggta

SEQ ID NO: 41064 - DNA, 787 bp, Arabidopsis lyrata
  Intron number 1 from transcript 893801 (locus 893801) deri ved from phytozome v7.0 (chr-ID scaffold_6; pos 7853404 to 7854190 reverse strand)
tgttgattttcaacgaattgttgattaattggtacaatttctgccatgtctgttctttttttttttttttttttttttgttttcaggccaaacgatcttagggattcgtttgaacggtttggtccactcaaggacatatacctgccaagaaattattatactgggtatgtctcaagctttgtcttttataatcagatgcttatatacatttcctagatcgatagagctagttggtgttgtttgagcaggtacctataatttcgatttgatgatgtttttgtggtacagagagccgagagggtttggatttgttaagtactgtaatgctgaagatgcagctgaggcgatgaaacgaatgaatcacaaagttattggtggacgtgagataaccattgttttcgctgaggagaaccgcaaaactccacaagaaatgcgtactactaaccatacaaggtggaaattccgttttttcttgtatctatatcaatttttcattttaaatgtgattgacttgtatgtaatttcttcagttacttcctacttctatttggtttaatatagtggtcgacatggggattacaagaggacttcacacagatcaccaaggcgcagatatcgttgtaagtagctttgtctgcttttaactttttgatatgtctaaggacaactacagtttatggttagaacaatacctatgtaccctgtgatgtttactaactgagtcggtgagtccttcctttcttgttaatcagctcattcacgttcacgttctcctccaaggcgagac

SEQ ID NO: 41065 - DNA, 971 bp, Arabidopsis lyrata
  Intron number 1 from transcript 913407 (locus 913407) deri ved from phytozome v7.0 (chr-ID scaffold_1; pos 17313709 t o 17314679)
tcgaggtaaaacaaaaaggaccctagtctctctcaaacgagcccaccgccgtatctccaccgactgcgtgttttccggcattgttggtcctccggtgttcatctgggcgacgattgaagactgaatcaataggtacgttgctgtactcttttttgtgattgaaattatgtctttttctcatctcaagtcacaatttttgttactcgtttagaaatttgcgttcatataaacaaaaattagatttgagacttgtagatcgatgtgaatctttttgttctctcgatttagttgcaagtcacaatttcaatttgcatgtagagttgttaatatctttgaattcgtgaaactcgattaaaggtttcaatttggtgagttttaaaattccaaatttaaattgaatgtagattgaataagtctttcgctctttgattccaaattacaatcgaagtgatctttttgttctctttttgatctgtttagtccactatttgtgtgtgtgtgtgtcgtgagtagctcaagtacgtgtcttgttttttttattagttataggttttgtctcttgtaaatcttctacatctaagtcaattgtaaatctttttagctaaagccatccacatatcgtcattggaaatatttcaattgcatgtagattgattaagtcttctatctctttgattcatgttaatgtatatgtgtttgtgttggaattcattgatccttcttgagctgtttagatatttgattttaaactctcagctcttaagtttatgaaattagaattcttttgtgatccttcttgagctgtttagatatttgattttaaactctcagctcttaaattttgacattgtgaagctcttaggtttattttaatatcaagtgttttgtctcttaataactttcaatatttgataaagctagtttgttctctattttcaggttttggatctacattacatcaaaggttatca

SEQ ID NO: 41066 - DNA, 261 bp, Arabidopsis lyrata
  Intron number 2 from transcript 346626 (locus 346626) deri ved from phytozome v7.0 (chr-ID scaffold_5; pos 151716 to 151976)
cggctggacaggtatgtatgtatactcaaagctcctccatcaataggatgcaagattagagcattttgtttttgtcaaatcatctcttctaagattggttgtttgacaagttagcaacttttttcttctttaacaacagtctagtgagtaacttagatatactcgtgcctgcctttctaacttgatccttacctccatctttatgaaattatttctgtgcctgcagagccaagcgtcaggtaacatagtgacgagtgttca

SEQ ID NO: 41067 - DNA, 355 bp, Arabidopsis lyrata
  Intron number 5 from transcript 495958 (locus 495958) deri ved from phytozome v7.0 (chr-ID scaffold_8; pos 18581000 t o 18581354)
ttgtcactggtgccgggtttgactctcaattttctaatgcatgccctttttcttgccgtgatgcagtttctcatctacttcttttttttttagtatcatacacctggatgtatgtagttttctcgtgtcatgagtgatatgatttagctttgaggttctcctgacatctatatcaaaattatcttcattattttgttggaatgattcgtttgctaagtgctgtagaagcttgtcttagcatgcatgcgatacttctattttatgctttctcccactattattttgtattctgtattaattctttgtttcttacgtgttacttaggagagatttagctcctcatctaaagtctata

SEQ ID NO: 41068 - DNA, 523 bp, Arabidopsis lyrata
  Intron number 1 from transcript 943539 (locus 943539) deri ved from phytozome v7.0 (chr-ID scaffold_6; pos 23984811 t o 23985333 reverse strand)
gatctcgtaagtcttcgtttcttgttagaatattcgtgaatcgtcaacacaagcgtctatagcttgtaaattgtatcaattattgagtatttcgattcactgaagttagattcagctccttgatcttgctctgacgggttagttcgaaagttagaataggtttagatccgactagtatcttctggagcatgaaaatagttgctagttttgaattgtacccttcggatgaagtttacagtgtgcaagaggactcttgatcaatgtggtgggtcatgaatttctccttgctggttttgttttttttctatgctgcaatctttattagaattgtgctaaatttagttgtacttatcaaagattttcgtgcaatggttgatagttcatcactgaactgggtttatgaggtttgtgttaagtgtggtgacagtagtgcgagcgatctgattgagaaatatgccacgatctggtggttttattggcttgtgcagattaaaaagtcgaatttggaggtgcttctgcaaag

SEQ ID NO: 41069 - DNA, 812 bp, Arabidopsis lyrata
  Intron number 2 from transcript 905254 (locus 905254) deri ved from phytozome v7.0 (chr-ID scaffold_3; pos 9914610 to 9915421 reverse strand)
gtttttggaaagggtatgtttttctttcattttactctcatcatgcatcatatataattatatatagatcatggttctaattatccgttttgcaagatattcatactacgctcttattttatttctaatgatctatcagtgtagggtttcatgtgtgtttctccgttttgctcgattatttaaatctttaactcgtcatcagacaataatttttgagactatagtatatttattaaaaaaattatggagtatctctaattcgactcaaacgtaactattggttttgtactgtaatttttttggtagaatgagaaactgtcaaatcaagtgttggaaaaaaattgggtcaacattttatagttaagctttgtttttttcaacattttagttgggattaaaagaaaattatggtgtatgtgtgtgtgtttttttgataactagtgttttcttgcaaatttttgtttgttttaaattcacccttgactcacattttttatttcctttcattgacaaaagatacaaattaaataaaaatccaacttcagagttgtcagctaaaagtttgttttaccagctgaacaactaaaaataaattaaaccatgggatattacgtacgttgccaaaattctttttctttatttaaagtttttcagaaaatgtttttttttttttttggtacaaattttcagaaaatgttactactttaaatattgaatttaaacccatatcttccctagtccctacataagaatggtattggtacgtaacagttaatatatgtggttttgtcttttggcagttgtgctgccat

SEQ ID NO: 41070 - DNA, 579 bp, Arabidopsis lyrata
  Intron number 1 from transcript 481472 (locus 481472) deri ved from phytozome v7.0 (chr-ID scaffold_4; pos 5975674 to 5976252)
gcccaattttcaggtaccactttctctcttgattctgttttgagtggacaattgagtttttcggttttcatgaaatcaaaaaaaaaaattcatttataatttagtttgttcggtttactgtaatttttttggtttagagtcagtttgattttaaataaggaaaataactctctgcaaatagtgtttaacttctgtttaacacagccctatagttaatattgtattttaacatatataattaaaaaatataactttttaatgaattcggtttatttagtttgatttgatacaaaacactaaaattagtcagttttatttttttgtcattttaaaataatgaaaccaattttaaccaaaaaagaataattaataatgaacccaaatggattataaacatattcctgtttgattttagttgaaacattttggtttgagacttggttcaatatggtttatatggccatctcttgtggtttttattgactgattgatgaacacaacaagtgtctaaaaaatcaaaaatgaagacaagtgatcatgtccaattttaaattaacaacaacaaaaagcagatttcag

SEQ ID NO: 41071 - DNA, 636 bp, Arabidopsis lyrata
  Intron number 1 from transcript 493105 (locus 493105) deri ved from phytozome v7.0 (chr-ID scaffold_7; pos 11326828 t o 11327463)
tcggtgagtttatctaaacccttcgttggttttggtttttgtttcggatttatcctgagaagatggatgttgttgctgttgatttgattgatgaagatgtgagtagatctgttgattttgattgttattttgtaaaaacatttgcacaaatggggttgattatttgtgaagaatcgttacttttttattctatttcagaggattttgaagctattctctgtttttaatttgggtgacaaaaaaaaaaaaaaaaaaattgggtgaaaattcctgtttctgagatgaagattttttttttttttagggtaaattatttttgtttggattcaggtattcactttagcatttgttttgttttgtcatcttaaatatctgatctgtgccgttgtgagacagggataagcttttcctagattctgaggttctttttatcatcttgtaatgatgatacaatgttgttgtgtttctgatcaattgtattgatgatattggttgctttaggagtgtatagtcattgtttaggcgataaggaagcaagaaatgcggaaccaaacaactaatgaataagtctgatatgcgatttagctggtttaaaatcatagtttaaagtctaacgaggttgtatctcactggcag

SEQ ID NO: 41072 - DNA, 818 bp, Arabidopsis lyrata
  Intron number 3 from transcript 479847 (locus 479847) deri ved from phytozome v7.0 (chr-ID scaffold_3; pos 10691864 t o 10692681)
caggttttgctctctttttttcttgcatctcgtagtttcatgtcaaggaattatattgagaatgttagtgtgttagtgtctaagggataggaacaatcagggttgtttcaaacagggtaaagcgttcctgctgctatccttttcctgttgcagaagccattaaatatctttctcttctgggtctcaagagcacctgcgttattatcaagtttttcaagtatctcttaaagaactttgggatttcaagatcttctcctagatgttttggaagaagagtgcctttaatctaagaaatgatcttgagacccgaagttttttgaagagaaacctaaaaacttgatatcaacgaatgtgctcttacacgcaacattcctccttatgatgcatcagcaacaactccttggaaaccataccctttagaaaagatcattgaaaatggagaatggaacttactcaacgatatttcctggcttctgcaaccggaaaggggagcagcatgaaactcttctaacgcttaccctgtatttgtccacaacagattgtttcatatcttaagttagcaggaaactacgaatcttgaaggttgtttcaaactgatatcttatggttcttttgtccaatatttagagtcagtgattttgcatttttgctaatagcttttacttaagtttatgcggctctagaatttgtaggtctagaactcctaatagattgaaattcgcaaggccgaattaacccttcccttctaatccaggataatatcaaactcatgtttcccttttgtttataactcacaaattctttgatttttgcagaaa

SEQ ID NO: 41073 - DNA, 950 bp, Arabidopsis lyrata
  Intron number 3 from transcript 473040 (locus 473040) deri ved from phytozome v7.0 (chr-ID scaffold_1; pos 12479386 t o 12480335 reverse strand)
ttgggtcactcgggaggatagttttaccaaaggtatgtgaattcttaaaatttattttaatttctctaacacatacctggtaaaaatttcagttccttttcagtattttctattttttctgttactgtataatgagaaatgaaatgcatttgatgaaataataatcatcaatcacgtacgtaatttaaaatttaaaacacattcccatgtaaaaataaagttatttcatcaggattagatttccatcattttataaaagagatttgtggaacgaaagcacaaaaatcattgcggccacagattctctcattattcaatttcacagagtatttattacacatttcattttacattcaaattttatataatatgtttatcgaactgtttttctgtttaaccaataaaacgttttacgtctttaaaattaagtaacgacacgaaaacaagatgaatatgaaacatgagaagaaaatgtggactgaaataaagttgtttaatcgaattttggttggtttcggtacgaattttaatatttttgattttttaatttagtaaggaattaatttaaatgttatagttttatgtttgaactatatttttaaattatatcttaaatttatacagcttcttccttcaatgaaaaatatgaattactaagttttgttatttgtatttggataaaatgaaaaatttaaaatgagtttagagtaaaattgggttgaagaaaatgtaaactcgtttatatgcctttcctatttaattgtcccttaaatggtttacctcgaaaccattatgggagagtaaacaaatcaaaaaatcattatggaaaagattttacatatcttggttttttattaaactttaattaattttattttaatgaaatatatcgttcttatttttcttagtaagaaagtaatacgtgaatcatggctttggaatgcagagag

SEQ ID NO: 41074 - DNA, 733 bp, Arabidopsis lyrata
  Intron number 1 from transcript 900755 (locus 900755) deri ved from phytozome v7.0 (chr-ID scaffold_4; pos 13755475 t o 13756207 reverse strand)
cagaaagctagccattccgattcactggttcggtatcagttccatacctactaacccgacacactcgggtttatcccttttcttcccgacccttcatacatatttgatcatagtatcatatatacgtgatcttgacatatatttttgttgttgtcaaaacatgtgagttaatatacatattttgttatagggttcataatagtttccaacattttttgcaaagtatttataattgtcattttaattaaacaacaacaatatcactaatttactaaggaataggaaagaactacgactagtaaaaacacttaacttaacagttttttacggatcaccatacggagacatgcactaataattacatacaacttatctataaaaacaaactgtatctaaggattttaggttttcaaccatcaaataacccccaaaaaaaaaaaaaaaaaaaaaaaccaaaaaaaaaaaacacaaattttctggtttttagaagaatatgacaagaatgtcatcatcacattttgctatcctttgcatcatcgtaatttctctggttcctctagatggatgtacgtctatgaatttatgcatatatataattaatcgctttttcgttggttacaatcagtcatcaccatattgttatatatataatattctccagatcaattattaacttctaatttttttttcccttatagctggaaacacacaacatcctgccgcgaacaagtca

SEQ ID NO: 41075 - DNA, 1033 bp, Arabidopsis lyrata
  Intron number 1 from transcript 355149 (locus 355149) deri ved from phytozome v7.0 (chr-ID scaffold_7; pos 12375452 t o 12376484)
gagccgacgatttcttgttttcacagcaacaagaggtaattaaatcaattaattggcgatttttttattgaattttctctaatttcatgattttttttctctaatccgtggtgcaatgttttaagtattttttattcaaggttttgatttaggagcaaaaatgaatattcggttttcaaaattctgattctaaagatggtattgaatctgggtagcaataaaataaaaaatttaaggtaaattccatttttttaattataagaaaaagtgttgactacagtaaaacattttttttattagagaaattaatttgatgattttaagttaaggtcggattagtagtcaacaagtcaaaataattttggttaattaccaacccaatcgtcggcaatttaacgacggggtacacgtttggttttatctgatttcttctaccattcaaacactgtttttgttttaacattttctggtcaaaattaaacatttgattactaattatcaaataatatcatgatttctaaactttaattgggttgaattgttttatactacttttattcgtttggtggaagatatttctgataggaaaacaatatttttttcttatacataaaaatcttatcaataagatattaaatgaaaacggacggtcatcttcatctaaacgtatcgcatcagaatcaacggtttattctactgccacgtgacacgtttgatgacacttgtgttccccatccggatcttcgcttgatccggtccacatgaaaattgccgatttcgttttggtctatgcatcccaatttttcctaatttgtttcttgtccgattgggatcggtacactgaatctctttaaaaaatccagatacgtaataggtttatgaaattaaaccctttatgttaagttgttaacctatcgcatacataccgatcggtatggaaattgctttccggtttaggatttgtcggtttattgtggtttgttttattttgtcattagtctacttctggtgcaaataagtacgaaggacttgt

SEQ ID NO: 41076 - DNA, 206 bp, Arabidopsis lyrata
  Intron number 4 from transcript 926050 (locus 926050) deri ved from phytozome v7.0 (chr-ID scaffold_2; pos 12739644 t o 12739849 reverse strand)
gctcaatccttgtaagtttttctttatatatgttagttttaatcaaaagttttataataatacaaataaagattagatatcatatagaacttacaaaacatctatctatataaacaaaacttcaaacaaaaacatcgatgagaaagagagtttacttgattcttatcacagggcatcccggcattcacgaagaaaatcatcaatca

SEQ ID NO: 41077 - DNA, 140 bp, Arabidopsis lyrata
  Intron number 3 from transcript 472098 (locus 472098) deri ved from phytozome v7.0 (chr-ID scaffold_1; pos 7897228 to 7897367)
tctgtaagtaaaaaatttggggtttcttgagagattttataaataatcttttttcttcttttttttttggccaaataaagaatcttttttttctttgacttgttttttgattgtttgatattgatcttgatctggcagat

SEQ ID NO: 41078 - DNA, 950 bp, Arabidopsis lyrata
  Intron number 1 from transcript 910238 (locus 910238) deri ved from phytozome v7.0 (chr-ID scaffold_1; pos 1988657 to 1989606 reverse strand)
acgtggcaatttttattggtgaaaaggagaagctgcaaaaaaggaaagtctacctatacataaacttggcgcctgtcttgtagccgttgctttcctctccggcgttttctctctcctctcttcgactgtcgtcgccggtgacccgtttaacaaagatgctacctttgttttttttaatactactgtagctatatcgcatctgatgctgttttagattttcgggtcgtcttctgcttctctttctcttcctctgtttgtcttcaggtgatccttaaatctctgcgtctgtttttgagtttatcagattctgggttttccttttcaactccgagaaaaacgaaattggatgtcttttttctgatccctagggttttaaatttgtttccacttgactcttgagtgagactgctcctccgttttctaggtcgtgtaacccaatttcgatttttctattggagattgttttaaagcttcgaaaatttaatccttttctgttttaggaccagtaatttagttatggactgtcgaattgagtagtccctaaaatatctgtttttgcttttacatcgtcggctactttactgttgtttgggggcttcgttggatcttttatctttattttttttttaatagaaagaaaacagcttttcgcgtttattgcgcgtacagtgatgttagcttttgtgtggatgaatccgaatttcgcttctttgttaaagtaaatcttactgttttggatattattttggatcctagtctctttctatcgcttatgtttgttttctttgagttcacaagtctctcaaggttttttgacaagtatttttaatttggtagctgagtttgattgtcggaagatttagaagatgtctctaagaagggaacctgatccgcctccaccgcagaggcggattctgcggacttagactgttggtagtcttggagaggct

SEQ ID NO: 41079 - DNA, 405 bp, Arabidopsis lyrata
  Intron number 2 from transcript 321394 (locus 321394) deri ved from phytozome v7.0 (chr-ID scaffold_4; pos 17555929 t o 17556333 reverse strand)
tctcacaagttcaaaaactagtcagaatgtagaaccggtttcaaatgtttattggatgagattgttttctgtgtcttctttcctggaatgtctcacaagttcaaaaactagtcagaatgtagaaccggtttcaaatgtttattggattttgtgtttccttggttttgattaacatatttgtgtcatgtgtgtgttcttgcatgaaatttctgactagtaattactaaaaggtagtcacaatgtaaaacaggttttgagatttcttagctttagttgtgtaattactcgcccatcgtgctttcattttgcttacgtgtacttttctccgggagtatgaatcatatgctttgtgacagaagaaacatgggagatccaaatctccagaaaaacatcaaaagtttcaag

SEQ ID NO: 41080 - DNA, 434 bp, Arabidopsis lyrata
  Intron number 2 from transcript 327634 (locus 327634) deri ved from phytozome v7.0 (chr-ID scaffold_6; pos 24251555 t o 24251988)
agtatcacatcacttgtttgcctcaagatcaggtaattgaatttgagcttctcaagtagttgacttagtcttatgtttctgctaatctaattcttgatctttttgaaatgattttgggtttgtttcatctatctctgatctacttgttgactgtataatttgccctgtgttggatactatctttagtacaatttgaggttaaagtcatgttcttgtataaatggatttgcttttccccgtgatgctacatctagctcaggtttaggttctgtgttgtctcagagttttaagtgctatatatagaagttgtggcctagtgtatttgcttctgtcaaagcttgtgattgagttgtttgagttatgtgtgtttgattttttgttttgccggcaaagaacttatgtgtctgtacttttggaatttgttcagaggaact

SEQ ID NO: 41081 - DNA, 432 bp, Arabidopsis lyrata
  Intron number 2 from transcript 477160 (locus 477160) deri ved from phytozome v7.0 (chr-ID scaffold_2; pos 18849048 t o 18849479)
cgcttggatcacgcctaaatctggtaattcgatctctcttcattcatcaatttcatttttttcgttcccacttatcagctactgttatatagcagtatagaataattgatccttggctttaccggttaagcaattgaagtgtcagtgtccttgaagaagatttttgagtttgactagtttaaaagatttgtactctcttgctttggaagttagttttttaatgtagagcccaaatcttgagtatgttttgtgatcaggcagatcatatctctattgaacaacgaccacagaaacaggaatttgtagagatcagtttttgtcatttctctacgctgatggggctatggccttgactttgctttggtttgaatcttttcatctgctatgactgaccgataattttattttatttttgtttcttgtaaaagacca

SEQ ID NO: 41082 - DNA, 772 bp, Arabidopsis lyrata
  Intron number 1 from transcript 930378 (locus 930378) deri ved from phytozome v7.0 (chr-ID scaffold_3; pos 10807991 t o 10808762)
gtctttaatcgtgtacgtattcctttccctttcgctcatttttttttcacagaaataaatagtttatgataaagttatatacatctggaattttctttatttcgtgaaaaaatgtgatgataattgaagctttttgccttttcctgttcactttggtccacaaatggaccataccttgtgttgtgttttggtccaaatatttgttttactttgccttctaaggttttgtatacacagaacttggattattttttatatctgtccaaatctagctattggaattctttttatttgagctacgagttttcgtttggtgtttcttttaattaagtcaaacgtattgttgttgttagaaaaaaatgtcaaactcgaattgttttcgaaataacttttctctatgaattttgactgatatgatgtttttatgtacgactgtgaaactatatatgattcgttttatatatgacatgaaaatgatagaacaactcattatcatcttgtgactattcaaactttccaaaatagatttttatcgattggtagaagtttcataatttattgataaattagttgtggtaaatagttttatgaattgtcgaattgtgcacaaatgattcatattacacaaaaattagtcttaaaatgttatgagattcaatgtaagaatccaaatcttcaaaacttcatttatagattgattatgtattgttcctagctcgaccttttggatattgatcatatattaatatgttgataggttacatatccaaac

SEQ ID NO: 41083 - DNA, 844 bp, Arabidopsis lyrata
  Intron number 1 from transcript 944677 (locus 944677) deri ved from phytozome v7.0 (chr-ID scaffold_7; pos 3654927 to 3655770)
aattttccttgtatcatctgtttatcttgtagcaggtgagtgtcaagtctctagagtttgttctttgtactttcatatctccagagctgggcttgcatttgtgttttgttctctgatttcattcgatgatgctcagttctgagtggcttttacgctagatatctcttgatgcttggcatatttctgaccaaatggcttctgactttttcgattatttgtgaggtgaaatattgtcagagagggttgattgattgatgtgtcctcaaaatctgaatgcttgttgttaggtttagttctagaaatcactcgttttgattgaagccactatatgaagacaggtctagttctgtgatggttcaggtttattggggtttaggggttttagctatagagcaaactgtggactttgctaaatctagtttattcctctgacctctgctagattttgttggaatttgaatttatatggaagaaatttggtggatctgatttatttcctttatagctttccgtctccacatggcagcccttctaaggtctaattctctaagttttgaggattcttacttttcagtttgaatgataagagagatgtatcaaagttgagccagctttgtttaccaccagaattttatttttacttgtaaattgagcttttggagtcgagtcccatctattatctcttttcgttctgtccttcaagaagtaactccaacaatttctcatttgtgttctcttttgttcatcttttcataaaggtgtggtatgtcttcttcttatattctcgctattttgttgcaatactgcaggaatttttgtggcttattccgctcctcaccgtcat

SEQ ID NO: 41084 - DNA, 581 bp, Arabidopsis lyrata
  Intron number 2 from transcript 906488 (locus 906488) deri ved from phytozome v7.0 (chr-ID scaffold_3; pos 21462469 t o 21463049 reverse strand)
aataaacaggtgatcttatagtttatttgtacaaatttgatttttttttttttgtatttatggtttcactattttcaccactaatcaatttttataatcaaaaagtttggtttcaacttttgagaaggtaatcatcgatggtttggtatgtttctttttgttgtaaaaagatgaggtacctcccgattttgttgaggtacatgttcttattattttcaaatatgtcttttttcagaagaaacactcaacttttgataacacagttgccacaaagtcagaaagatgacttatttcagggatgaatcttcagaggaggctaatttttgtcgttaatacaatttaagtattcttctctttagattagggataacaaacttggctgctaaattcaggaattactcttcgttgccaatctctctccccaaactaaaatattacatatatggaagtagtaacttaaagtttttggtatcgaggtcattctaaggcactgagattcggactttggtatgtataggattcgttttccatgcactaagatttaattattgtttaatttattggtttttaggtttctttcc

SEQ ID NO: 41085 - DNA, 458 bp, Arabidopsis lyrata
  Intron number 3 from transcript 471077 (locus 471077) deri ved from phytozome v7.0 (chr-ID scaffold_1; pos 3712217 to 3712674 reverse strand)
agattcctgtaatcgaaaacttgggtgctactgaggtactttcttcttctatcgagtttcgtttcttctttgtctgttaactaatgaatttgtagatgcggttgtatttctatgttcttaagtcggcctgttgggtttctgcattcaagtattttgaaaaatcattgaaagaaacattgctgaattgtatctagctctttaggagtatatgtggcttcgtgtaatagtacttttgttcatattgtggattctgtacttttgagagccagtcttctctgtgaaagtcctcctatagattttgtgttaggccatggtaattttgatgtttaaggctctaatatgctacagaatctccttcgtattttattacttctgttgaattaattttgataagtagattaattaacttgtgctgctttgcttacaggaccaattcgatacgattgatctttctgata

SEQ ID NO: 41086 - DNA, 533 bp, Arabidopsis lyrata
  Intron number 1 from transcript 491240 (locus 491240) deri ved from phytozome v7.0 (chr-ID scaffold_7; pos 2850256 to 2850788)
cgtggcacgattctcacttctctcgctgtcgaagagtacttaatctctctatctctctcaccctatgtctccataagatacgatcatacacgaatttgttggtgtctgtgcactgtttttgattacttttaggcgatacttgtgtttaagtttttatatttgattcagtctgattgagaactgagtagtgtagtctggggttttgagctcatttacaccttattagtggattcgtatcgaagaaaattagaaatgtgttcttgattttgtgtttgctctaggctttggtcgagtgtatgatttattctgtgaaaaatcgaaatcgtgtttgctttggtttagtttttgtagttactgctttttgttgttctgatctctgctcatcacatttcttggtatagttctatgtttgtctcaattatgtaaaaatcatcttctgagattcacaagtttttttaatatcatcaattacgaatgtgatgtttgattgtaacacaggtgggaagaaaagcttaagacatctcacttacctg

SEQ ID NO: 41087 - DNA, 961 bp, Arabidopsis lyrata
  Intron number 1 from transcript 894063 (locus 894063) deri ved from phytozome v7.0 (chr-ID scaffold_6; pos 9086544 to 9087504 reverse strand)
tcccagattttgtcttgaacgacttttgccaggtatcttttatttatttctcctttttaaggaaaatcccaccaacgaaaatcttaaagtttcctcggaatttcaacaaaagtttttaaatccgaaaacaaacagtctattaattcgaaaacttataactaattaatccatctattttataaaagtgtacgtttttctctgtatcgttccaattttatcgaatgtcccccaagggacagtgtacgtttttcataaataaaaaataaagcaagatgttagttttgttttttttcggcaacgtggattaacaatattttgcaatgtgtacaagatgatgacgcatcattgatactaacacaaactatttttatatgttaattatattcataatttccttgttccaagtgtttttatgtcgtcaaattttcttcttgttctaagtaattgattttattggaaggttaagttcatttttaatttcttgtgtaatttctatgtttatatggaaatatagaacaatatttcattcgaaaaacaaataaaactcacacttattgcaaatttctatattacacgaaaacagatgaaagtagtggagtacaaagatgcactccacttgtttatctttatcaagactgattagttaaagaaagttgtcactttcatttggttattgtaattagtaatgatagtttttttttttttttttttttggggtcaacactcaacagtaaggctagtatagaattgggtataataaagaacggatggccttgtagctcccaaagaaggacagatattactcaaatttataattttaaatgataaaatacaattatatagttattgaaagaagagtgtatagctaacatgattgatatataataattgagaaaccacagaaaatgtattcggagaagagagaggaaaaagcagaacttctcgaggggctgagtattgg

SEQ ID NO: 41088 - DNA, 663 bp, Arabidopsis lyrata
  Intron number 1 from transcript 928844 (locus 928844) deri ved from phytozome v7.0 (chr-ID scaffold_3; pos 4533228 to 4533890 reverse strand)
gttactgtgttatctgctttgattctttctgacgggtaaggcctgtcattaacttaggttcaaacttaaaagactctctcttgggtccaactaaataaaaaataaacatttatttatttatttggttaacctcgattcttctagccatttaaaagaaaacataggtttggttttggactttgcctatttttggtttccttattgtaggaatcttacatgaaactataagcgcaaagaaaaatcttaggtatataaagaacattaaacgatctttttattccatttcagccaattatatgagccctgtaaattcgttaaaattaactgtgaattcgttgatcttcttccggacgatatgccaaaaacaagagaagatttgatattttattacacaagagaagattaaatttggatgtatcaaagagatctagctatattttcggaaggagaaatttgtggtgaactgtttttgctaatgttcaccactcgtttcactaaaaaaaaccaatggaatcgtgcctgtcgcgattaatgggttagctctagatttatttcgtgccacggctagaggctgggatggtttttggttctgattttattgttaatgaaccctacactggtttataaggtacgtaacgctcttggactaccttccaatcaaga

SEQ ID NO: 41089 - DNA, 534 bp, Arabidopsis lyrata
  Intron number 2 from transcript 338146 (locus 338146) deri ved from phytozome v7.0 (chr-ID scaffold_2; pos 1789765 to 1790298)
tcaattgtcagaaggtgatgagagaacaaaccctgaaaaaaattattctttggaagcttcttcttaactctaatgatccttatttgatcttattacacaaagaagaagaagattctagaaaccctaattaccaaactttaccttttctttctttttaacttaacccctttacttgatgttttagtttgattttgatatctccttttgtttactagttacttaacccaactaaatatatacaaacaaaggaaacaatttttcctattttgagaaaatttcaataaaattgtaactaaaagtctaaaaacaaagaatttttttaaaaaccctattttcaagagattatccataatattgtatgaggcttgaagattatgacatatttatctttcatcattttctttactttatgaaatctcacaaagtaaacttgaggatccttatcttagtttaattaatgtttttatgcctattatgtactaattacacaaatattaaggttggagcaccaccggaggttgtggtgagactgga

SEQ ID NO: 41090 - DNA, 467 bp, Arabidopsis lyrata
  Intron number 2 from transcript 496593 (locus 496593) deri ved from phytozome v7.0 (chr-ID scaffold_8; pos 21260913 t o 21261379)
agaaagctgtctctctcgctgctcgtctcagcaacgtacgatcactcactcttttgggatcacatgacatgaatattctgcgatttctcgatttagattaaaccaaaaaaattcttctttttttttctttgctcgttgacattgcgatacgtgttccgagagagttagatgttttctttgaactctttctgtgagttgaatgtgtgacttttattttcttgtttattggaaattgtcaactgagacaaatgaaatctggaatttgatttgatgaaatatgaaatggggatctagacttgttgtatcttcgtttttaagaattgggttttaacaattcttgagatttgtgtatatatgattccatctgttgctttatgtttagagacttgagagtcagatttaacaagtcaaaaattgatttgctttttccagcaagtgaggaaatctctgttggtatctgacgtttg

SEQ ID NO: 41091 - DNA, 653 bp, Arabidopsis lyrata
  Intron number 1 from transcript 948997 (locus 948997) deri ved from phytozome v7.0 (chr-ID scaffold_8; pos 6223837 to 6224489 reverse strand)
ttttaggagatatagtatttcttcatccccatcaggtgaataaataagacaagtacttggttcatgttttaagtaactttggttcttaatcttttagtattcaagatttgcttttgatcctttattaaaaacatacataggttagatctgatacagaaccatattgtttagcttgtaaaatttactgtttttttaagcatttcaaaagtaatattgcttgattatggtttagttaaaattttggaaaattactatgatttactgattagaaaaaatatttttattaatctttggttttgtgaaaagtatggtaggttgatagactccccgaatatcaaatttaatatccgaaatgtcttcaaacatatatctcatttttctcaaataataaccaatattttttttttgattcaaaataaattagtagattgtctcgtttcatttacaattttgttttagtgttctacacgtatgtttcttcatatgatgttaaaaatttataaatataatgtataatgggtttcttaatattagtggtccaaaatgaatgtttcatcataatcatttccgacaaggcgacaactttacattttacaaaagtattattctctcattcgtagatttttgctattttattttagatagccaaatct

SEQ ID NO: 41092 - DNA, 431 bp, Arabidopsis lyrata
  Intron number 1 from transcript 489803 (locus 489803) deri ved from phytozome v7.0 (chr-ID scaffold_6; pos 19387813 t o 19388243 reverse strand)
ccggcgagtttttgacacttccgttgtcttctcaggtttggttctgtcttaactatctcatttatgttaaaccattatgtatgttatatatctacatgtagatctggttctcatggattttgaattcttgattaatctgtctgtttaatccattgattaacactaattttggattattgtttggaactattttcattagataagttttggtttttcatgtttaatctgaataagtaattaactaaagaagataagagaaagagaaaaagaatctgttaaatgtatttatcttaaaataaaaatttatttccaaaaaaatcaattattgttataaatttaacacaatttatttccaacgaagaatctgtttaatgtttttatctcaataactgatcttatgtctgtttttgttgttgttgttgttgttgttt

SEQ ID NO: 41093 - DNA, 539 bp, Arabidopsis lyrata
  Intron number 1 from transcript 922773 (locus 922773) deri ved from phytozome v7.0 (chr-ID scaffold_1; pos 17846615 t o 17847153)
acgaagctcttggttaactaactcccgccagagggattacttcgagaagcacaaattcaatgactcttcttcttctttgccttcatactccttgcaaaatggtaatctatctcagttggttactttagggtttttagttttcttaaaaaaatttggaaattggaagcttaaaaaccaaaaggtactcttaattatgagagattgtgtatgagcagggaatgtgtttcggtttctcatgtaacgcctcaattgagtttttctggatccaaagattcttaattgtgttatggaacgtgtttaacttaagctcactgctttttctctttgcgtttgatttttttgattcagaatgttggtttagtgttaagaggcttttcctttcatattatttcttgatgggaatatgttcatatgtgaagggaaccgcatatactaaagagaaagttgtatatgttatatttggagtcaagcatttataattctatttgtgtcttctctcttcagcttctttggattctcttatttgcttcagcatctgc

SEQ ID NO: 41094 - DNA, 533 bp, Arabidopsis lyrata
  Intron number 2 from transcript 475654 (locus 475654) deri ved from phytozome v7.0 (chr-ID scaffold_2; pos 9726858 to 9727390 reverse strand)
ggaggtggtgatgtaagtatatggatatgtgtttttcaaataacttttagattgttaacaaattttgtaaattataaacatatcttacataattatcaacatatctcaccacaaaaatatatgatcttctagattttgattttaaaatcatgatttttattattttttaatattatttcagttttgttttggagttttttttttttggtcgttagttttgttttggagttagtagttaataatcttattttaaatttgggttatcatactttttcgtctagacaaaaaaatttgctattttatttaacatctcataattacatatactagtaataatataacacatgatttcttagattgaatttttctaattatgatataaggtaatcacaataaatttaatgagattagataaataacaataatttttaaaaaagattttaatttctatacatcaattttgattttcttttctatatattgtttcaacattttcaggcagaaaaagttaaagtaatacaaacattactatt

SEQ ID NO: 41095 - DNA, 519 bp, Arabidopsis lyrata
  Intron number 2 from transcript 484097 (locus 484097) deri ved from phytozome v7.0 (chr-ID scaffold_5; pos 461495 to 462013 reverse strand)
aatctggtacaacttttttttttttttttaatatttttcttattaatttcatgtgtatccatcccctgtttctaatttgttcatcataaatcctaataagtttcaaaatttctgcagtgtttttttttttattgcaaacaaatctcttaagtacaaaaaaaatatattagaaacaagaaaatttctgcagaagttatcctttaaattcaaagttatgaaatgattatttcatataatccatttataagtgtcaaatttctgcagattcgatatccatcaaaaaagtaattataattttttgttgttgttgttgcaaactgatttcttcatatataaaaccttcacatcaagtcaataaagtttcaaatttttacagattttatttttttccggattatatccctttaattaagtttttttttttttttcttcatataacctatgtataaattcattataaaattataatgataatttgttgcagagtgagaagagaagaagtgaagaagattggattga

SEQ ID NO: 41096 - DNA, 874 bp, Arabidopsis lyrata
  Intron number 1 from transcript 357150 (locus 357150) deri ved from phytozome v7.0 (chr-ID scaffold_8; pos 12589049 t o 12589922)
gtaaagtaaactataaaactaaggtaattagattttgtgttaagaaaataataacaaagtttaatgggcctctttttgtttatatatatatatatagggtgcaaatggtagacttaaaataaaaggttgaaagagttgaatgaccattcatctcattttttaccatttgagatgaataagttggaaaattaattcaaccgattcaacccaaaaagttggaaaaatgaatcgattatgggtgcaaatggtagacttaaaataaaaggttgaaagagttgaatgaccattcatctcattttttaccatttgagaagaataagttggaaaattaattcaacccattcaacccaaaaatttggaaaaatgaatagattataaagcaaaattgttcaaccctttcaactactatttcgcagaggaatgagttgaatgatgttcaactttttttgttcaactcaaaaattttcaaccattcatctatatgtcatctatttgctgaagcaaaattgttcaaccctttcaactactatttcgcagaggaatgagttgaatgatgttcaacttttttttgttcaactcaaaattttccaaccattcatctatatgtcatccatttgcagccatatatatatatatatatatatatatataataaaattaattggcctagtgtggtaatttaaaatttttaatggattatatttggataaatatttgtaggagttgaagtcttggatgattgtcaaatgtgtttaatatataatccaagataggcttatccaagcttttggactatattttttcaattcaaatggacttcaaatttgtgtttgtgagagaaatttatcttaaagaagagtgaaaaagaagaagg

SEQ ID NO: 41097 - DNA, 899 bp, Arabidopsis lyrata
  Intron number 1 from transcript 887678 (locus 887678) deri ved from phytozome v7.0 (chr-ID scaffold_759; pos 1257 to 2155 reverse strand)
cgtatccgatcccagcagctcttctcgccacgaaggtatataactacatttttataattaatgtttaattggtatctctataaatatttggacaaagtcgggattctataggaaaataagattaattatatttaatgattatttgaaagggatacatataagtatacactaaaatttttgaatttctatcgacaatgtttttaattaacttcgtttatatttgcaatctttttaattaaaatgttactttccaaaacttaaattagaaaaagaaaaaaaattgtcaataacaaaatgtttgatgaggtttgaacagaaccggacttgagcacatggtgatgaaacattccaataggccctcactttagaagggttccacgtaaatgtttttttagttatacatatatataaattgttgtaaatatgagaaaaaatagcaagtttgatgaacaatttttgaaaaaaaaatccatagaaaaattatttttcataagatttaagttattattattttttaaaggatataattgtaatataatttttaaaaataatagttttatttaaattgattatttttactttataatttttaatattatgaaaattatgatgttatttttttcttaattctactgggtcctaaaattcattggtccggctctgggtttgaatttgatttaatattaaccccaacaaatacaaaaattatatttcctagcatctcttttatagtattatataacgttattatagcttttttttgggtcaaaagatattatagttcttgttgattctattgattcacgaaaattatggtatttgcatgaagatgattcggaattatcaattatggttaatcttcaggtggaagtggcgatattggggcacaatctggccaa

SEQ ID NO: 41098 - DNA, 974 bp, Arabidopsis lyrata
  Intron number 1 from transcript 924612 (locus 924612) deri ved from phytozome v7.0 (chr-ID scaffold_2; pos 861129 to 862102 reverse strand)
gcgttgtgtattgcactaggataagtgaatggtggttggtaagattcaatgtgagatctgaaaagtttgatcaagtagtagtacaatatttgggtgatccttctcctccatcttatcgcaagtaactctagtcattgatattgaacaacaaagatttgaattgtgggttttggaagatgttgagaaacatgaatggtccaagatatagatgattattaataaagaaacatctatttatatatatatatagttatagatgataataattgatagttttgatatatatatatatatatatatatatagttatagatgataataattgatagttttgattaaatttccaataaatcataaatattcttaaaaataataattactcaaataagtaatttgaatatcccgcatacagtattttaaacctacattcttatccgttaaataacttttcttatctttagagcatgattaacggtggtttcttagatagttcttagatttaaagttgaattaaattaaattgaaaatgttgtataaaactaagaaacgtttcttaagacatttttagagttaagaggtgtccacgcaggcccggccctgtacccattttttttatacatttgtatggggccacacaaaaataaaggcccatttttttgtttttttcatatttaataagaacaacaagtgaaaataaaggcctatttagttagatgcaagtctgttaaaggccccaatttccgaaaaaaaggcctcaatttccgaaaaaaggccccaattttcattaaaaaagttatttttgacattatttgtggtattatattatatatagaggcctcaatttttttatttcgtattgggccaagtatattacaggaccgggcctgtgtccacgtggcacgtttgcaccgtgtctccgagtttgctttatgtgtttgtgttctgttctgggtgttgaattgggaacgagagag

SEQ ID NO: 41099 - DNA, 683 bp, Arabidopsis lyrata
  Intron number 1 from transcript 929203 (locus 929203) deri ved from phytozome v7.0 (chr-ID scaffold_3; pos 5908279 to 5908961 reverse strand)
cgtagcttcctctgtccccgttttcgcatccactggtatatatttgggtttgattcaaatctcaactttatttgaattgggtttatggatcttagttatgatgttcatgtccatatttcgatggttattgatcatcagaaaatattctagccaaaaagtaaagatctttataacttttcaaggtttttctgggaaaaggaacaagagattagagatagaccattcttgtgttaagtctagaaatatttagaatttgtgagggcttatttgaccttttttgttatatgtatgttttatttgaaagttcatgaaatatttagatcttcaggatcttggtttttagaagcgtttcttgttttttagctttaattattgtgttaagtctttggaattggttgatctcactgttcttgttaccatctgctgtctctttgttgattatttaccagttttggggttttggagttgtcaaatgtccagatgccttagctcctgaagagattcagttttgtttatgatatcctctctaattgtctaaatgctttcagatatttggcaaagttttgtgttttgtgggagaaaatgtctggtatgagtctctgacgttttaatccagctaatgattgatgttgtgtgttttggctacagtaggatcagcatcagccaagaaaactgtagagtcc

SEQ ID NO: 41100 - DNA, 431 bp, Arabidopsis lyrata
  Intron number 2 from transcript 320780 (locus 320780) deri ved from phytozome v7.0 (chr-ID scaffold_4; pos 14079219 t o 14079649 reverse strand)
ataagccagtcagtgtccatcactcttgagtatatcaatctctttataatttccctggaagttatcttctatgtgttgtatagattgattgaagcgctaaaagccgaaatccttactgtgtttatgtgattaccagtaattttagagtgaaacctttgacgtgttattcgcaatcaatctttagttatacatgtgttttgattttgttgctgttctaattggccttctcaatcacattctcttttgaggttttctgtcaaaatgtttcatctgtttgttatatatatcgtttgtataactacatcttacctctttgggtgtttgtaaactattcaactacttctgatcaggttgagacttatctttcttactttttatgtgatcttttgactgcagcgcttacaatacgcaaaagcaaagtcagattgttt

SEQ ID NO: 41101 - DNA, 243 bp, Arabidopsis lyrata
  Intron number 2 from transcript 475706 (locus 475706) deri ved from phytozome v7.0 (chr-ID scaffold_2; pos 10565350 t o 10565592 reverse strand)
tttggtgttcctggtgctttcactcccacttgcaggtacaaagtttcaacctttttcatcatctctcacttaattctcaaatttgcattcaaagttttgatcttttttcttgttctcgattcaaattagtttcttcagatttatccatcgaattagttgtataagatgtgggttttggtgctaagctgatgagtctgtagatttgatttgagaattgtgtttttggttttttgtgaggttagc

SEQ ID NO: 41102 - DNA, 566 bp, Arabidopsis lyrata
  Intron number 1 from transcript 909043 (locus 909043) deri ved from phytozome v7.0 (chr-ID scaffold_2; pos 16208263 t o 16208828)
attcttgcaagtaagtaaaagcttcttaatttcaactctttcttttctgttgttttctgggtttgtatgcatgaaatctttatgggtttttgattgttatacttttctccacctgggtagtacttgattgcttgctttctatttgctttagcttgtggtttttgtgaaatttgtctaatttacagtttcttcgtaaaaacattacccatccatgaaactgtatagcaaattgaaaaagaagtgaataggttgagaataaagaaagaatctggatttgtttcctttttactatacactaaaaaacattaaaaagttttgatcttgagcgactatgcttatttctagttttttatttttttttgacaatcagttttattgaatttggatctgtttcttgtttcattacaaagcttagaaaaagttttgggtcttgagagaccaaagcttatttctcatcattctattttatctggatttgtttcctgttaagctaaacaaaaaaggttcgagtcttggctctgtttctgctaacgtcaatacaaactgattattgttgatcttacagg

SEQ ID NO: 41103 - DNA, 463 bp, Arabidopsis lyrata
  Intron number 1 from transcript 336095 (locus 336095) deri ved from phytozome v7.0 (chr-ID scaffold_1; pos 13216687 t o 13217149)
tgacgaagctgctgcaaggatccagaggggaggtgagaataataacaaatgatccattgatgattaagattttaactagtagatcatttgtgatcctctctagttaagtattttatgagtcttaagaattatgtctttttttttatacattatgaattgttattgttttctatataatccagtaatgggttaatgaaaccgaaatattttattttaatagatgtcacctttgagtttaacaaaatcttatcaaaacagagagaaaaaaagtattatcaaagagaagtattgaaagattttgtaacatctcaaactgtgtgaaaaagctgctacaaggagccttttgttattaaataagcccatatgcttttggcccatataggtttagttgttttgtaatttttagcctgtcttctgattttgtgaaggagagctggagagggataaagtcctccaaagattg

SEQ ID NO: 41104 - DNA, 421 bp, Arabidopsis lyrata
  Intron number 4 from transcript 928185 (locus 928185) deri ved from phytozome v7.0 (chr-ID scaffold_3; pos 2227863 to 2228283)
tagacttagaatctcgtctgggcaagacacaggtatcgtttgatctcttttcattgaatataaatttgcaagcttttctttatgacacagaaatgtaacaatcctgcttgatagttgtttataatatggtagtagctgctactttatttggttttataaacgtttggaatctcagttcttctctttacttgaaaacagattaagttttgtgaataccttagtctatagcaaacggcattgatgtttgaactggttaatgcatgattgtttttatatattggacgattagtttgtttgacttcaatcttatctagtattcttttgatatggaagtctttccacttaaggtttcttcaagagtctaacgttcttgtttatattaccaggtcgttacaccggtagctcctctaagtcagcaggt

SEQ ID NO: 41105 - DNA, 529 bp, Arabidopsis lyrata
  Intron number 3 from transcript 892895 (locus 892895) deri ved from phytozome v7.0 (chr-ID scaffold_6; pos 3906820 to 3907348 reverse strand)
agttcttctccaaagcgggcaaggttagttacctttgtaccttttctaatatgttgttaattgtctttatggttctagtttttgaggccatagcaagttattaatattgatccatgaatctcaattttcaattataaggttataaatgttttagtgatgggttgctgtttcgatgtgcttgaccatggcatataatccttttactgaagatgtagttcttggctcttataatataataaacattaatccttagtttgcttcattgacttcttattttggcttcgatagaaacgcttattattcttcagtgtttagtaatttgtgtgattttttttatctggatggctagacgtctcttgcttactgcacagagctgaatttatttatcaagtttctgcgctttgatttccctttctggtcttaatattttcgtcaaatgtctgctgtcttttcttttgggctctgttttttctttgttcttattgttctccgttctgtataatttcaggtgagggacgtgcgattgatc

SEQ ID NO: 41106 - DNA, 725 bp, Arabidopsis lyrata
  Intron number 1 from transcript 923350 (locus 923350) deri ved from phytozome v7.0 (chr-ID scaffold_1; pos 25605397 t o 25606121)
ctagattctgggctgatttcattgacaaaaaggtacctaatttctttgtgcccttgattgaataatgttgattgttaattggggatttcataaaaattgaaactttattgagtttgcaagtgaaatgcttagagaaattaagcctaacttttaaggttttttttttgctttggtcaatttcacccaccagattcgattatgggtttgattgttcttgtgttgccgagaaacacgggagaatatttggggataaaggtcattgctttggtcaatttttgttggattgaaacattgattggtaattttggggaatgtagcttagaaaatatgattaatcccttctttatattgttgcttggtttgatatgattgtaaattttggcagataaaacaactgatgatgttgagttcatagaagattgggaagaagaagaagatgaatcacatgtcacttaactatcacgtgtccgaggtaatggataaaggtgagtttgatgttcttgtcttgttctatcaagaactcaaatgtcaaatattgagctcatgttttattgattccgttaacgtcttgaatcagatttgtgatcaattcttgcttatattgtgcttccataatcttgcatatatttctttgcacaccctgaaactgcattctcttttgccttacatgtgccaagtgtccttaacaagtgtttgcttattattattcccgtcttaaaacagat

SEQ ID NO: 41107 - DNA, 241 bp, Arabidopsis lyrata
  Intron number 1 from transcript 330665 (locus 330665) deri ved from phytozome v7.0 (chr-ID scaffold_8; pos 80721 to 8 0961)
atcctcgaggacgagggtattgctatcacggtcggtattcttccttttttctgcgtttctattttcttaattttgattgcatcattgggatttcttttttaattgaacaagtgtttttgttttgttaataatgtctaaataaatatctctggatagagagatcttttgcttctgtttgtttatatccttgaacttgtgttggataggctgacaaaatcgccactttggtcaaagctgctgg

SEQ ID NO: 41108 - DNA, 865 bp, Arabidopsis lyrata
  Intron number 2 from transcript 492639 (locus 492639) deri ved from phytozome v7.0 (chr-ID scaffold_7; pos 8718086 to 8718950 reverse strand)
acaaagttagaatcgaatacgaagctgaaattcaggttaggatctctactaattttaaatttattatctataaactgatcaaaatcatacctaaattcgaaattagagatattgcaaacctcatatttaaaaaaaaaaaaaaacctagagactttaccaaactgtatgtgacagagacgagaaactgacaaatttagttactaataatttctgagtctcgttttttattccagaatttagtaaacgcaacaataatcatttactaattttatttttcaaaagtatattaattaactaatgaatttcaaaaatatttttaaaaatggctgaaataatcaacattagcaatctttgtttttatttaatttttaagaaggcttgaaatgattgaaaatagtcagtaagtgtctgaaaaaacgtcactgaacaaataatcaataattccagaatttagtaaaccaacaaataatcatttactaatttttgttttctaatttcccgtttaatttaatttaaatagtatttttgttggtcaaatagtatatttaaattatcaactttagcctgaagttattgaaacaatcaataaatatctgaaaaaacgtcactgcacagttaaacaatctttcttgatttgagcatctttatttctggccgacatttttctttttgtaaattacaaaaaataaatccgacctgccggaatcgaaccagcgacctaaagattatctgtcaaagactacagtcttccgctctaccaactgagctaaggtcggatattgttttcttctgctataagttacctaataattaataaaccttttgctctgtttcttgattgatacagagatcactaaaacggcta

SEQ ID NO: 41109 - DNA, 448 bp, Arabidopsis lyrata
  Intron number 1 from transcript 936002 (locus 936002) deri ved from phytozome v7.0 (chr-ID scaffold_5; pos 953555 to 954002)
aaacctatagttctcactttcttctctgttcttgggttagtctctttaatcttcacttcttgatattgttgttgatttgttcatagaccagagtttgctaggtggctttgataaaagtgtgaaatttgagcttgaatttgttcttttatgtttgagggtacacgtttctattgcttagttggttctataataagtttgactaaacaaagtctagcaagtgttctcatttctgttgaatttatggtgtattggtgataacttgtgtgtggaaatggcaatgtgtctttttttgaggaacatctttctgttgtttagttgaatctatgaggtcgaatgtgattgtgtcatatgatgataagtgagagcaatcattcaatccttattcatatgatttcgttatgtaagcaagtagaagtgatactgattttgggtttttttctgcagcaat

SEQ ID NO: 41110 - DNA, 372 bp, Arabidopsis lyrata
  Intron number 1 from transcript 937770 (locus 937770) deri ved from phytozome v7.0 (chr-ID scaffold_5; pos 14592360 t o 14592731)
tttcagacaccaatcgttgcctccgaggagccttggtatgctcatcttcttgttttttggctatacatattattttcgttactataaattctaatagtgtttgtttttttaaacgattgtatgttttggatgaatgaaagcaactacgatgcatgaagaagattcaggtgatgtttcaattgatattttatctttaatttatcgattttctaattttacaaaaatgttctcaccgagtagaatatacttttgagttttgagttaaatctttcacagtctgttgtggattagcaacgtttcaagccatattaactattgtgttgtggcagttcgaaagattcatataaattggactattgctacaaaaaaaac

SEQ ID NO: 41111 - DNA, 772 bp, Arabidopsis lyrata
  Intron number 2 from transcript 494591 (locus 494591) deri ved from phytozome v7.0 (chr-ID scaffold_8; pos 3745382 to 3746153 reverse strand)
ccagcttaaaaactcggtatgtaacttaagatttgaaggtcacaagggtgcgggttagtccaagtttgttgtagactagacggctctatttttggagtagatggtgggaaattgatggttaaaataattcccattttttcattggtgttaaattgacttattctcgaaacttaattgatcttagttagttttggcaattttcctttattttgtgcattttttgtatgtgtttgtgatgatttcttgcatttagttgttcagatccgtatacttatcttttagaagttttaaaatgtctttgtagtatgtttttttttttcgttcatttttaaatcttggaaacttgaatgggtcaaaatgagcatctgtggaccaatgaataaataacatgtgccgaaatggtcaactacatgtttttcatattactacaagaatactaaaccatacacttgtgattatcggttcgggttaaactcgattcaaatcaccactcttcaataggacaaagctttaataacaaggtatttgagggttattttggggcatgtaaaaggatttgaatggtgtacaacaagagtaacaagatgaacataaaagaaaaaaagaaacagtaagtgataactagaggaaaagcagtattatgtctataaactagcatatatatattgatgtgttaggttgatattctcttacatttttttttgttttgttttcgatgttcttttacattaccataggtggttgcaatttcgtctggagtggcacttgtagt

SEQ ID NO: 41112 - DNA, 406 bp, Arabidopsis lyrata
  Intron number 5 from transcript 493567 (locus 493567) deri ved from phytozome v7.0 (chr-ID scaffold_7; pos 17701890 t o 17702295)
ccccttggtcttccagagagtactacacaggttaggagaaaatattttggtgattttcgtgcagaaacttatcgatggtttcactgttaagtactgatcttcaaacattcagtcaatttttatagtggttttgtgccttctttgtctattcataatttcatcaagtttaatgtgttttttcaccctttgattgggaagaacaactggtcatttatgttgaaacaagttttaaaattgataaattttcaagttccatttcttttgtcctgtgatagctctctcattttattgtaaaactatagcaggaagttgaagaaaactaggttgtgtgatatagtcttaaacatgttccgttgtacaataataatgcaaaataaactcgatttgcagaccaaaactaccgtgg

SEQ ID NO: 41113 - DNA, 574 bp, Arabidopsis lyrata
  Intron number 1 from transcript 937652 (locus 937652) deri ved from phytozome v7.0 (chr-ID scaffold_5; pos 14042127 t o 14042700 reverse strand)
caggtgaagttccaaaccaactacactatttgtagttaacatttttaaagcttcttcgaaagctacgtataatatttgatgagagaaattaacttggaatttagaatttattagcggaataaaaaaacagccaataacaatttatttgtttgtttgtttgtttactttggaatagtttggatttgaatggtaaatagtttaatggaatagagattaattgatgatataaatgaataattttgttccattcattcttgaaatagtggaatattatttgttctgtggtttactaatctgaatttatatacttttgtcaaatgaattattccatttagtaaaagttttggtaattccactttgttgttatactttccacctgctgtcaacttttgagtttcttgttttacacggcatcgactcttcaacgctgtccaagacttttcaatctaatgcatgatctttgatgtaacactcagagagaatctgagtttgatttgataaaaaaaaaaaaaagaccctcagttctcttgttattgcagattgatccactcaagtacaagaacataacttctgc

SEQ ID NO: 41114 - DNA, 536 bp, Arabidopsis lyrata
  Intron number 1 from transcript 922984 (locus 922984) deri ved from phytozome v7.0 (chr-ID scaffold_1; pos 23338751 t o 23339286)
cttctggtaagtttgtcctgtgattgcctcaatgttctctcctatgtttgctcatctcgatgtactgtgctttctttgtgtaatatgcctaactaggaagtagcaagaacctaagcaaactattttgattcatgttatgagtgtgttcagataatcggatgcttctactatgtttgtttgctcatgtcttatgtactgtgctttctttgtgtaatatgcctaactaggaagtagcaagaacctaagcaaactattttaattcatgttatgagtgtgttcagataatcagatgcttctactatgtttgtttgctcatgtcttatgtcctgtgttgtctttgtgtaaaatgcctaattagcaagaacctaaccaatctatcctaattcatgttaatgagtgtgttcttctggtttgtttgctcctctaatatatagatgctactgttatgttctctcctgtgttagcttggcttcttatgttttgtctcttttttttccgcagatcaacaacaagaaaatctccccgctcctcttccc

SEQ ID NO: 41115 - DNA, 531 bp, Arabidopsis lyrata
  Intron number 2 from transcript 481858 (locus 481858) deri ved from phytozome v7.0 (chr-ID scaffold_4; pos 13520095 t o 13520625 reverse strand)
tctgcttgaattggaagctcccatcaagatctgcggtcagatttttgctccctttggttttaaaatagtggttttttttttttttgtagtggtgaatttagtgcatgttgtgataaagtatcaagatttgtttagtagtaatgaattgaattcttaaaaatatgtttatcttgaaaatccatgagctctttgtaagctgtaggtaggtcacactttaggttgtaagtttgagcattaagtgactgaagaaatgtgagattttgattgtcttttgagttcagaacaatgaaattaagcgaatgggtggtataaagtgggaatttttattactaaaagtctaaggattaagagttttgactggttctatgaggtttgattcttttatcttaatgttgactagtcaagttatgtgttttcattgggtctgagaaaacatttcctgcaaaagcttaatgttgactagtatcttatatgccatgttttcttagatgtaatggttattttttgtcttttactttataggtgatattc

SEQ ID NO: 41116 - DNA, 415 bp, Arabidopsis lyrata
  Intron number 2 from transcript 470729 (locus 470729) deri ved from phytozome v7.0 (chr-ID scaffold_1; pos 2583426 to 2583840)
tcaggggaaccatacttggctacaaaaggtgcgccattgtctatacatgatttgttgttcttttttcactttactcgattgagtcgtttttgaactagctcccataaacagtgaattttggctgatattactggttaatacacttttttatgaccttagattagttgcttataggattcaaatgctagttcctgaaaaagtagaaccacttatccacttatctttctgtacttttgattccgagcttagatagttgaagtgggaatagggtataacaatcttccatgaagtgtgtgataggttgcaaattgatgttgtttctgttttgtatttagtcataattgtgtccttaaacacattttatgtgtaaatatgtataggtcgaagtcaaaccagtacccaaacacgtccttag

SEQ ID NO: 41117 - DNA, 857 bp, Arabidopsis lyrata
  Intron number 2 from transcript 330245 (locus 330245) deri ved from phytozome v7.0 (chr-ID scaffold_7; pos 19603258 t o 19604114 reverse strand)
tcacttggatctcgaatccttccggctactcaaaggtgagttctttttgaaatttgattggaaatttagaaatcatgcgggtaggacaaagtttgaaaatttctgatacagtgatgatgataatcatatgatgatgagggtaatgatgaatacggtgttaatgatgtgatgttcatatgatgatgatgatgaatatgataatgattcagggtttaaggatgagggtttggggggttttaaaatgtcaagattaattttatgatcttgattgttgtttattgatatgcctgttactttgaacttgaatcgcattccgtggccctttgaacattgaacatggtgattactgtctataagagaaaacagtcttggaaaattgtttggactttattactaattatgtgtttcagacttttcgagttgttaggttatttctttggcttaatttatgatggagctgtccctcttctttagagtaattgtttcaggcttgtctgtgtcttccttgattattgttgataactttgtttgaagttaaagttttagtctagagacttcacaataagtttgtcatctttcacttttcccccatatgtggtgactcatatgtatttcttttatatttatgttcttacatattttggatttttatggttttgattacttttggttaatcataggacttatttggtgtttaaccaactgaggaaattcaattaacagtctaatagtcttacgaaagtaatattaacataagtcaaaacatttgtgattttgcttgaattctatgacttctaagttctaattgtgtatatatactagatcatccccatcggacaatcttctcctccatagga

SEQ ID NO: 41118 - DNA, 688 bp, Arabidopsis lyrata
  Intron number 3 from transcript 476943 (locus 476943) deri ved from phytozome v7.0 (chr-ID scaffold_2; pos 17812259 t o 17812946 reverse strand)
ccgcgccttcttccgcatcgtttaatctgttatccttcgtcatctctttctccaaatttgtttaggtgagattcgctaaaggtctccgatcttctagtttcggtagagagatctatcttagattctcgattaggttagatcttaggtctttgtttgtgtgttatcaaacattgaattgtatgattcgtctcgatcttatatgtggatcgataaaatctggtttactattgatgcgttgcttgcttttgcatgaattttggatttaatttaccagattttcttctacagatctggaattttgcattgtctgtggatctaattgtgaatttgcttgtgattgccatttgaggatccggttaatgctcactctattggttagaattagaagtttacaactatagtgtagtagttatctgatagcttatggatagtttcctgaatcggagatttggatcagagatttggtcgcttatgcatagtttcctgactcggagatttagatccaaggtcaatggacatcaaagagcattgcttttgtttgattttatgaattgacattttttccaaactgctctttgagagtgttatattatattagtgatgactcgtttgaattttgcttgttggttactactttggatgaatcttacaattgagttttttctttaatagatttttaatcgatcga

SEQ ID NO: 41119 - DNA, 674 bp, Arabidopsis lyrata
  Intron number 5 from transcript 481999 (locus 481999) deri ved from phytozome v7.0 (chr-ID scaffold_4; pos 14436816 t o 14437489)
aggtatgttactacaaatgacaaatcaaagctaagaaatctgtgaatctaatcactcacgattaagactttgtctccttgaaattagttagcaattttctgattttactggaattctcggttgattatgtttgcttgagttgagacacgtccttattttgctttatatgtgattcttgagctaaagctcttcttgcggaattagaagaattgttctgtgttttatgttttttgatgaggtttgtctagactctattactttgtttcttctatcatgaatacattgtacatttcacaacctttggctttgttttctttttgtctcttttcatccttatatatttgatattattttcctctgtttttgctgtgcttagttatttcaggtgttgggtttagaactcaattatttataaagaacatattcacaaaaatgcttatttggatgaatgtagcttatgtatccatgcatcacaatgcttaatttgcattagtctctgcatctttactgaggaaattatctgagttattcttctcaagttaaagatgacgcttagtacttggcagatatattagtttgcatgtaaaacacaatttgattgccacctaacctcactttgctttacttgtggagtaacaggcacagtttcttaaagtttccagcgagataccagc

SEQ ID NO: 41120 - DNA, 609 bp, Arabidopsis lyrata
  Intron number 1 from transcript 915964 (locus 915964) deri ved from phytozome v7.0 (chr-ID scaffold_8; pos 4882905 to 4883513 reverse strand)
gaggagagggaggagaaggagcagcaagtgacggaggaggagtagccggtgacagagaaaaagtagccggtgatggaagagaaggaggaggaagaaaccaaagagcgagagaaaagaaaattatggatataagtatgactaggtgattttaatgttaaagataaatataatctttaattataaaatatgttttagtcgttaaatgaaatctatgtaatcgtgcccaccttaattaattatgaaaaaaattggcttctatgttttccccttcttcttagaaatctctctctatctctctcgtatatcatgtatatcgattctgcataaataaagcatatgaagacctcattatcacgtaagttcgccctaatggagagcaaaggtattgcgagagtacggcgccgctagtttgaagctcttctcagatctattccgccggcgttttttactctttccttaacactcgagagacctattagaatgctttaacttctattttcgccccttgaatttaaatcaaagatttttgctcggtgctgttttctcaaaagctcatctttttggttctgcccagcgcatctctggctcgtcggcactcgagagatagag

SEQ ID NO: 41121 - DNA, 682 bp, Arabidopsis lyrata
  Intron number 2 from transcript 488679 (locus 488679) deri ved from phytozome v7.0 (chr-ID scaffold_6; pos 7528358 to 7529039)
ataataaggtaaataattgttacaagtcaactagttaaggaaaattaatttattattaatacactatatttgataattgatatatatctgattttgttctaatggtttagatgcttaatcccacatacaattatctaatcatatatattacttttagaactaattcataaaaacagaagataaaattatttggattttgatctaatagaatagaataaatcaagacaatttagctattaagtttgttttgcttctaattttggtggctaattgttattaaagttagatctcaacttatacatatgcaactgtttgattgattagaagctgctgattagaaaagttgtctgtgtctttgatacaacgagagtgataaggatgcgtttggcggtgtggcctattacgtgtctaagtgaacaatcaataattatagaaaagattcttattttgtctttgtacgttttgtgtttatcttttcttgcgtcaccctcacactttgaaccaaaacacgtttatatataataacgtcattgtcacttacatttacttacaagtttatgtgcatatcaataataagctagagcttagagatgtttgggaccgagttagccattattgatatatagttttatgattaaaactcgttgatgtatgactgcttttaaactcgttattgcagcga

SEQ ID NO: 41122 - DNA, 589 bp, Arabidopsis lyrata
  Intron number 3 from transcript 470409 (locus 470409) deri ved from phytozome v7.0 (chr-ID scaffold_1; pos 1397824 to 1398412 reverse strand)
attgtaggtgtttttactctttggtttcccactgggtaaaacttggatgtggctaacttcaaactgagtttcttcatactttgtacgtacaagtgcaagttcttgcaaagatgtgactcgatgattcagtccgtgcagttggttctcatttttaaatcgttccattctctaagttttcatcatatctaaaaactggctacagacgccctgcagttcccttcttctatgtacgagatttgtgttcatggtctggggtagatacttcatcttaatgttgcaagccagagatgctttagccagagaatctcttgttctttttttctctcctatgaattaatattatttcatctttgattcaaaagaatgcatgcataattgttggggtggaaatatactagtaatgtgctagagatttttatctgtttgtgttgaggagttcagttttgtatagcatcctactatgtaaattctccttctttgtttgattttgtactttattatactcttgatgtgtgtttcagctgtttaatgtgaaatttattatcttttcccaggccttaaaccctctgagttatttggaaaatatact

SEQ ID NO: 41123 - DNA, 336 bp, Arabidopsis lyrata
  Intron number 1 from transcript 480436 (locus 480436) deri ved from phytozome v7.0 (chr-ID scaffold_3; pos 20448512 t o 20448847)
cttgtgcatcttctccgtcacctatttcttgtcccgtatgtcactttttgctcctttttttctcttcgattttgctgtttcagttttggacttcctaattttagataacaacttctacaatggtatattggtattagtctatagagtaattggttactctgttcttagtttatttgtttggaatcaaagtttaatctttatatacattgtttctctatatattatggtgttggtgttaagataatgtttttgttcgactatatttatatgctaaatctctgctttttttccttgtttgggattcttttgtggtttcatgcagatacaagtaagaat

SEQ ID NO: 41124 - DNA, 483 bp, Arabidopsis lyrata
  Intron number 1 from transcript 472752 (locus 472752) deri ved from phytozome v7.0 (chr-ID scaffold_1; pos 11248040 t o 11248522 reverse strand)
aagcccatctctcgcttgcttactctcaagtctcaacggaggtaaatttcctaccgttttctatatctccttcgtaaatgtatcgtttttcgatcattctcttcttgtgctactttgaattgagagagatcagttgttatttctctaactggaaacatgggttttgtttcttctagatcgtacaaccaaagattgtgtttttacatttttgtgatcagaagaaccagattgatccaagtgcattgcgttatattgtcgaaacgtcgtgtgaattttataatctggtagcatattctgctgtgatcattttgaaatcgatacatctgagcttacaaggtgtttgatttaatgccgcatttgtagttgttgaaaattgtgaatttgttgtttctgttaaaggttttgtctttgtataattgactgatctggtcgactatatcttatggctttgtactttatcaggagaagttttgaaattcagat

SEQ ID NO: 41125 - DNA, 816 bp, Arabidopsis lyrata
  Intron number 1 from transcript 493454 (locus 493454) deri ved from phytozome v7.0 (chr-ID scaffold_7; pos 13999571 t o 14000386 reverse strand)
agatttcgaagtttcttctcaaggttagatttttcgtttgctactaaaatttgcgaaaattctccttcttgtgttgaagatttcgtttgatttcaccttttatccttctcggtagtgaaattggaacttgtaaacactttgataatgaattgatgtctaatttttggtgataaagggtatggagtttgcattttacgatgttgggtttcactgtaaatgaagttctttccaaaaacatatgcagagacttcttttgagtttttggagatcagacagctacatatgtttctgtagctagttagtgtcggaatcatagatcaatgcctatttctcttgaaggtacttgtggttttcttggaaagggaaaaagtaatcatcttgtatctttgtaagatcacttaagagtgtgtgatcttctcagaaattattggcttctagtcttgttgcggcagtttcagtgcttttttttttgttttgtttaatgaaaattagtagtttcaattttgagtactttgttcttaattttgtctcttgattgattcctattctctgatgtagaattgagtgagctgatcagtaactaagttcttcttatatgcaggtaccatataaggttaaatgctattagttcaagtgtttttttaaacgttatgttttttttttctctatgcctgtgttttttactgctttatataatctttattgaggcttgatggttatcatttagattttaggacttattttgggttgcggtttttacgattcatccttgaacttagaatcttttgtgcttttttcaggtgacagataaaccag

SEQ ID NO: 41126 - DNA, 783 bp, Arabidopsis lyrata
  Intron number 2 from transcript 485653 (locus 485653) deri ved from phytozome v7.0 (chr-ID scaffold_5; pos 16297817 t o 16298599 reverse strand)
tccatccaaatttccgatcgaatttgccgtcgctggtaatagtccgttctttaactctcttttcttcattttatcactgttttgtcatttattgggattcaagattttaacactgatggatccctttggaatggaaggtctaattgcttatgagttttaggcttagagagggatgataactttacatcttaagtcttaaccatcttttggcaaaaaaaaagtgtacgtagaaatattgtgataagacaaaagggagatgactcatgaactttcaactcaaaactaatctcaaaactaattagtagtgagtggagtgatccaaatatattaaatataaagataagtatttttcttattttcgagttgtgattggttcatactccgtctaagcttgtccatctatttcattttcggttttcaataaacgtcatgcttagtaaaatacttaaaattggactaaatatatttatgcaatagcatgcaaaccgtgcaggaagttacatgcattccactttttatacatgtccacaactttcccgttggagtttgattgttctgaagtatacgccaaaatctcaaagttttatagtttatagacacgtctcatcattttattttatttttaattattatcgtcggttatccatgcatgaattggttcataatcaattacatgttgattcataaagtgaacactaatggcttattgtggacatacgaaaaaccggtattttatgtgaaattgaaggtgacctaggccaaaccgattggacattaagcaca

SEQ ID NO: 41127 - DNA, 820 bp, Arabidopsis lyrata
  Intron number 1 from transcript 329405 (locus 329405) deri ved from phytozome v7.0 (chr-ID scaffold_7; pos 8786539 to 8787358)
ttataccatcaagggcacaaacaaagttgtgagaggtagtctttatattatcctttattatcgtcacttgtcaaatttagacattcttctgcatgtttttgggcatttgagtgttgagattaggtttataaaggaagggattgcttgaaagcttcgttttggagtctgtattgttcaatgtctgcttaggtgttttagattcactcttgtttttggtcgttttgttcaggtgttgtgtagctagctgctaagggttagtcactgcttcgtagctaggctttagaaattgtctggtgtatgaaatggcacaaaatgtgatatttggtagctctcttgttgttagaactgagatttcttgcagtgaattgttttgatttgggccttttagtgtaaatttccttgcttttttggtttcttttaatgaagtttgtgtttggctggttggttaaatgtgaaacatgaattcattttatctctatcatctgcattgtagcttgttatgtttgttgacacaatgtgtgcttccacatgttaagtatctgcgtatatctagattctggtttttttcttctggtgactaggtgtataagagttatggtctaggcatttttcgttgaagggagtaatctttaaaagcttgaatgttgaaaatcaccgctttttaaaatttgcaacccaaacttttgttcatttaaagttaataccttttttagatgaaagaatgctagtgttgggcatttatatcgctttactaatgttggcatgatgagctctgaactaatccttgaggttattttctgcagcgggagattgtgtgttg

SEQ ID NO: 41128 - DNA, 319 bp, Arabidopsis lyrata; identical to SEQ ID NO: 39107
  Intron number 2 from transcript 495589 (locus 495589) deri ved from phytozome v7.0 (chr-ID scaffold_8; pos 16887140 t o 16887458)

SEQ ID NO: 41129 - DNA, 484 bp, Arabidopsis lyrata
  Intron number 2 from transcript 490272 (locus 490272) deri ved from phytozome v7.0 (chr-ID scaffold_6; pos 23408455 t o 23408938 reverse strand)
tctgagaatttgaaaaacccaccgagaaattcgaggtgaattttgatcatcttgttcaaaaaccttttttttttgtctatattgttatgtttcgattcctaaatcattaattttgacgaggtgatttatatattgttatgatcatgtcttgattttcttctctaatttagttgctttcttttgattcgaaattagggttttagtgtttgctgtaaaatcctaaacgcataaagtttctgcctttcgtgtatttgtttgtttgatgcaatcatattgtgtagtgtcttcaagcagttttctagggtcttgcataaatatgatgtgtaagttcttatttattgattttaatagttagatgatacttttcagagaagttattgtcttttggtattacttgaatcaacccaatagctgtttcaccattgtaacccaggaataatcgtttgttttggctttcttgcagatttagttgattttttcactg

SEQ ID NO: 41130 - DNA, 796 bp, Arabidopsis lyrata
  Intron number 1 from transcript 483145 (locus 483145) deri ved from phytozome v7.0 (chr-ID scaffold_4; pos 19919871 t o 19920666)
acgaggtattcttctgattgagctccacgtttaaccaaaccatcttagattttgttttcctaactattgttttcatgtttggatcactggattgaaattctcttgttccgtctttagaatttcatctctggtaattttggtcttctctatgaagcgttttacgtgatcggatattagcttctcgtctttaacttgatacttatgtgcaagcatctgaaattcgtttgatttatccattcggattttgttgcattaccatttcatttactatctcactctataaaattggtttcagttagaaaatttgtagctccaagctgattgattgcatcattatttggtcttcgatggtttgtgttggcttgtatagtctataagtaaattccgccaaagcttaaaactttgtgttcaatcaatcaatctctctgtgtgtgtttattatcatcagctagacttcgtattgcctgataattcatgattgagtgatatgctttatttactattatgagttctgattttgtagaagcaataactagtgtttgggagaaaacaccacataaactttctattaatgtattagaaaaaagaaagttggaacctatgttttataatttttttttctctatatattgaagtatgaccgacctataattgaatattctaatgtgctttgaactgaggtaagcggggatttttcctggagtctttggtttgcctacttaaatgtagataagtgattaccaacttatacccacttttgcaggtttataactgagacctgtcaaataagctatag

SEQ ID NO: 41131 - DNA, 471 bp, Arabidopsis lyrata
  Intron number 4 from transcript 482052 (locus 482052) deri ved from phytozome v7.0 (chr-ID scaffold_4; pos 14790152 t o 14790622 reverse strand)
tttgactggtatgctattattctccacgctaatctttgatctaatctgaaaactgctttctagtaacattgtagctataggatattatgaactgctatagtgataaattgagagtttgttttatatgtaatgcagataaaagtttcaattttcatgatttgtttttttcttggtccgactatagtgatcttttcaagttaatgagattgtcgtgttagattttttgtccctgtatatatattacgtcagtgaaaaattgcgtacgttaataagattgtcctgttagatcctatatgggtgtggccgaagtgcgtgtatgttatatttcatattcgtatttaactactaccatgaagagtaaggccatagaatgaaaaattccttgcacatgctaagtactgtccgttttctctaattcaggcgtttcattctgcagcaattttcgtgttagaagggactttgtttcaaatc

SEQ ID NO: 41132 - DNA, 781 bp, Arabidopsis lyrata
  Intron number 2 from transcript 482052 (locus 482052) deri ved from phytozome v7.0 (chr-ID scaffold_4; pos 14791683 t o 14792463 reverse strand)
cggctttctaattgctgttcctttcgtgggtcgctggtaagttttgatctttttcatttgttgttatcgataaagtttcgatttttttttgaataatcgcactgttagcttaagggtttttgaggtttcaatttagaatcggattgctcctgatcaaatccctgttgtaagtagagaaagccttattctattgggaaggaattcgccttttctgcttcgtcttcttgtgaataaagagttggttttaaggaattgactttgatcaaggtatatttgttgtgtgcaaaggttgcgtgaaccttgtttcagcctcttgattgagtatagattactattatctacgctgtgttttagtgctttctcatattgcaatgtttcattcctttttttggagagaacggagccgtgttcgctttctctgcaccatcaattgtcatcagaatgctaggcgtttagtgcattgtccatagattctgctagtgcgatggtgggtctagtttatatccatcatggtggaaaactgttatagaaacatgtctttagcaggttatgccacgacttccagatccttggtttgtctttctgctttaaggatttgatttgcctttgtgtctcatcggttattattttcattgtatgtgcttctagcttgaacattttggtggcacttttttgtttgcatgcataaattatctgtcattagtggttttcattgtggatgctttatgatattcatgtttgatgcaggatttgtagctgcattctcattgggcactacacg

SEQ ID NO: 41133 - DNA, 322 bp, Arabidopsis lyrata
  Intron number 2 from transcript 485290 (locus 485290) deri ved from phytozome v7.0 (chr-ID scaffold_5; pos 14402682 t o 14403003 reverse strand)
ttttcattgtgttcttcaggtaatctcatgttaaataaataaaatcgatattttaattagaacatatttgattgtcaaaaaggatctatataagtagtggtacccaagacatagtgtgattcttcaggaattcacacataaagtttattaatatattttgtcttgtcaacgtttaagaatatattttatcgcaatacatatattagtatacaccgtttattagttaaattatacatacatatttatatattgcataattttttgttatcctctaattgttttcttagggttgaaggaggaccttggtgttactcatatcgat

SEQ ID NO: 41134 - DNA, 380 bp, Arabidopsis lyrata
  Intron number 1 from transcript 482591 (locus 482591) deri ved from phytozome v7.0 (chr-ID scaffold_4; pos 17151961 t o 17152340)
caaatctgagttacttttaatcgccttgaaccgtaagcttcgtccttgtaaagttttcatcttttctctgattatctctgattggtttgagaatacatatgtagatttaggttgttccattattaattcgcgtcatttgaagataagaaagtatctatctttctttgttttggatcctgaatctgctgtttgattggaatattggattagtgagaaaatgccccttttattgtttaggcctgtgatttgaaatgatatgagagattggttttttttttgtattatgtgttaatattattgttggagcttaatgcaattgagtgtttatgtgtattctgtatgtagtcgtcaaagagaaagactaaagagccaaaggttga

SEQ ID NO: 41135 - DNA, 651 bp, Arabidopsis lyrata
  Intron number 2 from transcript 473392 (locus 473392) deri ved from phytozome v7.0 (chr-ID scaffold_1; pos 14567687 t o 14568337 reverse strand)
gattctgctatcttccttaggatttacactctcgggttagtattttctcatctttcttctcgcaatttggttttgtactttaaaaaaaacgaaactttttgagacttgatagtaaaatctgttgagaggtcaatttctcgagaaaatgaaagaaaaaaatcgaaactttttctactaaaccgaattttgctgataattacaagtgccctttatttttattttcccacatgattatttcactaagatttgagaagtagttctcgagaaaaatggaaactttcgagaaaatttatgttttttggttcttgttcttgtcggagtaatcttcaagaacgaatttttacgagtgacaaattctcgaatttcacggttttaacaatctttactcgttagaattattgtactttattctaacaaaaaaaaagaatgttacagctaagtttcagatttgtctgctctgtgttccacaaagacaaaagcaacagaagtttcgtttgtgttcactgtttcgtgtttgtttcctgagaaaaagtcacttttagataactttctttttttcccaggaaagttactagagaatctgaagaactatgctaaaaatctgctcttttttcttgtttttttggcagcttgaagatctttgcaccagtg

SEQ ID NO: 41136 - DNA, 928 bp, Arabidopsis lyrata
  Intron number 1 from transcript 946030 (locus 946030) deri ved from phytozome v7.0 (chr-ID scaffold_7; pos 9227894 to 9228821 reverse strand)
tctggcgatttcgtcgacctctgtgatcgttgcgcgtaagcaacctttccctccttcctttcttcgctttcttcactctctctctctctgtttgtttttttgagttgatcatttcggtttttggagtgtgcttgtcttcgattttggaaaacgtacttagttttttttccttcttctttctgtaatctgggcttgtgttagtaagatgtgctagcttgtggtgacaaaatttgaaacggtaatttcagagtatagagtccgcatgtgttgactacaagccgagaaactaggagccattcttttcggaggtttattggaattgtttaacgctgttgaatttagtgattggaatatagagttttagcattttgatggatgctgggggactaatgagtttcacctgaaccttcatgtagcatcaatgttgtgtaacaagtagagagtctagaggttcaaagtccaagtgacatgaaagagataggagaagtgagactaagggacaaaataattaaagcaataggaagctacattgcattctgatccaccagattggagaaattcgtccactagtgggttttatagatttttatattctgctgcatcaaagttagaaaatataaaatgatgagtttcttaggcttactttgtgctatttttgaggtgttatagggagcattttgtgaaataataaattgggtaaagtaatggtttctatgtaaacacaaggtcactttcatggtattgcaaagcctttgagtatcaggatttaattaggaatcagagactttaaccaacacaaagagtctggttttcctttgtttgatttcactactctgcagacacaattcttttacctgctcactgcatcaatatcattaatatcgattttccaaatatataatgattatattctggttcagctctgctt

SEQ ID NO: 41137 - DNA, 931 bp, Arabidopsis lyrata
  Intron number 2 from transcript 484504 (locus 484504) deri ved from phytozome v7.0 (chr-ID scaffold_5; pos 3529252 to 3530182 reverse strand)
tcggtggtctttttcttcttccaagaaaagttttggtatttattccaaaaaaaaaaaaattctctttttgaatttaattcttgatttgggttctttcactgttccacctttttggattgtttttttctgatattttagtttaagttattggtttgatgatttgatctaatttacacacttttcttgttgcataaatatttgttgttttatgtgtttatgaatattagcatgtggagattcggtgaccggcaaaaatgttattccataaatggttcttctaaatcaatttgatttgatttctcttcctgtcaacatagagagagacttttagttataggttcctcttctttttttcttatctgataagatcagatatcgaatttgatttcttccattaatagattttatgctgttgacaaaaaaaagattttatgctaaaacagttacttttccgtaaccatattgagatttttcttacaacaggaaaaagtaaattttaaagtgagagtgagctattttggtgaattatgatttgaaaagttgtctactttaactgtgacccagaagatctgacaaaatatgaaaaagtattactactaatcagtcttcttgatctgggttccattgtttttcacgctttaatttgaagggtttggcaaaaattcaaaatttttacccgggaactttggagaattgattttaaatttcaagttaatctcttttcaggcattgcgttgtcacttcctctgattctatctcctctcttttttgaggtctattgttctattctatcttatgatggtgattgaatcaaaaggttttgatatatacacattttttgattagtttcattgtgtgtttgtgtgtgttttgtctaccattcttgctctaatgttttgaaatgcatatttttatgtcacaggaagcaaag

SEQ ID NO: 41138 - DNA, 497 bp, Arabidopsis lyrata
  Intron number 2 from transcript 496509 (locus 496509) deri ved from phytozome v7.0 (chr-ID scaffold_8; pos 20895752 t o 20896248)
gagtgtaaggttaaatgttcttcctttcctctgtattggcttagcaagattacattattttctttctgtgtatcatcccttatgttactatgctcacagttcgttcaaacatctaacacttgtatgcaagtctggtcatgttattggctttggttgtgattaggttttagttttgctgaatttatgttttagttttgaatttatgcttgattttttaggtgcttggtttgtaaaaggtggatgataagtggtcgccttttccatgtctgagtattgctgttagcttgaattgaattaattatcacggcttacgtacatagacatatcgttctctaattttctatgggaagtgcactatttagcctcttctttttgtgttgtatgtgtttgttctcttctattattcccctttttcatttgaaagaaagtctgtctactgatatcctgcccctaattgcgaggtttgcagtactacttcaggactggagggtgcaaat

SEQ ID NO: 41139 - DNA, 344 bp, Arabidopsis lyrata
  Intron number 1 from transcript 893682 (locus 893682) deri ved from phytozome v7.0 (chr-ID scaffold_6; pos 7296501 to 7296844 reverse strand)
aaattgaagctattcgtcgtaagagagttcgaaaagtaagctcctttttttcagcaaatgtggcttttttgttaaccataactagttgactggctgctttagtcaatagtattcatcttaacagagctgagaattggcgtctttgctctagaggagaggaagaaatagcagagtagttttataaggaagcaaagttttgattctgttgttgttatgtgatctttaatggttgatatcttcttggattgactgaatgattctgccttttggttactggttcgtccgctctatataaactggatggtgttttttgatttgtagggaaaggtccagtatctaattaa

SEQ ID NO: 41140 - DNA, 447 bp, Arabidopsis lyrata
  Intron number 1 from transcript 480416 (locus 480416) deri ved from phytozome v7.0 (chr-ID scaffold_3; pos 20072295 t o 20072741 reverse strand)
attctcgaggtacatatactgattagtaccattgattgtggttttgcaagtgtttagaagaaattggggaatttatcaaaatttgtgtttgattgatttttggtttagctgcttttgtgctaatagtttgtaagagggcctgaatagcagctactagtattaatttacattgatctctaaccatttagtttggtggacaacaaagtaagtaagacatgtggttccaaatgcttttattacccaatttcttctggttacaactctagtctacttccacaacttagcacaaacaccaacaataatggataggtagatgcttaggttgacatgaaaattttcagttcttgttgtttcggttattagtatgacactaagagtatttgagttttgaaatcctccctcacgtctcatttttctatgtacagcagctgaagttacagaacgatc

SEQ ID NO: 41141 - DNA, 536 bp, Arabidopsis lyrata
  Intron number 1 from transcript 488313 (locus 488313) deri ved from phytozome v7.0 (chr-ID scaffold_6; pos 5952981 to 5953516 reverse strand)
cagcttaagtaacgccgcctttgatttgacttgaggtcagcgttgtttcttctcccagatttgtttttttttttccctttcgaatttgtttccgtaatggtaaaattatcaggtttctttttctcctcctaatttctgcgttgttaaattttccatagtcgggaggttttttttttccgttttttcaaatctgattgagagatatggtgatgatcaatttgtgtggtgtagaaaaacttttgagagcaaatctgaatgcgtgtctgggaattattgggatagatcgaatcctttagttatttatcatggagaacgaatgcggaaaccatggattgtgaaattggtatcaattcaattgtacatttgcaggatttagggaactttaatgcttgtgtcccaaaagaagatgtttctgagtttataggctttcggatttcgggattccgctgtgttgtcaattttaatcatatgaagaagacttggtcgtcattttttactggaattgctctgtttgcgcagataagtttgttggtgat

SEQ ID NO: 41142 - DNA, 618 bp, Arabidopsis lyrata
  Intron number 1 from transcript 902141 (locus 902141) deri ved from phytozome v7.0 (chr-ID scaffold_4; pos 20369225 t o 20369842)
gccaagtctgtcctttcggcagtcaattgggcatattctgacgcaggggagatggaagacgatggagaatcgaccgctggagacaccggagcggacggagaggctgggctcgagggagactgaggaggaggcctagcacccgtagaaggtggaagcgacggcgaaccctttttgcgtttcttctgcttcgccataaggaaaggggagccagagaagacggaaggaagaggattccgacgccgtgagagacgccggcgaagaagagaaaatgagctcactttcacccttttgagagagagaaagcaaaggagaaaaggaggaagaagaagattctagaccataagaaaaacaactttaatctgcataggagatatattatgtatatcggtaacattatttacacaatcttttgacacatgttttctttgtgatgttagttaccataaagaagtgatattttaacatcccaatgttttgtttttacattaactttactattggaatcaattagtttgtcaaccacaaaagacatcaatctctcttaagaaaattattagacaaagttcattatacacaaattacaaaaaaaattccatgaaaatagagaaatcgaaaaag

SEQ ID NO: 41143 - DNA, 471 bp, Arabidopsis lyrata
  Intron number 1 from transcript 951489 (locus 951489) deri ved from phytozome v7.0 (chr-ID scaffold_8; pos 22375550 t o 22376020 reverse strand)
gaattttctggttttccgatatcttcaggaatcaggtacgatagataatagcctttcttctatgttctcgcggattttgttgtttttgtttttgaatttgtatttgttccggtagctactggctgatgttttggatttggtttcgaattgtcaatggtgttatcttgttctacgaatttagagcagttttagttgtttccctggatttggtttagggtttggaaatttgtagtttttaggatcttcataatgtctcaacggctcaggatcccttagatcttctagttcgtactgctaactcgcgaatctaggttttgatttttcaatgtcgaggtctgggagcttgagttttctgtatctgaagagtttttatgttagatgattgtattagtttatgctctgtttttatttatttatattaattctatctttgttttgcagggtttacacactctgcattcactctaggtt

SEQ ID NO: 41144 - DNA, 493 bp, Arabidopsis lyrata
  Intron number 1 from transcript 356828 (locus 356828) deri ved from phytozome v7.0 (chr-ID scaffold_8; pos 5599114 to 5599606)
cttcttccgtggagggagagaccacttcttccgtatgaattcataatatactccatgtttttgtttttcttattattattgcatgtctggttttcttcacccgaatcggaatctcttccgtttttgcttctcagatctgaagtttcacggcgatttaacgtttttgatagaactagtttgtgttttgttgattattgtgtagaaaatgaagagtttaatcgaacaaataaacatgaattgtttggtttcagtattgttgatgaatttggttacttctttgccatggtcatggttcattgtagagataattagttgtttgggtctcaaaagcctttaggatcacctgagttatcaaaaaaaaaaaaaaaaaaatctacaagatttttggagttgtgtgatgaaaaatttgtgtcaaaatcatcatttttgtaataactgagtttttattctttctaaactttgtggtatgtagtactctgcggggaaagagtat

SEQ ID NO: 41145 - DNA, 500 bp, Arabidopsis lyrata
  Intron number 2 from transcript 916592 (locus 916592) deri ved from phytozome v7.0 (chr-ID scaffold_8; pos 13608921 t o 13609420)
ggttggtcttgccaacacaaatcttgctttgcctggtaaattttaacttttcatgatatccaatttaataatttataactactaaacattaatttaagctttttaacctaataaatattttaaacaacaagcttttaaatagtgatttcatattgcttgttctttggttttaacatatttccaactcaatacagatgttgtagggaaaataatttcaatccaaggctcaaaccttagtgacccaacttcaacaaaccaaattgttgtaaatttatggctccaaccataagtttgaaatcttatattcaaaaaaattgtttccaacctttctattatctctttcccaaaaacaaattaatcactttgatcttcctacagaaatgtaattgtctccttgtctctttgggctaaaactgcttctcgccttcgtgccatcctatctggtccaatctctttaacatctgttgttttggtaacagctgttaatccaacaattcttg

SEQ ID NO: 41146 - DNA, 436 bp, Arabidopsis lyrata
  Intron number 1 from transcript 490474 (locus 490474) deri ved from phytozome v7.0 (chr-ID scaffold_6; pos 24573519 t o 24573954 reverse strand)
cacttatcgagccgtcttcgcttattctcaccacggtacctttgtttgattattccttttggtttcttcatcaattggctcttggtgtgaatcatacagagattttctccatttgggtcttttaggtttatgttacctctttccattgcacagaagaagaaacaaaccgtcgtttggtttctattgggggattgtgtcttggattttgtcaaaaactctatttggttatcaggattttgtcaaagttattgactttgttgaaacggatcttcaaaaagtctcatcttttgtattctttggtttcaatcgtagtgatgatgacctgtccttctatagtcaatggtggtagcaaatagattttggttgcttttgttgacatttcaacttttccacatttgtaggcgtatttgttggtggttgcaaggtggttcatttc

SEQ ID NO: 41147 - DNA, 519 bp, Arabidopsis lyrata
  Intron number 5 from transcript 358185 (locus 358185) deri ved from phytozome v7.0 (chr-ID scaffold_8; pos 19198672 t o 19199190)
actacttgaagccgtacacgaggctgagatattttccagatgagagaaggaactgctatagtctgagtgttgacaagaataggaaatatttgatcagggctgggttcatttatgggaattacgatggtcttaattctaacccgatatttgaactgcatctaggccctaatctgtgggcaactatagatttgcaaaagtttgtgaatggtacaatggaggagatccttcacactccaacatcaaactcgttaaaggtttgtctagttaagacagggacaactacacccttgatctcagccttggaattacggccattgggaaataattcttatcgcacagagggttctctgaatcttctcgttcggatgtatctcaacaagacagatggctttcttcggtaagtgtttttttttttttggggcaaatcagtggtggcttctatattcatataccctttatttttaaaattcctatacttattcaaggctaatacaacctttgttccacataggtacccgg

SEQ ID NO: 41148 - DNA, 590 bp, Arabidopsis lyrata
  Intron number 1 from transcript 478175 (locus 478175) deri ved from phytozome v7.0 (chr-ID scaffold_3; pos 3449529 to 3450118 reverse strand)
ctccttctcgtctccttcctcaagcatattctctggtaaatcctctctctttgacttttctctcgcagagtttattagattccttttgctttctggatatataaattattgaagttcatatattgtttccacgacacgaaaccttctaggtccaggtcatagttttactctatatatctgggtttgtttaaaaattgcggcagccttttccctaacgtacagactagaccttaattacagatattagagttcgttttccacgagggtttctttcgacctcgtgtcctggaagctgctagaggtttacttaccgattctgaatccggcaattctaaggctttggggttttatttggttgggattatcatctaaaaaggatatttggtcggtgccatgttttcttaatctcaattatgttgactattgctttggtaattcaaaaagaatctttccacttgcttattttaattccatattcgtctcttcattactttgtcaatcatgtacttgagattttgtataatcatcatgttttagcctctgaacttttgtgaacttttataacctgcagagcttagagcagcacgttg

SEQ ID NO: 41149 - DNA, 622 bp, Arabidopsis lyrata
  Intron number 3 from transcript 486045 (locus 486045) deri ved from phytozome v7.0 (chr-ID scaffold_5; pos 17784492 t o 17785113 reverse strand)
gaggatctatcgtcagatacagattccgaggatttgtaagtatcagctttcgatttttgtatatgactgtctttagtttgttgaatttgaacgcagctgcttgattttagtaagttcttaagtatttggttaagacctcttgttgattttcagatttataacttgatgctagtacttgagatgagttttttttttttttttttttgtgtttttacttctggatattaagcttttgagtttgctaagatctaatgttgtagtatatttttgatacaacaagtttgattgttcaatgtagaatacatagttttggtgacatgatttgtaactgaattttggttgagcatcaacatcaatgtagttggtattttagctctatgactttttttgagagaactaatactattttctgagttttacaacatgaagaccgacactgtgttttatgcattttgtattctaagacttgctaaatttactttgacagtgttgtagcataatcattttttccatctgagttagtaacatgtttctgtttcctctcccttttatagtcaaattcatcgtaccatttgtcttttttgtaggagagcggttggttttcacaggaaattacttggcc

SEQ ID NO: 41150 - DNA, 773 bp, Arabidopsis lyrata
  Intron number 2 from transcript 896965 (locus 896965) deri ved from phytozome v7.0 (chr-ID scaffold_5; pos 6686480 to 6687252 reverse strand)
tgtctgttaaaacagtcgtggatttggtgaagcaattaaactcaaggtttgacaccattgatacaagcatcaaagaagtgtcttcaaatatggagaaggtgattggagatagagtagaagcgaggatggatgaaaagtttgaatatatggagaaggagttgaaacagatgaaagagcgtctgaatgcaattgagcagggggtagggaaatctggtgaaaacgctgaggaaaactcagccttcaaacaaacagaacctcccgaaaagccgacgcaagtcgaccttttgctgaatcaaaaagaaaaagcaacaccaaaaggtccagcgaaacctccacaaaaccagtctgttactagtcctctggtaagctaacagtgccagacatatgtataaatacattgcggctgagttattattatcttaataaccttgtagctgagttttcattatcttgatcatataatggctgagttatcattatattaatcaccttacggctgagttatcattatattacggctgattatcattatcttaatcacattatggctgagttattattatattaatcacctaacggcggagttatctttatcttatggctgagttatcggtatgtttatgcaggcgaaggatactgtcgatgttgagaaggacattggtattgctggtgtcagtaagaatctggaaaaggaatttgataatgtcattgatggcaaatctgctattgatttcatagatacgttacctaataatattaggaaattacgctcc

SEQ ID NO: 41151 - DNA, 463 bp, Arabidopsis lyrata
  Intron number 2 from transcript 470252 (locus 470252) deri ved from phytozome v7.0 (chr-ID scaffold_1; pos 779666 to 780128 reverse strand)
gcccatcgattccggaagcgaacttgaggaagacggtacgtttttctcctctgcctttgattcgattctagattcaacctggattagtcttattgattccttttcgagttggtattgacgaaactggagaaattagggtttggagtggaatttttcttactagtttatcatccatggattattctgcatcattatccttaaaatgcttgtgtaaagtttacaactttagagacaagttcactataatcatggatatatgttgatgacattgatgaaaactacacaagcttaatcaagagtcagcttcattagcttcagattctttactccttcatctcttctatctggttaaagcaatttacttagttgatgtaagtttcttttttgtggtaactaattgttcaaatgctttgttgtgagatgtgtagatcttaagacagcattggggaagcagagaaaagat

SEQ ID NO: 41152 - DNA, 610 bp, Arabidopsis lyrata
  Intron number 2 from transcript 950326 (locus 950326) deri ved from phytozome v7.0 (chr-ID scaffold_8; pos 17615995 t o 17616604)
gaacaggaggaagaactcacgggaaacctcaaacagtaagtttctaagctctttgaagcgtctctaaactaactgttccggttccggatgaacctaatgttgaaacctgctctgaaaatttcggtcattaccaatggttctgctctctttttccccaaaatttggttttctttatttgcttacttatgttctttctcaatactgttgtttacagtaacaatgcggtgcatctctggtccaagatcaaaggaaaggagggtactcagttcaagaatcctcaatgaaggcatagctaagccacttatggttgttaagagtcatggtggttataacatgagacaacagatctgactgctctttggttggttatcttttgaatgttttcttcaataagtgtatattgtttaatgaattgtctgctgatgataaactctgttttttcaaggtatcgacttaatgaagagaaagctgagtggattatatgttaccggttatgacaacagttgcactttgatttggtgttcaaaagtaggttttatgtgaagttctgtgtcttgatttaacttaactctaattcatggttgttttcatttaaggctgaatcaggata

SEQ ID NO: 41153 - DNA, 297 bp, Arabidopsis lyrata
  Intron number 3 from transcript 950326 (locus 950326) deri ved from phytozome v7.0 (chr-ID scaffold_8; pos 17616749 t o 17617045)
ttcttattgagtgcggtataaatgcctttgttactgtttacattttggtattcttgaatcattctcttgaataagttacgtatgtgaaaatattcaacctctgagattgactctgtgcaggtaaggaacaagagtggactccttaggagcttgattaaacagccgagacataaatgagcttaagaaggtgtgtttgttttggctgcataatctcaaatttacttctttgtgttccttgaattcatattcacaacatcttctttgctttgttgcagacaggaaagctagtgttgaatc

SEQ ID NO: 41154 - DNA, 461 bp, Arabidopsis lyrata
  Intron number 1 from transcript 316796 (locus 316796) deri ved from phytozome v7.0 (chr-ID scaffold_2; pos 18448750 t o 18449210 reverse strand)
agcggagacggagaaggaccgatcaatatcagaaggtatctctctccctctctctctctctctctctctctctctctctctctctctctctctctctctctctctcattcttcatcactgatgttttctctcttgtaatttataggccattagtggtattcaagcaaggatttcgtagccgtaattactggtaacataataatagattaaaaggttgttgctttcttattcttgaagctgattctttgtttgtaattgtagcttagtggaatgttccgatatttgcaatttgatcggagatggtgactatggtccctgaagaaacagaggagaaacaaaaataactgattcagaatgatttttttttttttttataaagaagattcaaacacgatgatatatagtctcagaataaacgatacacaggtttcagagatttggttggcatatcgatcgaatcc

SEQ ID NO: 41155 - DNA, 225 bp, Arabidopsis lyrata
  Intron number 2 from transcript 492235 (locus 492235) deri ved from phytozome v7.0 (chr-ID scaffold_7; pos 6949441 to 6949665 reverse strand)
ccaggtacacaatccgcattttctcgcttatgtacttgataaacaaacagagaaatggttctccctgttgattaaattcagtttgttttgttccatttgaatcagcctctactactaatcactgaaagatattagcgtgtagccttcttaatcttctgtttttctctgtggtgatccaatattcttcctctaatgcaggagccagccgacttctcagacatctcc

SEQ ID NO: 41156 - DNA, 612 bp, Arabidopsis lyrata
  Intron number 1 from transcript 903709 (locus 903709) deri ved from phytozome v7.0 (chr-ID scaffold_3; pos 3373970 to 3374581 reverse strand)
aggtaattttttaattctcttgttttgatttttgagttcagaatttgaagtcaactatgattgattgatataagaaactcagattttggattgggattcttcgttttccttgtttggtagctgttgaaatgttgtggaaaagtgagatttttggaataattttcttgagtgtttcactgagtctgattgactgattcaagagttcgaaattcgaagcaattttttttttctttttctttatgtcacactgctctgaaaaaaaaaaaaaaaaacatttggcagaaagtagtaggtgctatttactttttaggccagtgttgttgtgggaaagctagatttgtggaataagtctgattcatgaatttgaagcaatatcattgtttttctttttatgtctagttgctgtaaaaacataaagttcagaaagtaacatatttgggaatgtgacatgtactctgttaggaactctgactcaaaaatcaatgatacaagtattcattttttttacaattctggctatacatgttatcctgactcaattatgctagctttcattttcagattgattctagacatatctctaatgaatttgttgtgtttttcaggtgcatc

SEQ ID NO: 41157 - DNA, 422 bp, Arabidopsis lyrata
  Intron number 2 from transcript 496943 (locus 496943) deri ved from phytozome v7.0 (chr-ID scaffold_8; pos 22709355 t o 22709776)
aagctggtgagtacgatcatctctttttgctttttttacatgttaaagttgagataaagtgtattggtatttgttaaagaacagcctaagacgctgagacatgattctcttgccttcttggatttatctttctgtttttttgactaattagtatctttttctctctatttttccccaagctgcttttttctttgcatcttttttgtgcaaagccttttacacatatgcttcgctatacttctttgtatccttcttatttgtcttatatttttcaaaagaatttcctttctggtatcacattattagatactaatctctcttataaatgaaatgaagtgagcccaaagctgtttctattttcatattaaacctcttctgagacagattatcgtttatggattttgtctgacttggtttaggac

SEQ ID NO: 41158 - DNA, 390 bp, Arabidopsis lyrata
  Intron number 4 from transcript 496927 (locus 496927) deri ved from phytozome v7.0 (chr-ID scaffold_8; pos 22640120 t o 22640509)
atcttcctcggttttgccgattcagaattctccaggtacataatccaaactacctgcttgattggaaaatttggcaatattggattaagttttgtcgctacatgtaacaatttctcaattctctaaccgaaccaataactctttaaaaactctatatgtaaactggtcggtgatcttggagtttagttggttttgtctgtagcgccgttatatttctgatcgtcgaacttgtctgttaaataagtgttcttcgtcttccatagttataagcccataatttatattttataattagatctaaagcatcaaagtttatgcccacgactcatcatcacacttttttttttgtttgtagaatctccagaaaacaacaatcaccctgaagtcatt

SEQ ID NO: 41159 - DNA, 879 bp, Arabidopsis lyrata
  Intron number 2 from transcript 482686 (locus 482686) deri ved from phytozome v7.0 (chr-ID scaffold_4; pos 17690865 t o 17691743)
cagagttcttcgtctcctctcgtcgtctctgtttggtacttcttaaagctttttcctcaggtcgagttactagagctaattttttctttgacattgtgttagattctctaataagcagagctagattttctaaggaggaggataagctaataagcagagctagattttcttctttctttatttttattttttcttcccaggaaaatatttttcttattttctaatgtaacaagcagagctagattttcttctttctttatttttattttttcttcccaggaaaatatttttcttattttctaatgtaacagcgctgtgagtctctctctggcccactttatacgtaatttcttttatggttttgttttttctatattgcatttgcatttgcattttgattggtgattgtgataaacatttaaaacattgacgcttcttctgtagcagctattaaaaagttttgattttttctttttattttgtgtttatccctcttctctgagactcagatcatccgacagaaatttgtctggttacagtttctaaataatactgtaattgcatagaatgtctgtcctttgctcttaactagatcttatttatatatttttttttactagatttgaggcaaagtaatgttttttaattcgagaggacatgtttcatgttgtgactttgtttactagtgcttaaaaaacatggatcaatctatggattgggaaaacatgcctacatagagagagaaatgagatccaaattttgtgaatctagcatgtaagttagattttggtttatgggcaacattgtctggttctgttcaattattgtgaatataaatacttgttctttgcagtgtaaaaacttggaccttgacttgaa

SEQ ID NO: 41160 - DNA, 432 bp, Arabidopsis lyrata
  Intron number 1 from transcript 482340 (locus 482340) deri ved from phytozome v7.0 (chr-ID scaffold_4; pos 16060402 t o 16060833)
tgcttgcatcctcttcactgctcgcaacgatcaaggtgagttaatccgattccgtgtgttaatttctgtttttgaattatctctcgaagagccttaacgatcctgtggagtttcttagtctgttggaatctggactgtaatttcatctctcaatcgctgataaaagatttgatcacattccaaatttgttcatagatagaagatttgatgcttttaaatcgtcattttagcttcaaaacagtgtagatacttgaagcttctctactggaactggcattgatctgatgttttctacaattatagattttgttgattaaagacaggatctactcagctctgatattcaattggtgattcatagtggatcacttagctttttgggggctaatacaagtctttcttggtttttcttttgtgggttcagtggacttg

SEQ ID NO: 41161 - DNA, 424 bp, Arabidopsis lyrata
  Intron number 1 from transcript 488484 (locus 488484) deri ved from phytozome v7.0 (chr-ID scaffold_6; pos 6667061 to 6667484 reverse strand)
tcttggcttcctgtagaatctgatcctggtatattttctctcctccaatttcgggttttttgttgttttctagattaataaagagatgatgtgcgtaacgaggttttgatagtggagcactaaaacctgatttatgtttggattttgtcaaattagaagcccaaaaatgttgacaatagtcttctttgcatctacaacacagcgaacgaggagagtgatacttagtgtgtgagcattggaaaataaaagtaatgatgctttttgatattacatatcaacaatggtgttggtcttatactaagtggatagtgtctctctcgatagccatcgccatgtcgctttcttgtttgttattttcttcatttttattcgttttctgtattatctgttgtttataggtattttcactgagattatacaacag

SEQ ID NO: 41162 - DNA, 825 bp, Arabidopsis lyrata
  Intron number 1 from transcript 489055 (locus 489055) deri ved from phytozome v7.0 (chr-ID scaffold_6; pos 9169701 to 9170525 reverse strand)
ttcttcttccgcttgagtggcttcgggtacgttgttaaactctcaaatttcatcgttcctttttctctcactaattttctcatcttttggtttctctgtgatttctgattattatctgtcttcacttttaaactcttaggagatcgaatcgatgttttttacttgaaagtttcaattttcgtttccgattgtcaagtgtctattgaaatgtctctgagaaatttttcatctgaaagctgatatcggtatacggaatccttgggaccgatcgatgataactgtgagagaagaatttgatatcttaataaaagattgttgaattgttaaaatcttaattttgaaggatccttttgtttcctttgtagttgctaaaatttcttgggtttatcttccttcactttgcctcgaattgggttcctgttatagctctagagtttattaaaagagtgtggcttttcatgtatgaatgatgtgggagtgtttggtttcatattgtgggaggccctttgtgggttgttacttaagctttgtgggggcattgtcatgcttacaacgattgacgtctctaatcatgactggttccaaaaaatcgatgctttggattggttttgcaagatgatatacagtatctgtaatccattttgaattggtacattaggttaaagctatagctgaatggtggctttatattttagattgtgtttctctacggtttaacatgttaatgtccttacttcttagttggtatcagagattgtatatcatggtacctgaatttcattctgagttgtcaactttgcaggtcagatttgagaggaagtaaaa

SEQ ID NO: 41163 - DNA, 1035 bp, Arabidopsis lyrata
  Intron number 1 from transcript 494805 (locus 494805) deri ved from phytozome v7.0 (chr-ID scaffold_8; pos 6904198 to 6905232)
attccttgttagcttagttatcatatttgccacaggtattaatatattatatacatatatcttttatatacttaatttttactcaaaaatttggctattttgtgatattaccctattatataatcttttacatacctttcaattgttatgtttttactcttcatcacatatttttcttacagtttaaaattttcaacagtataattctacgatcagaataaacaaattttgatattgccaagagtctatatgaacaattaaggaaacaaccctgcttgacatttttagtacacccgtagatgaattaacgtaggttcacatggcatgggatgaaaaaaaaaaaaaaaaagaaaaacacagtatgatagtaagttatgtgattttttttttatgaattgacttggtcttacaatgatgacacaaataagactattatctctaatcatgaacaaatgtattagatataacaacaacaaaatcagtttagtgcgtacgtgctagcttagtcgtccttagtgagtactacggcgtttggctcctgaggtcccaagctaagttggttgggtcatgtaggattagtttttcgttggctcagtaactttggtgtctttttattctgcccatccggcgacataagattgaattacatatataacaatatttgtagatgacattgaaaaaatcgcaatgacatgacttatttccatcaaatagttattttgttatgtgaacaactaatttatcacaatgatgttctatcaaactacacctcaaatcctaaactctaacctatgtttaatacattagatgcccatatatatatataaacatgttacgaaaatatcacatatttcataactatatatataaaaaaattctctcattgctatttttaaaatttatttgtactttatatctatatggtacaaatactcttatttttatgtttttttttttttgaacaccctcttatttttatgttaagtttactaaatcatataatgtttcagttgtgaatcagataagagcacaaac

SEQ ID NO: 41164 - DNA, 626 bp, Arabidopsis lyrata
  Intron number 3 from transcript 491086 (locus 491086) deri ved from phytozome v7.0 (chr-ID scaffold_7; pos 2262247 to 2262872 reverse strand)
attcagagagtgttcaaggatttgcagagtggcgtgtaagatctatatctctaatttccaatactatttttgtgattttgatttcttctctgttggaaaacaaacaaacaaacctagcccaattatcacgtaattcgatcaagatgaaagaagaattgactattccaatcaagaaacgacttctgcagaataactaaataatataaatatatttttaaaaataaataaatgatgttttgtcctatgataatattttttaccaatcaaattataattgtttgaaatcgatgacctggttttttccaattgaagataattttccattcgatgtagctaggaactttccgttgttaccggactttgagttggggacacgttggtcgatggtattagtcaaaagtattatttattactatgtagtattataatttaaaattagtaaaaggttattagaaagtcaacattatttctctgttaactcgtattggatggaaatctggattctttcattgagtttattgtatgtcttaattagcagaacaaatttatcttgaagttatataggctaaatttgagatttgtggctatgtttgttttttggacagtcagaagttaacttcttggga

SEQ ID NO: 41165 - DNA, 659 bp, Arabidopsis lyrata
  Intron number 1 from transcript 490434 (locus 490434) deri ved from phytozome v7.0 (chr-ID scaffold_6; pos 24362090 t o 24362748 reverse strand)
ctaatcttggttccgttttcttttatttgggagaggtatgaacattttgattcttatgcgtcaaaactcagattttgaaaccatctttaattacatactttttttctagtatggcttatgtccaaaaaaaacgttctctggctatgttctcgtatttttataagaaatatgtatgattcaaaatttcaactacgtataaattgttaccattacaataataaaatagctgttttcattcatatatgatttgatcattatatgttaaagttcagactactcttgattttttctccatatatgatttgatttttatgcgtcaatatttaaactgtccatgattgtttaaacttttcgaattacagtaatacaacatcaacatctattcttttcatgtgccatttgatctgttaaaatccaaacgttatgtaatgttgatatatatcaacttttctatttttttgttattgagacatgatgaaactaagttttaatattattggatatcctctcatgtatgtatgtatgtatataaaagttataagtttttattatcttgttgtaagtaatgaagtttatgataccaaaaaaaagaaagtaatgaagttaatttgctctttaaatgagtttgttataggaaaacaaggccacagctaacgctc

SEQ ID NO: 41166 - DNA, 500 bp, Arabidopsis lyrata
  Intron number 1 from transcript 349318 (locus 349318) deri ved from phytozome v7.0 (chr-ID scaffold_5; pos 20852734 t o 20853233)
ccggtaagaaaattacatacagtactctgtctctcgattgatcgcatgcatcttataagagatctttttttttggtcaaaatttataagagaatcttcccttaatccttttatatatgcatcgagaaattaatttatatcacggatcaataatacaatatgggttgtaaaatttttaatagtagaggccgtgattaatttttgatctacttattgtatcattttctataatgaatgcgtaatatttaaaacgtaaactgttttcttagaatattatgcgattgtgttgtcatatttcatatagtattcagaccaaattgccttcttgttttgttgacatatatggactgtacctcacagaaatgtttatttatttatttcaaaaacagctctattcagaacaaaagatgagtaatatcaatcgctgactttcttttgcctcaaaatctgacgtgttattatatatatgtgaatgaattcatttaaaaaagggctaaagag

SEQ ID NO: 41167 - DNA, 828 bp, Arabidopsis lyrata
  Intron number 2 from transcript 939010 (locus 939010) deri ved from phytozome v7.0 (chr-ID scaffold_5; pos 19529934 t o 19530761 reverse strand)
attgccaggaattactgcttcattctcacaaacaagtgagtttttcttcttgttttcctatatatttatacacgtcattttattattataagtctagatctcctatatatatcatctgcgattaacagcttcttctttttcttttgaaacagttgattattcttaataggctggaattgcaatcgatggacgacgatctcaccacccacaatccaatgcatatctttacaatgtctttggctttttgtttgttcctttttcttataacttattttgtgtttttctagacactaccaaaaaacaaagataagtttgtgtttttctagctcctaatattacactaccaaacagcaaggataacttatgaatgtgctacaagatttcaatttattgaacccgattctatatgaagaataatagtgcattaaaccctaacttctgttccggtcctttttttttttttttttctatgttgttgttgttcataaaattcagttgcggtttttttaatcaacactcgaaaacagaacccagattttgttattgaattggggttttgagtgtgttaacaagtttcaggaggaagaagaagagctagttttgcaagaatgaggaagaaggttgatgaacgtatcaggactctgactgaagacggtgtctgtttgcaatcatcggtgacaagtctcgtgaccaggtttgctgtttctgttctcgaaagttttctacttggacacttatctccctcagagaatgttttgttggatactaaatctacaacctttttttttgtgtgtgtttcttctctaacagatagtgaaccttcatcat

SEQ ID NO: 41168 - DNA, 443 bp, Arabidopsis lyrata
  Intron number 1 from transcript 321588 (locus 321588) deri ved from phytozome v7.0 (chr-ID scaffold_4; pos 18866709 t o 18867151 reverse strand)
ccaatcttgctcttgtatgtatatcttttctcccttattttccttctagtcttcacacttaaatagatgataaccaattgaaaatgagttgataagtatgtctttttatattccgatgttgaatgttcccctcaagatgatggttttccgacctatcttaaagtgactcccactttaggatcagaaaacatttggtttccctacttaggttaaaatcgggctctaataccatgctaagttttatgctttctgattcaaattattaatatctcatatatcttactttaggtacgtatattctatttatttttgatgtgggatcctaattaacaggataatcaaaatgtttttttgatgtgaacttgtctagttggtgagtgtattttttctttattcaagataaggtggttgatgttaatgatggtgttacaattcagggtgtg

SEQ ID NO: 41169 - DNA, 569 bp, Arabidopsis lyrata
  Intron number 1 from transcript 892301 (locus 892301) deri ved from phytozome v7.0 (chr-ID scaffold_6; pos 1221411 to 1221979 reverse strand)
tcaacgctcttaactccggagctaaagtcttcgtcaatctacatccctctctctttatataacgcctttttgtttaacaatgttttcatatattggacccggttcggtttggtttggccggaattggatacgatttgataataaccaatttgactggtattagttaaagtttgatacaattcaaaccttattactggaccgacatcaatttggttccaaatagagtcgagtctggtttagtttatataagtttgaattaggagagattgaccaaatttagttgggtttgtttcggttctgttggtatgctagttactttgtccagtttcggtttggtttgatgtccggttccctgtgtgaatgttaatatcaaattgggtcggtttggtctactttgattttgtttgatattcttgcggttcgatccggttcggtttaatcttcttgatttgtaatgcatctgtttgatagatactccagcaaggcaacaaacaacatgcaaatcaagtaatataatttgttgtgtttgaacaggctgatttcgaggacgcattgtctccgagttggga

SEQ ID NO: 41170 - DNA, 195 bp, Arabidopsis lyrata
  Intron number 3 from transcript 495607 (locus 495607) deri ved from phytozome v7.0 (chr-ID scaffold_8; pos 16963822 t o 16964016)
gaatcagtaagttgtcaaatttttatattactttgattatttttttcaatcttccacggtttaagagaatttgattggtgaagaacaagtcttgtgatgtatctaatttcggtgtttgttgtcttggaacatttttcatatgagattttggtttttgtaggtgactggaagggctttaaaagactcgatacagat

SEQ ID NO: 41171 - DNA, 749 bp, Arabidopsis lyrata
  Intron number 3 from transcript 485748 (locus 485748) deri ved from phytozome v7.0 (chr-ID scaffold_5; pos 16665559 t o 16666307)
tttagctcgggagatttcagatttgtcgatttgctcaggtacggatttcgaaatgttcttcaatcggatttgttcctcctcaccgggtttctagggtttgtattgggtgtctttaatctgtttgcataagccatgagcgaggttttttctttccgagaggtcattgtgacctgtagatctgagtcgggttccaaaagattcaatcttttgatgtctatctacatttctagattctcaaactccattaaaggaataatctttgctcgtttctcttaatgccctttgctgattatctgaagatgatttaagagagtgccctgtttttttatatataaaaatttgatcttttggtcgctttatagacatgtggggaacggttttgtcggtggacacatttatggattcatgaactgttgcaaaaaatatgcgtttctttggacgtttctgtaattttctttttaagagattttgttatcttgtgtctctgtgtccaccattgtgttgtgtgtattcaattgattttcccaggtgttgaagattgttatttatatatttaacttgttttatgcacacagatctttagtataatttattatcttccatgatctaggggaattaaaacatttgtaaagattgagcccataatttgtgtttcgacagatggtgttgcggtttttgttgctttgagagatgcatatattgtggtggttgttctgtttatgaattggtatgtgcattgttttgcagca

SEQ ID NO: 41172 - DNA, 322 bp, Arabidopsis lyrata
  Intron number 1 from transcript 896759 (locus 896759) deri ved from phytozome v7.0 (chr-ID scaffold_5; pos 4553802 to 4554123)
ggtgagtggtctgttttggtgaagatttgaattgttggtctgtttcgcgtggctcgggtagagagctcaatatgattttgggtgacgagcatgttagtattttaataacttaccttctatacatgttttcgatattaaattgaattgtttttttctttaacatttcatttgcagttcacccaaatttaagccgttgttcgtgatgaattaattgataattatttttcaagattgataatcgatgagtgggtgagcattaaattttttgatgtatcccgggttaacagcatcttgagaccagtaccgcatagattcaagattg

SEQ ID NO: 41173 - DNA, 451 bp, Arabidopsis lyrata
  Intron number 3 from transcript 492583 (locus 492583) deri ved from phytozome v7.0 (chr-ID scaffold_7; pos 8420451 to 8420901 reverse strand)
ctggtttcattctgctccgtcgtacgcgccttctcgtgagtatattggcctcaagttttctgttttgcctactttcgttattagctcaaagagcgtcaaggcttaggctaaatttcttaatttctacttcttcttcttcttcttctttctttgattgattttggctgtcacatcttcctttacaatgtggtaaaatgcgtctaagttaattcacattgtgatcatttttgtgttcaagtctgtttctatgttttggaatttgcttctactcatggttctgctttgatttcaattatattttggatcctacgttttccattgtccttggtgtctctaaatcatagcctttaagtcagcattgtgtgaaattgttaggatcaaggtgaaattgttgataattctttgtgtgttttcagcttttgtaacaaaactgttacttagagaggaggtt

SEQ ID NO: 41174 - DNA, 596 bp, Arabidopsis lyrata
  Intron number 1 from transcript 493636 (locus 493636) deri ved from phytozome v7.0 (chr-ID scaffold_7; pos 18760392 t o 18760987 reverse strand)
tgggtgtgctacaaatttcgcttctttacaagactgtgagtttcttttccaatttcttgataagtttcttgtccctgtcgttgatttgttgtaagagagatcatgataatgaaaaacgattgaagaaagtagttaaagattgtatcttttatggtctttcttactcgaaggtaccatttttcatgtaaagtttctgtctttgattattctaggattgaatgtagaagattagagtgattgtgagtttgttagatagcaactcgtaagggattggtttgggaatttggttagtagttttgtagcttctgtttgtgtttttgacgattgaagaaatttgttcaagattgtatcttttatggcctttgcttatcttgtaagataccatttctcatgtaaagtttctgtctttgcttatcttatgtttgaatgtagacgattagagagcaattagtgagtgtttggtttgggaattgagttgataaagtcccttttttaatgaattgaagtaaattttgtagcttctgtttgtgtttttgattctttggaggatggttttttaccaaatgtttcagctgaagatcatcttacagaggaac

SEQ ID NO: 41175 - DNA, 517 bp, Arabidopsis lyrata
  Intron number 2 from transcript 475074 (locus 475074) deri ved from phytozome v7.0 (chr-ID scaffold_2; pos 1490251 to 1490767 reverse strand)
agctccatcgccaaaagcttctttacctcctccaggtatgaaccaaactcttcacctactccttgcaattactttcttgaatacttttcttaaattttcattttttgaaattgaatttccaagtagcttttgatcgacttgattgtgtattaattgaattatttgattgattttgatcggagtttattaaccaaatcaattcaattattcaattgattcactgaatcgatcttctaattttcccagacttttctctttataaaaaaacataaacagagtgtgaatgccagcttttacttgtctactttatttttgtctcgaatattgacttgaatggttcggacaaaaccactaaaaaatgaaacatgtcagattatttttttgtatttatttataattgttatttgtattattgacgatttgtcttatatggatggatttctaatttttttttgaatttaaatggatttctaatttttcagcagggaataccaaaaaagacgccggagctgggaac

SEQ ID NO: 41176 - DNA, 734 bp, Arabidopsis lyrata
  Intron number 1 from transcript 922132 (locus 922132) deri ved from phytozome v7.0 (chr-ID scaffold_1; pos 13788727 t o 13789460)
atatcttcccctcggaatctaggccttaaaagaaggtacaaaatttagtatattaacttttcttgatcttggatctaatcattcattaattgttagctttatatatattatattaaattaatcaaagatggttttgagttattatatgtataaaataattgggatccaatttacattatttttatgatatcatatagagtagagtgaattagggttctaggccacttggtagctaggtttctaggaaactatcaatcgctataaacattcggaaaaagttggatgcatgcatttgctaataatagaatatgcattatggtttgtgtgacacttccctttattgagttttttatagggttttttttttgtcttttatcatgatcaatatcataatcatgaatttgtgtgtatatagacactatatatatatatatatatatatatatatgattgttttagattcatcagaggaaggagggttgaggttgaagacacatgcaggagaatctatgaactgtcacaattaaattaaaagaacatataactgcgttacatcatatctcaaacccaactgataataatgtccactatcaaacttagctttcacaacttacatatatacacacgtgtagcgtatatatatatatagattagaagccacacgtttgtaagtatggatgtatatacttgtatatgcaggaagagtcaggcaaagaaggtggtgtgtataccgg

SEQ ID NO: 41177 - DNA, 910 bp, Arabidopsis lyrata
  Intron number 1 from transcript 926921 (locus 926921) deri ved from phytozome v7.0 (chr-ID scaffold_2; pos 16671206 t o 16672115)
aggtatttttcgggttttttccctattattatttgtttttttacagcgaatacgattgaattattgagaaaaggaaatttaacggaaataccacctctaccctcattcatcatttgtctcatagtccaggtgtccgttgctcaacggttaattctggtactttgggcggtgattttgatgtattaaaaagaagtcgagaaccaacgacaaaagtttcaattattattattatctttaggattctctagcagtaaaagttagcattaatattattatcagtgttgttttcaaaaaaaaaaaaaaaaaaaaattattatcagtgttattgtattattgaaaaccatcatttgaccaaaattaattaaacgcgttgttttcatcagagaataaaatttgaagattataaatattttaaacttttcacaaataggatacccaataccgaagattctttccttttccatattaaaaatgtctaaaaatagttattggttatttatacagtaatttacaactaaacccatactcataaataaaaataaaatattgcaaaacagctgtaacttgactgtttcggaaaatctcatttcacatgcttcatctccccaatttcatttccatattttttattttttcttctaacattcactttatactctctttatttatttttattttcctttgctctaacccctttttctaactctatataaccccctcacaaatccataattcacctcttccccttggctctagaaccaatcactctctcttctttagcgtttttatattgtcttcctcgttttctcctaccttttctattttctcttttcagttttctctagaaaaaaaaaaacaataatcagtgtgtttgataatatttgatgtcgcagaactcttgtggatcttg

SEQ ID NO: 41178 - DNA, 872 bp, Arabidopsis lyrata
  Intron number 1 from transcript 351886 (locus 351886) deri ved from phytozome v7.0 (chr-ID scaffold_6; pos 17647537 t o 17648408 reverse strand)
ttactgtaattggcgcaaccgccaccactttcgccgtgagtcgaaatttataactcaaagattggttttatttctgttgaattatcgaaattgtgattaagaagtagtttcttggtgtgaaaatagtgtaattttcgggtttatgtgctcatagtcgacgattgatggttgagaaatgattagctttagagtttgatgaggatataaagtgacattctcagtagtaatggaacattataggctatgattggtgatataaagtgtgaatttcataagcttcttactttaagatcgataataatgtttttttttgtgtgaagctttaatgattggttttagtttcggcaaattatcgagttatgattgagaattagctgcttggtgtgaaaaatagctttcgtttgtggtttttggtgctttcgtgctcatagtcgaggattgatggttctatttgattaatctttagaggttcttggcgtttgtgttcattgtgaatgataaagtgactttctcaataatatggaaaaatttaggctctgattggtgagaggaagagattatggattggtgttgtaaataaaataataatctgtgggattgaactgcggaatgattaagcgagataagcataaattcactagaaaaactgatttctttgttatgttgtcgtgaattaatctaagaggcggttttcccgaaaagtgtgactgttaatataacctgtggaatcacagaatcattgtatttttttgttctctgcgggttaatcttgtggtctgtttgttttgtttaactctttgtgggactgtagtgtctgatacttctattgtttggtaggttcatcagctgcgaagaagttttgattgggtcta

SEQ ID NO: 41179 - DNA, 530 bp, Arabidopsis lyrata
  Intron number 1 from transcript 472381 (locus 472381) deri ved from phytozome v7.0 (chr-ID scaffold_1; pos 9246680 to 9247209)
atccaagaccgacccttttcctctaatctctcctggtatttgacttcatcaaccaatttttgtttcctggtcttttaatctttagaatctcaccaacttgtttgattatgtggttttgttttgctctaaaccttttgcaagctgtttaaaccagtcagtttgctattaagatatagatcttagtgctctgattgttctgaattacgaaattccttggttagttttggtcttgagagatttgcatagatttggtaggtactaaaggaagaatttttacatggatttggtgggattttagatgatagtctgctttggagaatcagctccgagatttggatcataaagctccataattggtttatctatgatgaattaataaaaaaggctctatctttaggaatgatctcttggtttgtttttttcatgaatgaacaagcttttgttagaaacagtggcttgaggtttttctgtgtgtgacatatttaagattctgacatttgggaacattctagttgcaggcttgcagctga

SEQ ID NO: 41180 - DNA, 662 bp, Arabidopsis lyrata
  Intron number 1 from transcript 472576 (locus 472576) deri ved from phytozome v7.0 (chr-ID scaffold_1; pos 10265071 t o 10265732)
gccagaaaccaggaacgtctggtctccgtaagaaggttcgttgatcgatctctgtcttacgaatcgagtgaatcgagcgaaatcgaattgttgcatctggatcagatctgtttagattgtcttgagtggattttaagtgagattaaccatctgatttagattttttgatctatgcattgatctatgttgatgacaaatttgcgtaaatctcatctttgaatcggcttttcgtatttatttggatcaagttcgagatcacgtttattatctttgatttgagtatatatttgatacaattatatacacatagagcttgaaattacgtttttgaattgatgtagcgaaatggagactatatggattggatttgtgtacagttactttaatctctcttgattctaaggaagaagagcctagttgctattctcagatctttcattatagtacgttttcgagtataaatgatctttgaatggatatgcaaatcatatatgtcaatgaaaacgcacttttcagccataacatatcaagctagttagtgtccattgtttggtctactctctgcagatatcaaactagcatcttttgttatctctgattagtattttgatttttttaatcgtgtaggtgaaagtgttcaagcaacccaattatctagagaa

SEQ ID NO: 41181 - DNA, 381 bp, Arabidopsis lyrata
  Intron number 1 from transcript 356074 (locus 356074) deri ved from phytozome v7.0 (chr-ID scaffold_7; pos 23350699 t o 23351079)
gtggagaaactcaacgtaagcagctaaatatatactaataattcaaaaatctcgagacctgtaaaaatgttaagattgtttagacgtatacaaaagccaacatgaagacgtacgtagtaaatgatactcatgaatctttgaccactagactaatattgtttgcttatgcatttacacaattaaccaaaaaagtttagaaatattattgacagaacgaaactcataataattataatttacaaacgcgcaagtaaacacatgcatgcaaacgaaaaataacgaagccacataattaattaattttttccttcacataattagttttgtttttgaaagtaatacatagtttttttttctatttaatagagggagcttgtggat

SEQ ID NO: 41182 - DNA, 837 bp, Arabidopsis lyrata
  Intron number 2 from transcript 936483 (locus 936483) deri ved from phytozome v7.0 (chr-ID scaffold_5; pos 3706421 to 3707257)
gaaaagtcagatcaatcggtggtgaaagggtaatttagtcaataattgttttgtgaggttatagagttttgatatcttgtcttagctcatctttaggcagtctaatttcaataatgtgataggtagctatgagactagattaagcattggatgctgcttttgtttattttggcttgttgtttttggtccagctaaaaattatggccactagcttgttgttcttactctaacttatgcttggttctagtttggcggctctttggattttgcttaactctctgtgaaattattgagaactagtttgttgttcttgtcacaacagatacttgaaagttgaaacttaagacgagaattatgtaaatgaagctacggttaactatatatgatgctgctgtttctctaccttatgactactagtttgctgttctagtggctgatcatttgtagatccttggtgggttttaacaaagatgcaatctttttaagtataagtataaccacgtcaatgatatagttacactggatggagacatggtttagcaatgagtcgtggtgttgtttctttgagacattgcgtttggctattacttttctgtaaggatttggttgaagatgcaatctcttaagtatcttagtaatgagtcttactattgttcttttgtcttatggtactagtccataaattacatgactattcagtatttagattctagactgtttcggaaaaaagttgcattctttaagtttttactatttactctttgcattgagtcttgatgtgtttatctttggcctaaataacatgtttactcaatcaggtgatatctggaaggcggt

SEQ ID NO: 41183 - DNA, 972 bp, Arabidopsis lyrata
  Intron number 1 from transcript 930400 (locus 930400) deri ved from phytozome v7.0 (chr-ID scaffold_3; pos 10941043 t o 10942014 reverse strand)
cggtgatctattagttcctggctcttactgtggatgtaagtaacattataacaactctcttaagtatattatattcatttcaattttcatcctcaacatatatgatgcatataagtaacataaaaatcacaatcttaattagtaaattcatttttcatctttaatctcatatatatattggtgtttggtgttccagtatataaagttcctggtggtgcatgagaggagaaaagaagaatacttcttctatggttatttggcattgatgaaagcagactcatatatcttaaattatacgtttacatcatatgttgtgaaagatctcatcaataaaaaaaagttttattaattgtgtgttcttaatttttagtaattgacacgaaaaagacagaatcaacaatccatgcttgtgacttagacaaaacagaaaaataagacattggaacatccaaatgactctcacgattttcaaatagaaagagaaaacaatagacaaatcaaagtataaaatagtccatgagcgttttcctgtctagttgtctgtgatcagcacgagattttttttcatttcttaatagttaatactcataagggtcaaaatttgtctgcccaaaataaatcgcaagatttgtctgtcccgaaaatttgttagtctttttctgtttttggtcaaaaggaattaattgttgatctttaaatgatggtaaatttgcaataaatattgtattattttgtaaataatattatctttcctttttctttattgccttgacaaagtgttttggttatttttcataattgctggctagaaatttccttaaagaaacaaatttccatcaatactttatgtagttatgattggtgaaatatgttttataataataagtaaaaagttgatgatctttgaaaaatggtaaacaagtaataaatattgtatgattttctaaatacgatttttccgtacgaaaggtt

SEQ ID NO: 41184 - DNA, 746 bp, Arabidopsis lyrata
  Intron number 1 from transcript 888528 (locus 888528) deri ved from phytozome v7.0 (chr-ID scaffold_7; pos 2348122 to 2348867 reverse strand)
gacaattatatttacattcttagttagaaattaaagtatgcttatatttttctaaaattgattatcggtcctaaccactatttattggggtttagggataaaatattgaatattcgtgacccaagtataaaaaaaattaatatttgatatttaagaaagtaattctataagattaactgaataatgatgttcattcaaaatcctttgacatagtaattgctgcgtttaacgtgtaatgctggtctattcgataacattaagaagataattgctatggtggtttgatcgatcatcggaatcttctaaaacgtggagtagaatttttagacgcaataatggaacaaaattatttgaaaaaattgtagctcagagtcggatcacctttttgcatggatccgacccgaaatgcaatccgttttttaaataagtaaatgacaattaatacccctggcactcgacacgtttgacagtttgagcaaagaaaaacgattatatttttcctctgaggatcgtcgatcatcagtttctgggaattagctgctacagatttgttccgtcttgagttacgaaatcatggtaacaatctctaatgctcgatcttcgattctgtgtatttcgcatctccgatttcgtttgtatgcttcttcttcattagtttgatctgctcttgaacatgaattgatcggttgttttcggatacattttgtgcttctagttagccggcaaggaaaggtaaggctcaccaa

SEQ ID NO: 41185 - DNA, 259 bp, Arabidopsis lyrata
  Intron number 1 from transcript 932220 (locus 932220) deri ved from phytozome v7.0 (chr-ID scaffold_4; pos 1052326 to 1052584 reverse strand)
gcttctgcacaattggctccggcaatgtttggttcaatttctcgaaaaaaattggaactttggttgattatttttctttatgtcttccaagtgtttgtgatattgcttcattcaaacgtttttttttaacgaattgatataatttctcgcaaaaattgcgactttgtttgtttttgtttcttaatgtcttccaagtgtttgtgatattgcctaagtgaagttgtttgacttgtgattttgcaggctccaacaaagcata

SEQ ID NO: 41186 - DNA, 822 bp, Arabidopsis lyrata
  Intron number 2 from transcript 470142 (locus 470142) deri ved from phytozome v7.0 (chr-ID scaffold_1; pos 389619 to 390440)
agacggaggctattttgaaggtttgtgtgtgttttattttctaccatcattttcgaattatgtaaaattctcatatttcttgcgtgtttacaactgtttttttggtaccgatttttctgtgaaatttctttataatccctttgttttaaatattacattagttttcagtattgaacttatagcatattcatgaaactttatcttgatattttcaaattgtttatttttctataatcataaatagtattttaaattttatttctgatataaactccaaatgtgcaatcgtttttttttttttttttttttttttttttttttttttttgtgatgtcgttttttggagataaggcaagaatacacgttaccataaaatttatacttatacttgttgtatttttggtttgaaaaaaaaaatcattttctattgacttacaattatcttcttgaattttaacattatttgaacgtgtagaaaaatacaaaccagtgtgtaacacacaaattcgattgttaaataattcaatagtttttcataattctggtcaataaaattacgtagacgttacatagatagtgaaatgtttatatagaaaacatgtatatctctttttcctcgtcagaaaacatgtttatctatattcatattttgttacccgaatatttgttaaaaatgttttcttgtatgtagtgttagtgaaaattgtaagccctatgttaggcataggtttcacatgtttgttatatcaaaaataaaatgatcaaaagtggatttaatagaaaaatgtctgaaacagggcatatcaacggacaggatcatag

SEQ ID NO: 41187 - DNA, 367 bp, Arabidopsis lyrata
  Intron number 1 from transcript 312610 (locus 312610) deri ved from phytozome v7.0 (chr-ID scaffold_1; pos 6849989 to 6850355 reverse strand)
gcgttcgcaaaggtaaagaatttttcgtgaagatcctaatttcatcaagattttgttcaaaaaacgagttagggttattagttattacgtttcatcgcagatgagtttgagattcgagggcttgttattttaaacgagattaggattagggatcttgaatttctttgcagatagaagagattatgatttttgccgatttctgcttcttttaccacaagattggattcttgtgatttcattggcttatactactctcagatttgattaatttgatcaacataatcttaaaaaatcacaggtgataaagctttagttcttatttcacttactattgattttttcttgtaggcaccacgactaagtagag

SEQ ID NO: 41188 - DNA, 349 bp, Arabidopsis lyrata
  Intron number 2 from transcript 329503 (locus 329503) deri ved from phytozome v7.0 (chr-ID scaffold_7; pos 9529044 to 9529392 reverse strand)
ctgtcttccacacccttcactgcaaggtatcaattgaaaaataaacattttttgatatggaatttaatttaggaatcaaattttgctactactactatgttaaaagttaaaactaggtctaatccagtgtgtatacacagtgggaatgggatcaaactagttgggtatatatatatatttatactagtttatattatataaaaaacggcactcaaaaatgctaagaagatacattggtcccatcggattgtaataagtttctactttctactagtttgattcctagtattaatatccatgttattgtgaactaaatttaatttatattttaaaatatataggtggaaga

SEQ ID NO: 41189 - DNA, 480 bp, Arabidopsis lyrata
  Intron number 5 from transcript 491137 (locus 491137) deri ved from phytozome v7.0 (chr-ID scaffold_7; pos 2476148 to 2476627)
cgacgctgttatcatcaaggttaactctatttacatactcttagatcttcttttgattaactatcaaaagggttcggatgtctaaccaaatttttttggaaaagttggatgtttaaatttcagtatttatttttaccattccaaaaacatgaataatgaagatattacaccaaagtagcgaatcaattgatagaaagtgtagaaccactatcaagtacccaacaaataaagcaaacactactaatttccccagatattgttaaccaataaccagatattttaatatactaaacaacatggagaaattgcattgtcatgtcattttcatgttttttttttttttttgggtgcgctttcaataaaaatttgcagattttatcaaaagtatgtgggaaaagacaaacgtggtctaatacgtaaaatgtgataattgaatggggtgcagtgggtgttacacgactggggagacaaagattgcat

SEQ ID NO: 41190 - DNA, 601 bp, Arabidopsis lyrata
  Intron number 1 from transcript 480728 (locus 480728) deri ved from phytozome v7.0 (chr-ID scaffold_3; pos 22679704 t o 22680304 reverse strand)
tttcgccattgaagcttgaaatttcatctgtaagatcatcttctctctcgtttctttctttcgaaatccgtcgattaggtcatttttctctatcttctgctgttaatggtgcttgattttgattcctgcttgttgaatcggagcggtttcgttttgattttgcgtttcttgtcggtttcttttcgttttgagcgccgagaacttggattgttcttcgctgatgatcgattcgtcgatttactttgattcgtttggatttgttctattttacgattctatttcagttttccgattgatgtagcttagagtagttggtgatgtagcttagagaacttggattgttcttcgtatatacgtttagcctctcacgttgttagattgttgtctaagatgatatggagttgcttggtatgtgtgcttcatttctctgctcggatttgaataaccattctctgatctttctagaagttttgtatggtttatatgattggaacgtcgaaggatttgtctggtggttattgtatgaaatgttcagtagtgagaataatttatatgattgaatgactttccttttgtttgcaagttatagtggacattcgat

SEQ ID NO: 41191 - DNA, 1009 bp, Arabidopsis lyrata
  Intron number 3 from transcript 329078 (locus 329078) deri ved from phytozome v7.0 (chr-ID scaffold_7; pos 6869391 to 6870399 reverse strand)
gggactcaacgccaaagacctcgtgcttctcagtggtatgcatctcttcttctgttttttttctctctcattcatgtttgtttggtggtttcgaatctctcaaagtttttggttcgaagttcaagttatatgattttcatttcccggatccgtgatgtgtttcgcatgtttcgtccgttacctctcttcttcgtgtgttaagtgtcacgtgcgttacgaaactccggtagaccaatagaaaacattataggaaatttttccagctaagccagcagtgttttttgcgcagaaaaaggttttcgtgaaaaattgaatgttaaatttgtgaaaattttcttctaaccaaaaaaaaaaaaaatagtcagatttactagttagctaaattttaagagaaatgaaaagtcgtttgtaaaaaaaaaatttaggcttttttggtcaacttactatatgcacttattcaagaatttggtattttagttctaatagactaatactaaattgagtgtgttatagtagcaacaagtgttttgatgttctgtcatcttaaccacttaatctggcatggtccagaaatgttaattcaccccgaaaataggcctgttatacgttcggcagtaaatctcacaaaacatcataaatatctaccggcccattctttagactagatttcagggtgaaattatcaacttgcacgtgtgaccaaacaaagaagaaagtaagaaaattatcaacttgcacgtgtgaccaaacaaagaagaaagtaagaaaccatcaacatgcacgagtctaatacagtagtgatcatgcgttttaaacctggtcaggctcagtttttgtcattttacataattaaatttcaagttcacatgtttcaatatgagaaaactttgtcaaaaacaaaataaaaaaattatttgtttctagctttaagaaatcaaaagatcttaacttgagtggtctactttctgtatcagctgctcacactatcggaacaacggcctgcttcttc

SEQ ID NO: 41192 - DNA, 515 bp, Arabidopsis lyrata
  Intron number 1 from transcript 482526 (locus 482526) deri ved from phytozome v7.0 (chr-ID scaffold_4; pos 16913454 t o 16913968)
ctcacgccacgttctcttcctttctcctctcactggttcgctctcttttacccctttcacgaatgttgcattttgcttgttacctacgactgcttttgattctctttctccattctttctttatctgggtttcttgcgatgattactttaatggacttgtcgtcaacattttcttgggaaagtatgcattttttttgttgggttactgttgaatttgacttggatttcactaaattgtgagaacccattgtttattgttcttgcgtgctacattgctttagatctgattcactagatcggtcaaaataccaaatctttatcgtgtttgtctttttgtcctctaatagtattaaacttggtgttttcttgttctctagatttgcggattcaagaatgttaaagatgtctttaaatgtgtattaaactcgtgggccaatttctggtttctttaatcttcttctcttttacttctcactgaagtctcaagttggaagttctaaaacatcagtggcatt

SEQ ID NO: 41193 - DNA, 566 bp, Arabidopsis lyrata
  Intron number 1 from transcript 491486 (locus 491486) deri ved from phytozome v7.0 (chr-ID scaffold_7; pos 3850934 to 3851499)
gcggggtctgttcatcttcccttcctccgtttttttttttttgttttttctttcttcatttggtgtttcttacaatttttggtttagatcccatctagatttctcagtttctaaatcttgtctcttttggatccataattggatcaatggaaactcatattccgcttcctctgagtgtgtgtagttagttagtgtcagttgatcaagtgtttgaaaatggaaacttttctgctccaatacttcaattgctatgatctatcaattaatgccgcatctgcttttttttttctttcttaaatctcttatggacagtgtggttggatttcagttcgctagcttcgctaagctaaatctttgactctcaaagtttataactttacttacttactgaaatttagctcaactagatctcgttagttcccgccatgactgtgactcgccttaattcagatctgcattgattgttttgatttagatccttgctgatctgttcctgtagtttctaatactcaatgactaacaatgatgcaatgttggtcaaactgcagaccaaacctttgaagaat

SEQ ID NO: 41194 - DNA, 974 bp, Arabidopsis lyrata; identical to SEQ ID NO: 38596
  Intron number 1 from transcript 896310 (locus 896310) deri ved from phytozome v7.0 (chr-ID scaffold_5; pos 1826242 to 1827215)

SEQ ID NO: 41195 - DNA, 467 bp, Arabidopsis lyrata
  Intron number 1 from transcript 312525 (locus 312525) deri ved from phytozome v7.0 (chr-ID scaffold_1; pos 6481573 to 6482039 reverse strand)
gaagaaactggtatcttcttccttcctcttttattttcttttccactgtttattggaatttctgctgtacttttccttaaattgatgttgtctgtgtaagagattgtttgtctgttctgctttatgttgaagttagtttcttttgtttcttatggtttagggtttatgttcgatttgggggatttcaagaaatgttttgtttctagtcgaatttgggactctctatgttcaattcatgtgaaattatctaattagatgagaatttaacggtcagggctttcttagggggtcaaattagggtttcggattaaattctctttaaaccctagatttggttgatgaaatttgggggtttcttatagattgtgtcttgtgttgttgctagttcatgtgtctttggtttttgattagtagaagcttgtttggtttcagttttatccgaaaagagcaggtactccgagaaagac

SEQ ID NO: 41196 - DNA, 660 bp, Arabidopsis lyrata
  Intron number 1 from transcript 318486 (locus 318486) deri ved from phytozome v7.0 (chr-ID scaffold_3; pos 7347467 to 7348126 reverse strand)
tgccggcttatgtagtgaaactcaatttgttttttaaaagaatgtgtaacattgatagggttttctccaacgctttgacttaaaaaccaataaatgaataaatattttagtcaactgttggagtatatcttagctaagaatgaaaaaaactttcatctctggttacttctggtgtaaatttatgacaattatatccacataacctttaatatttgcctacactaaaactttcttagtgccaaaaatcatgaacacatatttgtgaatgcacttcccacatctaatgtatacgcataattattcgccacatccaagacaatggcttttccttgcgtgaaaagaaacgtattttcaattcttcctcttctccttcttttatcaatcactcatttgtattcatctttgtcatcgagcaacaaagtcacaaaagagtcactttaccaactctgtcaaaacaaacaatttacaaccacttctgcatcgcttggctaactctgatccaacaacgttcaccctcaatttaaggcaggagtaaggaagctatttgctgcatttgtattcatatttgctaacgaagaaattgaagattgaagggaggaggctagctttccccatgcctttgcagggtggttatccagatcaaaaccagcttctgcgctt

SEQ ID NO: 41197 - DNA, 440 bp, Arabidopsis lyrata
  Intron number 1 from transcript 938476 (locus 938476) deri ved from phytozome v7.0 (chr-ID scaffold_5; pos 17494046 t o 17494485)
cgtaagtgatcaatcttctttacctaatattttgtgtactttgttagttttgtcactggtggtctctcgtccttgatccttccccgatcaaatcaaagagatcggaaaatcccgatcttaagatctaaggtttattttcactgtttgtagcgatggaactttgaattctaatgcatatggtttggatttgtcgattcgatgtcggatctcagtttttttttttttttttttcaattttgaatacgattgtttcatcaattgatatatctcgtgttctagctttgatggatctgtgtgttaattttgttgggttaactattttaatatgttaagatggatcatgctcttgttcttgtgagaaagatgcttaatgtttttgttctgaaatttttaaatctaatgtagaacggaactgctgaggaggtgaagaagattgtgaa

SEQ ID NO: 41198 - DNA, 949 bp, Arabidopsis lyrata
  Intron number 1 from transcript 927805 (locus 927805) deri ved from phytozome v7.0 (chr-ID scaffold_3; pos 872274 to 873222 reverse strand)
caggtactcttcgcgattatgagttcttaccgtgaataaatctgtacaaggacttatatcgtgaatttaatctgggaattacactaatttgcgggaattactcggggaattagtctcggtgatctcctctagggttagatcgtaatttggcatctttacgatttctgaaaattgttgctagtgagtctctctactctctagtcgtttgaataactgaagaaatttgtttcgattttggatcagtgttcataaagtcatgatatctgttagaaactgcatagaagttgtttggattttgaggacattaggtttatgtttcacaagtattactgcttttttctgtactattacatggagaatttgttgttaactgatgaaaagttattgaaaactatatgcgctaaaatcttttcgtatgtgtaataagcgatacaaatcatattttaaataggtcaatcttcataaccattaccttcacagctatgatcttggagttagttcctttcgctgattaattttgggatttggaaagttacctatgctattttactgttaactttaaatttgttagtgaaatcaataagttggtttgagctttctccttttatgctgtcactactctttgacaccagatcatcttacccttgttatcaatgcttgataaaattatgaagagatcattcatcaatcatcacatactatccctagttaaagatggcagctctgctttcgttgaaaactaatgatttaatttagtgaattgtttggtttggtgagactttcaaactcgtatatataatagaaattgcataggctctataccactcctttttctgatatattatgaagtttgtttatcacattttgtttacttttgacacgttcctggttgttttaattaatgcggttaaggaactaatctctacaggatagaagcaagaaatcacct

SEQ ID NO: 41199 - DNA, 459 bp, Arabidopsis lyrata
  Intron number 1 from transcript 338140 (locus 338140) deri ved from phytozome v7.0 (chr-ID scaffold_2; pos 1741132 to 1741590 reverse strand)
ttaccagatcttgcattacatctgatatcttaaaggtacatgcccttatcttaacaactaacacacaaagttctatattgaattcagttcggctttggaaaaacaaaactcattaatattaaatgtttaatagaaaatcgatttaggtttcatgaattttggttttgattttggttttctgattaggattagggtttcatggtttgggagtttactatgatttgttatgaatatggtcttttagttatgcgttttattaacacattgatttgatctatgatctaagtattaaaatgaagaaatatttttcttccttttttgttgagtatccaagaacctaagaagtgttgagtttcttctctttgcgttatttatctttaggtacgtcaatatggctaatttgtgtccttttctttctctttagagtgtgacaacccttattttcgacaaagccatcct

SEQ ID NO: 41200 - DNA, 374 bp, Arabidopsis lyrata
  Intron number 1 from transcript 313871 (locus 313871) deri ved from phytozome v7.0 (chr-ID scaffold_1; pos 15404238 t o 15404611)
cattgttaagcttcttggttactttgacgattcaggttcctttctctctttatccgttttaaattcaactatagattcttgaaattccttaataatcaagaactggtcctaggaattgttaccatccatgaaagtcaaatactttaaagaacaaagctttaagctttattcttgtcttgtactcatcacaattctttttgtagattcgtttctttatccaatttaggggttttcacttttaccttaattgattagcttttcattgttgtaaattatgtgtcttttgagtggattgttagtgtgaatctaatgttgttgttgttgttgtctatctttcagaggaaagtggtgcactattactagaataccttcct

SEQ ID NO: 41201 - DNA, 389 bp, Arabidopsis lyrata
  Intron number 4 from transcript 951445 (locus 951445) deri ved from phytozome v7.0 (chr-ID scaffold_8; pos 22205557 t o 22205945)
tcacagaccgaagccttattctctacattcaacaggtgtgaataaaaatcataaaattactaagtaaccggaaaatcatcttcttgagtttacttgttttgatacaattgattactccctctgtttttttttaagttctcgttttaactgtatttggacaaattaagaaaaggtatacaatgactatattaaacctcataaaaatgacaagtaattatttacaaataatttgtgtttattaaaatgaggataatttgggtagttattggcataaattatattattaccttaaaacgacaactaatttaaaacaaaaagaaactctaaaataacaactatttgaaaacggagagagtattaatgattttggtttatttaattcaggcaat

SEQ ID NO: 41202 - DNA, 434 bp, Arabidopsis lyrata
  Intron number 2 from transcript 481923 (locus 481923) deri ved from phytozome v7.0 (chr-ID scaffold_4; pos 14024650 t o 14025083)
ataaggtcttcggcgccagcaacgttagcaaattgcaggttccatttccttctcattgctatatattgttttttctctatatattattttttttccatgatattatggtccgttgaaattccttgcataagcttctttattttatccaactctcttccaaacaaaatattcaatgtgtgtttggtcaagtatcaaatctttaaacatgtttatagtatacctatacacattaaaaataagcatatttcactttaacaactcttattcacttgtatattattctgaattggttaattaattatctttgataaactatatggaaatatatggattaataatcataatttgtgctacaaaatatgatatataaaaatatatttacatgattcgtttaaattgttacaggagctaccggttcatcaaagagctgacgc

SEQ ID NO: 41203 - DNA, 550 bp, Arabidopsis lyrata
  Intron number 1 from transcript 915837 (locus 915837) deri ved from phytozome v7.0 (chr-ID scaffold_8; pos 3846976 to 3847525 reverse strand)
gatccgtcgtcgtccccctcgagccatcgaatccggttcgcttgactcatcatagccagaattcgattcgcaggtcgacaataaactggcttgtttgtatttatgggtctttagagattctcaaatatcaagcttcttcaaaattggctttagatctaggaactgctaatacaattgcttaacatctttcgtctatgcattgtatctccgtaaatgggtatattaggttttgattctcagtggcctatatgttaggctatgctagtttagttcaatatcaccacttactctctgtgttgtgcctaactactaagggaaatatgatttctgattttgtttgctttaatgttttgctttagtgatttgctttagtatcatcacagtttgtatcatcacatatcatcactgttgtgtcgcttgtgattcttgttctttctgcactttgtatctatgtttctcgtatgctatatgcttttactcgttaaagacatggtttgtgattaagatctctggtcagttcttaaatggttgtatgtttgtgttatttcag

SEQ ID NO: 41204 - DNA, 820 bp, Arabidopsis lyrata; identical to SEQ ID NO: 40507
  Intron number 3 from transcript 494050 (locus 494050) deri ved from phytozome v7.0 (chr-ID scaffold_7; pos 23273886 t o 23274705 reverse strand)

SEQ ID NO: 41205 - DNA, 535 bp, Arabidopsis lyrata; identical to SEQ ID NO: 40508
  Intron number 2 from transcript 494050 (locus 494050) deri ved from phytozome v7.0 (chr-ID scaffold_7; pos 23274873 t o 23275407 reverse strand)

SEQ ID NO: 41206 - DNA, 174 bp, Arabidopsis lyrata
  Intron number 2 from transcript 353697 (locus 353697) deri ved from phytozome v7.0 (chr-ID scaffold_7; pos 4424740 to 4424913 reverse strand)
cttttccaatattcgtgaagcggcttgagacatatgtaagttttgttttcttatttatatatagattgttttggccgtgaattagtgtgtttcttcgtgcctttaattatacacctttggatcttttgatgccttgtagggttttacagaagttgagtctgaccactttgaata

SEQ ID NO: 41207 - DNA, 572 bp, Arabidopsis lyrata
  Intron number 1 from transcript 915719 (locus 915719) deri ved from phytozome v7.0 (chr-ID scaffold_8; pos 3069882 to 3070453 reverse strand)
cccaattcaattgaggttgtttcttttgtttgtaagacttatgtgagatttatataggccaaaatatatcttcaaattttaatgctaatatattatgtaccataataaaatggcttttgatcgttttcatttttggtagcttagatatgtttatgctagcttttgactaaagaaaaaaaagatatatgtggtagttctttaattcaattgagtcacaaaaaaaaaaaaaaaaaaaaaaaaaaaaaaaaaaaactagcccgatgttaggataaggttgctcaggcgtgctatttagctggagaactggtggttgcaagaaagcattgtgaagcgtccattaaggtaaaagccctaaatatactgatactgctttgattaagaccacaaagtgattcattgattgacaaatatgagaacagcggttgtgtaatatacgaaaactgcttgagcaaaccgacatctgggagaccaaatttctcaaacaaccttttaaattttgtttgttttacgttatcccaactgggagatgtgagatatattttgggtttggtggcagattctgaagaggctat

SEQ ID NO: 41208 - DNA, 449 bp, Arabidopsis lyrata
  Intron number 1 from transcript 944335 (locus 944335) deri ved from phytozome v7.0 (chr-ID scaffold_7; pos 2300478 to 2300926)
gcacaaaactctcactgctcaacaagatcttgcaggtttctttctttcttctatcatttagttttcttcttctttgttcacatacagattaacaaaatttcagaatttttgtgtgatttgattgatttttagtgatttttcttcactttggtgaatgagtaattgaaaattctctgccttttaatcatttgttggcttaaatcggactcaaaggccaattcttttcgtggatttttgtgctaagagtaatggttcttggggaattctagaatcgctcctttgaattcttcaattgagcttgagaatttcccaccaaaaaaggtgtttttgcttgatgatgtgttcttgagataaagttttagttttttttttttttatgtagtttaactttcaacaactctgcttcatttttatgtgtttggtaacaggagggagattgggaggtctat

SEQ ID NO: 41209 - DNA, 286 bp, Arabidopsis lyrata
  Intron number 4 from transcript 492157 (locus 492157) deri ved from phytozome v7.0 (chr-ID scaffold_7; pos 6629112 to 6629397 reverse strand)
gtcactcccggctctgacagcccaaaggtaacgaaattattagtgtgggcaatccagtttgttttttggttcagttttttttcctatatattcgtttttttatcaaaactgaaaccaagaaaaattagttataatttgatttggtataagatcgtttgatgcaattttatcaaggattatatgcccactccttatggaaccacaatcaaatgaatcatagagacttaaatctaaaactattcttctaacaggttgcacctgaagtgatagcggaatacacagtgac

SEQ ID NO: 41210 - DNA, 591 bp, Arabidopsis lyrata
  Intron number 2 from transcript 921902 (locus 921902) deri ved from phytozome v7.0 (chr-ID scaffold_1; pos 12612296 t o 12612886)
tggaatttgttatacgcatcctgagaaacttcctggtacgtaacgctctctttttgtaacatcaacacagagaaaagaaaaaaaaaatagagataaattaatactattgacgatttttttcttaaaaataactcaattggcaccatgaaaaacaaggagaattgtccaaaaatgacaatttggttattgtgattttcatttaaaatttgggtcaaaagtaacacatgtttgcatacggattctacacaaacactcttggctttacccgtttatattagagttttcggttttaaagaaatttgtagagacacatatattttggtttaattacaaaaaaaaaatgattgctagatttgataaaatgtaatatttgttcagaagtgtaaatgttggttttctcacaaaaacaaatgatcacatgaattaagtaaagttttgtgaaatagcattgtctctaaaattttggtttagattataaaagtgaaatcatcaaatccaatgtgattggtgattagatcaacatatgcttaacttaagtacatcttgtcccaagtaggagtaagcaaagacgggcaagtacggcacttcttc

SEQ ID NO: 41211 - DNA, 562 bp, Arabidopsis lyrata
  Intron number 1 from transcript 351756 (locus 351756) deri ved from phytozome v7.0 (chr-ID scaffold_6; pos 12991249 t o 12991810 reverse strand)
ctgggagtgaagaagttaatcttattgagagcaaggtaagacctttttttattgattttggtgtcaatttatgattgtaattgttagatgggtcttttgtgattttggatattaactgtgttcatggattgttcttagttttgtggtgtttagttatgtgtttttttaagtaatcaaagcttagagctttcatcgtttggggtaatgaaacgtgtcggttgcttgatgggtctttactaatttaggagcttttcttggctttatttggcttttagtttttctctttctctagtgactgattttgattctgggcaaaatcagatttttggtagttcttgatttttcacttttgattttgttgtccatttcttgactgtttctactgttaagtgttgaaatcatatcaaatcaacttgctaattagttggcagaagactaagactctttatggacctttaatcaaatttgaagaagctttttttatgtcatataaagttttgttgtttttgttaatagttccatgttccatgtttttgttgcagacagtggtgcctctcaatac

SEQ ID NO: 41212 - DNA, 446 bp, Arabidopsis lyrata
  Intron number 1 from transcript 348285 (locus 348285) deri ved from phytozome v7.0 (chr-ID scaffold_5; pos 15828118 t o 15828563)
aggttttcatcccagagacgtcttctgaagcgttggtaataatctctctttctttctccttcttacaaaactttagtaattactgaagaagaacctagctgcgagtgaaagtgataaaaaagattctgaattttgttcttttgtttctcgtttcttgcctttgatgacatttcacttgttgatttgtgttcatcctttttgtgcccttgttcttttttggtttcttagtggcagtgctgatgattgttttcttaaatctatgactctcggttgtaaattgggcttataaagatttgatttttttcaccttgtgtaatgtgtcttttatgtatttgtttagtgcttaaaaagctcactcttttatcactgtgtcttgctcgtatactctgattgttcacatttgtgtttcaggcgattccattgtctttcacggaacatcttgttga

SEQ ID NO: 41213 - DNA, 937 bp, Arabidopsis lyrata
  Intron number 2 from transcript 494382 (locus 494382) deri ved from phytozome v7.0 (chr-ID scaffold_8; pos 1312416 to 1313352)
atcctctcactccaaccattactgttagtgtccatgtccagtccaatctcaatctcttttttcttttctttttttaatagaaatctccatctctttccactcttttatttttggacataattaagaaggaaaaaatatcaattatatacatctgggtctttattttattattgccatgcataaccatattgctgctaatgggacttccaaacctcaatttaagctcaaatgtctatatgatggtttgactaatgtttttgagatgattattacttttttcttttgtcaatctggtcttgtacatataaatttaccaaagaaataggatagagtaaactttcagaatctaaatgacggttttaaggactacaaattgagaataaatgatgctttatacatattttcaaattataagaaaaaaaaaaaaagtaaaatatgggagtacatttctttcttttacacgaaatattacattttcgatattgatatatagatgtgtgaagttatgaacaaaccaatcatttaattttcggggccataatatttcaaaaaataattgaacctcatattcttaaatccaaaaagcaaagtaaaacctcaagtttattcgtggttaggttctagaatgtgacgtctaaatcaacaaaaattgaagaaataactaacatatataatgacaacaacaacaatatatatatatatatatatatatatatatatatatataactaatcactagtcactacttgatgtcgttatcttaagattttttttttttttttgctaattttaaaacatttatatattgcaacaaactaacacattttatttgtatacttttggaataaatttaattaattatgttgttgggtgtgttgttgctttcattggggatggtacagaacgtgatagacattccgactcagcttgagtattt

SEQ ID NO: 41214 - DNA, 853 bp, Arabidopsis lyrata
  Intron number 1 from transcript 905201 (locus 905201) deri ved from phytozome v7.0 (chr-ID scaffold_3; pos 9637126 to 9637978 reverse strand)
tattctcttattctttcttttttgtgcaacaggtattctctaattccttcttgttttttaattagtttctcttcacatgatttactgctcataaagctttagcaattaatttatgtggtttcttcattggttaatgtgtgttgattttttggctgatttaacattttgaagggaaacgaaaagtgttggaactacagttttttttccatccaattttctgatggctcgtagaattatatgttcatagattctataattaggtgctcgttatgattgtatcatgagattcaaaatctcttattgcagccaccttgtgggagatttaatgaattaaggaaagagatcctacgttttttaaatctgttttatcttttgaacattggtttctatcgcagttttctaatttggattttttctgtcctacaaaaataatccgttttagtctgtaaattgatgatatcaaaatttaaaagcggtttcttatttgcaaggttatttctaaccttgtctctaacagggactcaagacggatcttttgagtttattacagcaaatgctcacatccttaaaagattaaatgttgaagagatgaaatgaaaataagagagagtttgtgcccggttaaaattgtgtgcttaagtcaataagtagtcaaagacaatatatcatgcttatagttttaatttatagtcacttgtgtttctgcattctactagattttttagcagggcttgtgtttataaactgttacaaggctcttgttttgtaaactgttgaatgttgatggaaatatattttgaaggacttaagcttttatatatagttcttggaacagaatcattggagccattgc

SEQ ID NO: 41215 - DNA, 548 bp, Arabidopsis lyrata
  Intron number 1 from transcript 486320 (locus 486320) deri ved from phytozome v7.0 (chr-ID scaffold_5; pos 18987310 t o 18987857 reverse strand)
gccgttcttcggattttcactcttctgctcgaaaggtctctctcattccttctctcaatccataacgagcaacttctcttctctatatcactcctgcttctagtttagctgctcatcttcttctacttgctgcaacaactcgaaatcgtcatttctattgttctagtatgttttctaatcgtgtttttgtttcttctggttgtaatattcttcaatgaatttggttcaattcaattcgattcgatatatgattcagttttgcaaaatcactgacctaaattctattcctggcaatactttttcttcatgtgagtgagctcaatcaggtagatgcagtgattttgaattcattatgtaagaaaagattaatcattcacttgttagagttcatcaaaaacactactttgtcagagctcagagctcctggatttgtaatatttgttttcagatgtgtttgtttagattctggagctctatatgaagttaaagttgttttcttttctcttctttcagggcagtgcttgagaatcactgaagaaggtgatcgc

SEQ ID NO: 41216 - DNA, 778 bp, Arabidopsis lyrata
  Intron number 1 from transcript 478588 (locus 478588) deri ved from phytozome v7.0 (chr-ID scaffold_3; pos 4944965 to 4945742 reverse strand)
agattcggaataacgctcacatcaccgaccctaaggtacttccccttaatttcactctgattattaacacggactcgggtccactgcgattgcgaaattggaagcattttccttttttctttactctccccaaattggtgatgcgttttggttgggttgacaaaacaatgagctcttccttatttgttaatctgatcgtttctgctttctattgcgcttttggcttggatttattgtcagctatgtttgaatgttgttgaaagctgaaagcttacaccttctatcgtttggaatttttgcaagtagtttatgttgagcggatactttaatttctgggtagtctgatcttatgatcaataaagtgtcttgtaaattgggtgttgggtggatattttcttgtagcgaaaaggtggaagctttaccggttgcatccctctaaagctgtgttactttcttctttgtatttgttttctttcatagatgagtctgttgtcttcgatatacttcagatcacaatggagttcttctttctcgtaatattggtatttggtacctaagttaagatttgcttatgtgatgaatggtttattttacttctttttttagaaccatcaattgaaagcatgtccttgaccttgagtgtgaatgcattaatcttggattttgtttgttttataactttattgttctcgattggctctctcttaaggtgcttttagaatgcaatctgatggtggttttgcttctgcaggtaattgatcttcttatattcaaggga

SEQ ID NO: 41217 - DNA, 636 bp, Arabidopsis lyrata
  Intron number 1 from transcript 497050 (locus 497050) deri ved from phytozome v7.0 (chr-ID scaffold_9; pos 332491 to 333126 reverse strand)
cagatctgatcttgagcttttgcaccagcaaaaaacaggttctcttctatctttcttgatctatcatcagatttagtaacatgcatgttagtacttgttaataaaaactatacataagattttgacttttaaagtgattaatatgaatcttgcgatccccatatgtttcttgggaaaatgaaatgaggattcgagagttttctgggaatccaaacactaaatttcttctgcaaaacccaaaatgttaattaattttctaaagatttgaggcagagagggaccagtcaataatcacttttcctttctttttttcactgtctttgctttctgctaattatctaacttttccaacagattagacgtaactttaacataataaaaaccttaatttatgggtgattaagatagagacatactccctccgttcttttataagtgatgttttaggagaatgcataatagattaagaaatcatttaatttgtttatttcaaaactaaaaaatcatttattatctaatcaaccaataaaaaaaatatatacagaatatatataaatcgtcaaaactaataaaatagtaattaattttgtattgatatttgaaaacatcatctatttaagaacaaaattagaaact

SEQ ID NO: 41218 - DNA, 540 bp, Arabidopsis lyrata
  Intron number 1 from transcript 351887 (locus 351887) deri ved from phytozome v7.0 (chr-ID scaffold_6; pos 17654155 t o 17654694 reverse strand)
ccgtcgccaacgtccatccgactcgggtccggcaggtactgtttatgactcttctccttctcgtgatttgtaaatgcttgattttgttttatttgctcgatttcatattagatctgctgttatttttgatgtttagggctgtatagtgttcgattacaaccagtttttaactcgatttctctcttggctctgtttattccatgttagcttcatttctctgtttctctaggttttttggtttgattttaggttagtatattatttcagatgatgtttataattgctattcgaatttcaaagtgaaaaaggtttgatttgtctttaatttgttctaatctgattgttaaataaagattctaagaaacgagtgtgttagtatagtggctgctcatctaatttgcttaagtttgtgtttgtttattgattctaagaaactactgtgtttgttgtatctctgttattatttgtttaagtatgtgcttgttctttacctctaatttacctttcaataactagtgtttcctttccctaagttaacat

SEQ ID NO: 41219 - DNA, 389 bp, Arabidopsis lyrata
  Intron number 2 from transcript 938915 (locus 938915) deri ved from phytozome v7.0 (chr-ID scaffold_5; pos 19170085 t o 19170473 reverse strand)
gaaccttgtcagtgaggtatggagactgaatgactcccttctatgttttgagccttttagatacaagttagaatctgaaagaattggtttatgtatatctcatgttagattggttgaacgaaattcatgaagttggtcttggatcttgatagagatattagatgagtcatcttaatcgactgttgagtatttcaatagtggtgctgccaaaagctgtgtctgtttgttatttatacctgaagaatttctcttacggcatgacagaaactgtgaatactctccgcaatgtttgaatattggcagttgcaagctcttagttttaatgggaaagttttcaggttgtatctgatatttggttcctttctttcttttgatttccagattcttga

SEQ ID NO: 41220 - DNA, 1001 bp, Arabidopsis lyrata
  Intron number 1 from transcript 891239 (locus 891239) deri ved from phytozome v7.0 (chr-ID scaffold_7; pos 19345653 t o 19346653 reverse strand)
cctctcggtggcgatagtcgcgccgactccatcgggtttttcttctagatccatcttcatttgctatttctagattggatcgtgttgcttatttttggtcgttgaaactaggaaaaatgcaattacattttgtaggattgaaaatttcgaaaaaaattcggagtagaagagtaaatggcgttagaaaacgtttgataagcggaattaaaccggaaatgaattggcgtaggcgagatatgatctttttccttagttctaaaatcgctgtaattagcgattaaaagtcacttgtcaaaatttgtaggatcaaaattttcaaaaaaataatcggatttgaaaactgcgattaaaatggcgttataaaacgttttgttaagcagaaataaccggaaatgaatttgcggatgtgagagatgatatctttccttagttctaaaatcgctgtaattagcgattaaaagtcacttgtcaaaatttgtaggattaaattttttaaaaaatcagattagaaaactgctattaaaatggcattataaaacgttttgttaagcggaattaaaccggaaatgaattcgcggaggtgagatatgatctctttacttagggggtgttattggtttgtgatttaaatagagttttagtgactttaaatgttatgtagaatctattgttattcaatcaagattttttaaaagtttgttaaagtttgatgttattaatttaagatttgtaaaaagtaatctaaaatcttcataaatctaagattattggattcatacttttataaagtcattaaatgttttgtgttattcaattaaaacaaaagaatctatgattgttaatgaattaaattaaattattctaaaatcgctgtaatttagcgtttaaaactcacttgtcaaaatttggttccaacacattttctgtatgtacttatgagatttcatttgattgatatgtgttcagtttatacttcaccaaaatcaagcttgggtcaccac

SEQ ID NO: 41221 - DNA, 356 bp, Arabidopsis lyrata
  Intron number 1 from transcript 325654 (locus 325654) deri ved from phytozome v7.0 (chr-ID scaffold_6; pos 4497286 to 4497641)
gccgtatcaaggtatcttcacttttcttcttctatggtttcatgttcaacaatttattatatctctgtaatccacttatctagctacttatgaaactggcttaatctggtattctctaccatctagttgtgaatttgtgttagttttattggtggtggattgttattcatacaattgtgtacaggcctgtttgatcttacttttgttgactggaatttggctcatattttgtttttgtcttgttcaatttgtagtgattttctattcaaaggaaagatcttttacttttcgattaatgtattttcttttggtgttgtatagatttgggatactgtcaagggtcaggtccaaacaga

SEQ ID NO: 41222 - DNA, 363 bp, Arabidopsis lyrata
  Intron number 1 from transcript 936167 (locus 936167) deri ved from phytozome v7.0 (chr-ID scaffold_5; pos 1980712 to 1981074)
tcacaagaacacccgtaggacaaggtatataactatatatttatacattctcatatgttgcatttactcgaaccttaaatttagaggtaaaccattagagccaaaactcgaaaccagactatatcttgcttagtaaaacaaggtgaagaccgattcttttggggttttaggctgatcgggcctcagatttttctttgggcttttattgggcccaattgtcttttgtatattattttgatgtaattttaaaaatgtttggtcataatttgattttattgagtccggactatagcatacaatttgacatctataccttattgagtctctgttaacaaatgtgtttattacatttataagctatag

SEQ ID NO: 41223 - DNA, 418 bp, Arabidopsis lyrata
  Intron number 1 from transcript 887441 (locus 887441) deri ved from phytozome v7.0 (chr-ID scaffold_234; pos 10324 to 10741)
tttcagacaccaatcgttgcctccgaggagccttggtatgctcatcttcttgttttttggctatacatattattttcgttactataaattctaatagtgtttgtttttttaaacgattgtatgttttggatgaatgaaagcaaccacgatgcatgaagaagattcaggtgatgtttcaattgatcttttatctttaatttatcgattttctaattttacaaaaatgttctcaccgagtagaatatacttttgagttttgagttaaatctttcacagtctgttgtggattagcaacgtttcaagccatattaactattgtgttgtggcagttcgaaagattcatataaattggactattgctacaaaaaaaaacagaatcacaggtttcattctatcaaaggagataaagcctcttatc

SEQ ID NO: 41224 - DNA, 658 bp, Arabidopsis lyrata
  Intron number 3 from transcript 925321 (locus 925321) deri ved from phytozome v7.0 (chr-ID scaffold_2; pos 7520295 to 7520952 reverse strand)
acggtactttttactttcttaagatcactgttaaaacgcaaacgcttagttactgctttttcgtttaattgtgaaaagaaataagtcgaaaacgaattcgcagtttttaaacacaaacggatgtttctttttgcgtttgcgtttagctttaacgtttagtgttaaccactatttgtaactctactaatgcaatcatctggattctaattttggaagatcggttcaaaaatcggaaaattttactaatttttttggtctaggcgaccacgactaattggtctaggcaactgattaaagtgttttaaaaggtttttcaatgaagtttttattttcaatgaagtttttggaataaatagaaacacatttttaaaaaaatttatagtcttaagtaatatatttaacttttacattttcaaaacatgtaaaaagtatatattatggataaaaaaatcgttgcttaatctccgattaattggctggatcaaacgcttattaacattgatttttaagtattagcaaaaaaattttgtgttacacaaaataaaaatggagacaacctgacaactcaagtctttagaaaatttggtaaatttggtaaatttgattgctcatattgtttgtgtgacgttcttctaacaggattgcgatatcaacttgg

SEQ ID NO: 41225 - DNA, 376 bp, Arabidopsis lyrata
  Intron number 1 from transcript 488833 (locus 488833) deri ved from phytozome v7.0 (chr-ID scaffold_6; pos 8219583 to 8219958)
tggctacaccgttaaggcctccgtccgtgacccaagttccgtaccctctcttcttttctctctccacttattcactctagggtttagacactatttcatgggtttgaatcaagtctgtgtgactggagttttgagatttggtttctagtagtgaactgtgtgaattttctctctttttttggtgtttgggtcatcttaaaaattgatgctttgtatattaaatttcccttaagatataacctaaaacaccaacaacgatctgcttgtagaaatgaaattaatactttggtttttatagtaatttgttgaatctttcatgatgattcaccttatatacacaggtgatccaaaaaagacacaacatttagtttcactg

SEQ ID NO: 41226 - DNA, 607 bp, Arabidopsis lyrata
  Intron number 1 from transcript 949514 (locus 949514) deri ved from phytozome v7.0 (chr-ID scaffold_8; pos 13620446 t o 13621052 reverse strand)
ttgccggttagtcacctacccgtcgttctagcttcctttcccttttatattttatattattagtagtaactgtgagaaaatgctaaagtcttcaattttagaatggattactacatttgtacttgaaatgtcggatccgaaacagactttgtactttgattagtttagttatgtgttcgtgttctttgactatgaaacttgttagattgaaagaaagtttggatttttaagattaattgttttggattttagttttagtttttctttagtgggtggaagcaattcttgtgatctccgtgaagccgacacgggttttgctatcataagtgcttcagctacttgaaaggtctctacttggataattatgattctttgctttgtggatctttcatgtgattccagctgttgttgtctcaatctctctttttctcaaaaattaaatttttataaggaaaaaaaagggaaaataatagatcccttgaatgcagtaactaaggagcttttttttgttttttactgttgttgaatttaaagtgaagaaatgagctaatcattgtggtgaaattgagcagtgaagttgcttgattggggtgaagaaggtcatagg

SEQ ID NO: 41227 - DNA, 438 bp, Arabidopsis lyrata
  Intron number 1 from transcript 488237 (locus 488237) deri ved from phytozome v7.0 (chr-ID scaffold_6; pos 5672070 to 5672507)
tttttactgtttttattcacggaaatccagttaaggtaattgtctacatttgtcgatttactttggcttctctgggttttgatatttgtttttctaatttctcgaatgattcaacatttcttgcatttgggtgatgaagaagcaccagattacacattttctggtttatatgcttcacaagtgctcctcttataatgttgtttattaggattggttgtttgatttcactgaaaattactcagtcatttgtctcccctagtcaacatacagtgtaattaactgattcaacagaaattttcataattcattccttaacacggttttacctcattctttatatttatatatatttagatcgcttgagaaagatctgatattctttctgtgaatttgaaagttgcaggtttccacattgcacagctgtaccatttgtcgaga

SEQ ID NO: 41228 - DNA, 291 bp, Arabidopsis lyrata
  Intron number 1 from transcript 945448 (locus 945448) deri ved from phytozome v7.0 (chr-ID scaffold_7; pos 6725192 to 6725482 reverse strand)
acgatctctgttgagaagccgatttttggtaagaatctattcccacgatatttgggaaaaaaatgtctctatcaagatacgtattattttccggctaaatcaacgattttctaggaaaacaatgaagtttttttcctcaaaaataatggattttgggctaccacaataagttttggggaaaatattcatgaatctttttttttcttcttttcgaaattatatactatattttacaaagatttgtttttccaagtagaggagggttctgcattcaagaagagtggggacaag

SEQ ID NO: 41229 - DNA, 645 bp, Arabidopsis lyrata
  Intron number 1 from transcript 943550 (locus 943550) deri ved from phytozome v7.0 (chr-ID scaffold_6; pos 24053636 t o 24054280)
ctcttcatcgatatctcttctctcagttttgccaggtcagtcactttattatttatttttttgcgtttatatacgttatacgtttacagtttttaaaatatttttttgataaatttatatttttgaaaatatcaaaacgagaatgttttgactactaaatattgaagctgccaagaaaaaactaatatatattgatatctatatatgacttgttacagttaatatatcatgacctatatgtattaaaaagcgacatagcatattaaatagttattatagacttatagtagtgacggtgaaacacggacaacttgcctgattgcgaatatgaaatattaacaacataaacgtcaaaaatattaacaacataaacgtcaaaaatattaacaacataaaaaaggaaacaaaaaaaaaagaacaaatcaagcctatatcattaaatacgaataagaaacgacgacatatcctgtgtggatagttattagtcatgacagtgaatatatctcatggatttgaatttcaatacctgtaattgatttttgttaggtgctttcattcattgttttcatgttgtactcaactgattttcttgtccttttctctctaacaggaaatttatttcgtgaagaaattagacaagcgaag

SEQ ID NO: 41230 - DNA, 1047 bp, Arabidopsis lyrata
  Intron number 1 from transcript 894642 (locus 894642) deri ved from phytozome v7.0 (chr-ID scaffold_6; pos 12542864 t o 12543910 reverse strand)
gattacatctatattggcttatcagtgtgtctattgtgagttttggtacgaatatctacatctatattattgatgattatgattgtgattattcagacagattattgcttataattttaaattcttttatgaagcatgataataatccagccgtgttcatacgtatcgggttagatgaacacgtagggtgtaacgattgaggcgtcgtggattggaaactcgcatgtcattactctaatttcataaaagagagtcagtgctacacaattatgaactttgttgttattatgaaccattctctcactacaggaaatgtgggtattgatagcactaaaaaataacggtttttatgtctctgctatgtttgacttgatcgtgatttaaagatagcgttttttgaattgtaaacgctatagatgatttaagcgggacatgctgaaattgacgcggccaattttcgggttactaaagtttaattcccgctattgaatctgttaagagggaaaaatgtgaaattttggctaaggcaaaataaattaaaacaagaaacatcactttttcatttttttcttaaggcaaaataaacttcttctctctcgatttctctcgatttctcacagtcaacaacacatctcacttgatttcactcgaattctccaatctgcaactcaatctcagtcgatatctctcgatctccaacaggtatgttcatattcaatcgtagcaaatctatcttcgtctcgttctctgaatgtcaatctcgatcctcttatgtgtagtctcaatctgtatcaatttctcgttcaattcagcatctcgttcgattcagtctctattgttttttcttaatctcagtctagtacttcgatctctgtctcaatccttcattgtcacttttcatcgatcttcatccgtgtaagtcgaatttgacatttacggtgacattgtgtttgggttttgggtatttgtctcatgtaaagttttaatttacatcgatgaattttttcttttgcaggaagagcttggtgaaacttctgttgaaggttt

SEQ ID NO: 41231 - DNA, 864 bp, Arabidopsis lyrata
  Intron number 1 from transcript 352016 (locus 352016) deri ved from phytozome v7.0 (chr-ID scaffold_6; pos 19345571 t o 19346434)
gtggtgagagatcgatgaatgtgagagctgtgaggctgtgaaagagagaccctagatcgatgatggttagagagttacgagaaattcaggtcttgttttcggtttatcaaatcggtttaaacatttaattcggttaattacacatttgatttgaaatgtttaatttctattggtttggttatgagtaaccactaatctattctaatcaaaatcatttcaatccaattcattaaactcattaatcaattaatccattaagatccaaatttttcatccattaatagatccattatgttgattggattggtttggattgatccatcaattttaatctattttgacacccctaggtatgtacaactgaattctctcataaacagaaagataagaatcctaagaacaagattagaagatagaacagaggaattcataaacagaaatggttccgtttcggtcacatgactgcattttaagaaactatgtgacaaaattactttcttgctccccaagaaagctctaagcaactttaatcctccatctcttgccggactgcctttctttcatgctctaatcatatcccatatggatggcctccttgcatcggctatatggatcggacacacaatcagggagaagaagcggtttctataggttaaccgaatctgattttcctttaattatgcgcactggattccggatatagttagagagtatggagccaagagtgtgaatttccgtagcatgtgtagctatctcgtttagtgagaggatcaattccaaggaactctgttttgggatggagctgacaagaactctcggtttcttttagcagtaaagctaccgaaaggatcattaacagtccaa

SEQ ID NO: 41232 - DNA, 504 bp, Arabidopsis lyrata
  Intron number 2 from transcript 486907 (locus 486907) deri ved from phytozome v7.0 (chr-ID scaffold_6; pos 169389 to 169892)
acaccaaggcaagcaattccatctctggatgtttttcttcctttcatggagtaacataacataagcaaatgtgatgatgatgatgatgatttcatgcgtccatgtctcattttcattgttcgttgtctctctaggaccatcagagtcaagaatatgcacagtgtttacacgctttacaccagcactactaggtcatgaatagggaacaaatacatcttttgtgtaagttcatcataagacagacctataacttttactcataaactaggcattacaaacagtttgcagaaaccgtttcaacaactctcaatcaatctttacacccacactattgtttgttttgagttatttaggaggttcaacgtccctaaatccgttctctaactgatctagtgggtcatccatcatctggagtctttacctgatatttcaattctacatttcttttctcgtttggttcttcttgcagggatccttctttggttggaacggggcgacttttta

SEQ ID NO: 41233 - DNA, 615 bp, Arabidopsis lyrata
  Intron number 1 from transcript 945230 (locus 945230) deri ved from phytozome v7.0 (chr-ID scaffold_7; pos 5894857 to 5895471)
gaggacgaggtaatctttcatctttttcttatgtatttattataaacacgatttagctctgttttttccgccggagattgtagtttgttaatgaggacatagaagaatcagaattctgttttgaaaattcgacttttatattcgagatctgattcgttactctggctttttcactcatcctctattgatgatctgatagagtgtttggatagagaagaaaaacattttgtataagaggaatgaagattttctgtcaaatcgttttctcaaaggcgtggtcttttgttgcttgagtggtttgtttaattgtggtataagagttagattaggaattgaatggaaatggaagatgaagcttttgagttctcgaagacatctgattgcatcggaattgtataatagagttctctttcaaaccattttggcatttttagtagatttaggaactgaaagagaagaaaagatggatctttgaattctgtaagacattgttagtatagttggtttcatcttcgtgactcactatatgatgtaactcggtgtctaaacctgtttgttttggtgttttctattgacttagattgaactcaaaactgctcctgctgatttccggtt

SEQ ID NO: 41234 - DNA, 1001 bp, Arabidopsis lyrata
  Intron number 1 from transcript 337814 (locus 337814) deri ved from phytozome v7.0 (chr-ID scaffold_1; pos 32142115 t o 32143115 reverse strand)
atcgacagaacctgcaggaaataattgttccggatgtaagtaagtgttaatccaatcggatataataatttgatcattacaatacataaatagaagatcgaatgattaatatttatttatttaagcatcatcattagtggatccggaagcgacctaccagattattaaatcactagtttatggtgtgtttagtttttttttaacgacaagtttaatcttttttatgtacttttagtttatcatttgtgatggcattattttttaatttaatatatgttattgttatattttcaatttcaattaatttagtaactatgatttttaatataaaattatgtatatatgtaatttaatagtataattttgtttaggtataaaataatactatattaaaattgagggagtactttgtaaataaaaaagttgtgctctaaatttaatattgtgttgttccaaatttggagcaatactattcatatttctatttttagagcaagatatagaacaccattggagtgattttgctccaaatatagagtttggagcaagatatagaccactattggagatgcccttagagttcttttactgcatgtgtaaaaaaaaaaaaaaaaaccttttattgaagctaaagggtttgagattttgcctatcgtactgatacggctcatatacttgttgatgccacttttgatgaaaacatggtggcttgttctgcctatcttaattttcttaaattttctctataagttattgagtttacatctccttaggcttactttgaatatatactttaaattgatgattatgtttatgtgttatatgatcgtatttatagtttgattcttgtgtagatatgccattcatttaaatcttgttttgttctgtctttttatcactttctgtattttggttaaactaagtgtgttttcatcactttctgtattttgtttaatctatttgcaggcttttgatctccattgtatctggattagcttctc

SEQ ID NO: 41235 - DNA, 677 bp, Arabidopsis lyrata
  Intron number 1 from transcript 477560 (locus 477560) deri ved from phytozome v7.0 (chr-ID scaffold_3; pos 931450 to 932126)
agggtagtctccttctctccagcttctgtttgattttgcttttgattgttttctgtgtttcttccattttttgacggaatcgcgtgttacccatcgttaatcgttatatccactttcaatgtttttgacactcggattttgaaaaaaatatgaaaaagatcattcgtggtttgatgctttggaatggctgtatattgatttgtgctaatcattcatggatcctgggtttttatttatattttcaaagagttactttttaggtcagaggtgaaaagtgtctgtgtatgcttgtaatctaagctcttgctagtactttaaggttatgtatggtttgctttataccctgaagattgtagttcccttctacattagtatagtagtgcctacactgtttagaatcttgatgtagccattccactttcatcgacagttgggttgcttgtgtatccatgaaaacaggcacacaagttaggtagtccagattttgttttgtgtatgaccagcttgttagctatcaagtgtaataactctatgtgctgctaccgatttcgtggtgttcttgttaatatatgactattctatgtggagtggtttcccactgtgcttgatatgatgactagatttttcatatttggtgattttcttcttgtgttttcgtttggagatgccaggtcgtt

SEQ ID NO: 41236 - DNA, 585 bp, Arabidopsis lyrata
  Intron number 1 from transcript 940460 (locus 940460) deri ved from phytozome v7.0 (chr-ID scaffold_6; pos 3929065 to 3929649)
gaaggcgatcgaaaagaggtataaacatcttcttctttttcatcatctgtttttttttttttttttttctattagggaactatgattttactaagaaattgagatctgcttggatttcgtcgggaattgaaaatgaggttttagctaaacaagctccaagcactactgatactggtaatcggaaacaagtattgagttagtactatattctaaaagtttcgtcctttttcacatctcgataagctgaaaatttgtcatcacgaggtatattttctacttggtaatttcgacgaaactttattggattgataaaaagatcttactttacccagattttatcgatcattgaataaatcaaagcttgtaaattttcccataaagtcaagaacttgactttgtttcttagcgaattcgtcctcttcttcttcacttgctcatgatgcatcgttttgtaaatagctctgtttttcttttttaaagactaatgcatcaaaatatgaaacctttttaaattaagttaatgttcgaattgtgtttttgttttttgcagaagaacactccgtggctatcagtgccacagtttgg

SEQ ID NO: 41237 - DNA, 398 bp, Arabidopsis lyrata
  Intron number 1 from transcript 357390 (locus 357390) deri ved from phytozome v7.0 (chr-ID scaffold_8; pos 14556659 t o 14557056 reverse strand)
aggaggttacaccacttacaattccgctactgccggtaaattatttaattcttttcattttttttcattaacttcttgttagtagattggatctaacaagcttatatcattaattaaaaaattcgaatattccgtacgatttgagttttcctatcgataagattcatggtggagacgtccaagttaaatcatacattgggatcgtaatcaattatatattaccactacttaaataaaaaaagatataaaaacgtaaccgttgtttattttgtttcccgtaaaatgtgtaagcgttaccatttgaaatattatttcattttttctctcattaagaaacaattggctaaattgcatgtgatccaggtattgagggacttcacttcatagccaaaggcata

SEQ ID NO: 41238 - DNA, 453 bp, Arabidopsis lyrata
  Intron number 5 from transcript 495060 (locus 495060) deri ved from phytozome v7.0 (chr-ID scaffold_8; pos 13645949 t o 13646401)
tgtttttagtggcaggagtcctatttactgtctttgtaagtcttctccaatgcccatttgatatgtgatcacatgaatttttgtataccttttaacttatcatgggatattataggaactcttttttataaaaaaatttgaatgttgattatataaatgcatcatagtatgattcactggtaatcataacacaataagttaagaatctaaccaaaataatgaaatcactccacaagaaaatgtatcgtactatgttcattgttatgttctttcctctagcttagagataaagtttgaggtattacgttgaatgtttgtcactttttgtatggctttcggattatgtttttatgggcaggtttagtgttcttacctcatttatgctttaaaaaaaaatcatataactgctttttaataggtactgatccttctattcctcacttctgcgcggga

SEQ ID NO: 41239 - DNA, 873 bp, Arabidopsis lyrata
  Intron number 1 from transcript 891029 (locus 891029) deri ved from phytozome v7.0 (chr-ID scaffold_7; pos 15001881 t o 15002753 reverse strand)
cggaacagagataggtaccggagaggacagagttggtgtttcgaaaggaaaagatgactcaaaaaattctacatgtcgagaagcatagagacgagaagtttcttttaaaacagagataggcattttgagtaagagaatagcctaaaaagacacacaagaaggacgaccaaagttagagcgaagtgtgttccatgcttgaagagcggtgactgccgtggagacgattagttgaattggtgttgagatggatcccaacattgcagagaagatcagtttgtcttgtctaagccaagccgtatgtgctggatttggcgtggttaagtcattgacctggatcgttggatgaggaatggaggattcatctgtgatgtgtttcatcagattgtatccatccaaacacagagagacttggaggctccacgtgatatagtttgaggctgtgagtcttgtcacagtactcatgttcacggagaggattgggttctgtgaatcgtttgggttaacgatcacagcagtggagttggaaatagcagcaggggcggaagccattgatgcaaagaaagagaagaataagcaagaaaggaaggaaaaaaaaaaaaggaaaaatgttagaaaatgcgcgaactttcgaatttgggacaaataaagcatgaacttttgaaatgtcatttaaattataaagtttagtttgaattttgattaaatggttaagttttcgttgacttggccattttaggcatgtcgacatttttcccaaaaaaaaaagagaaactttttggatttagagagatcgctgctctgataccatgtgaattgtgtatattgatgattatgagagctgagaacagctcctatttatacaagcaagagttc

SEQ ID NO: 41240 - DNA, 640 bp, Arabidopsis lyrata
  Intron number 1 from transcript 482551 (locus 482551) deri ved from phytozome v7.0 (chr-ID scaffold_4; pos 16973088 t o 16973727)
aaacgaagaatcccagatttctgagtaaataattcgaaacactaataatctcttccagaaattagggttcatccgttagttgtgacttgtgagttttgttccgtgaatcttttagatttgccatctgctttcgattctaggtttcatcatatcatgaatcagtgctctgttaatcttgtttgatactggtcaatgatttctaaatcgatcattatgttaaatcacactcttggctctttttgtttataaggaaatggatttctcttgtaaaaatctttgtagagtctgagttttggcactcccttggcttttctcatcttgaagagtctttagttttgttaggataagatttaaaagtgactgcaaaatacttctttcgtgaatgcaatgttttctacgtccctttggatttcttgttttcaatgtctgttgcaaaatttagtactcttttgcaaatagttttacttattttggatcaatggatcttgaaaactgtgataagtgagcatgatttattattccctgtgaatttgagaatgatgattgtaagaagaacaaagcatatacgaatgcttaatctgtgtaatggcgttttggtacatcaggcgacaccatttatagcgggggttgcagtagctgc

SEQ ID NO: 41241 - DNA, 633 bp, Arabidopsis lyrata
  Intron number 1 from transcript 480507 (locus 480507) deri ved from phytozome v7.0 (chr-ID scaffold_3; pos 20916094 t o 20916726)
cccgaagctattgttcgcttacataaaaggctgtgaggtgttcttttttcgtcacctcaatatcctgataagcagggccgaccctgggctaaagcccgtaaaccacagttttacaatttttcttagaaataaaatttaatatctggtaatgggctaataattttttttgcttcaggcaccaaattcatttgggccggccctgctgatgagaactcgtctcctgtaattgccaattatcatacgaatttctccgttgatggttcatacgaaattgctactcctgtcaatggtttgatttgtcttagacatgagcggatcataagtcaaaaatatgatacggtgctggtgatatgtaaccctagcacgggacaatccttaccattacccaaatcgaagaatgggcgttcttggaagagtaacttttgtgggtatgatccgattgataaacaattcaaggtattggcctctacatattaaaaaaacaacagtgagttttattatgagcatcatggtttgaccttaggaactggaaacatgtcatggagaacgtatcaatgatatgcaacgatggtcttttgtattaccatgctgcggtgaacaacgattattctagcgatagtatagtttgctttg

SEQ ID NO: 41242 - DNA, 995 bp, Arabidopsis lyrata
  Intron number 1 from transcript 483119 (locus 483119) deri ved from phytozome v7.0 (chr-ID scaffold_4; pos 19825764 t o 19826758 reverse strand)
gagctttgggtcgtcgaccctaagagagctaaaaggtttcatctttaatcccaaatgtcgagaattttgtctgctttgattgaaatctagttccttgatagatcgttaacaacagttttatgcttttgtttacaattcgtgggaaaaaggcggtttctttatgacctttttgatgaatatgtaatcttttgatgttgatgtgatgccattagttaggtgtttcttttggagatctttttgtttttcttggttacgtgttatatcactttctttttgactctgatcttcgaatcttaacgataactgatttttaactgaaatttagttatagcttctactgtgctgctttttcaattttaggtctttcctactgagagagaaaccatgagggacccataaggatgctttttttttttgtctaaatcccaagttgaattctgtgggaatgtgtctctttcatgatgattttatggcccccaactaaatttttttgtactagcttatgtttgattggtcggttctagcttgttcttcaactcatgtttggttagagatcctagctaatgatgactttttgtgtggtatggcttggataagttttaattcttaacactgaaactttcaagatgatcccttcttcaaattcacttttagtagtcaactgttaggaattgaaagttatagtttcaagtgactttggtggttcaaataagtttgggaattagctttgtgtgggatttgatctttgtcaatagggttaagggcgatccaatgtaatctctgagatctgtagctgggatgaacctttgatgatagtcactcttaattgcatgaatgttcttgtgacttatagtaaaaaaaatgtctgcggcgaggaaactttctctaagctgttctaaactcttcaacattgagtggaaacattcagctgtctaatcctgtctcatgtactctgtgcaggataattgctaatcgacagtctgctgctcgttcga

SEQ ID NO: 41243 - DNA, 802 bp, Arabidopsis lyrata
  Intron number 2 from transcript 478975 (locus 478975) deri ved from phytozome v7.0 (chr-ID scaffold_3; pos 6440451 to 6441252)
aaggcatcgtccctgtcttctatcgccggtaacgtattcaatgctataagactccattgctatttaaagcatacagtttttatctttttgacaagttaaactgaaattatatattaaattatactccctccgtttcataatataagtcgttttggagaaaattttttgtttcacaatataagtcgttttcaaatttctatgcaaattatatattattttaatattttataattttttatattatgcagtcttttttatgattggttgaactttttaaaagcagatcttcttaatctgcgtgcttaaaactaaaacgacttatattatgaaacggagagagtatatgttttggagtttttctttttaaaatgtaaggtagaggacattatacaactaacaaccctatcattattttaagttattaacattattgttttgtctataatccatggtaagaggtttaaacttgatcaatttgcttggtaaaatttgggatactgcttgaatcaaaatgatcactagctagatcattaaagcaacatttgtaaggaaaatatcattgaagtttagcattgccgtttacaatacatcagcatcacattataagtaacatgtatgtataattgtatacatacgatcgcaaatagaaaaacaaaacaacaaaacaaccaatccttcaaacgaatctggaaaaaaggtttaaacacttaggttacataaaaacatagcacaaagtaatatatgcaaattatctaataattttgtaatgtaatgtttacatatatatatataatagggtggg

SEQ ID NO: 41244 - DNA, 304 bp, Arabidopsis lyrata
  Intron number 1 from transcript 479338 (locus 479338) deri ved from phytozome v7.0 (chr-ID scaffold_3; pos 7888064 to 7888367 reverse strand)
gcggtccggcgtttcgatttatcctgcccgaggtttatctcgattctttgtaatgtgttgctttgagggattttgagcttctcgagctgaaaaatctgattttttggctcggttttgtttcttaggtttgggtcttctttttgggttcatgatagggtttagatcctgaagaccaattcaatttttataattagttagtagaaactggcttgttgtttgagcaatttgctttaatctttacgcaagacttgaaggcaattcgatttatgttctgaaatcttcaattgttatgaaggtaacggag

SEQ ID NO: 41245 - DNA, 320 bp, Arabidopsis lyrata
  Intron number 1 from transcript 349284 (locus 349284) deri ved from phytozome v7.0 (chr-ID scaffold_5; pos 20729664 t o 20729983)
gctttcctcctaattctcgtcccgatccttctcaggtttcttccctttttctgattcatgtggtttgttagcttttcctggaactttccgatcactgaattcgataaattagggttgaatcgctagatcttttgatactgtgatgatctcgtgttgaatctatctgtcttttgaatttgagagctgtgtttttcgattataagacttgaattttggtgatggcaattttagttgattcgatccacaagttttgggaattacgagataacatttttgatatgaatcgatctataggttaaagctgcttaccggaagaaggt

SEQ ID NO: 41246 - DNA, 705 bp, Arabidopsis lyrata
  Intron number 2 from transcript 492561 (locus 492561) deri ved from phytozome v7.0 (chr-ID scaffold_7; pos 8327275 to 8327979)
ccgtcgccgttcgtaagcttgaggtgattcgattacacttcctggattttttcgtcttccttcttctgttgtgtttttttttgttatttttggaagtttctcgaatcgctgagtggtggttcgttggatgattgtttgatcatcgaattctttctcctctacgcttttttatatcgttgttaagctcatgttgatgcgtttaggttgcaattgaagttaatcatgttgaattttcgattatctgatttgagtttttacgagggttctgttgtttccattgctgtgtagttcttacagaattctcatgcttatcgattttggtatttgaacgagtttatacttaacgtattgtgaaattagctggggaaagttttgttcttttctttgtttggtctggatttttggtattttactgatatagatgggggatgataactactagctgaatgatgctgaggggtttaaggtagttgttgaagtcaatgaactacaaacttctcagaactcattttgtgtacaattttagtttgtgtttataactttttattgggtcttttgtccttctcatctttgaatcatcaatctattgtctcaacatcaatataacttataggtttttgttgtggctggtgtccctcgtgtttgccaaaacttacatgctttcattgttgcaggagtatcgtgggaatctcaatagagctgtga

SEQ ID NO: 41247 - DNA, 871 bp, Arabidopsis lyrata
  Intron number 1 from transcript 474279 (locus 474279) deri ved from phytozome v7.0 (chr-ID scaffold_1; pos 27228662 t o 27229532)
gaaagccccagaaacctggttagcgtctcgatccttgatctttgacctttggatctggattcttcatgttcttgtgtcctggaaattgttggattgcgtagatatctgatttcgtagatcgttttgggaaagctattgaatttaagaagaaggtgattcattttagatctacggataaaaagatttataatctccattgatttggcttaaacttacctctgcttcttgattgggatcagttcaatactatcctcataaattgttgttatgtccaagtgttggaatctctcaattagatttagcttcagagaaaacctcaaaactctagtagtttgtgtgaaacaaggacatgaagaagatggaaacattgcaatctttggatctgaattcttcatgttcttgttatgtcctggaaattgttggaatacgtacctgatatcgtagaccattttgggaaagctgttgaatttaagagcaagtaatcattttagaattgttgatataaaaaaaaaactttagaatttacgaagcttcgttgattttgcgcttgatctgtctctcttctgcttctggatttgattcacttcattcaatttggtttcctcataagatgttgttatgtccacattgttgaatttctcaaacctcaattagttagcctcgaaaaacaagtagtttgtgccaaacaagaacatgaaggagataaaatgtttggcaatagggtttacagagacaatgattccagatttagtctatccgaaaatggttcagctttctacttttcttgttgatccatttgtctaacattctcacatgttgttgtttctccttgacagttttgcggtcagacacacctgaaatttgagatcaa

SEQ ID NO: 41248 - DNA, 484 bp, Arabidopsis lyrata
  Intron number 2 from transcript 481870 (locus 481870) deri ved from phytozome v7.0 (chr-ID scaffold_4; pos 13624776 t o 13625259 reverse strand)
ttgcttccgtactctcaagcttagcactccaagttgtaagtatcacaatcttttttgattaagtttcaatattgttactgtatctgtccctgtggtttattgttttcttgtttgaatgcttagttattgattagtatggtgtgttatgctttaatttgaacatgggtctgctgatgtgaccatagtgagattagtcttctcaacgtctagatcacagttttcttcattctaatcgtaaaatgctttggttgtgctattttcttgattgttactctgtcgctgtggttgtgctttcttgattgatgcttagttattaattagtagtatgatgccaaatgcttaaatttgaacatggatttgcagatgtgataagagtgagattcttcctttatgcttttatacatactttgaaacttaactcatattctttgtttgtttactgaattgtgcagttggtgatctgaaccacttgatctctgcaacc

SEQ ID NO: 41249 - DNA, 715 bp, Arabidopsis lyrata
  Intron number 1 from transcript 482801 (locus 482801) deri ved from phytozome v7.0 (chr-ID scaffold_4; pos 18358601 t o 18359315 reverse strand)
tgtgctgagacttggttcaagatcaaaggcgacaagtaatttaactacttcttctaaattttgagctcttaaattacttctttttttctaaaaaatgttttcgttaatattcgagttatgggttaacttgatcataattgttttgttaggattcttaggagatatatatttttgtttttgttcagtaatcagtatatgttttattgacttattctttaataattaatttcgatttaaggaatttgtcaaactttttatttgtaaaattggaatatgtgaagcttacgttctctttagctatagagctaataattttcttttctagagttttctttatctatttaaaataaaaaatgattgtaggtaaaccactcaaaattcactgttataataccttcatatgtttttttttgcttctcaaagtaactatgttaatattttagaaacctttaattatttaatatttttaaaaaatgattttacataagttctacaatcaaaaagcaaaagagctatgacatcatgtggagtataactattactttaagcgcttaaataatctgctaaagaattattagccatttaatcacgtacctttctgtgagttattctatatcataagtatgcactggagagttttgtccacttttaatagaaaataacatatcttattgaaacagaatctgcgagatttgccaatcggtagcccgaaacg

SEQ ID NO: 41250 - DNA, 819 bp, Arabidopsis lyrata
  Intron number 1 from transcript 897351 (locus 897351) deri ved from phytozome v7.0 (chr-ID scaffold_5; pos 12052370 t o 12053188 reverse strand)
cgaggaacccggtggctgcggtggtggctgaagccgtagtttcgaagcggcgcacgattcatccttacgatctgtcggcgagtgataatccagggaccttgatatcgcaggttcttcttaatggggataactttgaagattgggctcgtgaactacgaacagcgttgcgtgctcgcaagaagttcgggtttgtcgatggatcaatccatagacccgctgaagatgctgcagagattgaggattggtggacaattaattcattgttagtctcttggatccggaacacaattgatccgtctctacgtcgtgacatctcacactttgaagttgctaaagacttgtgggatgatatagcggagcaatatggggtggtttctggaccaaggattcaacaattaaaacatgagttagtgacttgtaagcagaagggtttgagcatcaagtcatattatgggaaattgaaaaagctatgggaagatctttcagattatgataaggaggatcaatgtgtctgcagtacttgttcatgtgatgctaagggacgtggaaatcggaagagagagaaggataaagtgcaccaatttttaatggggcttgatgagtctacttttggggcacttaaatcaagtcttttgactcgtgatccgctgcccaccttaaaccaagcgttctcgattgttcaaagagatgagactatgaggatcgggaataaggaggtggaggtgcgacctgacgtggttggatttgctgttcagacggtttcacgtggacgtggagattacagagataaaatctgtagcttctgtggcaagaaaggac

SEQ ID NO: 41251 - DNA, 466 bp, Arabidopsis lyrata
  Intron number 1 from transcript 481796 (locus 481796) deri ved from phytozome v7.0 (chr-ID scaffold_4; pos 13068870 t o 13069335)
caagctttttagatccaccaattaattggccacaggttctttaatcttccatattacctaatcctctctttctttactctctttttgtgtgatttctacctctcttaaattctccattgattgttttgattcttatgttaataattttgattcattttttctaaaagatatattcctattctcatcttcattcatctttaagctcttcttttttcaaagttccaaaacatattcatggtatttcttgcttttataatctcacctatatatagaccatttacatactataggtttattgtaaataaaaaaacaaacaaatttaattgacaaccaaagattcattgaatttgaagtatctcgttcttctttctttgtttggtgtgattgaattcctttttgttacttgtttttattgtttgcagtctgcgaattcgaataatcatcctaatcatcctcatcatcatca

SEQ ID NO: 41252 - DNA, 430 bp, Arabidopsis lyrata
  Intron number 1 from transcript 334480 (locus 334480) deri ved from phytozome v7.0 (chr-ID scaffold_1; pos 4770843 to 4771272)
ggtaagctccttggatctgatttcgctcttcctctctctctcaggttttaccaattttgttttagtaatactgtttctagtgacataatcggagatctatagattgttttagaaacttgtgaggttgcaatctcttgaatgtttgtgatcattcttctggatctaataggttgatagttgtatttgaagttgctagtgtgatggcttagctcttgaattttcgatttatcactgcttttgcttctctgattcaacctagttcaatcaatttggctgtggaaggttccatatagtcaagggttttgttatttgaaatcggcttttcaagtttgagtttggtttcttttgttccttggaagtttctcttctgctttggtaaaccttagttgtgtgagtttttcttccaggtggatttcttttccttgggcta

SEQ ID NO: 41253 - DNA, 298 bp, Arabidopsis lyrata
  Intron number 2 from transcript 926398 (locus 926398) deri ved from phytozome v7.0 (chr-ID scaffold_2; pos 14551855 t o 14552152)
gcatcgtttatccctcagagacatttcaaggtacggtcttgaaaactcctggttcgaccaaaatgtcttaaacaatcttgtaaaatccgaaaccagatttgtattagagatcttttgtcttctcacgtaacatatttctgtgcatggttgttatggtcgtatactcgtatctgttaatattcaaaggaagatctattattttgtaacccaaaagaaaaataaattttacagttttattaattttattgatgtgacatgacaaacaaacataaacaagaacaggattcagagcaatcgg

SEQ ID NO: 41254 - DNA, 442 bp, Arabidopsis lyrata
  Intron number 1 from transcript 893654 (locus 893654) deri ved from phytozome v7.0 (chr-ID scaffold_6; pos 7204121 to 7204562 reverse strand)
agctttcaccagagacaacaatagtcactcccgaggtttttgttttaaaaatagttatttattttttgtttttgttaattttttccccttcttccaatgcatagaacaaagaccaagactcacgcacgtagccctattttgtttttgcttatttatcgatttcatctcttttgagaatttccatgagtggggtttagtgtttgttcacatctcatgaattgaaacttagtcaaatatgaaactagacatatatatattcaccattattcaaaatcataattatatatgatcacatatatgtgtatatatatttttattttgtatccttttgtccataaaatcaaaattccatttcgtatattatagatcggtgataaatcaaacccaacgttggggatctctttgcttttttgtttatagattgggacatcaatagtggtgc

SEQ ID NO: 41255 - DNA, 824 bp, Arabidopsis lyrata
  Intron number 1 from transcript 487829 (locus 487829) deri ved from phytozome v7.0 (chr-ID scaffold_6; pos 3969661 to 3970484 reverse strand)
tttttgaagcccttttgacacaaaagaccagaagaaggttcgacttcagatctctgttctttctgaatttttatcttttgggttgatcatgaatatcattatctctgcttgactcgaaaaaagttcgaaacttgtgtttctctgaaactctttgattctctgttgtttattgttaatcgatgattagggtttatcgtcgttgactgcaaattgaaagctgtaatttctttctgatggttgcttctgatagattggctatctgataatttggttctatctcttatcctctataccttcttctccgagtagacttttaatcgaatattgacttctgtacaagaatgtcatatcaaatcagtgagagagagtaatggaatttttttccttattgggaggtgtttaagatggtccaccattagtggctaaaagaagaagatacagtaggatccaataactctgacaatgacatttgaatttggtctgttttaggaaatgcaattagaggttttgagaacatatttcaatgatctttatctaattgacaacctttcaataaacactagtaagcacagggcttttctggtgtatatgagaccgatgtttcgccttatcaatggagcttatagaagtagggaaggtagtagctagggttgacgaattgggtgatggaaaatgacttaatgccacaacctttcctttttcctgtttggctgcaaatcacttacatatctctctttaacttgtgatctcgtatctttgcaattcttgattttgatgaatgaagttttgtatgtatctcttttcttgttgccagttgaagaaac

SEQ ID NO: 41256 - DNA, 519 bp, Arabidopsis lyrata
  Intron number 1 from transcript 897712 (locus 897712) deri ved from phytozome v7.0 (chr-ID scaffold_5; pos 13897021 t o 13897539 reverse strand)
tcaagaaacaactcgctcaagggtacatcatcaacttctttctttttattttcttttcaattagtccttgttagttcaaatttcacatttgattgaatttttatattatttccatagcagatattgagtaactgaaatagcaataatagttttcccaattttgagaaatttgaaaaaacaaatcccttaaattacattaataacctatgttttttttccttatataatattgtaaagcatttaatagtaactggtctattttttaaattagtagtatgggtttctcttttaattttttgctcatattaataagaattcaaacactagtgttttggtctataattaaaatattagttaatttttgcttagtcatctttacaaatttacaactacaaaataatgattatatagagtaataaaaatattaaaaagtacacgtaatttgcatagaacgaattatatatgtatcatcatttgatttcaggtatccacagaaaactatcttcgattcgctccaca

SEQ ID NO: 41257 - DNA, 571 bp, Arabidopsis lyrata
  Intron number 2 from transcript 950520 (locus 950520) deri ved from phytozome v7.0 (chr-ID scaffold_8; pos 18481427 t o 18481997)
atcccgttcgaagtgccttttctcttctcgatcaggtactagaaaatccaaattctggttaatgttccttcttgtttgaaggaaaatatattttcttttgttgacattctgtttttgacaggtattagatgcgtaccagaaggattttggtgacacatggaggtttgctgataggatgcgccatatcagttttaacatactcactctgttcgcttcctcaagcgatcttaaccctaaaccgccctcatttttgggagtacatacctcagaccatgagactttagctttcctgctattcaaagaggggcctgaccacaagaaagcggagcacatcttatctatctcttgaataaaagctttagggagcctaaatgctgcaatccaaaagtttgtgatgctaaagattactgattttagcaactgaagtcttccagcaaaggagagagttctcgctgtccatgagcttatgtttgatcttattttttccaacagaggaaggtaatccgaagatgtaaagaaaattttgcagttacgtaattgtcaagaactgacttttgttttatattacagt

SEQ ID NO: 41258 - DNA, 579 bp, Arabidopsis lyrata
  Intron number 1 from transcript 950859 (locus 950859) deri ved from phytozome v7.0 (chr-ID scaffold_8; pos 19863666 t o 19864244 reverse strand)
tgggagaagcttcagctcgccggggtcacccaaaggttcatactttcctctctcttcctgcgcctttgttgtcattttggcgataaagccctagaaaatgctgatatttagccaaattaatgattctcttagctgagaaacaggtctcgttttgtttttccttatttggcatgacattttactttctcaatctgaattgtttatttcatagattcgaaagatgctgttgaatttatcttatataggtaggcgtttcctaacttggttaactgtttcttttccactcagagacatttcttttacttgaacttcttcataaattggttaccttttggttattgacagttttgagtttgacttatttttcttatgtcttatctggagaaagtttctatatttactaatcctttctggaatcttttaaattatttttttgttcataagactaactatcaattagagtaatgtggcatcccattagatggcaaggtagaatctagtctctcgggagtgtatccatcaagaactttattggattttgctgatctgtacggacaatgttggtctttccttttgcag

SEQ ID NO: 41259 - DNA, 802 bp, Arabidopsis lyrata
  Intron number 2 from transcript 947060 (locus 947060) deri ved from phytozome v7.0 (chr-ID scaffold_7; pos 14783216 t o 14784017)
acgctccaagacttcgagttctcaagcttaagtcggtatgtagctattcagtttcattagaatttgtgtgtattttcatttaatccaatagtctcacgctaacacgtacgttgtgcatctcagatacattgtgctcattacaatgacccaatggatcgctggaaccaaccgagttctgttcctgaatgtttattaacacatcttgagattttggagtggagacagtacaaaggcacaaagccagagaaacaggtggcaaagtacatcttagcaaaagcggttcatctaaagatggcgacattctcctcaaaatctacagagaaacatcatatgttcaacaagttaaagtctgtctccatatgttcaaaggcatgtcaacgtgtgttcaactgaaattatctatgaccatgtcttcaattcacttagtttgaactctttggaaactggaacttggtattcatttactacaacgcaagaacagtttacataacacaatcctagagacaccaaaaacagtgctatcaatgctcatatttattgtcgtgatgttttctttaaatctttctatatatataatgatcatattttgtattaatatataaatctactaaacaaaattcagctatgcaatttatttttgttagatttggggttgttaggatacagtttagtataccaaccataaatgccacccttttgcttaaataatattgtttgaaaatcagcgaaaaatatacatacacaacgaagaagacattgatatttaggtcgagagtcgagactggagagttacaaccgttgc

SEQ ID NO: 41260 - DNA, 633 bp, Arabidopsis lyrata
  Intron number 3 from transcript 490550 (locus 490550) deri ved from phytozome v7.0 (chr-ID scaffold_6; pos 25008484 t o 25009116)
cctcggccaccagccaatagacgtaaacattccatcttctattctttatttcagcatctccatatatataagaaaacaaaaaccctaattcacaaaaatcttatccattcatttccctgtttcgtttcttcaacctttcatatacacaccccaaagaatctggtttgtttataatattttttttttttttctgttttggagtttctaagttttgatctcatcttttgattcctctcggaatgtgacttcttagttctctcgcatgcacttttttttctttctttttttcgacaaaggaaagtaataagtgatgtgtttatcccccggaaatctagctaaacctatagacaccaactgatatatttttggggtagatcgtaagaaagataatgatgaagtgatgatgataacgagcaaagtgagagggagagggagagagagagagcttgtttttttttttttttttcatttaattatattttggtgaatatttagattttttggggagacacaatataaatcaataatgtttttttatacaaaagggtttgatttggaattaaaattgaatatgttctgtttgtttgtggaaaagcagccccagagaagcgacaaagagtaccatctgcatac

SEQ ID NO: 41261 - DNA, 463 bp, Arabidopsis lyrata
  Intron number 3 from transcript 344493 (locus 344493) deri ved from phytozome v7.0 (chr-ID scaffold_4; pos 11470397 t o 11470859 reverse strand)
ggagattgaggttatagattcggacgtgatcggatcagcacaaaagagagagataataaaaaactgtgtacattggccaagaaaattgggactagaagactagttgatggcgaattggggtacagaagaaatgcttgaaaagtccaagaccaactctgaaaaccgcctatctaatcctgatgacaaagggataataagcattgtgccggtcccgtagcatttgccaaaatcgagtacgatatggtaaggtctcatagctttttacttactgtttgatttagtatgaaagttccatccgtttcgtgtattcataatcaaattttgttgtttggattataacgtttatgttgtttggtatccagaaattgcatgttttggtgaactgattgttttatttaatcagaatattctttgcggtaaatggttgcaatttcttgtttgtaggtggttaagtctgggaaag

SEQ ID NO: 41262 - DNA, 743 bp, Arabidopsis lyrata
  Intron number 2 from transcript 334161 (locus 334161) deri ved from phytozome v7.0 (chr-ID scaffold_1; pos 3326355 to 3327097 reverse strand)
aaatcaaatccgccaaggtttttccttctcttttgggtttgtttcttttaaagattagatagaattcatgggttattaggattgaattcgttctctatgtttaggtcgtggaatactgtgattagatctaatcccgtgaactctttctctattctattggatattttttccctcagaatttcccaatttcgttttcatcggtttgctctcagctcactgattaactcattgttgctgaaatcagcacagctacaatccaagtgttgttggtctagtgtaggatcatgattaagactctcatatctcattttacatattctttagcttgtagcaatctactgtgacacatgcttataccaccatcatcggtagtaacaaacatcaaaatcctgtgcactcttccatatcactgcttccttcactttacctccttcattgtgtgtgattaaataagccttccaggctctatcggtaatcagctattgtcaacaccaatcggcacttatcatcattgttttgaaaagaagatgtgggactttgtaataataataagtggatacttgtcttcttctttcgtttcattaggggaatcaaaatagcattctactgtgtgtttcattaagagtgttgttgtttaacacttacatctatatcacttgttgcaagataaagccctgtcctgtatgacccaaaagcttgattaaaaagagtttcgattatgcaggaaaagtgtgaaaatctag

SEQ ID NO: 41263 - DNA, 408 bp, Arabidopsis lyrata
  Intron number 1 from transcript 946272 (locus 946272) deri ved from phytozome v7.0 (chr-ID scaffold_7; pos 10433339 t o 10433746)
tattttcaccatcctcgttctaggtttgtgtttattataatcggcattatatattatagtaatcatcccaaataaattgattgtgaataacattttagttttctacaataaaaaagtttgttaattacgtgaattttgattcaaaattagatatcgagattgagattctatattatattagatatcaagattcgttgaatttaaaacatctatcatcgttcgagattatccactttcccatgtaagctctcaagatcgagtttggatggctcacgaggttatcttatttgaacaagcttagtcaaacatggtgtttttttatgtaaaaaagaagatgtatcatcaaaacagtttttttcttccattttataataagaactgagattttatgtaataggggagataggg

SEQ ID NO: 41264 - DNA, 458 bp, Arabidopsis lyrata
  Intron number 1 from transcript 327304 (locus 327304) deri ved from phytozome v7.0 (chr-ID scaffold_6; pos 21396199 t o 21396656 reverse strand)
tcgttagcgcaattggaggatagaggagagactaggtacaatatctgatttcgttttaacaattctggttcatattggattagattgatctggaattagaagaagctggagatgaaattgtgtttactgtatatagatttggaatgtggaatctaggtttttaggttaatgttagttgatgcttattgtatctgtgaatcaatgttactttttgtgtgacttttttcatattggtgaatattgatatcaagcttatgttcttgtaatgttagaagttcaagcttgatgtggaacattgttgcaattgatcttgttgcagagttagatagtttacgttattttgatccttgtttattgtgtgtctgagtttcctgtctctgaaatattcatttgcttccatatccacaatgttgatggtctcagtaatcccgcgaagcatctagaatcagccaatacga

SEQ ID NO: 41265 - DNA, 613 bp, Arabidopsis lyrata
  Intron number 3 from transcript 482768 (locus 482768) deri ved from phytozome v7.0 (chr-ID scaffold_4; pos 18231676 t o 18232288 reverse strand)
cacttccgcctagctcacttctcggcgctggccaggtaaaacgattcatgaatgaaagaaaaaatgttgttttgcgtcaatcttttgtgtaaagattagaaatttctgtacttggattcacaaattgattgaggtagttcattaatgaataatgtctgatcatagatgtcgtgggaatattttaggactagtaggaactctattcttgtattcatgcttgtgcatactcttcttataaagatgtaaagatctcgttgttcagtcacaaagcatcattcataggcactaggcaggcaccaaacatcatgggcacagaatactttcttcccattagatagatatgcgtcttatacccatgttctacttgcatacaatttctatagtactgctgatttcgttttatacgaagtagaagttggctttgtttgctttgaattgcttgatatctctaatctttttcatgttgacctgtatgcacttatatctagttgggattgtagaacatgtattggctccaatagattgtttattcgtaatgaacatagaaatgaggtctttttaattgtggcatacgcacatgtgtttatgctgcaggcattttctggtacgcaaa

SEQ ID NO: 41266 - DNA, 780 bp, Arabidopsis lyrata
  Intron number 1 from transcript 475473 (locus 475473) deri ved from phytozome v7.0 (chr-ID scaffold_2; pos 7262427 to 7263206 reverse strand)
agttcgaggaatttgaaatcaacgaaggtgaagtttttgttgttactagttgcctctttgatttttgaattgattcatcatcggttatatggttttaacgatgaagctacgaggttataaagaacaatttcattggtgattaggtcttggtataaacctctaaaattgaacctaggctacgatttctttgattttggtttctggattggttttgattctgcaccgtatcttgttccttgatcagattctgctttgctagtctgttttgagtctcaagatttaactaacacttgtattggaagaattgttaaagatatatcgggtagttctgatgcgaaaacgggtaaaatatatggataaaggagcaatttttatcaggaactgattggtgattatgtgtaggcaatgtttcatgagctaaaacctaacggtcattgtggatttggtaactatttggggcattgagtagcttggggagagttggggtcctctagagttcaatctaggctacgattattatgattttggtttacagattccttttgattctgcaccatgtcttgttccttgatcagattttttccgattttaacagattttgctttgcaagttagttgagtcttgagatttgataaagatggtctctattgtatgacttgtgtagttctgatgaggaatggatgtgtttggtgtcattttacagtttaaggaagtaaatatcaatggatcttttcatgttttgcagattggttggagaaagaagaagtcaaggaagttagc

SEQ ID NO: 41267 - DNA, 682 bp, Arabidopsis lyrata
  Intron number 2 from transcript 898471 (locus 898471) deri ved from phytozome v7.0 (chr-ID scaffold_5; pos 17446884 t o 17447565)
catcctcctaattcatcgtgtcacgttatcgcaatgtaagtttttttttttttttaacttcctactttgttacaataatatatagtcgttcatataatgggttttgctttaactcccttaatgtatttttgttgttgttaaagtattatttacaaaaaacaaaatcaattaatctattgctaaaataattgtatttttgttaggtgctttctttaattattttgttcagaaacctcgttttatggatttttaaaatcttttacagtctttctttttttttggacaaaaatcttttacagtctaactttgattctttagttttattcatgatgagtctcgctagtttagttgtccaaacgctgattatcatttactgtcttcgatttcatttccttgataatttcaaatgaatgactaaggtaattctaaaatatacttctagttctagttaaataataataaaattatgtcatttggctaacggtttaaaaaaaaaaaaaaatacgtcacaaaataatgattcataattattcaagaagaatccaaaaaattaagcaaaaggttcctgcttatatatgtagcttgtctcccaagaatactgaatgactgatacctacgagagtccatcgttttttctttgtctgcagagttttgacgtcgcagaatttgacaggcattatac

SEQ ID NO: 41268 - DNA, 537 bp, Arabidopsis lyrata
  Intron number 1 from transcript 493314 (locus 493314) deri ved from phytozome v7.0 (chr-ID scaffold_7; pos 12705470 t o 12706006)
ctgttgttgatcttgacgttgatctctcttacattgtgagtctcttgtttgtggttttttcattgtgtggtgttatgtgaagcagttgttgatctttgtgtgatgcttaatttctgattatgggttgttttggaagtgttaagatcatatgaatagtactctttgtttataaggccaagatgattaagttttgtgcatcttagtttagttggaggagatatagcttttataagagatttcaaatggtttgtatcttgcttgcttctacttagttttgagttccagatagaagaactatgcgtcttttgtagcctatgaaagctcaattgtttgaatctccatgaggattatagtatgcttttataagtgtggataatcatttcttctctgtttttgtatctttgttctttttctttgcgtggtatctaatattcggttggatattaagttttgctacttgatcttattatatatgtgctctgcatttttaaaatcaagtgttgttgctttgtgtatctaaggacaagaaggtgcaga

SEQ ID NO: 41269 - DNA, 553 bp, Arabidopsis lyrata
  Intron number 1 from transcript 944932 (locus 944932) deri ved from phytozome v7.0 (chr-ID scaffold_7; pos 4693829 to 4694381)
caagctttaatggtgagcttcaatggtagatggagaagaagaagaagaagaacgctggagctgcaacgtcggagctgctgaagaacgtcggagctgttgaagaagaagaagaagaagaagaagaagaagaagaagaagaagaaaagaaagtctcgtaggtttaatgtcgtaaaaggtgagacatttgataggtttgtttttttaatgagagaagagagaaaaagtttttgattggttgaataaaaaatgtgttggtattaaattaaatgtagaattaaagggataaggggtaaagttggtttatggaaaaattgggaaggagaaggggtagtgagaataaagaggggttttccaaaaattgattcaccccaaaggggctagagagattaaaatccaccgcttgttgattttggaaacaaacctatgattttgcatcagataggttatagcttcttcttctttttgtatttgctcaagttttggcagtttcctctcttctcattatgatgcattcgcagattgaagctctaaaagctgctggagtgtctgaagt

SEQ ID NO: 41270 - DNA, 449 bp, Arabidopsis lyrata
  Intron number 3 from transcript 944727 (locus 944727) deri ved from phytozome v7.0 (chr-ID scaffold_7; pos 3883663 to 3884111 reverse strand)
caaaagacgccgtaagttttcttctattcaatgcctttgatatatgttgttgtatgagagatttccatgttagcctattttttatttgtgttatgtttttatttttggccattctgctagattattaggataatcttacttttatgtttttggcttgtgttattcatgagttgttgtaacctactctgactagatgaaaagcttttttgcacatcaatgtgttaggttttaaattgactatcaggtgaaaagactgaatatctacaactattgtcagagttacctcatgttttggcatttttctatccatactgttcctgtttccttagtgatgagaattgtgttctgtggcttaagggaacattctcaaagatgattcaagtgttttgttctaggtggaaacagggtttgatttattagttgatatgagttttttttatttccaggga

SEQ ID NO: 41271 - DNA, 937 bp, Arabidopsis lyrata
  Intron number 3 from transcript 488326 (locus 488326) deri ved from phytozome v7.0 (chr-ID scaffold_6; pos 6015112 to 6016048)
agaggctgcgttttcgccaccgctttgattcgccggtaaatttctctagctccattttttgtatacgcatttgcaaatttgaactggtttcgataatcatttgatctctgtaatttgagaatttgtcagccggtgaaaagtatctgaatcggatttggaatcgcgaggatttgttttggtcttttggaaactaattgagatcttctgagagttcttgagtgatatcgtgttattgttaaattgcttggaaattcgagttcgaaatgtagatctatgctatgtttcgttttggctgttgaattggtccgctttgttcttattcaacactctgtgaagttgacaagtagagtttactcagattttttcacttctttattgatggcatttaactatttttcttgcttttgagattcttgtgtgtttatccctaaaattgaggaaatatttgagtgtaggaagagactgaagagctgatcttaacgcttaagtgtcttattatttgatttggtttgaaattgcattgacatgaatctacaaagcttgaatcagacttcttaatcttctgtttgctggtggagtttcttgcctgattcaagctttgtagactcgaattcatcgagatctgtgtgcaatttctaaagatctattgctatgtgatgagcttgaaacggatttgagtgtctcattttaggctttgtgtaacagtttcacgaaaattcagtatcctctgagttttaaggaagtaatttggagaatgtgttagatatgtagaattgattatgattctggtcttcgttgttttaagttttagatttcttcctgcagtttacttgaccttgcactgattaattattttatccatgcttttctctatcacgtctgtatttagttttgatggtgatctctttttcctgtttttatgcaggtaacttcacgt

SEQ ID NO: 41272 - DNA, 501 bp, Arabidopsis lyrata
  Intron number 3 from transcript 486380 (locus 486380) deri ved from phytozome v7.0 (chr-ID scaffold_5; pos 19203458 t o 19203958)
agattaatcgaaaaggcaagagcttaagtcacattctaaggtaaattcatggaactaaaaaaactactttttttgtttcaagaattctactttcggtagcattatgtgattcttctgtgtaatgtctcttgcttcaatcgtaagtgattcctttccaatagttcaagagccgggtttcctcagtttttgttttggtgacaaatgttggcaagttaatgcacgtaacttgtttgttgaaatgccgcaattaattgctgaaattgcgcgtgctcttttgaatcctgtttctctatgtgtcagcatttttggtcgaacttgtttttcaaacttctgagtcggcagctttacctaccagttttagagattcttccatttgtcccacaatccctgttttgcttttaagatttgtgaaagtcagagatgtcttaggtcttcttggggtgttaataattttacgttttcttgtttactaggtggggtttgtgaagttgtgagcaaaag

SEQ ID NO: 41273 - DNA, 495 bp, Arabidopsis lyrata
  Intron number 1 from transcript 351269 (locus 351269) deri ved from phytozome v7.0 (chr-ID scaffold_6; pos 9390032 to 9390526 reverse strand)
acagctccaaagacattgaatttcccatccctaaggtacactttcattttctacttaactctcggacatgtcacatgcccatttttaccagttttgatacttatttgcatttattttgctatatgtaatcgaggatattgtttttttttttttttgtccaaatgagaattcactgtctttaatttggttctttaaaaaaaaagcatttgttaatggtaaacgctatacgcaaataaataaaacgccgtttgagtttatgttttatgaagaactgaaaacgttttattatttgaaaatataaactttttttagttatagaaaagcatgtcatatctagacgcaaacgcaaaattgacttttgaagcaaccacaaccttaaatgcaatgaaacaattagtttcattttatcaaaataaaaacaaaaaaaagtttcgttacctgtctttttgattttttacaggatctaattgaggaacttgggatatactttttgtt

SEQ ID NO: 41274 - DNA, 868 bp, Arabidopsis lyrata
  Intron number 1 from transcript 916545 (locus 916545) deri ved from phytozome v7.0 (chr-ID scaffold_8; pos 13280198 t o 13281065 reverse strand)
tgttgagtgaaaacggatcaagaagtacagataaaataattatattataaaaaaagttagttttaaataaagtatttacatatactatacatactaaaacaattatatataaataaattttcaatctttgttttatattcttgaaaatgtatttaaaatgtatatgaaatacctaaaatatctattaattaactataagtatcgtaataaaaaggagttagatcttagataatattagtacagatatataatatatgtaattcaagtattttaaagcactactccaattattattagaataatttaagatttagttaatttgtattttagtaaaagtaaatatgcctatttcaaatattaaaaaaaaatccgatcatgattagaaatagataatttatctagtcaactttattgttcaaacatactaaataaaattcaaaccacttcaaaatttagaagaatgtaaactattatttaatattgcaatgttttcaaaattttcagatttaaaaaaaaaaaaaaacaaacaaacaaaacagaacatatcataattttcgtatttttattttaatcggaccaatagttttcttcacaaaaatatttaatgaaaaagcattatatggttttcgaggaaaaaaataataattttgaattaaaaataataatataattgtgtactacatgcagtgatgcagatcaggacggaccacttgttttcttatgcagatcttgaaccgcttatatttgcttttgaacgattcctaaaagcagtccaaggattattttcattttttaaatcatgttaaacttacactgtgtcaaaactgcttaagcggtacgtcccgctttaccgttactccgccattgg

SEQ ID NO: 41275 - DNA, 842 bp, Arabidopsis lyrata
  Intron number 1 from transcript 888473 (locus 888473) deri ved from phytozome v7.0 (chr-ID scaffold_7; pos 2148583 to 2149424 reverse strand)
cccgatcttaatcacggcgtcacaccgtcggtgtgcaattctttggagaagagagatattaagaaaatctggttttctctggtttaattgggttttgttttttaataatcggttaagtacataataaaccggcgaaacccagaaatgtggattaatagatctaaaactattaattcggagagatttagttacagaacttttgtttcggagagaaatagatatataacttttatttcagagatatatagatcggggtcatactttgggctttatctatcgtgatgcgatagttcttgtggggaaatagaccgttttggagagaaatatatacaaaacttttaaccaatcattgcattcgatgtaaaaacgttttttcggaataaattttacattttattcaaaaaaaaaaaaaaaaatttttatctccgccggtggccccgtccactctcctttcggctccgctgcatgtaagcttcattggtatttgatgatttagtgggcttgtcttcgatgttgaattggcttggttttggctagtggatttgtgaaaccttgttccggaatctttgtttcatttgacgacacatgttgttttgtgtttattccagctaatagctatgaagatgatgtgatgcctatcgcaactgggcatgggaaagattttcactagaagccgattcctgatttgtaaacgagttggttttggctggagatagtgaaatgtaacttagagagactgattgttgagttcttagtcagatgattggagattattaacatgtaggagttttgatgtatattaagtaggttttctcacagcctccttttttctcaaaagattc

SEQ ID NO: 41276 - DNA, 369 bp, Arabidopsis lyrata
  Intron number 2 from transcript 485222 (locus 485222) deri ved from phytozome v7.0 (chr-ID scaffold_5; pos 13903768 t o 13904136)
actgaacagtgagcacccatctccagcctcttcctgtaagtttccccaactactctgttttttttttgttctgcattctttaagacaaatcatagatttaggttttacgatcgatctcttctgatttcgaactcacttctaactcaagcctctgaaaaactctttgattacaagcccattttcgaaatctctctaaaactcaaacatgcaattcacttaatgatgcaaaaacccagttgaggtataaaggaatcaaatttagtttataaaagtaatggatttgtgttgcattgttgaaattcaaaagaaagatcagagttttgataaagaattttcacttttgattgtaccttataagcaaggaacaag

SEQ ID NO: 41277 - DNA, 452 bp, Arabidopsis lyrata
  Intron number 2 from transcript 482141 (locus 482141) deri ved from phytozome v7.0 (chr-ID scaffold_4; pos 15168368 t o 15168819)
ccgacatcaaacgccttgccgagttttacaaagaggttacgatacctaatcgacgtattcaatttcttacacttttcttttttatctctcttctcggattcatcaaattctctgttcttggtttctgaattgttaccaattcgacaaaaacgaaacctttgatttaagtctttgtaaagattatatacccatccatctggaatagaatctagggtttgcaaattggcttttgatttagagatttgtgttgcttttgtggatgtgtctcgtttctaatttccacatttggaagagaaaaagaattaatatttatatcgtagtcttaatcattttgatcaaattaatgttatcttcatcgtcatcttctttattttatatttccttccttttgttctgaaaccaatggcttattttcaggtgtttgggttcgaggagatcgaaagtcctgattt

SEQ ID NO: 41278 - DNA, 343 bp, Arabidopsis lyrata
  Intron number 1 from transcript 488118 (locus 488118) deri ved from phytozome v7.0 (chr-ID scaffold_6; pos 5220698 to 5221040 reverse strand)
gattaccgaccttctgatagtagtggtgagtcttatgttctttcaatgttatccagtctagccgtttctttactaacatgctgttagtttttgttattaatctctctctttctcctatccacaattatatgtgctttttgatgtaaatgtgttcaatgctttttcagttagaagcattcctcctcaaagtttattgtatttgagttttcttctcttcttcatttttgtttactgactcttttttcgtgtagcttcgaactgatttactatgttttgattgtattaatgtatttgtttctgtctgttttgtgatatgttgttttctgcgggaactcaggtacag

SEQ ID NO: 41279 - DNA, 711 bp, Arabidopsis lyrata
  Intron number 1 from transcript 478900 (locus 478900) deri ved from phytozome v7.0 (chr-ID scaffold_3; pos 6204514 to 6205224)
gcagcctctgtcctgcaaattagcaaggtatcatccattatttataatttcattttttatcttttcaatatttttttcgtgtctaggactctagatattgagaaccaagttatcgttatagatataaatttcttattcttacttttgattctaggtttttttcttaatctattcgtcggtttttatttgttgaaatatgacattacattagcgttatagccataggaccacattttgttgatttaaagataaaacacaataataattcaacaatgtgaagaaattttgatttggctcatatagatacttttaaagaaattagaaaatgtttaaaaatatttgtttttatacctttttaaaaaaataaagcacttttgagtgagcaaccaatgagaaaagagaatgctatttatatagttgtttgccataattgaatggtgtttggaatctccaaaactgcacgagatgaaaacgaactcttttgtcacaatatatgccaagtggtggatccgacgtgagttacacgcgccgcaagtgagattagtacagccaccaaactcttcctcataagaagacataaattcccccacacttgtggggacactaactcaaagctctttgacggttttgtcctgccgtttcttcagttaatttcaattcatgccaccgacataaaacgcagccgtttttatattgtttgtgttaggttca

SEQ ID NO: 41280 - DNA, 683 bp, Arabidopsis lyrata
  Intron number 3 from transcript 496280 (locus 496280) deri ved from phytozome v7.0 (chr-ID scaffold_8; pos 19934604 t o 19935286 reverse strand)
ttctgcttttttctctcaagtcagattttcatatcatctcttcgagaaacatagattattaatattttgcttcatgatggaaaccgatttaaagaattaagaattagaaataattacccggtggactttgatgtcttctgagacgatttcaactccagaccaaggctattcttaccagttggcatccatcccgttgtcttgcgcgaagtaaaaattaatgattataaatcacccaaaaagtcaactaatgctcttgcctctctgacaccacaccactaatctaatcaaattaagtatcggctaattgttgaattacgtacaccaaaaatattagaatttctatattgcaaattcacgaaagtatcaaatgacatataataacaaaacatatgatatggttaacttttcaactcaaaatttgaaataattttctaagatatatattttagaaattaaacctctaaagaatttttcttaaacaataattaagttctggtttctgtttctgtctgtaatcatcatctgcttgttcagataagcaggtttgagttcttcttttcctcttctgtatttttctgaattatattttccatcttcttgatattttactggaatcttgatccctctaaaagttcacttttcttttatttttctttcttacagatcaaccaatcaaaaccaaa

SEQ ID NO: 41281 - DNA, 932 bp, Arabidopsis lyrata
  Intron number 3 from transcript 938368 (locus 938368) deri ved from phytozome v7.0 (chr-ID scaffold_5; pos 17039379 t o 17040310 reverse strand)
cttctaatattcagattaaaaagcctctttgcctggtatgtctttcaaagaatatatgtctcgtgtaattgcttgatatttctggaagaatcgtttttaactttctctagaaatggcaatgtaaattggtctactttcacatgtttctttagtcttcccaaaaaaatttagacttcagaaatcgcaaaaagtgaaacataatttattggacttaatctaaaccatttataccaacatctgtgtagtaaatttatggtaacatatctattctcatgagaggatggtaacatatggtaacatatctattctcattgaagagatccaaagagatcaatgccacattttaggtaccaaaataaaaatgatagacatcttaagcttgcacacaattacttccaatgtcacaactggaaactaagcacgagctgtttgtgacatgggcgttttaacgaatgttaaagaactagaacttgatgactaaaattctttgactgtggtgagaactcaaaaaagaattcagttcgacttcaaagtcttatatgcacttgccacctgcctctcagtaatggtcctcttctcatactgggcaacacatggaaagatggtaagctgtaatgaaagctattgaatagagattggtgtaggaataaggatgaaaagatggagttgcagaaatatgaatgatagtgatctaatcatgaatatatcgatggacaccctagaatacctcagtgtggattaggggttggcttatcagtgtccttagtttcggttaagtggaagactctatgccttgaggtttaaaggagttcctaatcttattatctcataaatgggtggtattatgttgatacataagtcccaatgttcaatagtagtttcagttttatattatctttgctttgttcaggtcggtgggggagagattcctg

SEQ ID NO: 41282 - DNA, 790 bp, Arabidopsis lyrata
  Intron number 1 from transcript 476577 (locus 476577) deri ved from phytozome v7.0 (chr-ID scaffold_2; pos 16278769 t o 16279558)
tctcggcgagtggggttcactgcctaagaaagccggtacaaatctatacttacaccattctacatacaatgtgtacggtctatactatgtttgtatctctttggaagctaggggctttgaagaagccaagctaggatctttagattccattttctgtcggaccatagattttgttttctggtctgttttatttatttgggtggttttaattttctagatttatgcacaatagtatatttttccgatttttttaaaaatcaatatacgtttgttagctttaaaaaaaaaaatcgattttgggagtaaataactaagggatctatcattggtaaaagatagctcttacgagctttttgttgataaatctgtgtatgcattattacaatattcttcttttttttgagctcatgcattacaaagttagatgagatttatcgtctattatattcataagcatgcagaatatcttctatcagattctaactatatgatgatattatatctaaatgcaatctatgaaactcatgaacgccaagtgtttccctggttcctatttcttttgattattatatatttatatagtattatcttattaagtgtataaagctctagaaaataaattatgatccttttttacccattttcagaaagtttatttcattgtgtgtttctccttttctatttgatggaaaaagaaaatttcaatctttttttgtaacttctctgtttgccaccatgataaaaaaaaaaaaaaactttttctctatatgcaaaaattaggtctgcaaag

SEQ ID NO: 41283 - DNA, 610 bp, Arabidopsis lyrata
  Intron number 3 from transcript 481556 (locus 481556) deri ved from phytozome v7.0 (chr-ID scaffold_4; pos 10296181 t o 10296790 reverse strand)
tgttcttgagctctactgtctccaatcagcttcaagtaagtttcatatcaatcttgcattgtatctttgttctttagataaaaaaggagcaaactttattggttgttatgaggtttttgttatgattaagctgattcacaaagggtttattggccatggagaacttatgttgtttatatactcttcaagtcttcatttagaactgatctgtattctaggctggtgtatgctttgaacttttattgccactgaaagactaaatatgagcaattagagttcagatattttcgatctcgtagagttgtagtagtgtatcaatctcgcgctatcttttttcttaaatgaaaattttgatttaattgttgtgacgtttggagttatgatttgattaacaaagactgagcacggccattaatgtgaatttcttcattgatcatttttgaattgtgtattctttgaactgtgttgtttatgtgctcttgaaatcttcataaataacttacctcattagtatttatctttttaagctatatggttcttatgtaacacgatgtctaaaaatgtttgtgggacagctgattttgatttaacagggcagctcgtttggcct

SEQ ID NO: 41284 - DNA, 392 bp, Arabidopsis lyrata
  Intron number 1 from transcript 935405 (locus 935405) deri ved from phytozome v7.0 (chr-ID scaffold_4; pos 21767111 t o 21767502 reverse strand)
gacaggttagtgtagttctttctttctttcatgattgaaagttttgttttttgctttcattatacaaatgttgaagaatatagccaaattctttagagatcaagtggaagattctaatgttcctcatgtctttaggagattgtgaatcattttttggtgtttgatttggtaaagagttagaatttgttggaaattttgatgttagggagcttatttcactactttcatttgggaaagcgaagtacacattgtgaaattactgtcgtcaaacctctgtaaatctctgtacatcaagtcaaaccttatcctaaatagattactgagaaaacgtcttatggtggtagttatcgtgttatctcgctgtgttgcagatacaacaagtcatcagtcga

SEQ ID NO: 41285 - DNA, 287 bp, Arabidopsis lyrata
  Intron number 1 from transcript 904586 (locus 904586) deri ved from phytozome v7.0 (chr-ID scaffold_3; pos 6906409 to 6906695 reverse strand)
ttacgcttacatcaactttgattcacctttcagcggtaaacaaagacttcgacttttttcgtttcttcgttctaaaatctccgatttttatttcattgtttagggtttttgatttcgcactctttcatgttcttgtttacatataaaccctagaaatttcctttcttgaattcgtttccatgttcagaagattaatcgagttagttcttgcgattttgattaatcgcttctgagaaatcgtttctttaatgtttcttattgttgttttttctctggattagcatcga

SEQ ID NO: 41286 - DNA, 526 bp, Arabidopsis lyrata
  Intron number 2 from transcript 471937 (locus 471937) deri ved from phytozome v7.0 (chr-ID scaffold_1; pos 7253820 to 7254345)
ttcttcagaaattcaagctctacgctactccctcggtaacaaaatctcctcctctttctctttaactttgtccgattattgatctgtgattatgtgaatcttattcttcttatttgtctctttttaattaatgtttatttgcatcaatgtgaatctttttttccggcaactgatttaccggtaattgcgttgatactgtttacggtttatggattttgattttgtttgacattcttgcttaataattccggttttggattcgagttctctaagatagtttggtttattattcgatgagcctgtttgcttggcggtttcatatggttgtagtgtaagccatgaatgagagagcctttagcttgacataatgtagagtctttggttctaagttttctatagtttagcctgattcttcatgaattctagtggaaatttttgatttttctcatgtgaaagcactacattttgactttgaagttgttgaatgaattggttgttgtgcagaatttttatttgattggaagag

SEQ ID NO: 41287 - DNA, 743 bp, Arabidopsis lyrata
  Intron number 1 from transcript 928723 (locus 928723) deri ved from phytozome v7.0 (chr-ID scaffold_3; pos 4123494 to 4124236)
agcttattaggtcagtttttttttttgtcgataccttatattaggtaataatataatttcttactatttgttctcgtttttattatgtcttaatattaaatgtgttagactatttttttagactggctagtaaaacaaagtttagaatcttgaattgatagtagtagtactcataaagtttcagataggttacgaataacaacatttttctcaagaattattgtaaattgaaattaaatgcgttgaaaatttaaactagttaagaaattttagatctataaagttattaatagaaaaaggaagattttgatcaaaaaaaaagaaaaaggaagattttgattcgggtatgaaaatggtgagacaagttgaaagtttgttcttggtgctctctttttcgcctaaaaatttcctaatttttggcaactattttttttttttttgacttcacagtttggtactaattttaatacttcggtgaatagcttttttttgccagcactgattagctgaataagttggtgtttggtaataataattaggtgaaattaagttacacataacagtcgtggacgctaaaatacttgcttcatacaccaaactttaatttattcataattttatagtagtataagataagatgaaaatccggtcattatcaacaattaatacttgtcaatgacgaaattatacaattaatgactcgagcaggttcttgaacgccggaatatttggcactggcgccg

SEQ ID NO: 41288 - DNA, 411 bp, Arabidopsis lyrata
  Intron number 1 from transcript 935582 (locus 935582) deri ved from phytozome v7.0 (chr-ID scaffold_4; pos 22416123 t o 22416533)
gaagcctgttcacaaggttctcggtggtggaaagcgtaagggttttatcttaatttaatctctcttttctttgtttttatgtcttttgtgtgatgcttgatctgcaatgttagggtgtagttactcgtataagatcgattggtgatgatatgatgcaaacatgtttacataatttgtcatacctgcattttcttgtgaatcgatcctttccagtccataagaagacttgaactttagggataatgtatttggaattgacttggttgattagataatagacatttatgtttctcttatgttactgtttgctacacctttttgatatgaatgcaataaattggctttattggtttatctatctcatgtcattggccttatttctcttttctcaatgactttttgcagctgctg

SEQ ID NO: 41289 - DNA, 751 bp, Arabidopsis lyrata
  Intron number 1 from transcript 907879 (locus 907879) deri ved from phytozome v7.0 (chr-ID scaffold_2; pos 8791989 to 8792739)
cggagaaaaagaggcatttacttattacagaggtgtgatttgattatcatttttttttttctcgtcgatttggattggaatagaaagaaaaacgagtattgaaaaaaaatctacgcttttgaaggtgaagtttataatataaaaaaacaatcccttctgtcatgtatccacgattaatgcagccttagatgcttcaattgtgaattatagtattgagcaaaaggtttttacctatggttcccgtattacagatcaatcctactacactaatacaatatacgaataggaggcataggggaagaagcactacgccgagaaatcaacaacacaaaaactttcttaaaaatgattccctttctttcttcttcttcgttgggattgggactaattaacatggttggaacaataaacatccatctcgttcgtactttggatacccgtataaccattgaagactgttgaagtgactaattcctggaaatttaggggcgttgagaacaaagaaatttttagagtttccttttttatttttatctagcatgaacccacttggtagtaagaaaagagcttttgcaagaaggttggctagggatttcttgtaaaaacattagccccgcttagttcataatgacatcacatttttacatatattattttcattatgcacctaaaggaggagccgtatgagatgaaaatctcacatacggttctgaaacggagaattcgttaaagcgaatgacgaccgtaacgg

SEQ ID NO: 41290 - DNA, 857 bp, Arabidopsis lyrata
  Intron number 2 from transcript 907494 (locus 907494) deri ved from phytozome v7.0 (chr-ID scaffold_2; pos 3614433 to 3615289)
aggtaaaagttgtcctcctttcttagttactcagataaacgaaaaatcaaatttgctacttatgctaacttaattactaaaattgtgtctttttaaaacaaatttagtagaataacacttttattagtacgatatgtttcgacttccaagggtttgttttgggtttgaattcctcctagtcaaaaaagagaaatcaaactctccacaattggtttgtgtttgatcctagtattcattcaccactatgttttcggctaatagtttcacttttattcctctctgttgcattttactttgctgcaagtattggatttggtaaggatcctttttgttcaaaatatagtaccaatctctttctctgcttttacgggaaaaacggtctatttccccatgagaactatgacatcataacatatagagctcaatctatgaccacgatccagatatccccgaaaaaatatttctcaatctatatctcctcgaatcaatatttttcatctatttctccataaatctgatttaatcggtttacaaactaaaccggatagaaaaccactctaacccaacatgactgatttgaaaaacccaattgaccaaaaatttgatccattctaaaacctgttgaacgagaaattgatgtctgcaacatccgtaccatcaatggcaaaatttctcacaaaaacaaaactttactctcctccatcttgggtttcccatcttattatgaatcattcccacacgtacattcatttcagtttttctatgtttcaattcttcatttctttcagtgatcatcacctttctctttttcttcttctacatcttcagcttcctactccgatacatcggtcttccta

SEQ ID NO: 41291 - DNA, 651 bp, Arabidopsis lyrata
  Intron number 1 from transcript 942730 (locus 942730) deri ved from phytozome v7.0 (chr-ID scaffold_6; pos 19425827 t o 19426477 reverse strand)
cttcatatcttgcgacatccctcgccgagtacaatgtaagtgataatgcgatgtgaaactcggaaacgataacccacaaagtcagttttcaatttttgtccttgtttgttaacagattgtgccggaacttgaattatggaggtttaacttttaccttgagaacacattttcgcaagtatcattataatggttaaagatgttaaaggaatatcctttatccaagctgatcgatgtgagctatttcttttacgttttgtgagattttcaaatcaaaagtctaggtttagatgcttactaatgaacagtttccactatctcatattccttaagctgtctacgaaacatcgaccgagtggatcaagcaacttccatttgatcactggcagtttgtaacgtgggttcttgaacgtattctctctgattgggcagtacaaaaaggagatacacaagtctattcttcaaaatctcaagtaacgtttggaaaacgcattgattttcgcatatgcattgtgtttgtctaactccattgtgttttacagttagcgacagttgttgaattagtgatgatattgcgtagtaagcctgatgctttgactactattttgccgatgctgagtggagacctaggtatcaaggccaagacaagcttcc

SEQ ID NO: 41292 - DNA, 430 bp, Arabidopsis lyrata
  Intron number 3 from transcript 488052 (locus 488052) deri ved from phytozome v7.0 (chr-ID scaffold_6; pos 4909751 to 4910180 reverse strand)
cagaagaagaagttttctttggattttcactactggtaagctcggtttctccctcttttgattgtaatttttaattaggtttcttgtttttttcttctggagaagttccgattactttatttgtaaagtttggatctttcttacagatttagtaggattagagaatggtatctgttaaactcttcctgtgtaaaatctatttgctttgttacaaatctatgcttaaggaatctagggtttagattccactttgtttactttaataaactaaagtttcttaaaccctttttgtctgatgaatcagaatcttattgctttatctcagtcaagctaaaaagattggtactttatcatccccactgtgttcttaatcttgtttttgtggaatttttcagagccattgttgtgaaattggacgctagtagcattg

SEQ ID NO: 41293 - DNA, 742 bp, Arabidopsis lyrata
  Intron number 2 from transcript 924738 (locus 924738) deri ved from phytozome v7.0 (chr-ID scaffold_2; pos 1619730 to 1620471 reverse strand)
aggtattttcaaaatatatgacacctttgtattaactttttctttttactacaaattgactttattatttacagctacaatctttcaatatattaacctaacgtacggaccaagtctcaatttttctagaaaacaaaacgatgatacaacacgtaactttactcgctttgttttttgtcaacacgcaaaatctttattttagacttttaagttaataaagtatataaaaatatatttaaaagttgggatacgtgttgagagaagaaaccaatacatatatgaaaataaaaatgaaagaggagttattgatggtgacgaaattcttgttagttgttacgtacgctttctagtttatgttctttttactttattcgattctaaatgccttttcagtgaataaatccatttgattgtggaccgcagataatcgccgaatttgttttaaatgatttaatatatgtcggtatagtcagatcttctggagagttgtagcatccacgaacaaagaatataatcgcagattcgcaaaacacattttattaaataataattaataatcacatatagtactctttaaaatgtataaaagtcacttttggtttcacccatgtgggatggattaaatgaaatagattgatttgctttgatacatctttaactgtaataaaataaaccaaacgttgactaaatcatacataaatttgcaggtagtggtggtgatcgggaattttgcgagtggagc

SEQ ID NO: 41294 - DNA, 669 bp, Arabidopsis lyrata
  Intron number 1 from transcript 894647 (locus 894647) deri ved from phytozome v7.0 (chr-ID scaffold_6; pos 12579465 t o 12580133 reverse strand)
aacgaacgcgagaggcaggaatcttaacagatctcgtcagcggcggcgtagtcggcggcaatctaggtgatgggagctagggttttttatttaggttaaattgtcattaaaggtaaaatgatcagtttcagaaaagctattagggaggggttatttttgaaaaaggtcatgagaaaaggagcatttttgtgagtctcccttatttttttttgtgagacaaaaaaggtttatttaccacatgtttattttaaaaattttaaatgtacaaaaacaaattatgatataaatcagcctggagatgtgcctttagtcaagtggttaagtccatttgacttcgccttacccaccggagttcgactccagtaagtcgcgttactccgcgtagtagggattggttatggatcgggccttgtcgatccaaagatgtcaaaaaaaaatataaatcagccttttttaaaataataaaaaaatcttttgtggcccactaaaactcaggcctggctgtgactagtatatggtttctaatgagtttttgtataatgtgtgtgtttagttttgccgttgttgattatgtttctgtggagaagactaatccattctcatatttggcatcttatatattttttttctgcaggagctgcgttgagacaaaagagcatagaaaacaaa

SEQ ID NO: 41295 - DNA, 355 bp, Arabidopsis lyrata
  Intron number 2 from transcript 487830 (locus 487830) deri ved from phytozome v7.0 (chr-ID scaffold_6; pos 3976269 to 3976623)
ctcttaccgataccctgaggttccgttttcagatttgatgattccactgttttaacttatcaaatgccgctatttgtgtcgtttgtatatgtttgtttgtgctttctctgtcaatgggagatttgatggtagtaaactaagaattgttaaaatggtttgatctcagtttaaggtgtgatcaaacttgagtattatttctgatgactaaaatctgatgttgggttaggtctatggttcttgatgttcatgagaagagtagttgttcaaattctccagtacggaatggtattggtttttcaattgcttattatgatttctgcaaaacacaggttggagcttcggccctttgggattg

SEQ ID NO: 41296 - DNA, 190 bp, Arabidopsis lyrata
  Intron number 2 from transcript 493590 (locus 493590) deri ved from phytozome v7.0 (chr-ID scaffold_7; pos 18077477 t o 18077666)
cttctcactccgtctccacttcccgttcttctgaggtttctcttctaattactttgctctcgtctaatatcttattcctcaaatgtgtgtatacatatacaattcattgtcaatttggagcatgtagagggagaattaatgtaatgtgtttttgtttttcgtttgagattatagattaggtgttcgatag

SEQ ID NO: 41297 - DNA, 443 bp, Arabidopsis lyrata
  Intron number 2 from transcript 945637 (locus 945637) deri ved from phytozome v7.0 (chr-ID scaffold_7; pos 7499723 to 7500165 reverse strand)
ctatcttggtggtagcaattcttttcactatttatgtaagtcttctccgataccccatctgacagtcctatatatctcattcttgtaaatatttgatttctgattttatgtttgcttgcttgcctaatcgggttatcaacaacatttgtcagttgttatgtggtggttaaatggtatcatgttaatgaagcatcaaagtttgatcactgggatggaccctgattggtttaaattattttaactgaaaaatgacttgactactccgcgatcatgtagcataagatgttccttgtttgtttcttacccgtcttagaagcttaaaccctgtcttcctgttctgccccctgttatttggcatttaggcgttgttattttggcttttctgaatcacgaagtttgctttgataggtattgatcctcctcttcttcacatctgcacgaga

SEQ ID NO: 41298 - DNA, 609 bp, Arabidopsis lyrata
  Intron number 1 from transcript 481178 (locus 481178) deri ved from phytozome v7.0 (chr-ID scaffold_4; pos 1572442 to 1573050 reverse strand)
ggggtatataatcttcttcctttgtcttttggattcttctctaatttaaacctaattacgtcgatttctagatgtctgcctttggaattagattagtttgggattggttgttgtggaatcaatgtggaatgtagatttagggtttcgtttcatattcttgattgatataatctcataaataatgcagtattgatactcttttttacatagtctattgggaaatgcagaattggtatctgtttttttttttttttgtatataatctcttgaaaattgctggtctatgtgaactagattgttgactttgtatggtgttgttactattcagaaggatctgtgtttatcttgagtttgtatggtgtggttactattcggtatatcagtgtttgaggtagcgagaatcggattcttgttaggtagtctcgtaatgaattcagaatagtattgttttgtatatagttatgaaaaatgctggtttatgttacctagacagttgaatttcttccattttttggggaaatatgattttgagtcttgagtttgtatgatgttgttactgtatggtatattagtgtttgaggtagctccattgatgccgcagtgtacagg

SEQ ID NO: 41299 - DNA, 745 bp, Arabidopsis lyrata
  Intron number 1 from transcript 320665 (locus 320665) deri ved from phytozome v7.0 (chr-ID scaffold_4; pos 13031321 t o 13032065 reverse strand)
tactcgtcccacttcctcgcttggctacttgtgaggtaccatctctctcactctctagataaacataaaatatcccaacttgttttatttacttatatatatatgtacacatgtaactttacgtacttatagtagtagaagtatggtctttattgttccaaacactaacttatgtgtttctatttgcatgtgaaaacaaaagtagctatatttatctttttcacgatttagaaaaatgttacataattttagagggttatttccataaaagaggagttattagtttggttaaaatttaaaagatttttgggacctatacgtgttcgaattagatttgatgaacaaacgaagcagggcaacgagaaaattagtagatgatataatagaatgttaatacagtcacaaaacatgttgacgtgggtattaaagtgtgttgctaactttattccgtaccgcattattacatataaaatccttcttatgtcagcaaccaccgctgaattttttgttgtcttaattcttcccaatattgcgaacaagctgtgtcgcatcacagacaaatatgattccctttttgattaattaatataatccctaagattatatacttcttctagtatagtaataaatcaacctattagcaatggcatgggattctctgataatattaagaaaaataaaatagaaaacttataatttattttaaatatataggtgaaacaaagctgcaaagagcttggtcaaa

SEQ ID NO: 41300 - DNA, 888 bp, Arabidopsis lyrata
  Intron number 1 from transcript 331646 (locus 331646) deri ved from phytozome v7.0 (chr-ID scaffold_8; pos 15327858 t o 15328745 reverse strand)
cgtgatactctctccgcttttcgtcttcttcccgagtaagtactaaattcatctcaattgcgagtatttagggttcttttgaggctctagtttagggtttttctgtgttgagattttgttcatctgttgtagctgaattcttagggttgatagaatcgaaaaatatcaataaagttgggaactttcagccaaccatgaagcagaggattgatctttgaatggctttacttgtgccaatcaaattagcttgagtctttgtatttgcatatacaatttgcaaacaaattagaaattgtagaatgttgtgatttttttttttgaataacacaaacatttctagtgttttacaactttgctttgtgctgaatatcagcagataattcaatgttatggttcctgtatctgttgattaaaagtcccgaatatcgaaccaaaggtgggaaattttcttagattatcgccaaccatgaagcagaggattaagtctagtttggggttggttcttcgaatggctttatttcatgccaatagattatgggattcactgattctctgtgtttgcatttctcatttgcaaaaaataattgtaagaaaagctaaaatgttctgtttcaatgttaatataagaacaagattttagtaatgtgaacgtaatggcaagttttttcttggattggaacaatcgaatttgagcccttagtgtgacaataaggctactcaagagaacatcattcctatagtacacaaatctcttagattcttgatatgtttttgcaattgcaaatctatgtttcttcttctaagtctattaagactaatactactaaccgtttctgtatttttttatatttagcatcaatacatcagctgctgtttcagccgctaacc

SEQ ID NO: 41301 - DNA, 168 bp, Arabidopsis lyrata
  Intron number 2 from transcript 943541 (locus 943541) deri ved from phytozome v7.0 (chr-ID scaffold_6; pos 23996945 t o 23997112 reverse strand)
ggaaaattcaaggagaaagagttaggtctattaaagtaagggagtttcttctatacatgatgttctttattaattatactaatttctgaaaaatgtgaaatcattgattggttttgattattcttctgggaatgtaggagaaatttgaggctaatagaaagaaagtgg

SEQ ID NO: 41302 - DNA, 773 bp, Arabidopsis lyrata
  Intron number 2 from transcript 914157 (locus 914157) deri ved from phytozome v7.0 (chr-ID scaffold_1; pos 26354460 t o 26355232 reverse strand)
tgtctgttaaaacagtcgtggatttggtgaagcaattaaactcaaggtttgacaccattgatacaagcatcaaagaagtgtcttcaaatatggagaaggtgattggagatagagtagaagcgaggatggatgaaaagtttgaatatacggagaaggagttgaaacagatgaaagagcgtctgaatgcaattgagcagggggtagggaaatctggtgaaaacgctgaggaaaactcagccttcaaacaaacagaacctcccgaaaagccgacgcaagtcgaccttttgctgaatcaaaaagaaaaagcaacaccaaaaggtccagcgaaacctccacaaaaccagtctgttactagtcctctggtaagctaacagtgccagacatatgtataaatacattgcggctgagttattattatcttaataaccttgtagctgagttttcattatcttgatcacataatggctgagttatcattatattaatcaccttaaggctgagttatcattatattacggctgattatcattatcttaatcacattatggctgagttattattatattaatcacctaacggcggagttatctttatcttatggctgagttatcggtatgtttatgcaggcgaaggatactgtcgatgttgagaaggacattggtattgctggtgtcagtaagaatctggaaaaggaatttgataatgtcattgatggaaaatctgctattgatttcatagatacgttacctaataatattaggaaattacgctcc

SEQ ID NO: 41303 - DNA, 215 bp, Arabidopsis lyrata
  Intron number 1 from transcript 929163 (locus 929163) deri ved from phytozome v7.0 (chr-ID scaffold_3; pos 5744227 to 5744441 reverse strand)
agactttgaggattcttcctgttgctcacaataaggtatttcttctgttacctcgtttcgattttggtggtttgaattagtgggaatgttttgaatagagaagaaatgatttttgagagtttgagtttggtttgtgttatataagaatgtagatttgaaggtttgggtttttacttgcagataatcagattggagcctaaagttaaagctcaaga

SEQ ID NO: 41304 - DNA, 330 bp, Arabidopsis lyrata
  Intron number 1 from transcript 489520 (locus 489520) deri ved from phytozome v7.0 (chr-ID scaffold_6; pos 12340467 t o 12340796 reverse strand)
gttaaagttgagatctttgtaaccgataggtaaaattgggttcatgttttgatcccaagttcaagtttttttcctatgctttacattatttgaggttgtcttgtcttcacagctctgttctgtattatcctgtggtggcctcttctgaatatgaattaaaattgaactgtcttaatctccatttagttcaattattgaggtttatggaaatttttggtccggtttgttttggttatctgctgttctagagtcaagattctattttgctgcatcttgctagttacattccaggaaagtgattcagtgattgttatctgtagatgaattaaa

SEQ ID NO: 41305 - DNA, 250 bp, Arabidopsis lyrata
  Intron number 4 from transcript 948113 (locus 948113) deri ved from phytozome v7.0 (chr-ID scaffold_7; pos 24647869 t o 24648118 reverse strand)
atccttgtgattgtcctaggatcaggatcaggtaatgatgcttttgttttttttttccaagtatcttcttgattttgatctaaactttgtctatctcaattgcaggcgacttagataaaattcagtcttcggtgactgaattttttagggatattcctaaaggaatatctccgtatacaccagaaatcagccgacaatgggactcgggtaaacttatttccttcaatctgttgagaataatcagagagtg

SEQ ID NO: 41306 - DNA, 838 bp, Arabidopsis lyrata
  Intron number 1 from transcript 930808 (locus 930808) deri ved from phytozome v7.0 (chr-ID scaffold_3; pos 13582997 t o 13583834 reverse strand)
atcggatccttatcttcaattatctctttttcaaggtatgcatgtctatctcattgtgtgaatcgatgtatttaactaatttcaaattagggtttcttcgtttttgagaaattagggtttcatgatttggggacaagggatttttcgttgttaagtgtttaatttggcaaattagaagcatgattgagtgtgtgtctgtattgcttaagtaatttctgattagggttctttggatttctaaaattagggtttctggatttggggaaaaggggttattcgtttttaagtatttgatttgggtaattagaagcatgattgagtgggtctgtattgttaaagtaatttctaattagggttcttcggatttgttaaattaggatttctggatctggggaaaaagtgttattcgttgttaagcatgattgtaaacatgattgtaaacatgattgtaaacaaactaggcttggttaatactttgttgaatcgtaatactctgtttttgtaaacatgattgtaaataagcatgattgtaatactctgttaagcatggttgtaaacatgattgtaaataagcatgattgtaaacaaactaggcttggttaacactatgttgaatcgtaatactctgtttttgatcagtgtggatgattctttggattacgaatatgttggattttaattttattaatgatgttgattagttttattgcaattcgcatgattgttaggattatttgagatttttattttaaaatgttaatctgttttgtttcttaatcttgaatttgatttattgttttctgtttattgtgagatatggtgttaattggacataaag

SEQ ID NO: 41307 - DNA, 836 bp, Arabidopsis lyrata
  Intron number 1 from transcript 926901 (locus 926901) deri ved from phytozome v7.0 (chr-ID scaffold_2; pos 16591946 t o 16592781)
tccagctcctcgtagagagtttctccacaccactggttcgtcttcctcttcctcttccttctactacatcgttttgcttgtttcaatctagttttcttcttcatcgtgcttgatttcttgttgtagaccgtttcgtgttcgttgtgcttttttttgttttcgtagtagactgttaatcgcatgttcagtgacgtccctatgactgatttttcgacttcgttgattaactttgtttggctccgtatagctgattttggtagtagcttagttttcggggaatcagagtttgttcttagtgaagaatcgtagatcgggaaggaagatgtgctaattagtagaagttgcaatttctaggtcttgcctggagcataccttggaagaaactttaggatcaggagttagcgtggtgcacgctttgatctttttgatcgaggtaagatatgttagaaatttctaggggtttgtatttcttttggtgctagtggaatcatgcttgatcaccaaagctttaatggttgtatgactcgtgttgactatagtccaaatcacttatccactcgtagagaacgtgtcatcaggtagctttattttcttctgtgtatctaattttagccttggtgggttctgactaaccagattcttagattgtttttaaaaattcttttttaaaaattcttatcatatatgtgctggatagagtttctacaattctctacgctaattgtattgtgtgttgtgcaacaagctatatcatcgtttgaagaaaagaaaacaatgatgtttcctttttacttgataaactctcagggacaagccagctgtgttttaagagttcg

SEQ ID NO: 41308 - DNA, 604 bp, Arabidopsis lyrata
  Intron number 2 from transcript 889700 (locus 889700) deri ved from phytozome v7.0 (chr-ID scaffold_7; pos 7528514 to 7529117)
gaaacacagactcgcgttcccgtgctggcaacacggtaatttcttatgagagatttattttgtttttgatcgagtaatggaacccgaaggaggtgaaatgcttgttcagaatcccatttttgatcgtgtttatttgcgtatttggtgtaaatgacctgcgttctctgtcttctccattggtcattgttgcgcaatgatgagcattcatatagtcattaggcatgtgctgcttttcttatgagagcaaattacactcctatcgcagaggatccgtatatgctcgaatgggattggattacgtcattgacttatgcttgctttgaatgaaacacacaacattttagtttttgttttcatacacaaagcagccagtatcttctccctctgtttccgttaaaatttgcaaagcatgttttttaaaaaatttgttgcttcttttcattgaaaatgcaatttcaaatcatgtaaatgcaaatacaaataaacagtgaatttgtttgtgctgttgatttcatgatagatatctcatggaatttgtttttgtctgactttaactacctactttgtaggttttcaagagtggaccgctatctatatcttcaaa

SEQ ID NO: 41309 - DNA, 714 bp, Arabidopsis lyrata
  Intron number 2 from transcript 479628 (locus 479628) deri ved from phytozome v7.0 (chr-ID scaffold_3; pos 9311791 to 9312504 reverse strand)
atccggaaagtccactcttcttgactctcttgcaggttcgttcttgttaccattcaactgctgcatgcataacacatatcaatcttctgataaagaaattttttatgttaattaactaaagtaatttattgatagtactttttataataatgtttttgtctaaaatattcgccgccgtaatctgtaatacgttaccttcggcgtccaaaaaggcaaaaacgccaaaatggtttatattgctgtgaattcatatttttattgccaattcattatattttgtataccaaaggtatcacatctttaacctgctatttaaagttataaaccctatttagtttatactagttgttatgatcaccttttgatatattactcgaaagttgattatagataccaaaaaaaagagttaattattaaaatgctcataacggttgcatgcaaggaaagatagaaaaagtagtgcagaaaaaatgttcataaatgcaaaattgatttccggggcagccatttctgttacctactctctctttacttatgatatactagtatctcccttcccacatcccaatacaaaaaaaaaaaaccatttttttcagtttattgttatttgttcgttctctaagatatacttatagattaatttataatcgattaataaaataaaaattcccgaattatccacattccacaggtagactcgcaagaaacgtggtc

SEQ ID NO: 41310 - DNA, 336 bp, Arabidopsis lyrata
  Intron number 1 from transcript 914105 (locus 914105) deri ved from phytozome v7.0 (chr-ID scaffold_1; pos 25997571 t o 25997906)
atcctacaacaccttcttcacgaacgccaaagccggtttgttcccaccgattatccccaatagggttttcgtcttcttctttcagtaatttgtcaggattttttcgtgaatttgtttcgtccagagttgaatcacttgaaaattgatcaattcgttgatcgtgagttatagttgactggtctttgatcatattacttatgtgttttggttcagatgaagattcaattgtggaatttgcggaatatcaaattcttaaatttgcatctttagttattgattgatgtttggattaagtttctaaactcgtcgatgcgtctgtgtgtatattcggtagga

SEQ ID NO: 41311 - DNA, 681 bp, Arabidopsis lyrata
  Intron number 1 from transcript 494394 (locus 494394) deri ved from phytozome v7.0 (chr-ID scaffold_8; pos 1372470 to 1373150)
ccaattcgttacccgtctcagcaaattcctcgaaggtagatctgtattaatatacatgtatgcatggctttttttaccacatgcaaatgttgcattgaaaagaaaattgatctagaacactttacgtttaataaaaaaatatcatgtcactttatagttttgatttggccatgcatatatatatatatgcgtacgcacacttcttgcatgttagaggatgcatgcaatgtcgtaaaatagctatatcagtgtctaaattcgaataatttgatgcaatgtttttagactacatttttcaaatttctcgtacatcagtttctaaaatttacgttagacatgaagcgagtctaaccttaacatattcaaatctccaaaatatatccttttcgcttagatcaatattatttgtattttttttgctttaagcggagatagatcttttacccaaactaattcttttggtctgtagaaattcgaatattttgccatttaaaacatttaccgtggtcaaaagaaaacgatgaaaatttcagagagtaaaattcgatccgtgatcttgatccattttacatccactcgaacaaactatttatagtcgaactatttattattattatttttacaattgttgtgtgtgtttgtgaaggtgcgaaagtgaagttggagtgcaggagcagaaca

SEQ ID NO: 41312 - DNA, 758 bp, Arabidopsis lyrata
  Intron number 1 from transcript 474084 (locus 474084) deri ved from phytozome v7.0 (chr-ID scaffold_1; pos 25593649 t o 25594406 reverse strand)
tccaacagcccaaaggtacatatatacattctacattttatataatctcagtcccctgttttgttgtcctgttttgaaatttgaacaccctttcccttgtggctcctctctcactctagctgtctcctgcagcatgcattctcatttaagagtgcaataatatttcatcatgagaaagaaaaaagtttgattattcttggttattaacaaaagactggtagcttaagagtcaaatattaaagcatcatcattactcaaaattaaagtaatgtttattggttgaacaaaaaaagtgatgtttgttgtatgggttctagctagtggggcttttgcattagccattagtacaatcaaaatcatttattactaagataagaaaccagtcattttaaatggagagacgcgtttaattaggattaaacattactttaaagaataaatgccttcaaagatccgttgatgtttcttacgtagtgtggagtcatcatcattcagaaacagtgtgaagaacttttgagataatgcaaacctaatgtaatgtgagtgaaatcactcagactcggaagctgagtgaaaaatctcttagtagtttatccatattaaaccataaatttgacccattttacactataggtcagaaacatccctcattataatatactaaatacatttttttgtgaggtttttgtagtcataaccaaaataaaaaaattgaatgtgcagacaacaaggcacaagagaacgtagtgttcattcat

SEQ ID NO: 41313 - DNA, 350 bp, Arabidopsis lyrata
  Intron number 1 from transcript 356600 (locus 356600) deri ved from phytozome v7.0 (chr-ID scaffold_8; pos 3000901 to 3001250 reverse strand)
aatctctgttcctcaggctaccgttactcatactggtaaagttccttttttttttataattggtatgagaaagattccctttatatcattcttgatttctaggattgtgttctgtttctgttccattataagttatgggtttcaatgatacctgaaaagggtcttgtttgatttgagggaaagtcaacaaattttccgagaaagtgaacaaattgtctgagaaattgctataaatagggtaaaatgagggtgaagactagaattttaccattttttgttggcatgaacacaaaaatgatggaatgtttgatctaatgggtttaatctgtggaaactgatgtaggatttca

SEQ ID NO: 41314 - DNA, 669 bp, Arabidopsis lyrata
  Intron number 1 from transcript 494323 (locus 494323) deri ved from phytozome v7.0 (chr-ID scaffold_8; pos 843889 to 844557)
atcacgtgtttaaagaagtcttcaaggttaggacttcaaattattggttatacggtttgtgacatttttcaattcttgactagttgttgttacttgttagtcactgctatcagtttaactgaaattagaggcttagagcagctccatcgatagaaactatgatttctttttagttatataatttctttttcatttttttaataattgaatcaatggatacatatggcatgtgtccattaatttgtagaaacgcttctcattgtttctcgtttgatataattacttcaataattttgtttttattaatataatttggtgagatatcctcctccatcccacccatggaggtgtccttacacctaattacttttggtttgggtagtcttatatgagaattattatattttagtttattatgtaaatcatcaaaatcaccaaaatttgtcttctatattaatatattattgttcttttaaatttgtaaaaagtaataatatttttttctttttgttcattcatctataaactattttccatttgtttgatttatatattacttatacgcattagtcagtgcatgcaggaaccaaatgttacggtttataacattatattaattcttaatcaatttcaggttgctgtgaagtttctttatcttgcggcctacgc

SEQ ID NO: 41315 - DNA, 421 bp, Arabidopsis lyrata
  Intron number 3 from transcript 496765 (locus 496765) deri ved from phytozome v7.0 (chr-ID scaffold_8; pos 21885416 t o 21885836 reverse strand)
cgcttcaacgcgataacgattccctccttggacaggtatagtctttgtgacattttttctttttgttaataaatttgaacgtctaggcacacccaaaagaaacatgttagccagtttttttaactaaatccatcaataattcggtcaatcaaagaaacaaaagttttgattgtttgtgtgtgaattgcctttaattacgttaattttcttgtgcattttaagataataggttttcttaattacaaatgaaaaaacaaacacaatcacaacagaagaaaactttgaacattaataatatactcaagttttaaacaaattcagagataatccattattttggtaaactataaagattattgatatttataaacatgacatttatgcagattaaagagctgaaaacaaaacttaacgtggaagg

SEQ ID NO: 41316 - DNA, 345 bp, Arabidopsis lyrata
  Intron number 2 from transcript 933705 (locus 933705) deri ved from phytozome v7.0 (chr-ID scaffold_4; pos 14916888 t o 14917232 reverse strand)
ttgcttccaagtaaaaatcctttttcactgtcaatttatttatttttatttttgttagaagccattgcctagttatatatgcaagatagtatttgtaatctaccagattcaaaatatatataaacgtaaggatcttgtgaaattagtagttgatcaatccggttcagtttggtttgattagtacctgtcctttgttcttaactgcgatattgctttgttaaaatataaacaaagattctagtcatattggtcttcgtttgttcaaatttcaagattttgcttaaagtcaatcaaatagatgaaataaaaactgaaatttcttattaacttgcagtggtctgactg

SEQ ID NO: 41317 - DNA, 1044 bp, Arabidopsis lyrata
  Intron number 1 from transcript 474209 (locus 474209) deri ved from phytozome v7.0 (chr-ID scaffold_1; pos 26647249 t o 26648292)
gatcaaaactaaccataagcatcgttctatctcttgtaattattactagatcatgacccgcacgtacgtgcgggctttcatattttaaaatgttttttaacaaaatttaattcaatatagattattttgttgttttatgatatatattttagtgtattagatctggatctacgtacgtgtagaaatatttttatagaaattgttatatagattttaaaaatacaaaatattttgttgtattagtgaacttcgtaataatataaatattataaagttagagtaatgaacaaaaaattcagttgcgttaatgcataatcatattttaagatccggactaatttagttgcaaaatttaaatggtgttacatttttattttcttaactaatcaaaacagttctaacagtttgcttatatatgttaaatagaatatgaatttcggttttagtttgggttatttcatgtatattagcaagacgtaactattttggaacatgaaacatatcctttctggtatctgtcatgtacacataaaataaaaatattacggtcccatatctatcataaatacagtatgtataactgaaaacgtatgtacatggttatgtgtaaaaaaatttattttatatagtgctcataacccaaactcataccaattgggtatttagttggtttttaatatatgttccccttccatctcgtctcgtaatttttatttccattttattccattaaaattatgttccaaattcttgtttgcttacctttaaataccatacaatattacaatatatactgtgagttttgcagattaatatgtatgctgttaaatttataaatatattttaacaaatttattaatgtttctagctaaattttgcatatttttcttttcattgtttaatcataattaattcgattttttagactaaaattaaaatttgagatatatctataaaagggatatgctattgctgcataatattttttgaatgcaaaatatataattagttcacattatttcgaaaactgtgtgcaatatatta

SEQ ID NO: 41318 - DNA, 598 bp, Arabidopsis lyrata
  Intron number 1 from transcript 485808 (locus 485808) deri ved from phytozome v7.0 (chr-ID scaffold_5; pos 16872667 t o 16873264)
tcgcctgcagtgctttcgctgcttgcgtcggcgaggtaatcgccggattccttaattttttcatctctcttaactctattttttgtaccggtaaagtatttattcgttcgagaaatgtgtgtcgcgatctagtgttgtttagctatacgcggaaatgtatttcgaatttcgttgagatttgtgaagtttctatcaggttgatctttatctttcttgtcttgtatcatcgtattagctagagaatctggattttagcttctatactatttatcctgaattcctgattacgtaattacgatagaaatgatttgatcttggaataatcgttcagatctgtggctaaaaattgagtttttggcatttgtatggcagtgttttgacgttgttgatttatgctttggataatgattttgcgaatcattgaaaagattatgagacttgaaaatgtttaattatcctcagaacaaactgtatcttctttttggcggtgttgtttcctcagaaaattctgtgttgcacagtcgcttttgaaaattcttatgcaattaaactctctggaccaggtttgcactattccattggacactgctaaagttag

SEQ ID NO: 41319 - DNA, 613 bp, Arabidopsis lyrata
  Intron number 2 from transcript 321255 (locus 321255) deri ved from phytozome v7.0 (chr-ID scaffold_4; pos 16813037 t o 16813649 reverse strand)
gagcttcaggtaaagcttagaccttttttcgtctattagtaactgcaatgcgcttaaaaatgtggcttttaagctgtgttgcttgatagattgtgagattagaatgtcactagaggttagtgaatgctgaatctttggactgagagaagaaactgtttgatcacaagaactactctttagtagcttgagtctgttttgttgtacatgtagtggcactggtttccttgaggattctttcaatggactgtgggtgccttttcgtcagttatctgccttttccttagctaaaaacctccttaggaaattctgatcaatggtgcttggtgaatggattggtgaaaatgtctataaatggacttaagagtggatcgagtgacatggttgaaatgtttccatgcgggacatggttgaaatgtttccttgtggttcattgccattgcaggttggttagcgtgatgtcaatcggtttccgattggaacaaattcttgatctgcttgttatcttaatggccatggaaatgctgaaagtttcaattatcgctggctaaaagtttgagtctttatggtaaattgtgcagagttgcatagatttggtggaggcctcgttgaagaa

SEQ ID NO: 41320 - DNA, 141 bp, Arabidopsis lyrata; identical to SEQ ID NO: 39758
  Intron number 1 from transcript 934918 (locus 934918) deri ved from phytozome v7.0 (chr-ID scaffold_4; pos 19998586 t o 19998726)

SEQ ID NO: 41321 - DNA, 356 bp, Arabidopsis lyrata
  Intron number 4 from transcript 492696 (locus 492696) deri ved from phytozome v7.0 (chr-ID scaffold_7; pos 9064885 to 9065240 reverse strand)
ctcttgtttccgccgttgctcttgtatggtttctaatttcttcgtaattcatgaaattttttgtttgggagtgaaattagttttttgtttgaggtttatagatcaatttcttgcgtgtttgacctatctttcctcttctgtttaacaaaagtggtgaccttttgttgttgaaacatcgttttctatctaaatcatggagcttgaaatactactcattgtatagtttgattgattgtctgtagtttatttctgggtttagttagttgtggatacaatatgttgggtccaaacatatttctgaccttttttgtttaaaatgggattatgattggtaggttcaactgataaggatccaa

SEQ ID NO: 41322 - DNA, 400 bp, Arabidopsis lyrata
  Intron number 2 from transcript 490404 (locus 490404) deri ved from phytozome v7.0 (chr-ID scaffold_6; pos 24159379 t o 24159778 reverse strand)
acacaaccaaaacccaagtaagtatttatgagttgttagtttcttgtccttcaatagaatttcagtgttttctctttggttaacatactttcagtgtttgtattaagaacaattcacttatatccaaactatttgtatttgttaacaaaaaaaaatcagatagtaaattttgttgtggacacacacaattgattatccgatcatgtgagtttatatatctaaatgcgcttttgcatttatgtatatacacatttttttgttgggtcatctttcagttccgtatataaaattgtaggttgcttattgaatgaattgtttgatttatactttggtagttgcggttatgattaatatacaatttgcagattagtagactgaaattggagctagagaggcttaa

SEQ ID NO: 41323 - DNA, 876 bp, Arabidopsis lyrata
  Intron number 1 from transcript 931152 (locus 931152) deri ved from phytozome v7.0 (chr-ID scaffold_3; pos 18822941 t o 18823816 reverse strand)
atagtgaaggtaactcattttcttggaatctgttttcagaatttgcttgagtatttcttcttgttctttgtgtcactctttttgttctcttgcttcttctctggccataaactactctttcatggtaagatttgtgaactaagaaaatgtctttgtttgtttgtttatctcagttctggaaattaattaaacaatctctttttttttttgtgtaggttctgaatttttacctcttgatatatagcaaaactgtaagcttactttgtcttagtttttggtatatgtgtaaaaaacctactgcaaaggctattgttattaactggattttgaatcaaatgcagcttacatgaaaaatcatatgttggtttcatcggagattgatataggattgttgttgttttgcctttcttatagggtggttgaatcttttgacgctagagaaatggagtatgtgcgtttagtatccgctgtttgttggatatatggtgagatcacatttgtttcaaaattattttcttttggtaagttgtgaagcagagagagatggaatcctggagtctctagaagtgacgtagtcaaggttctctccttctttgtttcttactttgcctcagtcaggttcgtcgaattctttctcgtagctttcaacttgtttatcttttaagagaataagtttaatattttggaaattctaaatcaattggcacgtgatcttgtttcttctaaaactaaattacacatctttcatcactataagttagaaatgttgtctttttgtaaccgatttatctcaaaaaattaggaaagctttcaagtatgagttttccatttgatttctgttttttttgcagtctggagctttcaagttgtcaaagg

SEQ ID NO: 41324 - DNA, 893 bp, Arabidopsis lyrata
  Intron number 2 from transcript 489290 (locus 489290) deri ved from phytozome v7.0 (chr-ID scaffold_6; pos 10548921 t o 10549813)
ccaaaagctagagtcttggagggagaagaagaagactctcaggttgatttcttgtattcttctgcgtattctcattatctgttgtttgtcctcattcgtgttgtctgcaaaattcagttaaacatgttcacaaaggttgagactttacacgatcttaaaaaccattttgaggtcataattggtataaatttgaattggtttttgggagctttgttcttttggtagcacaagttggaacatttcaatgttcttgattaagggttttagggtgaatgttttatagggtttgattttggatgaaaattccttcttttagggttttagattattaacttgaattgctctttgtgtttctgttcctatgctttggataaagttgcagttcttgattgatagttgaaaaatactaattctttaatcttttatttggaaatattttgctagtttctggtagattttgttagtttcttagagtcttaaaaagagtattgttgaagattcagacaaaaaattctgttctgtttcagatcaaattgtttggttactttagagctgtggattctacttcttgtctgtttgttattctctattagatttagttggcgtgttgttgttgttaccttaaaccatccacagaatcatataatcttttggtttagagattccttaaaacaaacttcaaaatgttagaaatttgagatctgtcattcaaaacactcaacaacgttcttttttttttgacattaaacactcaacaacgttcataagatataaaaatgtggctttcaagtattcttaccagtaccatcactgaaatatttgagtttttttttcctcattcttatttgatcatttcatttccgcagtgagagagagaacagggtttgatccat

SEQ ID NO: 41325 - DNA, 897 bp, Arabidopsis lyrata
  Intron number 1 from transcript 896755 (locus 896755) deri ved from phytozome v7.0 (chr-ID scaffold_5; pos 4513494 to 4514390)
gggtgggcggtgcgacggccaggggtccaattccgtgttctaataatgaagggacccatttttttaaatatttttgcaaaagtattaaaaaaaatagattccaacataaaaataaaatttataagggcccaaaaaaaatttatttactgcttttaagttttaataattaaattttaattaaaaatatcataaaatctttttttataacacaaaaacattaaaaaaaaaaaaattctaagggcccaaaatttttttcgccctagggcccatcaaagtattgagccggcactgcctaccagtggggcggacagaggaggcagcaccgccgttcgtcacaccagctaaccaataccaacatatcatgctcgatcgggtacccacggtttgatggcggtgatcccacggaatggttgagcaaactcaaacaatatttcacccttcatgagataccaagcgaacaacgagtaagctttgcatcgtatcatctcagtggaaggaaccccatggtggcaggagaaacgtgtaagcatgaatagtgggtacgatttgggtcatcagaagagatttttcacgaggggttgtctaagatccgtagtcaaacatggtctttaggcgactattctgattaacgccaaatttaaccccagatatgtaaaacataagccaaggagtttgagagattaatgaacaaggtggatcagtagcggacccagccaaaacttttacccagtgcaaaaaaacacatttgtggggaattgaacctactacctcatgctttaagggtgtatctattaaccactgggccaattgcttcaatatacctaatgtaaaatcaaaactatttatatattacccggtgcagttgcactcctttccaccaacgtgggtccgcccctg

SEQ ID NO: 41326 - DNA, 619 bp, Arabidopsis lyrata
  Intron number 2 from transcript 335709 (locus 335709) deri ved from phytozome v7.0 (chr-ID scaffold_1; pos 11054727 t o 11055345)
ctaagagattctttgactctcctgtctctcccaacgtaagctcacattaactcagtaattttttctaggtataatttattcacaaagaaaataggattgaaagttatccgaacgacaacttaggctattatttgttactaagatcgcaagatttggttagaagtttttgaaaataactttttttatgagtaaatatataaacgagtaagttgaaacttgaacgagtgtatatataagatatttatttatttgtttgttatatctatctataagtttgagaaaacaaaataaagtctttaagtttttggtacaagacacatttgacaaataaatactccatctttgctgtccatttgattttaagcttaaaactaaattattttgtgtgggtgcgtggtttttttttttctgtgtactattaatcttttttttttaaaatataacaataagtatgtttcttcaaattaacattttacaaaactcaaaactcgaaacataaaataattaaataaagaaaactgcaaatatatatatatatattgggcttctatatgttgctatagaatacacaactcatttgttattaacattttgaataatatggatcaatgcaggattc

SEQ ID NO: 41327 - DNA, 523 bp, Arabidopsis lyrata
  Intron number 1 from transcript 925260 (locus 925260) deri ved from phytozome v7.0 (chr-ID scaffold_2; pos 4968191 to 4968713 reverse strand)
tcgattcagaactgatcaacattttgaggagagaggtaaggatgctaactaaaatcccaataattttatttttcttatatgattgatgaattaaagtgaaactcatatagaaactaaactattctctatgtagacatcatttgtgagcagtcacaaatcacagtaaccaccaaatcggaccagcggtatgtaacgttttaatcatatataacccaaaatttttgaaactatttaacaatctatatattcacataattttaagaacatttattttcttttctttcatgcaggatgataaaggcatactacactcatacccagaaggtttccgaagagttctttactacatcaaagataaatacaataaccctatcgtctatatataaaagagaatggtgagaaaaaaaaaataaggaacctttttctgtaaataaatttttctttctcttagttaatggttaaattgaataattcttttttcttgattaaattttttatttgctaacttattctgcaggaatta

SEQ ID NO: 41328 - DNA, 596 bp, Arabidopsis lyrata
  Intron number 1 from transcript 318477 (locus 318477) deri ved from phytozome v7.0 (chr-ID scaffold_3; pos 7303826 to 7304421 reverse strand)
ggaaatattgtagataagacatgcaagcagacacctgactacactctctatctctctcctccgctccgatccacgtagctcttccgccgacaccgtcggcctcgttcttatcctcgtcgacaaaatcaaggttttcactctcttaccataatctcaatatgaataagacaaatttttccgggatcacggggttggtttgataaatttagggtctgactggtgaaaactatagaagaaatgagtagaattttaaagaagaaaggaagagaaaagaaaatggcacttcagaagaaaacgttactttagctattttgtagagggataaaatcttctactttactttcacttttcagtagaaaagtaattttttttttttttttttgactggtgaaaacacagatgaatttagaagaataaaatttatacatttttcttttcttctaaaaacacctatcagtcacacccttaaagttaaaggagatataatatatatgtcccaaaaggtaaactttatcagtttataattaaatgtaaatgtttttttgttttcttgttgggaatgtaggcgcttggggctgaaacgctcgggcagatca

SEQ ID NO: 41329 - DNA, 496 bp, Arabidopsis lyrata
  Intron number 1 from transcript 330235 (locus 330235) deri ved from phytozome v7.0 (chr-ID scaffold_7; pos 19470431 t o 19470926)
ctcagcaggttggtttactatctctcagtgtttcctgttctcggtttcttttgtttgtgacctgaactatgtagacactatacatgattgtttcagccgttttcgtttggtatatatagaagagtatagaatgttaacaactgtagttagttcatagattctgataacacaatttggcctgttcttttactttcgttgtaaattatttggctgtctacaccagatatatcttattcttttcagttccaactttttgacattttcaatgttctgataaacctgaattttgggtctatctggtgcttaatatgaattcaagtataagcattgtacaagtccgataaaactgcctgtcttttcatcaccaatgattgtgcaagctttaagaagggttatattttctagtaaatagtgctatgaatttcaaatctaactgaagtcatgatcaaatttttacacagggactgtacaaacagacagtaaaggtgctcaagat

SEQ ID NO: 41330 - DNA, 925 bp, Arabidopsis lyrata
  Intron number 1 from transcript 931037 (locus 931037) deri ved from phytozome v7.0 (chr-ID scaffold_3; pos 17554290 t o 17555214 reverse strand)
tcgtcggaaagaatctggcttgtcttctccttgtggtaaagaacagtttttttttatcagtcttcttgatttctgcggtgtagatttaccttgtttgcttcttgtttgcttcttgtttctctgttgggactgtatttgtggttcttgtaccgtattgatttgcaaagaacattagagatatgtcttatctgttgtgtagttatgttctgttgtaattgtcttagtccaaggtttatagatttgttttatccgttttgagaaattgcttcatatctgcgtattcagagtcctgttttagggtctagattttgtcttgacattgttttggtttgagtttagctatgtgtaagttttagactagcacttaaactctgtcacttgtgttaatggttctagatgagtctttgcacaatgaagttgaattgtagcttagaaacaatgtccagtgtcactctttttgttaatcggtcacttttattttgtgtgttttgccatttgttgttaatgaagttgaatagagcttagaaacaatatctagtgcctctctttttgttaattggtcacttttattttgttggttttgccaatttctgtttatttattgcgcaatgattgtttgtttctttgtaatgaggatttgttcttggagttgggttattcagctacacacaatcagaagtttctcttttcaagtttagatttgatacacttggtgttgattgttgttgttatatgctttccattttcgaataggatcctttttatcttgtttttgcgctttttaattccctttttgacgaatcttgcattaatgcttcacatctttatcacattctactgtttggttgtgtctttctattttaacaagcattcttgtgtcatcgttgcaggcagaatcattgctgatagggttgattgctgttga

SEQ ID NO: 41331 - DNA, 286 bp, Arabidopsis lyrata
  Intron number 1 from transcript 924144 (locus 924144) deri ved from phytozome v7.0 (chr-ID scaffold_1; pos 29674034 t o 29674319 reverse strand)
ctttcctttatctttctctctgtttgtaattttctttgtcgatctttagggtttcgttttaagtcctttctcttttttacttgatttcactatatctaatcaaatatttatgtttttctcttccgtagacttattagtcgaattaactacttaatgtttcaaaatcgcagtatttatatatttttctgtgttgaaatatttcaattaatttactcaatcgctaattctttttttggtctatggtattgcagagattttgtaggtgacaatcaaaagtttgacaaaa

SEQ ID NO: 41332 - DNA, 596 bp, Arabidopsis lyrata
  Intron number 1 from transcript 943323 (locus 943323) deri ved from phytozome v7.0 (chr-ID scaffold_6; pos 22946158 t o 22946753 reverse strand)
atcgccgataggttctctctctctctcttctccatgtaactcaaaatctctcgaattatggttttcttcaagaggaattttcgaatttttattagagcactgatgttgatttgatttcagtcgttgtataggggttatgctagttctagggtttagaacagattttgagaattggggaaatttttgttaacttatgattgtgtttggaggattctgtgtcactctttctttatactgagtctctgatgaatgcactttttgacatttgagttgcttggtaatatcttgaatcattgttttgttaatttagtgttcgtaatagggttaaatgttttggtttcttcgacattgtccttttcacgtttgtgaatgttattccttttgttctttggatttgaagtagaaaatatccacttgattctcatatttttctgctttggaggtctaaatctttggcttctggttcttcatgtgctataaatgaaagatcttttgcatctttgtctttcttcttctctatcttagattatttttctaacttttactcacaattatttgcagttctagtaacctgagaagccttagacttgtaagat

SEQ ID NO: 41333 - DNA, 284 bp, Arabidopsis lyrata
  Intron number 1 from transcript 487834 (locus 487834) deri ved from phytozome v7.0 (chr-ID scaffold_6; pos 3982491 to 3982774)
actttgggtacattttttttctttaatcttcactctaaatttagaaacaaaaaaaagttcctctttttatcctgaagtttctaaattttgttcctttagattcgatcccgaagaaaagtcctgtgttttgactaactcaatctgcttgatatacacagtcttttcctttgggttaacttgttttttggataagtaaaataagttctgaactttgtagatatagtagtggtttgttgccttttatgaattttgtgtttgatgtttttactcaggctacactacac

SEQ ID NO: 41334 - DNA, 395 bp, Arabidopsis lyrata
  Intron number 1 from transcript 492241 (locus 492241) deri ved from phytozome v7.0 (chr-ID scaffold_7; pos 6982444 to 6982838)
tcttgatccacataacactgtccgaggcaatctaggtacttttatatattaactaaagaattaagaccatatgtgatcacagttaagactatgcatgagcattaacaacataaaacggtcacttgggatctttgtaatttttatttttgttgccatacccatatatagtcatattcgtaagaaagtaagaaacctatccgtattttgatgttatcttagataagaaaaaacatatatattttgttttggactaccctacaaaacgaacaattggataacattatttgttaacataattgcgggatcaacttaaattattagaagtgattgtattgatttgaaaattttcatgaccaacaggtctgcctccattggtgtgggacgtaaagatcgca

SEQ ID NO: 41335 - DNA, 602 bp, Arabidopsis lyrata
  Intron number 2 from transcript 945907 (locus 945907) deri ved from phytozome v7.0 (chr-ID scaffold_7; pos 8732840 to 8733441)
tcctgaccatcaagaacacgtaagtactgtttgtttgtctctttcataatctggcattcatacttcctcccaggataaggatgtcttgtgttcatgttttgcaaatattaacataatctgctgtgagttgttgcgttgcgcaaactagtgttgactgtttggttttgattgtttgcatagcagttgctctatttcatacttgttattttgttttgaggaactcagtcactgggctttgtctattggtatatgttggttactggttcgtatgctctgtgttcatattcatgctttgcagttattagcataagtgagttgtttaatgtagtacattcactcgttgtttgttgacataccagttactgtatttcatggctgttagtttgtttgaggaattcagtctctggacttggtttctaatggtcactggttagtattggtacataaggtttaccagacttctttatctgagactaagtaaactttgtgatttctgtcatggagtttctcaatatttgaagaactaatttgaatgtgcgcttttctttctgtgatttattttgccagtgaaatcgcaaagcatctttctctcccaccagtca

SEQ ID NO: 41336 - DNA, 288 bp, Arabidopsis lyrata
  Intron number 3 from transcript 473131 (locus 473131) deri ved from phytozome v7.0 (chr-ID scaffold_1; pos 12862823 t o 12863110)
ggtaatgttctctttatgatctatattcgaaatctaatgttttgtttaagcaatctctaattaattgagaaacataactgagttcatttaaggttcaaagtttctagaaaagctgtttcctttttttgtcatgagatagaatcttttatcttctctatgactttgttttaacccttatcttattatagctttctttattggaagagattattctggtttctcataaaacatttgatttgtgcattgtgcagccattgctactgttgttacggtcgctgagatattgaa

SEQ ID NO: 41337 - DNA, 595 bp, Arabidopsis lyrata
  Intron number 2 from transcript 481406 (locus 481406) deri ved from phytozome v7.0 (chr-ID scaffold_4; pos 4485012 to 4485606)
aagattcagtctccttgcttctgtatttgttatttgtgaatactccgatctttggttactacccacttggagttttaacattcgacactttattgaagaatactttgggaaatctggtgaatttgaattttttttttagtgatatatgttgaattgttttagaattacgaccaatgtccctggctgatacatttaggtttagttagtttttgaagacataactgatggcttcttgtccaaattgcttgatatttagaagagttatacatttctggtaatttaattattagggtttcctttttatttcaatggattccgcaatgcagcatttttatgagtcaagaataaatgtcttgatcataagtagtgttattctgtcacgtttaggaatcttgagttggatcattttgcatttttggatcagatttatacattgattggtaacttgtggctttattttggattgtttctgccttcagttctctcatcattataaccttatcctttcggtttatagattttctttagtctaattaattaacttccaaatgtatttgcagtgcggatttgtcgttggtgcttaattcccgttgta

SEQ ID NO: 41338 - DNA, 858 bp, Arabidopsis lyrata
  Intron number 2 from transcript 483834 (locus 483834) deri ved from phytozome v7.0 (chr-ID scaffold_4; pos 22694758 t o 22695615 reverse strand)
atcctattgctgtcaagatcatctccaaggctaaggttttaaattctcaatcttgatcatcttgttttgattttaggattgtggcattggtgttatgttagggtttgttatgagaatttgagtagaattttagctttttatgtgatttgcttattgctgaaactgctacaagaatctatggagggttttgaaatgtgcaattagtaatgcttacattttctcataatattgaggtagtgaaagtaggattcttgggtttggataatggctgtgggacagtgaattgtctttttcttccagctgagtctctctgagagaaacagtgttgtctcttttaataggtaaatcttttgtctggcagtgacttgagaagacaaaaatgtgatctttttgttgatttgtcagcattaggacaggatagccgagtttaatgtactaatgttttatgagcttgtcttctccaatcgtttgtttgttctagtagtgaagcttgtagtcacagttaggttacattttgtttacttagttgttgagaatgttatgatcttacatgtgttacttgttgtctgttgcatctttagaaaaaagatgattgatgaaaaacgttgatagagaagtcttttgtctggctgcgtgatggggagaccataatctgacattccttttgtctgcattaggacataatgttttaagtatgggcttcactttcgaatgctcatgattttgtctcttcacctgtttgcttatctttgtaatgaagctcgtctgacacatttaggtgacagttgtgccatccttctcatcaataaaacaagcaaaaatgatttgttgactgaattatctttctttgctttgcag

SEQ ID NO: 41339 - DNA, 921 bp, Arabidopsis lyrata
  Intron number 2 from transcript 906101 (locus 906101) deri ved from phytozome v7.0 (chr-ID scaffold_3; pos 18309536 t o 18310456)
gtttgcatacttgcagctggttacgtactgtacaagtatcgtcttagggaatgttttcactcttttatttctctttatgaatcttcaaattcatcatcatcatgaatatatgtagtgataatttccttttgtgtcaaaaccaaaatgctgtcttatatggattttagaaatcatggcgataatgtctttgtacatgccatggctgattatttcttggaatatctttcataaaagagataaatatataagaaacatttctttctttctattttttttttgttcatttgacttttttttaaaattatttctactcttttcattgttatagctagataaagattttaaaagtacgatttttaatatttttattgaaagcgaacaaaagagctctgtcaacagttaattacagactgaattgaattgggattttggttacaaatgctaacaatttttgtcataatatagtttgaggctttaatagaataaggctgcctgcctctgtccccctgtactatatcgttccaactcggttccccctgtacttttaccctctacctatttcaccctatacacatgatattcttcacaattccacccatttttataaaattctgcctaattctccaaaatcaattaagctccttaaatgcattttaagatcactaaatcgcgttttaaaattgattttctctgatcaaaccggtaatcgacctagatttattaaaccaaattgaaccttctgtttcagaaagagggttcaatttttctcttaaaaccctaacaaaattggggaaatcttcttctccaccccgacacctgcgaagacatcgattgtcttcttctccgactgagactgtcgaaatcctccgactgagaccgttgagcaagagctaaaatttggggaaggaggtggaacaagaa

SEQ ID NO: 41340 - DNA, 832 bp, Arabidopsis lyrata
  Intron number 2 from transcript 917661 (locus 917661) deri ved from phytozome v7.0 (chr-ID scaffold_8; pos 19008313 t o 19009144)
ttgtgaaaggaccttcttcgagtaagatggtaaagaaagggtctccgtttctgcttgaatctggtaaactttgtgttcagatccctaatgaagtcatcactcgtaaccacaaaagatgggaatctttcattattggtcaattcaatggtaaccttccctctgggggtgctcttcatgctatcttcaacggaatttggagtaatcggtaccgtgatatcattgtttcccgtttaggtgcaaagtcagtccttatcagaattccttgccctacgactcgaaaacgcgttcttagtcaagggatttggcacattgagggacaaagtatgtttgttgctgaatgggaacctggccttaatcctgaaatgccagaacttacagaagctcctgtttggttggaattccgtggagttccccctcatttcttttctgaagaaggtttcgaacacgtcgctggtatgcttggccatcccctcttctgccatccatctactgtcaacatgactaacttggaagtgggtaaggtctttactattattgaccctactaagcctctccctgaagctgtgaatgtccagtttgagtctggaaaaatccatagggtggatgtctcttgcccttggctccctccgatttgctcccattgcaaccaagttggtcacaacatccgccggtgtcccactgcacccatcacttgtctggattgtaagtcttcttcccagaaaattgtcccaggaaaaaaaaatcatctggacacgcaaagagcaaaggcaaatctcagtggattactgatgtagtagaacctaacaccgagtttctctcctcttcaatcccg

SEQ ID NO: 41341 - DNA, 592 bp, Arabidopsis lyrata
  Intron number 1 from transcript 496342 (locus 496342) deri ved from phytozome v7.0 (chr-ID scaffold_8; pos 20176269 t o 20176860 reverse strand)
agcatcaaaatttctccggggagatttgtttggtaataaatttcttcttgaatgttgataatttctttgatcaataatctcttacctatgtgcaaatttcttcgtgtttgctccaattcaatttttatgtattatcaccagaaatcgttacttctctaaagttccattcaatgtttattctaatctaaagatttttcactttttgtacgattttagagatctcaaattgtttattttcatgttgtgattctgggtttgtcttatttcgcgcttttatgattcttcttcggcgatgaactcaagaattctgatagacgtgattgttttttttttctttgttatgtggagagaattgaagaacactaatttgattcataagaaagacaacattttttagattttgcgtttggttgattttgagtaatctcttggaaattaaaggatgaaactttgacctaagatcaatgatctataaatggttgattaagaaagtttcagtttttttttttcttgttttgggaaattttcttaacggtgaatttgatttcttgttcttcagattcatcatcgtatatactcttgcacaaagaag

SEQ ID NO: 41342 - DNA, 394 bp, Arabidopsis lyrata
  Intron number 3 from transcript 355547 (locus 355547) deri ved from phytozome v7.0 (chr-ID scaffold_7; pos 18414867 t o 18415260)
gcgatttcaaggcctccaatatcttgttagattctgtaagcaagcattcttctttattgatcttaagaatttgaacgcttacaccaaactagaccgttttacttttagagcggactatttttttttttggtaatcgtagtagatcatggaccaaaatcttgactaatctccgagtatgtagaaaatgggtattattactacttaagacatctacaatatcctaaaatggacatatttgtttgattgtttctttctattcaaattatggtggaaccgcaattccatccacggtcaccattcaaaattctaattgttggatttgaataaacatttgatgttttgattttttttttttccaggattatacagcgaaactctcggacttcgggctagc

SEQ ID NO: 41343 - DNA, 1027 bp, Arabidopsis lyrata
  Intron number 1 from transcript 934177 (locus 934177) deri ved from phytozome v7.0 (chr-ID scaffold_4; pos 16866288 t o 16867314 reverse strand)
acactaaagaagccgttaaaagcctaactacacaggtctctttctctccctaaagatctttgttgatccttaagactctttttcactttactttgttgctttttttcctaattgccttccttggtcgtgaaacaaacaaacccacataacccaaattgataaaatggtcctcttaaactgtttaacaattatggtgaaaaataaaataaaacagtttttatgttaaaggttttgaaattcggctgtcaagtacaaaagcatagaggttactgtagttaaggctgcaggttacaaacaaacaaaattcggatctttagacaagatcctattgtgatgcaacatcacttctctggaatctattacaaatctctctttaataggttgtgtcagtgtttattttttctcccctctatgtgactagacataaaaatctagcaacaattagtaaaataattatatgtttcacgttgaattttaggattaccaatgtagtggctgatgatttgtgtggaaaaaggttaatggagtcacgccttgttgaacatgatttttgcttgttattgaagattgatctactgtatatactttcctagaataagtccctagtggattcttatttagattaggagcaaaaaaaataaagaataatctgtggtggggcaactatatagattatatggtaaatcaaaagaagcataaaaagaagttatgattatgttctattcacggagaagacaagatgaactatattttatgtttcaaattatatcagatcttctagctttattcatgctctttatgaatgatgatactagactccttttccctagttgggataaaagaaaaatcatccatttcttgactcattttttttcatggcagaagactttattgcttacttactgtttgtttaccctgttctatccaacattatgttgatgtccaatgatcacctagtactatgttgagttttaagataacacttttaatcagcttctttggtacggatgatatgcagatcaaagac

SEQ ID NO: 41344 - DNA, 859 bp, Arabidopsis lyrata
  Intron number 3 from transcript 488184 (locus 488184) deri ved from phytozome v7.0 (chr-ID scaffold_6; pos 5505069 to 5505927)
ttgtggggtggaacttttggtgaagtctacaaaaggttagctcaattctcactcttccttttatacgtctttatattgggatttggattggatctgatgagatcacgcacttggtgcttcttgaacatcactcaaactttaattccatgtttgtcttaatctctagtcgctttttagatgtgaaacgctactttttttaagagactatttctgtatgtgtaaggtaagcgttccaaggaagtaattggcagctttgaattggactaattctgtttgattgttaactttaggatcttaattagctgccttggaatttcaagtcattttattgccaaatctgttgctaggcatgccctaaagtccgttcataacaagttacttcctttactgttgttgaatgtagagttagttgtgtgtagcgtataatcaagtagtgttttatgaatagagaagttctaaatacatatgtgaaaagtgtgtttaggctgtgatagatgactgttgctttattattcactatgtacatgtgcaattaaagctagtttcttttttgtctttcagctcaatgtgcttttctcaaattatttctgagaactgaatatgtgattttcaaagtttccacatcgagtttagttatatgtcttgaatttcctccatcctcgttctagtaacctgctatgaactcctcctgagtctgctgtagatatgtaagaaaaactgttttatgggctgcatctttgttacaatctgcatcttcttctttcggctcagtgttcatttttttgctatgttagagatgagacagttttattgttgatagtatcttaactaattgattctctctttgattcaggcctct

SEQ ID NO: 41345 - DNA, 470 bp, Arabidopsis lyrata
  Intron number 3 from transcript 495715 (locus 495715) deri ved from phytozome v7.0 (chr-ID scaffold_8; pos 17396466 t o 17396935 reverse strand)
ttaggtcaatcacatctttcaagtttctccatcaggtaatcttaaagtttcttcctcttcgattttgttggggtttttatggagatgaagtcaacagtttcttcttcaccatttttttaggctaaagtctttagctttcttgttaggtttgattactgatacatcgtttcttctcatccattcaatttttgctatatgggtcagatttaaaacaaaatgcttttttttttttgttttctgtgattatgtggagcttaatggtattgagttttgactgttctttatatttttctttgatccgttggtccatgatctgaacgagtctcagtacgtatcatcaaaggaacaaacttttctttgttgtgtcatgtctctcagaagtttttctttataaagcctgtacctttgttttgtctggttgttgtactaatggttgatgatttggtttttgtgatgtttttgcagagatt

SEQ ID NO: 41346 - DNA, 698 bp, Arabidopsis lyrata
  Intron number 2 from transcript 495715 (locus 495715) deri ved from phytozome v7.0 (chr-ID scaffold_8; pos 17397105 t o 17397802 reverse strand)
tttcaaagatccaaacttgtattcttcaaaaataggtatgcatatacatatagtcctctgtaagtttttggtattttatgatccatttttttttcttctgttcatagcattattaaaaagggtttggttttaattcatattttttcttcccagatttgttttttaatctcatgtttcagtttagtcatccacaagtagagattactgtttttttttctaagggttttgcttatcttctttcaatgtcttgatattttcttaaatctcaatagtttctgaaaaaaacaaatctcaatgatctttggtttaaatctcaccagatgtatgtttacttacctctgtgtcttgatctatttgtttcttattgtgatgtcttgagttttatgttattccttgcataaaataacactccaatcagattagaaactaatgcttctttttaggggaaatttttgaaagaattaaaaatccaatcttttgattgttcctgtttgtgatttgcttcaccaatcaaacccatatacttcaaaatctcacccactaatcctaattttattctctgtttttttctaaccttcacatgaaataatattttttttcttcaaggatcttcttttcaagtttctgggttttaaagactgaaacttttaaactctttttcaggtttcataggctcacaaatttggtataataaagat

SEQ ID NO: 41347 - DNA, 936 bp, Arabidopsis lyrata
  Intron number 1 from transcript 938326 (locus 938326) deri ved from phytozome v7.0 (chr-ID scaffold_5; pos 16869945 t o 16870880 reverse strand)
cgtgttctcgaaaaacttcccgtgagtttttttctctttactctaaacacttagggatttaaaaattcaatctttgtgatcaaattctgcatttttttacttagttaaatactaattgggatcaatcctcttttatgtgtttggtcctgctgaattgtttgatggttttgttgaacagttctctaggaattatctattatggcgaagttagtgtaaacagattgcaatgtttggattagtgtctcctttttgggacgaaggagaatcagtagtggggtaggtaataagatgaattctgagaacaacttcaatgattgcaaaactgaattatcattgtgcaaatataatagcctttttaccaatcaatatctcggtggcgatttttatgagctttactttttgctattggattgagactttgacgagcaatatagtcaatggatttataggcggctttgatgtgtggatcataccttcctacaattttagttgacttagaatccataacattctgtgtcatagtttgagaagacttgaaatggaaactctttataatcttctagctctgcaatatttaatcttgaagttccattacagtccaagttgatattggtttgattaagagttcattaccgttccgtgtgtggttttaatctatgttagtgtctaatctgttttgttgagttaattgtaacttgacttaaattcgtcaagtaacagatttaaagtacgagaagttctctgtgatcagtgtaatcgtcttactggttttgataattaactaaattgtttatcatttcctctgtttttgcaatgtaaggaaaatagtttctttctgtttgacttcattttccgggatcttggtcatggattatatgtttttgttgtctcctttatacagattccggaaatttggcagaaacctgaaagcgggaa

SEQ ID NO: 41348 - DNA, 471 bp, Arabidopsis lyrata
  Intron number 2 from transcript 491161 (locus 491161) deri ved from phytozome v7.0 (chr-ID scaffold_7; pos 2576415 to 2576885 reverse strand)
ttttcctcgtcttcgcgctcttcaactccggaaaagtaggctctttttctccgacccgttttcatgtggatctcaaattcttgtgtatctccagaagatctgattctgttgaacccttttgtggagttgctttcttattagtgcttttctggatttggttatgattagtctctcttggattcaaatcaacattctatctccaagtacattgaagtgtttaagcgagtttataggaggagcttatagagtgtgaaatgttggttcgttgtgttttgattattgtgtcaggataacattgttgaacttggtttagctttctattttccgggtctgtcatatttgttaggtttcttctctttgttgaacatttggttgcttggttagtgtgagttaggttcaatagaggaggagcagagtgtagtatgccttgtggatgttgtgcctgatttgcttcctcttttgttacttagg

SEQ ID NO: 41349 - DNA, 800 bp, Arabidopsis lyrata
  Intron number 2 from transcript 900923 (locus 900923) deri ved from phytozome v7.0 (chr-ID scaffold_4; pos 14730883 t o 14731682 reverse strand)
aaagcttaggcaacaggtttgtcttttttttttctaaagaaaattaatcatcagtctgttccacaatttccttaatggtgattaagaaatcaaactgtttttgggtcgacggtttttgtaatatgaacttcctttttcttttttccactttgcaagatttgtcagatgaattactctgcgtattacctagtctaagttaataaatgattttttttgtaacaatttgcaaaatattttaacaccgtgggggtggtaaggatccttagaccatcattaatggtagtctcttagaaagatcttagaaaaaaatcttagcttaaaatagataaaaataaagcaaatatcttaaaattattaagaatgtctcttagctaagagacatttggtgggttaaaaagtgcttcttagctaagtgtccatcatctaatgttaagagctaatattaagagactaccaataatgttgctcttataatctccggagattctatccgtgatttcctatgtctcaaaccaaaccaaagacttcattaaaaaaaatttcatagaattttaaatatacaaaacagaaacaagatcttcaatattactatttaaaaggatatgcactttgatcaatgcaaaacatatggcatgtataagcttttgttttgtagttttcttctatccccatgttttctgctgtaactaaaaagcaatataaagtaatacagtaaattgttgaaatccataagatatcattatacgtgtgagacactttttaaaaaagtgttttgttttctttgtttcttaataatttag

SEQ ID NO: 41350 - DNA, 709 bp, Arabidopsis lyrata
  Intron number 1 from transcript 939225 (locus 939225) deri ved from phytozome v7.0 (chr-ID scaffold_5; pos 20382803 t o 20383511 reverse strand)
agcaaaagccagttttcgatttggcgctcttgtacgcctgaaaattcgcagtcttccctcgtccccaatccctggagccaaacactgttccattcaaccgccacgtcatcatatcttgaattttaattttcgtttttattattgttcaagcgaattaatttcagaattaaccataaaataatcgggaaaaatatataaaccgacgacggtctgtgtctccttcaccagaacacaagatccttctcctcctcttttgttttccttggccgtcgattttaaggttttatcttctccgttgtgaaaccactgataagggaatttacgaggaggatttgttttgtttctccggcgttttagagtttcacgatttctccgtcgtttgattttttaattcaatcctctgagggaaacgagaatttggttttcgttttcgaatttagggttaaagaagcggtttcgcattgggttcgttgagtcttgaaccaatttgcgagaggaattgaagcgtttcgagttttttctttttgtttcccggaggtccgaagtgcgaatctgttttgtttgatgaaattagggttttggaatcggaatttggatggtcgtttatgttgattagtcgacgattgctgagttaggacatgattttgaaacgtaccttgacattcgagaatcagaatctgaagcggtgcaaaattgattcagaaattga

SEQ ID NO: 41351 - DNA, 376 bp, Arabidopsis lyrata
  Intron number 1 from transcript 481708 (locus 481708) deri ved from phytozome v7.0 (chr-ID scaffold_4; pos 12189095 t o 12189470 reverse strand)
tctcttccgcctccgtcctctgctcttcccgtcaggtagcaaagtttgttcctttttatcttctctagctacttactgaagaagaaaatgaatcatcttacattactttgttttgattggatttgaccctttactttgttctgttttcaattacctttctctatttggtttctgggtttttgaagaaattgaatttgaccctttactttgttctgtttcgattgcttttatctatttggtttctgggttggtgtaaaaatggttgatttatttgggaaatagaagaaattgatcgataatgatgtaaatgaatctgctttattcattttgtgggtacacagagtaagttgggaggaggaaatcagcagcaaggtca

SEQ ID NO: 41352 - DNA, 765 bp, Arabidopsis lyrata
  Intron number 2 from transcript 486980 (locus 486980) deri ved from phytozome v7.0 (chr-ID scaffold_6; pos 470509 to 471273)
ctcgacgaggtatataaaatatttatgatcaaattttaatttaaatctgcaattttttttaattattttctatacattcttatatgtattattgtgttaaatgttcacacagtttttggtcggtgtcctttgaaattggagacaaaatgtgataaatgatttgtctcttaaaaagatcttccttggaaaatgaaactccttcaaagccatttaaaaatatttaacatatgatttaatattttatttcattcattataatacgatatgttaattaaattaatgttccctatgttttgcatgaatcgaagatgttatagcgtccatattaatacatatcattattatataaatacaagctcgccctcttcttgcaaaacgttgattactgtttttttaaatagaattttaaggttatactaaagtagtgataatattatcttgaggaagtaatttatatagagcttccttagctcctgatctgaatttgtgaattagattcttcaaatcttaggggtataaacatttaagtgatataaagaggacgtcttttctttatgaaaggaatatatgcattatatgatcttaaagctaaggacttaaagattttaattagtttattccgaggtatataaaatactttttgaatgaggaaataacgtatgagccattcaaatttataatcacccattttattatgtaagtgggggaatctataaacatttccatgtgactttttgaaggtatacaagaggtataagcaatact

SEQ ID NO: 41353 - DNA, 508 bp, Arabidopsis lyrata
  Intron number 1 from transcript 319110 (locus 319110) deri ved from phytozome v7.0 (chr-ID scaffold_3; pos 11390642 t o 11391149)
cgttgacgccgttacccagctcggtggtcctgacagtgagtattactttgtctacttatcacctttgttgctgaaatttttggatcttgagatgaaaatgtgtgttgagctagcttcttcttctctttgctcagtttcttactcgccctcttcaaaaatttcgtcttttttagggttaggttgatttttctctcaaagtttttgatatttcagatttgtgaagaatatgtcttgttacttgattcgttgaagtttgtgattacatgttcttgagacttgaattgagatctatataagtagttctttatgattcccaaaatagaatcatatgctgcagtgtataaatttgtttcctttttcgaaattagtcaattgtaattaagtagtgtcagtgtcatctctgaaaattttgaagcttgtggtttgcttgtagctaagaatccttattcaagttttgtctttttctttcacacttgttcaactaacagaagcgacgcccaaaactatc

SEQ ID NO: 41354 - DNA, 223 bp, Arabidopsis lyrata
  Intron number 1 from transcript 323163 (locus 323163) deri ved from phytozome v7.0 (chr-ID scaffold_5; pos 11432203 t o 11432425 reverse strand)
caagcacacttcgaggtttgtaactttctttttttcttcaggagattgaatttgcgaataattgatgttatttaagttttttttagggattttgattatgctcttgaagattgtgaagtatgctttgagtttttgtttgcgaatcttttgtaattctggtgaatgattgatttatgttatgtgcttttgataatgtatgtaattgtgaatgtgcaggattttt

SEQ ID NO: 41355 - DNA, 408 bp, Arabidopsis lyrata
  Intron number 1 from transcript 490180 (locus 490180) deri ved from phytozome v7.0 (chr-ID scaffold_6; pos 22904621 t o 22905028 reverse strand)
ttccttagtctatctatcctcccttccccaacattgtaagaacaccaaatctctctctgactctctcaattccaatctttgtatgtgttcttgtttcatattaaaatcatccaatccctagaaatgttaaaggtcaaatttttaatttattatttcggtttttgtttttctctccttaacctctgaatctccggtgtcggaatccgaacacataaggatgatctacattggctttttatttttgatattttttcctagagattcttctcgtgattaacctttttttttttttggttttgaaattcacaacaatttgatgtcctaaagaaatattggaactttcttattttgggttcatttccaacaatttgtgcgtgatgggttgttctcaatgtaggattttgtttg

SEQ ID NO: 41356 - DNA, 372 bp, Arabidopsis lyrata
  Intron number 2 from transcript 495765 (locus 495765) deri ved from phytozome v7.0 (chr-ID scaffold_8; pos 17688386 t o 17688757 reverse strand)
tgtcgaggctaacgagtgcatcaaaatttacctcggtgcgtatttgatttaaatcatttgaggttgattttggggatatagtttcgtacggaattagggttacgtttcctgctttcgacttttttgctgaaattagttgttcttacttcgatttttatagtttttgacttttccggcgaactttgttgctatcgaaaggtaggtttcacttattgaacgtgtagagaagatctgtatactgtggtttcgatgagtcataaaagtattctctgtgtaaatttcttaggttgatgtgacataattttgttgtctgttttcgtgatgtgtgatgttctagtttcgagcaaagaggaagttgattctcctgatatt

SEQ ID NO: 41357 - DNA, 266 bp, Arabidopsis lyrata
  Intron number 3 from transcript 314128 (locus 314128) deri ved from phytozome v7.0 (chr-ID scaffold_1; pos 22622694 t o 22622959)
cttggctggagacacggcctcaacgaagaagtgagttttgtatctttatgaaaaagttagagactataaatttgatgtcttctccttattttacatgtagataatcttgttaacggtttgttatattaagacctaaaataaagacttaaaaatatatagaattgacttcaaaacaagcctccatatttataattagaatgaagcattctaaggctaactattgaatgtgtttttcttttgaggataataggttgcaagagcacgag

SEQ ID NO: 41358 - DNA, 642 bp, Arabidopsis lyrata
  Intron number 1 from transcript 483713 (locus 483713) deri ved from phytozome v7.0 (chr-ID scaffold_4; pos 22265102 t o 22265743)
gctctatccgtacagccatcgataccggttgcggggtacgttcaaattctcttcactctgattaaaccgaaccccccggtttgatttgattttgcctttctatcaagaatgcatattcgttatctttatttttaagcttcaaattaaaggaaaaaaaaaaaagattttccctcaatcgaataatctgttgggacgttcatatattaactaacaaaatactgtatattcatgtatatccatatctagtcacatctaatctaaattccatttgattagtgtattcttatatatgtgaaaaataattaaattttggaattagtgcattttgtagatttaatcttaattttgcatattcttttttcaacatttttggtttctgagtgtgacccactaagtcacctaatcgtctaatgtcactgttgacctactcatactttaccgttaaacctgtaaagttgaaaaaataaactagtagttgtgaacaaagagtcaaaatgaagaatatcttttcttgtctcttagtttgacttaatttgtcaaaacaagaatatcatatgcctttgagttttgttgggatgttcaatcaaatgtgtctttggtttttcaggtggctagcttcggtgcatatcttttatcaagaaa

SEQ ID NO: 41359 - DNA, 840 bp, Arabidopsis lyrata
  Intron number 1 from transcript 926940 (locus 926940) deri ved from phytozome v7.0 (chr-ID scaffold_2; pos 16766883 t o 16767722)
atagctttacggagaaagcaacatttactattgctgcaacaacttcatcaactctacaacactcaagagaatgaaacttgtgaacacacattgagtgtagagatgaatataaatgttcaagaggagaataataatgaaattgagagtgataaagatttgccttccttttcagatctttgaatctatggtataaactcttacaagtcagtgtaaatttttgtcttttcttggttaaatatactgaaactgtgtttttttttttaaccaatcagattcttgacatggaccttgaaccgattggtcaagactagtacgagttggaaggtaaataataagctgtctcttaaattgtaattttgccatttgttgtctctaatgtaacaacatgctatatactgatgactatgtatgtagcatgcagacatcagaacgaggaaattgtgtgaatgataatgagattagagcagagtattgaatcttaaatgaaccgtgacattgcttctcatggagttttctctcttcatgagaagctctaagcattacattaataaagaatcttcttgagatgcttaattatagtaattaattgattcaatcaaactaaaaacatttctaacatttcaggtgttacttgggagagcaacatgagaatatccagtagatatcgatttaggaagatcatcagaatctgaaataagattctcttgacgactgatgataacaccattcataatatatattaacgtctattaatttttatacattttgatggatagtttataagtaggagtttcatagaaattgatggaactaggctctaataaagttgaagcaagacgg

SEQ ID NO: 41360 - DNA, 682 bp, Arabidopsis lyrata
  Intron number 2 from transcript 909919 (locus 909919) deri ved from phytozome v7.0 (chr-ID scaffold_1; pos 685724 to 686405 reverse strand)
agaaaggaaacacaatttgtgaaatttgtctccaggtttgatttcgaatttatcaatattttttttatttgtctaataattaatttcttttttttttttggggttttgcttttgtgatgtttagcttataatttgtttttctatcttctcccaaaattttgaacttacgtaattgttttatttttttgtttcttcgacgtctcatctattttttttgaataacaacgatacgtgtaacaaacacttttatcgttcgtgtcccataatctttggcataattagaaaaggaaaaatattcgattctcgtaaaagatcgtaatcaatgagccaatgccacgctgtttatgatatgatattttcgcgtatttttatttatttatttgtgtaatctataaattaaatgaattacgaaaagagttaggaacaaaaatggtaactggatccatcgtttcatgggacccataacaaacttggaggacttacttttctgattcgggctggattatttcagtttcggttcagttatgtggtttactaactttattttctttattggcttgattttttttattggtttataaatatactcagaattaatagtataatgttgacaaagaaaatagtttaataaatttgtaatattgcaggagtataaacctggatacaccacaacttcaaaacc

SEQ ID NO: 41361 - DNA, 637 bp, Arabidopsis lyrata
  Intron number 1 from transcript 493939 (locus 493939) deri ved from phytozome v7.0 (chr-ID scaffold_7; pos 22191973 t o 22192609 reverse strand)
gctgcttcaagtacttagctgaatttctgtcaattgttaaactgtgaatagaatgagcttgattgaggaatgattgctttttcttaactgggttttttgtaatagagcttcaaagttcctcagaacaatatgattaaggaatgcttaatttgtgatatcgtttcatgattacttgatttcatcgggcttttgcggcaatggtgttcatttctggatatgtatgctgcttggtgttttatgtatggagccacaatggattattcttaattctgcttagtgtgtgttctctagtgtttacgaacttaattccagagatacgacctaatctggagcattagagtgttatagaactcaaatgattgatactggacattaattttttttctgtacagttttcatgaaagcttaaagttttttcttttcaattcatagctgtattacttgttgattccgtgtctgctgcgtttatcaaagctctcacttgtcatgagatattagagatcaaggttctgttttcttgtgaatacttaagctgaattgtttttattccttgtgtcttgttcatttcgaaatctgtgaacaaagtgattacaaatctaagttttttttgttttaatttgcaggtcgtgggatcatc

SEQ ID NO: 41362 - DNA, 607 bp, Arabidopsis lyrata
  Intron number 1 from transcript 951014 (locus 951014) deri ved from phytozome v7.0 (chr-ID scaffold_8; pos 20463008 t o 20463614 reverse strand)
cttgtttctttgttactacgagtctgctttgtgtttctcttgcacttttatacaaaaatgctattagtcgtatccactagtgttgccattaagccttgggtttccttccttagaattttgaaagttcagtaattgtgtcaaacgtctcagtgatatgaaacatctgttggatatggtgagtgaagcggaaatttgatagaaaaaaataagacttttcttctaaatgtgattgcgattggaaaatttggcttctttttatttgtggataagaagttctacatgaacaagttttctgcatgtcaaagaatatacttatcatgagaactttctcttccactaaatttataggttatatagtgaggatggagacggatcacaaggagggacagattatgattttgaatcttgtgatccgtagccagagaaaaacttgaaaagctccagtaagatcaatcagggtatgtgtatgagaatcaacattttatctttatgcaacctagattgtcttcacattcttgaagtgcatcaatataacatgcattcttcttgttttcctggttatttatttccctcatgaagcttggaaaaaagagtgaacaagaaggtt

SEQ ID NO: 41363 - DNA, 827 bp, Arabidopsis lyrata
  Intron number 1 from transcript 348712 (locus 348712) deri ved from phytozome v7.0 (chr-ID scaffold_5; pos 17880800 t o 17881626)
aaagaaacgagtaagcatgaatatgtcataaaatcaagagtacgacaaaacaaagaagatgggcctaaagaccgaaattggacgtggggagcccacggacagtggcggtcggggcgttgctaatatgaaagaaacgagtaagcatgaatatgtcataaaatcaagagtacgacaaaacaaagaagatgggcctaaagaccgagactggacgtgggaacccatggaaagtggcggtcggggcgttgctaatatattgttggtttaaatatatagattttttatatttaattctattatatatatcaagatataaacattaataattgtttgtgattcaaaaacactattaattgttgattactaataatatatatcaaaagttatagcgttttaccataattctatattaatgtcgttataaaaattagactcttgacaaaattaattcaataaatatccctaacttgataaccctaaatattaattattaattctggtcttaatcaacatacaaccccgcgctgggcgcggggacctcccctagtttaactgaaaaagaaaattaaatatttttatttattatatatgttaaatatggattgttttttgaaaagatattttattctattcaaaaattatccatcccatatcgttttcctttttttcatagttatccctattccaattaaacatacaatttactttttacttatatgtagattctgacgccagcttttcttgatgagtcaaactcaacttaattacataccaattattgtctattatatacagacgacgaaagaagtaatcttcacaatctctcaaca

SEQ ID NO: 41364 - DNA, 594 bp, Arabidopsis lyrata
  Intron number 2 from transcript 493040 (locus 493040) deri ved from phytozome v7.0 (chr-ID scaffold_7; pos 10960687 t o 10961280)
tcattttccaggtaaattaattattcttagcaactccatatataaatatttctaaatgatgtaaacggtgtattttgttgtgttgagaattttgtatcattttaaaattttgagatatgaaaaagtatttattgcaaattgatcttagttcaaactcatgatgacatctcagtgatctcactttaatcattttctccactataaatataatatcgagtatgctagggacaaaattatatgatagatcgataagggatataagatttttaaaaactgaaaaacaagaagcactcatagtcttagatttactggatttcaacagctagatatacatgcattgaaattattttcaaatagatagcttatgaaggaattgcttcttgaatctgctatatagctttgatcatgatttcttgaatataaagggaaatgaacagaggacacactatatgattacactcttacacatatattcaaatgcatttagtaatcaaatctatatatatccataatagacactcttaaatactttttaaaaaaaaaaaaatttaatgggcagatattggcagtggttttagcaacaataggagctat

SEQ ID NO: 41365 - DNA, 948 bp, Arabidopsis lyrata
  Intron number 1 from transcript 888927 (locus 888927) deri ved from phytozome v7.0 (chr-ID scaffold_7; pos 4138944 to 4139891)
tgttcttcatctctccaaaggtaaattaaatacgatctgatgatatatgtatgaagattgttgttatttgctgccatttatttggtttaaaattgcatgcgagtttgctttatgtgttttcctttgctgaactttatattttatgagatccttagcatcgaaagcttaatctatgagtttaaggcgtggttaagtgagattaacatgggaccattaacgttaacctagttttacttaggctggtcctaactcttttgaatcctttataatattatattgttaccttttcctttatctagtttctcattagcccttttaatctgtgatttctagtcttggtctcttcataaatatctgtggatatttttgttatatatgatcatatctatgtgtatagtcatggatcttgcaagagtactgttcatgatcttcgaattgctgtacagattatttatattgcatgctcgtacgttttgattccatttatgtaattatgtttctaatttagtctatcacatatagtttaatgtgttttgtactacttatagatggtatctagtttatatgtcattgatcgacgtgatcacgttgtgaatcttgtgagaatattctcgtgggtttgtgtcttgatttaagaaatgttctttgggtttgtttcttgatttgagaacatgttctttgcatgtcctcaaaacgacgttttaatttaggcattctttggaatttttttgttgttttttaccaaaaaatcttcagtaatttgaacctgtaaggatcaaatcaatcctgtatcgtgattaaggaattttcagtatatgactgctttatgtatgtttcatgtctagattgtgaaggatattaaaatttgatttgtctcacttatatttttttctctacgccaaaacatttcaaaatttcaattttaattcatatatatttatgggaggg

SEQ ID NO: 41366 - DNA, 356 bp, Arabidopsis lyrata
  Intron number 3 from transcript 938812 (locus 938812) deri ved from phytozome v7.0 (chr-ID scaffold_5; pos 18780983 t o 18781338 reverse strand)
tacttttttcttggaaaggtaatgatacttttaggggaaatttggttgtgctgattgttatttagttatgaatctgcttgacatttgagtaattctgaggcattgcttagaacaagtgttgctaatgcatattatgagaaaggcataccattttgtttattacgattgatgatggagtatagtttgatagttttcattctgtttcaaggtttgttttaagagcactttacttaatttgtgttacattacaagcttgttttgttgttgttccatctgtttcttcttcattcgaattgaaaagtgataattaacatgaaacaggacaatccagctagaactctttcttggggctgcct

SEQ ID NO: 41367 - DNA, 664 bp, Arabidopsis lyrata
  Intron number 1 from transcript 471384 (locus 471384) deri ved from phytozome v7.0 (chr-ID scaffold_1; pos 5016892 to 5017555)
cgactacaagaatttccgacagattacgcgtgaacgtgagttctctctctctctatctgtatcggatttcatttgatttatatatctgttttgactctcgttgatttggattgacttgtcgatttttctggattctcgtgatctatttctgattccgggttttgcggagcagccattttagttttgttgtttctatttgattctgggtactaccgtcgtgagaccgataatgtgtaggcttctaagacttgtcgcggaattgctttgggactgtttgtttatatgtaatattgggaaatatgttgtttgttacactggtttggttctaaagtttagaattaagattttcgatgatgcttatgaatttggtagtagagctaaaatgtttgcctatcgggcacttaggaacataaactgatacatgtttcaaatggttgtttaatctttgagaagaggtttgtggaatatgattgtagagagttataggcagtgtagctcttgtcatgcatccatgggtctaaattcaacgaggctttggctgttatcactacttattttctcttaagtctcattacttttcttccttgttttggtgaggctttatctattgctattgggttgtctatctgatctgttacatttctttaattcccaggactcttgt

SEQ ID NO: 41368 - DNA, 547 bp, Arabidopsis lyrata
  Intron number 1 from transcript 888921 (locus 888921) deri ved from phytozome v7.0 (chr-ID scaffold_7; pos 4087938 to 4088484)
tctccagactttgcttcatcgctgccaatatcacggtttggttccttctctctctctccttgtttctttaccaaattgttcatgttttctagatttatggatttggttatctacaacatcttattaagctacaaaatttatcctcagattcgtttcttgtcataagactataagttgattcctctgtagattatatgtttttaaagacgagcttaaaaaatcaattaagattatttagctagattcactctctgcattttttttttttacttttaaaaatccatgcttcagattttattgcttcacatgtggttccaaagctcattggttcttgcttttgaggtcgttggatttgaaacagtctcttgttctgtaaaaattgagactttggggaattcttacatatttgattgctccacttgtgtcacagagctcattggttcttactttactttttttgaatgagtaaaaactgagactttgtggttaattgtaactattataatgtgcagttacaacaacgaaccaggcacagaccgcattggag

SEQ ID NO: 41369 - DNA, 1010 bp, Arabidopsis lyrata
  Intron number 1 from transcript 481562 (locus 481562) deri ved from phytozome v7.0 (chr-ID scaffold_4; pos 10355409 t o 10356418 reverse strand)
aagtctcttgtctccgagttcgctgttttcgataggtaataataatatactttccctgtttttttggaattattattacgtcacataatcttattgtcgtatcctttgtcgtcttattggcatatcttaaaacactatattaatatattacgccacagttttcgttaaaaatattactaaaaatccaaatcagaattttttcccccactctgaaattaagaaggaaaaacagatgcatggttccacttttaaaatatatttctcctttacttttttttttcggccacatttctccttttgtactatctttatattttcctctctaaatggaaaaattattaatatctatttattttgtttaattgtttattgaagtataattattacgtaatataatatttttgatttttttgttaagtatctaataataataagtacagactgtgcagtattgttatggcgagctctttgtggtgaattgttgttgttgtttgaccgtttgctctttttttttttttttttttttgaggcgaacgaccgttagctcatgttaaaaccgtatactgtttaacaacaatcagtagtactaatatatttttccactctgaaattgagatgaaaacagatgcatggaatttcaatatattctcctttacaattttgttttttcctctctatatggaagatttattgatatttattattttgttaaatggtttatggaagtattattaaattattattacgtgatataatattttttagttttttgttaagtacgtaataatatagtcttattggcgctctctttttgtggtggtgttgtttgaccgttcgctcatgtttcttttctttttttggggagaacgaccgttggctcatgttagctcatgtattattttagtttttcgggaaaacgaccgttagctcatgttgaaatcattagtactaatttgatactaaaatggaataaatctgattttttttatatatatataaaaaaaaaacag

SEQ ID NO: 41370 - DNA, 480 bp, Arabidopsis lyrata
  Intron number 3 from transcript 470113 (locus 470113) deri ved from phytozome v7.0 (chr-ID scaffold_1; pos 244088 to 244567 reverse strand)
tccgtggctaccttgctgctctttccactttgcaggttacttcctttaatttgcctatcatattttttgaaacaaacattttgtttttagcaattatcataaataacggaaaaatattgctaataatccacttataactccaaatatagaagaattcaagttggcttctaactaagaaaccttatgtttgtcagtatttactaggttttaaaaggtctttttgttattttggagtaggtgatcaggtcaaaggtctttttgttatttttggtccttttggccacacttggctcttttctttttttactttactcttatttatggatttgtttaataaaaaggaactttcaagattgtaatcctgtttttagcaaaatatcgcttgagtaattgtgttcatggtcgctttctacaaattgaacattaagaaaaccttgttttacaggattgttacccagagagattggggaaactatatat

SEQ ID NO: 41371 - DNA, 679 bp, Arabidopsis lyrata
  Intron number 3 from transcript 494297 (locus 494297) deri ved from phytozome v7.0 (chr-ID scaffold_8; pos 702815 to 703493)
gatctcgagtggattttctctaatcaatccctggtaagctaatatttattgaattttctttctgggttttcgatctgatttcacctcattgtcttatgaatccaccatttgagttctgtggattaaaagattcaaactttctcaaagacaaatttctgacatgtttttagagtctgagtttgattacattttcaggtttttgttaagctttctctcattgttttctgaatcctcttatttggtaatgattggaaatgatcataagattcctactttcttggaaactaaataaaaaaaaaaaatccaatttttatgagaaataactcttagaaacgtctctgattggctaagtggttcaggtcacaagtaacaaaagtactgattttggttgatgatactgaagaatttggttgatttaagtggtttggttatataagttaatcttgattcttgaaggattcttcattaacaaaagtagtgactttggttggtttctaaagtagtatttggttagttgaagtggtttaggtcacaagttaaatgtgtaggattctttttgttaacaaaagtttaaattttggttgatttaagtggttgtcaaaatttattcttcattaacaaaaagttttggtttttggttgattctgagaaatttgattgatttgtttttttcttagaa

SEQ ID NO: 41372 - DNA, 469 bp, Arabidopsis lyrata
  Intron number 3 from transcript 490119 (locus 490119) deri ved from phytozome v7.0 (chr-ID scaffold_6; pos 22565129 t o 22565597)
ggtaatttcccttagactctaagaaactggatacaacatttgtcttatgagacaagttcgtcttttttggcttcagaactgatttagaatgcttatgagttatgaattatatggttcatatgtagttcttgctagatgtactagtaaattgccttatagtcatgattcatcgatgtagacaaactcacataactgctgagtagtaattctttggtttttgaaagttctctttttcacttgtagaaaacttgagatgtgtaaaagctaaagggttgagttgaatctttccgcatctcctgcttgactgttttttttttcttgtcacatcattagctttagacagacaatgtttagctgctacttgttaatagcgttttgattgattgattgtgtattttaattgcctagtttgcttttgcttataatcaaatatgtctttgtcttttggggttttgcagatttggacttc

SEQ ID NO: 41373 - DNA, 552 bp, Arabidopsis lyrata
  Intron number 1 from transcript 914410 (locus 914410) deri ved from phytozome v7.0 (chr-ID scaffold_1; pos 27925666 t o 27926217 reverse strand)
aggttacttaagaaaccaccacattcatcttctaagtcttgaggagtatctagtgaaagaaggttactagtggtgttatatataaatttccaaaatcaaagagaaaaattaataactggtatacaatgatgtaatatgaacctttaattactgtttttatgggatggaaaatttactgattgctccgtttaacagacacataacaacatctgattgctccgtttggctagttaacgaaagttagcgattaaattaaaagtcaacatacaattgagaatttaaatcaccaggtccagatgatatatttttcattataaatattctcatgtattttcatcgattctctatgaattattgttaattttctttgaaaaattagttaaatctaatacaaaggatacattaggaaatttgttcataaaatacatagatagacaaatatttaaatatctatctttatttttaattttcctgacttttatgttttcacttattaataaaagtcactatattgcagccgaagatctaaccctaatttgctgggttcccttg

SEQ ID NO: 41374 - DNA, 460 bp, Arabidopsis lyrata
  Intron number 1 from transcript 930379 (locus 930379) deri ved from phytozome v7.0 (chr-ID scaffold_3; pos 10814607 t o 10815066)
gaacagcttgttaacttcatcattcgacctccaaggttatgcttctctctcgagtattatgaatttgtgctttttgatttctccgatttggttgtcaaattctcaatcgtttgaagaattgggttttctctgaatttaagagttcatgacttgaattttgttctttatgatgattacttgtattcataattgtcttttgtactttcacttgagtttctgattagaagaattatcaaattcttatttttttggccacccatgtgatctctctgtctctgtgtcattactaaagtttactattcagattctactactgaatcttcaagaacgtgtctatgtattactttgacatgagtcttttaagagttaggatttgggacgttactaggtttgaagataaacatctataagaagattgtcaatatgtgaattgacttgtttgtgtgctgcagagctgagt

SEQ ID NO: 41375 - DNA, 334 bp, Arabidopsis lyrata
  Intron number 4 from transcript 476550 (locus 476550) deri ved from phytozome v7.0 (chr-ID scaffold_2; pos 16137151 t o 16137484)
gcaacaagtaagtttaactataattaatgaccatcgacaggcttaaggacaaaaacatatgctcaaatttctatgtatttttctaatatatgatatactgatttcatttgatttaatatatattaattaaataagaatttcagacgaaagattcttcaatgttattataaaaaaaattgactgaacacaataatttagctagtttgtaaaggtagaataatataaatcctttaataaccctcacaaaatgtgtatttcataaagtaatgctacatagtgacgatttggtatataaatatacacattttctaataaataatgttttattgatcag

SEQ ID NO: 41376 - DNA, 896 bp, Arabidopsis lyrata
  Intron number 1 from transcript 494672 (locus 494672) deri ved from phytozome v7.0 (chr-ID scaffold_8; pos 4514401 to 4515296)
tcagttgcttttcagctcactcccactcgaacccggtaagtaaaatttcgtgtaaactcttgtttttgtgagctttagagaagtagaatatggtaattgatccaaaatgttaaaactttgtgtgaaattgttctatggaagtcgaaagattgcatttttatgttcattgatgagatacaaaattgttgcagtgttaaactttgtgtgactggtttgagaaattggttatatggaagtcgaaaggttgcatttttatgtcattgataagatcaatagttgttaaagtgttaaactttgtatttcttttttgggaaattggttctatggaagttgaaagattgcattttcttgttccttgataagatcaaaactcgtcaaaatgttatattttgtgataaattgttctatggaagtagaaagattgcatttttgggtttcctaataagatcaaaagtcgttaagatgttaaattttgtgttacttttgtgagaaattgttctatgaaaatggaaagattgcattttttggttcattaataagatcaaaagtcgttgaatttgtaggtttgttaccaaacttgcaaagaaaaattaagtctttttctttgcattgattaggtaggtaaacagcttatgtaaaataatttttctttttaattgttgaatataataaactcttgttttcgtgagctttacataagcagaatatcgctaaaatgttaaattttgtgttacttctgtgaaggattattctatgaaattcgaaagaacacatttttaggttccttgataagatcaatagttgttgaatttttttgtttgtttaccaaattacaatggaaaatttaaagtcttttctttgcggttgtttcaggtgcgatttgttggtaacagcta

SEQ ID NO: 41377 - DNA, 866 bp, Arabidopsis lyrata
  Intron number 1 from transcript 893036 (locus 893036) deri ved from phytozome v7.0 (chr-ID scaffold_6; pos 4488987 to 4489852 reverse strand)
ttccaaacgaactgttattggtgctgcagcttcaggtactcgtctctatctttagcttgtgaacattcatcaatcatgtatgaaattatatatagatttacgcactatcttacaaaacataaaaattatgttcttctataagtttttatttttacattacatattattacaatcattgcagataatattctctttttattcgtttttatatattacatttatatttttatattgctacaattaattctcataagaattattagggggaggtcgcagcaggttgaaatcaaagtcctacatatagtaacatgaacaatataatcccaatgattaacgaaggactagttctttctataattgtcaacgatgtctaagtcgtgatatatagatctaaagatccttgtcttaagaaatggctggttgtctaaattggcaaatgatgagtccgactaatttgaaagagaatatcgctccaaaatcagcaataattgaaacataaagaaaacctatatatttttcatgaaattcaatgaaagatatatatatatatatatatatatatatatatataattaaaatagtatatatatatatatatatataacaataaactagaactctaaattattatagtaggaaaataatagcgtttgaagatcatgatagatttgtatatcatgtatggaaggcaatttgaattgatccccgatcgaatctcaagtcctctctacatcatattttattaaagttatgtacttatgttttagttatttctaagcacattttgagaaacgacttctcaaataggaaatattaacttaaactttgcagctttatacttgataaagaagagggaagtggtggcc

SEQ ID NO: 41378 - DNA, 449 bp, Arabidopsis lyrata
  Intron number 1 from transcript 475195 (locus 475195) deri ved from phytozome v7.0 (chr-ID scaffold_2; pos 2578395 to 2578843 reverse strand)
ctttcgctgaggaagaagaagtcaatcctttcgctgtaagctttttgactttttgatttaactcgtaaaaacttgagatttgatctttctgcgaattgggttttttcgaattttggttgattcattgaatcttgttaatctttgggttttacttagggtttgattttatttctactcgcttgtacttgtggcttagaatctgaatatgggtttaaaggaatttaaaattatgagagatttgtaattcaagggttgataaagattctacctttatgttcctaactttcggtttgttcttgggtttgtgatgctttgtcatgaatcttgaagatgtttctcactgaattctgaagcaatgaattttgtttttgttaactgatttgtaatggttgtgaatgtaattacgttgtgtagaatcctagaggtgttccgcctgcgtcgaattcgag

SEQ ID NO: 41379 - DNA, 444 bp, Arabidopsis lyrata
  Intron number 6 from transcript 488442 (locus 488442) deri ved from phytozome v7.0 (chr-ID scaffold_6; pos 6498308 to 6498751)
gagctgttcactccccaatagagggattgtatcaggtggtgctttctttactgtagaagataccgatatgctagctactttcctccttagttacgcgagtttgataatgatagattagagcctctttgattgtttgagggatagtaagaaaatgacataaagtcaaatagataaaaataaatcctttccttgatcagttagttagtttatgactgctttttcagattctctgtcaactatcctgtagagagactttttagtcttcaagattagcgcttcattctctgtcaaacgagcttctcgctgaagttatgatagtagctctttggaacattatgcttgaaaacagaatttcaattccttagacaattttaatgatttaatatgtatttgatttgtgtaaatgtaggcagggcttcctcttgtacagcaatatctgttaca

SEQ ID NO: 41380 - DNA, 570 bp, Arabidopsis lyrata
  Intron number 1 from transcript 479301 (locus 479301) deri ved from phytozome v7.0 (chr-ID scaffold_3; pos 7740004 to 7740573)
tattcgtaggcgattctctgcttataagaatttcggtgagctccattttgaaatctctatttgttttcttttctatttgcgttagctactgattcgttagatattgtttctgtgttacctttggattgttccttctatggttatctcaagactctgcttcaactgatagttttgctgatggtaagattaatttggttctcttcaatttcacaattggaagctagttgttataagcttctaagtagaagctacaatcagtgtgaaaggtgcagactttttcatctttttatttgggttttaactgtctatttatgcatatatgtattgtccctgatggaataagttagaagctctctcttcttatgtttgagtcttgataatttgatatagtgagttcatgatgctaggatgatattggtttgcttgtatggtctctgacgttaattcccataaattcttcttatttggtttgcttgcttgtctttttatccagtgttttaagtggaaaagatgcttacgttttagtggtcatttcttacttttttttctgcagattcggaaggaaatttc

SEQ ID NO: 41381 - DNA, 473 bp, Arabidopsis lyrata
  Intron number 1 from transcript 931351 (locus 931351) deri ved from phytozome v7.0 (chr-ID scaffold_3; pos 20512088 t o 20512560 reverse strand)
aacctcctccgattggcccaaagagaggatccaaggtcacctcttcttcacttatccatacataatctatgatgcatgagctgtcaaaaaaaaaaaaaaaaaaaaaaaaaaaaaaaaaaaaaatctatgatgcatgtttctacttcgaaattttgagttaattgatagacaagtttggactatttagaataattttataattatggggttaatgtgaaacttatatgaagttttggcccctgtagatcattataaggaaataataatccttgtggtagaagaaaattcaagtttgattagatgttattagagaagattggactaatatttcagccaaattgggtgtcatcaataagttctgtgtctattttagggcatcttaagagctatggggttggggctaatgtgaaatttgtatacaattttggggacttacaggtcaagattctaaggaaagaatcctactggtacaa

SEQ ID NO: 41382 - DNA, 326 bp, Arabidopsis lyrata
  Intron number 2 from transcript 344104 (locus 344104) deri ved from phytozome v7.0 (chr-ID scaffold_4; pos 3670573 to 3670898 reverse strand)
gaggtaagaaactactggctctactcctaaatcattatctagttcaggcgaatttaatttagattcttttttagttggtgttacacgaatcagatagaatttgaaagccgataatgctaaatcgaatgaatgataagggaaaagaagttcttcttgtggttcttgaccattgcaaagatttagaactgttgattacatatgtatataaacttttggtgtatttttcgatgtttcgttctttactttccttttggatatgcaactcaaagtaatatctactaaatggcataggtaaagtcgttgcaaagttctgtgccaagtatcta

SEQ ID NO: 41383 - DNA, 645 bp, Arabidopsis lyrata
  Intron number 1 from transcript 489990 (locus 489990) deri ved from phytozome v7.0 (chr-ID scaffold_6; pos 21428308 t o 21428952)
gcgcttcagaggccgtcgctcttcagaaactcgaggtgattcgaattttactcatctcgattcctgttatccttttctccttcttcgtgattctctatgattttgagatgttattttgttttggtttcgaaatctgttggaatcggtaaatagaaagtgaaagtaacgatgagagtacgatcgtttgattattaggatgcttttctctcactcgttttgttcgtctctctcgcacagttatttcaattggtgatggttagggttgtaatcgaagttgattttcagaattttaggtcattggatgatctgtttgagtttctagaagggtttttgttcttacattgctctttagctcgacatttcccctgaattatcgcgttgatcatgtttagtacttgttcattgatgattatatgattttcaccaatgttgacagagtttttcttcgaattttgagagctggttgtagagtggtttatgctagtatcgaattaggaaagtttggtttattttttgttgtcttcatggttgccttattttgattaggttgatatgtatctgtattagtatcactatgtttaatttttcttttctttttttcaaatcttatgcaggaacatcgtggtgatcttaatcaagctgtga

SEQ ID NO: 41384 - DNA, 298 bp, Arabidopsis lyrata
  Intron number 5 from transcript 479740 (locus 479740) deri ved from phytozome v7.0 (chr-ID scaffold_3; pos 9935182 to 9935479)
atcttgcgacaactttcgcaaaggttagcattatttacaaacactattatgacaatcttaatatcttacctaccatgtcatggttgcatttgatgaactgataatcaatcatcttctgtttatcctggaaagctaacgaaagtaactacttcctccaaataataagagcgaagagcataatgcttgttgctttttttcagcttcttcttttagttttgacttgttgtcagtaattttaaatctatatattctcttttgtgtagttaaacagagttgttaccggacccaaacacccggg

SEQ ID NO: 41385 - DNA, 691 bp, Arabidopsis lyrata
  Intron number 3 from transcript 925230 (locus 925230) deri ved from phytozome v7.0 (chr-ID scaffold_2; pos 4704830 to 4705520 reverse strand)
gaggttggtaccactctttagaattacatcatttttatttatgatatctcatgtttcttgttggagatggtaattagcttgttgataatattgttgctccagagtggctcgacgaagtcttttgaggagctactacttgaaggttgtccaagttactccaagaaaatcctcttatcgctgatagattcccacttttgcgacacttcctcggtagtttatcatatacacactctggagatcgtcgaagtataaaataattgatctgcatacggagaagctataaggaaacgggtcaacactggatccaactcagcataaccttatttatcttttctcgtttgctaatgttgtttcaattttataaacagccacccaaaattgataagttttttgtatgtgtaatattgtaataatgataaacagtttaaaaaatatatataactttttgggtatttttctgcccttgtgtgaataatttcttttttggaaatttttgttacgtttaaaaactttttgggtatttatttttctgaacttttgttaaaaatctggattattgtataaataactttttgagttgttaatagaatcctggtaaaaaaggtctgggggattctctctcttctctctttcatatcttttagagagagatagcaattccttatgtctcgcaggattgttcagtgaatat

SEQ ID NO: 41386 - DNA, 428 bp, Arabidopsis lyrata
  Intron number 2 from transcript 489928 (locus 489928) deri ved from phytozome v7.0 (chr-ID scaffold_6; pos 20582197 t o 20582624)
tctgttcttgtcaccaacgtaagtattttgctatatgatttaaataatattccagaaacaatgaaagagagattcaaaaaaactaaaatcgaatttcttaaagaaaaccaaacttatttcatgaatttaaacacatgggttcctcttgaaagatctgagagttttttttttctttctcactgaaagctttctaaattttctgtgtaatcataatgttaaaagttgaaactttttttttctcatagaataatctttttttcctatgatattaataataacaataaagacattttatttatgtactagattttcttccaaaacaagagaaaagttaaaaaagtatttatctataataaaggactaatacttttaattaatgtctcattacatcaggccaacatttgtccggatagtgaaaaagaagtcag

SEQ ID NO: 41387 - DNA, 319 bp, Arabidopsis lyrata
  Intron number 1 from transcript 314348 (locus 314348) deri ved from phytozome v7.0 (chr-ID scaffold_1; pos 25254268 t o 25254586 reverse strand)
cttacgccgcaggcaaaagtatgtacaaataaaaaccatgaaccctaattaaagccctattagtttcttattactcaagaaaaaacatgaattttgtttcttgtcacccaagaattagataaatcatattcctctgctcttctctttcaaacagcatctcatctaactatgtacaaaaccttgaaccctaactaaaccccgtaacattaattgagctttagtttcacctagcttcttcttagctaagcctttttcatacttttgtttttggttgggattcttagctgggggtgatcaatactacaaccaaaaagttgca

SEQ ID NO: 41388 - DNA, 359 bp, Arabidopsis lyrata
  Intron number 2 from transcript 897054 (locus 897054) deri ved from phytozome v7.0 (chr-ID scaffold_5; pos 9834735 to 9835093 reverse strand)
gtcctcaggttttgcctcttttattttttataccaatattacttacttggtttaggttgtagagttttttcaaagtgagaaacgcttgtatactaggctttgactcataaattgccaaatgtggctttcttctgtcgatgcagtggtttgttgtgtttggtggctgcttgagcagtgattggacattgcacgttatcttgtggctgtttatggtttcaggggttttacttgtttcctaattttgtattcatactttactttgatttttggatttcattggatgatctggttattaactatactattcttaaaacattatgacaggatttggcaacccgtggtatcaatctcatcttgag

SEQ ID NO: 41389 - DNA, 238 bp, Arabidopsis lyrata
  Intron number 3 from transcript 947539 (locus 947539) deri ved from phytozome v7.0 (chr-ID scaffold_7; pos 21294504 t o 21294741 reverse strand)
ctgcacaaagtacaagagcttgtaagtttccgaacaactcttttgatttaagtctctaagttatgtgaaaagtttcctgttttaggaacattattcttttatgttctgcttacatgttgctccttttttttcttgcatttcttcttcttctcgacttggtcttccgtttcttatctgaaaacaaaaaatatcggaataagaagtgcatacatccctatctggactttctgaccaccta

SEQ ID NO: 41390 - DNA, 796 bp, Arabidopsis lyrata
  Intron number 1 from transcript 891656 (locus 891656) deri ved from phytozome v7.0 (chr-ID scaffold_7; pos 22333582 t o 22334377 reverse strand)
gacatcataattttcgtaagatttgttcattatgttatttttatgtcatactttcaatttagaaaattttaattatacacatttcatagtttttgagtattttgaccaattttcgctatttttgttttggtttggattcgactttttcgtgtttctaaaatttttggttacttaagaccatcctcaacggcaggatctcacaccaactctaataattaaaataatagaaaaaatagaaaaagaaggagagagaatgttaattatgagagaatcgttgcttaactttctcttttaagactcgttgagagattttagagaaactcaacttgtcagattcattgattctattggtagactttaattaattattttaaataaaaaaatgataataaaaataatatttttttgtcaacagacctctatttttgagatcctgccgttgaggatgctctaagatatataaaagaagaaaaataaattataaaattcatagttagaaggtttatttttgtgtcatatatagagtttggatatgtagattgaaaatatacattttaccattatttttattttttgttttagtttggattcgactttatttttgtgtttctaatattttaccattattttttggttatataaatggaagaaaataataataatcgaatctctaaataactcaaaacaataataatccaacttcatatttaatgttgtatacacaatgaaccaaaataatgtagtgtttcttttggtggtagtgttttttaacaaaggtgtcatcgtggctatagtc

SEQ ID NO: 41391 - DNA, 598 bp, Arabidopsis lyrata
  Intron number 2 from transcript 487432 (locus 487432) deri ved from phytozome v7.0 (chr-ID scaffold_6; pos 2327531 to 2328128 reverse strand)
taatcctccctctcactcagagtattcccactacggtatatatttctctttttaaccaaattatttgactcttttttttttatcaaataattttaatctctttttcttttgacattttttatttttctacgaatgaattgttcgtgtcctagagtatcgactatacaatgttgtcgggaggattaaaacattacacccaaatgtagatatttatagctaatagtgtacgataaattatatttagttctacaaaatactatatgcttcggtttatcaaaaaaaaaaaaatactatatgcttcattattaaaaacctgagataagtaacgttattatacagctattaagtaatagaagaaaaaaaaatgaccacctcgactgcttaatttctccaagttgtagttaatatagtagctatacacgcgcatataagagcgcgtgaagaagaccgtccaatcccctgggacaaacgtgctttttgttcagttgtgtacttttgtgtttttgtttttgtttttggtttctttcaattaattaatgacacgcacgtgtcggtgattacaggagccgccgtagcaacagcggctgagactcactcc

SEQ ID NO: 41392 - DNA, 768 bp, Arabidopsis lyrata
  Intron number 1 from transcript 949410 (locus 949410) deri ved from phytozome v7.0 (chr-ID scaffold_8; pos 12852201 t o 12852968)
aagagttcaggcaaactctggtacatacactttctctgttctcaattatggatgtttaatcaagtagttagtttagtgggagatgattattgaataaaaaaaaataagggtttgtaatctggtgaagtaatatgttgttgtcctcttgaaatgtgggaatttttcctagtttagggtgtagtataatataaaagggtgtttgtggattgaagagaaaacttttaagttagatctgatggagatgtatgactaagagcttttggataatcgttgcttagcgtcaagtggagattttttgatgaatcatgtaatcatcattgtctctatacagtagtagttcttgatttggttacagctttggcatcgtacctgtaaatcaaacattcaaacataagatagattttgatgcttgatcttgatgctttcaatgggaattcttttgaggacagtgaaacttgttagttagacgcgtcatttgtccgagctttaggtagatgaaacattgtacacacacacttgccaaatagtaattactgaatcatatacttgtgtctgcaaattaattgagaagtgtacttctccctggtttctgattctagttttgagttcctcatttcatttctcttggtcacagactcagagcagtaatggtcaatagtgtttttctttcagttgtaaaactgattcaagaaatgttgatttatagaccggtgttgtctttaataaactgtagattaaagaaagagcagaaaagctagagatctggaa

SEQ ID NO: 41393 - DNA, 425 bp, Arabidopsis lyrata
  Intron number 2 from transcript 312091 (locus 312091) deri ved from phytozome v7.0 (chr-ID scaffold_1; pos 4104658 to 4105082)
aatttgggaaagaacgtctctcgcattttagaggagtgagtcggcttttcgtttttcttcttcttcttcagctttctgcatttttactaaaacatggatttcatcatcaaaaaaacaatcttttataactatttgattgtgtgttgtcttgttcatgagttgtctctagtctctacgattagattaattgggaagacaaaaagttcaatgcttctgttaaacattggtatttaccaatttctgatctttccttgttgggagtggctttaactgatatagtctaacatgaaaatttcaacatttgtgttttatcttatttagtctacgatagcctttgttattgtctgttttgattggtcttgaattgtatttatgagcaagatggaagagagtttttatacattggttgttccttgcagcgcctt

SEQ ID NO: 41394 - DNA, 430 bp, Arabidopsis lyrata
  Intron number 3 from transcript 471888 (locus 471888) deri ved from phytozome v7.0 (chr-ID scaffold_1; pos 7066221 to 7066650)
gtcgataaatctcttttgaatctcgagcgattaaggtctttgttttttttttggttgatacttacttagctatctcttgatgtcttcttgagaacttgaattcgagcttcttttggcgaatttctccttttttggattgtgatcttactctgtttgtgctggttttatttcttccaagcttcatttgttctgaattttctccacagatctcgaaatccgtaaaagtatctcataaatgaatttaaggattatcattaattttccgaagttgctaatctgtttttaatgtccaaatgatcttattcctagttgtgaattcgtatcctttttggaattttgagctgatcttctactgattcaaataattcaatcaattctgtatttgtttttccctgtttcagattatccagtttgaagccgcgagcatcaa

SEQ ID NO: 41395 - DNA, 723 bp, Arabidopsis lyrata
  Intron number 1 from transcript 914024 (locus 914024) deri ved from phytozome v7.0 (chr-ID scaffold_1; pos 25543265 t o 25543987)
agatcacgagcgagattgcagaggtaacatgcttctttttttgaaccctttcagattcgttagctaaacatttttttcccgttagctaaacatgttcattagacagaaacgtacttgatcttcttattgtctatgttcatgatttttcaatagtcatggttttgaccagattgttaacaaagagacttttattttctttgatcattaaggattatgaaaattattcaaaaatctaatcttcaactcctgtttgatgaaccgcctctaaagcaatgaattgcatttaggtttgtttgatctatttattgattttattcgcaggatgagctttggaataactcatgatatctttctacaatgttcttaaaacaccaaagcttataagatatagctttcttcaagtctcttattgcttccagtgtctcatccatcaaaagacaacatatgtgtctcttatcttttggagctgtcacagccttcgcttttggactcacaaataccagtttcaaatacaataagttcgtagctcaatctctaaaattttctctaagattcatagctaaagctgtaaattaaggcaagagatttgctccttttttatttgcatgattcaggaagactaaaccctcaagaatattccactacgaaaagatcactccaagaaattcgtttgttttatccaactctgctctttgattagcggaaaacaaagatacgtagtca

SEQ ID NO: 41396 - DNA, 485 bp, Arabidopsis lyrata
  Intron number 1 from transcript 914924 (locus 914924) deri ved from phytozome v7.0 (chr-ID scaffold_1; pos 32186664 t o 32187148)
ctcttctgaagttatattcgaggagcgattcggtagctacatgttctctctctgtctatttcttatctagattctaagtgtcaatgcgatcgattaataatggttttatgattctgtttgataagatgattgatagaacttgttgatccatcttatatattccaattcaatataacttttccaaaatgcttgcttaagattgttatagatctttaggatttgtggattatggtttctttttgattttttgaggcattcctgaaaccacgggattacaaattttcaataatatttagtatgtgattgcttacgtgctcgaaactagtatagttcttatatgatcaagtccttgagtttaatatatcatacgcaatagtacgtatggcaagttttgatctaactaatgatttatgatatatattttcatttctgtatgttacatttttttttatttgttattttgttgtctatacttcgaaagacgg

SEQ ID NO: 41397 - DNA, 558 bp, Arabidopsis lyrata
  Intron number 1 from transcript 354582 (locus 354582) deri ved from phytozome v7.0 (chr-ID scaffold_7; pos 8985007 to 8985564)
ccctcgtacgtttaccttacatatgtgtggagacttgggatagagctcatggttcgcattctttttgtggtatgggctcatcaaaataactcattaaagtttaaaaactaatattgattggttaacccaattaattaggtggaaaaaagttttttgctcaccaaatgaaatctatggtaaatttccgtaaaacggtattcaaattttggagtaggaaagagtgtaatctttcacttttctttcataacttgtaaatatatttttttggggtcaactataacttttatcggtttccagtgtccgattttatttatttatttatgaatgtaaaatttattgaaacataaaaaaatattattacattacatgcaccataatgtcctagaaattatagcatcacttggttttcttgttttcttttctgaaaattcttgtatgcttcggaaaagaagtcaaacacttatgattctcttctctcttttaatatacatgtcaaagaaaataaagtgttagttttttttggcctttttttatactgtttttcttttctagttgggc

SEQ ID NO: 41398 - DNA, 378 bp, Arabidopsis lyrata
  Intron number 2 from transcript 496535 (locus 496535) deri ved from phytozome v7.0 (chr-ID scaffold_8; pos 20968736 t o 20969113)
aaaagttggaagagcaagccttaagtctcagagtaaagctttctgcaattttcatctcgttcattttctatcagaattttactacatttgtacagtttttggtgtcgatttctgtaactgtaacttacatagcattgagtttgattcatatttcttgtattaagtgttcttttttgccattgtgtagtgtaagtgtttttatcattatagcttaagcggttctagaaccatggacatgttgataattttttgaatcaattcagtcatctggtcattttgtttcgttgttaataaccttatgggaaatgattattttgttcttctcggttggcattaataaactgaagcttttgtgcatgcaggagattgcaaagaaga

SEQ ID NO: 41399 - DNA, 475 bp, Arabidopsis lyrata
  Intron number 4 from transcript 472021 (locus 472021) deri ved from phytozome v7.0 (chr-ID scaffold_1; pos 7572997 to 7573471 reverse strand)
tatttggtagtccaaatcgtaaatttacccaccaggtatgcttttgccatttatcctttgctctactatcaccaagttgatcagtagaaattaatctttatgaaatgatcaagctagtttttacctgtttcgaaattcttttgacttttcttgttgtatgctaatccctgaaatttcttgacgcttttactggattcatgctatcacctgtcgatagtacaaaatgtgtcatgtagtcaacagtctaaactcaagcaattgctatctcatctctgtactacaaattttgccattaaccggatccttgacctttagctatttctgctttctttgtttccctttgaacaaccacaattacaatagaatccatatgagctctgtttcgaaatgcacaatgcaccttattttctgttttttctagttgttatatgtcttcatatcttgatacatctgataatgcacaggtgtttgctag

SEQ ID NO: 41400 - DNA, 375 bp, Arabidopsis lyrata
  Intron number 1 from transcript 359442 (locus 359442) deri ved from phytozome v7.0 (chr-ID scaffold_236; pos 306 to 6 80)
gggttctccttcatatctccctggagagaaacccttttgatgatttcttcttttttcaagaattgaactttttgttgttatgaacaatccagaaagttgtgtgcttttttgctaaaagaaggtttgtggtttgagatcagaagcagttgcagctttggtctaacgtgagaaactggtttattgctgtaatttggatcaaagctatttaggtggtggttttattttggccctttcttgtgattgtgaatactatttatttttttgtgactacaaagagaacctgttgttacccaaaagcagactcaaatcaaagccatgatgtaaatattatcgtttgcagagagattgaggggtgaacaaagcaaagggatccgt

SEQ ID NO: 41401 - DNA, 601 bp, Arabidopsis lyrata
  Intron number 1 from transcript 945849 (locus 945849) deri ved from phytozome v7.0 (chr-ID scaffold_7; pos 8494559 to 8495159)
gtcagaccgagaaattagccaaaccaatccttaaggttacctcattaaccaaaaccacattcaatttttgcgtttgtgtctccttttaccacacagatcttatcatttatgttttacacattcaattctatctattacttgtgattttggtttaagaatcattagggtttttacaagttctctgtctcgaaaactttcttatttgatgcagacattttaaaaagggtattactttatttcgtcaaatatggtttatctatctgttctaagtttcactcttttgatggtgtctctgtagattgaattttgtttctaacatgcaggctatatataatagtacttctttgatttctattgtgtgttctctcttctatagaagcttaaagtgtgacactttgtgtttctctaggcaaattttctcgccttgcctatagattaaacgagttgcgtgattctggaactggatttgttgtagtatggtttttatctgattctatttatccaagtatcttgtgtgtatgtgagtgactgttcttcttttcaccgagattccatatttgtattgtgtagaaaaaagccggtactccagggaggtcgatcg

SEQ ID NO: 41402 - DNA, 810 bp, Arabidopsis lyrata
  Intron number 1 from transcript 911478 (locus 911478) deri ved from phytozome v7.0 (chr-ID scaffold_1; pos 7012321 to 7013130)
tcgagcgcatcaacgctggttctcgtcagcacggtgtacggttttcccccgatttcttgcctgattcattgctaaatgcattgattcgataaaattatcatttgtttaggaatgatgagataatctatcgaattctatgatgagtttctgttaggatggaccttgggatttagggttttgttatgttaaattcggtgtttgatttctcccgagtctggtagctattataacaagttgtagtttgatctttcaaacagaacttgatggaattacacagtagttttaagttgtttgctgtattctagagatttttcttattcagtggcactctgtgtttgcatctacagattgatagaaatagaacttgttgggtatataactagaagcgaatgatttagattgaatcgttgcattaagtgcattttagatggcttgttttcttcagattaaggatgtgaatgtttaccttagagctcaaagatgcttaaagaagtgaatcatttcgtgttggtaatatgacaaatacatttcctgtcaataactgaaaccaaaccatgattaattcctaatacaagcaaacaatcatatttatctaactcggttacctcgtttcagctttgtaacacttttgttttgtcctcactttgtgacttctgttcacttctagtcttgttgcttaatttttgtttatctctttcaaatatatgctattataatactctgtttcttgtgaagaacatggaaatgacatgtttgattggaatcctaacatctaaaacttgaaacaggtcaactacggtaacttcatcc

SEQ ID NO: 41403 - DNA, 439 bp, Arabidopsis lyrata
  Intron number 2 from transcript 945679 (locus 945679) deri ved from phytozome v7.0 (chr-ID scaffold_7; pos 7690075 to 7690513 reverse strand)
ggtcaaaaaccaattaaaggctctcctcatcctcggttagtcccaactatttttcatactatttagcatcgatataatccacacatatacatcacaatcattcactagattcaacaccaaaaaatcaaaatattggctagaagattagaaaattgagcaacttgtgtattgtcaatattagtaccagatagattttttaaaaaatgtaattgttttttttctatattggttgtaccaaacatgtcgtctagtagaatagtagtgggttcagtttcacgctctttttgacttgttgtttcctagaaaataaatttgaaaatagaaagccgagagttaagttgactcttgtgttctcaataattaataaactcgaacttggactcggtgttgtgtttcatcaacaggggatattacaagtgcagcagtgtaagaggttgtc

SEQ ID NO: 41404 - DNA, 250 bp, Arabidopsis lyrata
  Intron number 1 from transcript 491601 (locus 491601) deri ved from phytozome v7.0 (chr-ID scaffold_7; pos 4355311 to 4355560 reverse strand)
aacacctaccagcgtcgatctgcgattcccgataggtaaatcgatcatctttggcggtttttcttctctttaggttcttcgagaatttctacattatttgttttcttcagatgaatcgaaaataagcgaccctgattttctgggttttcttaaagcaaatccctttgatttaatcttgcagccattattaattgggtttctgtttgtgtgtcacttatttttgggtattcagaagtcaagtgcttaaagg

SEQ ID NO: 41405 - DNA, 602 bp, Arabidopsis lyrata
  Intron number 2 from transcript 945403 (locus 945403) deri ved from phytozome v7.0 (chr-ID scaffold_7; pos 6569927 to 6570528)
tagaaaagaagctgagaattgcgactgcttacaaggtaagactcactcactctccatttccatgtttcgttatcaatcgagcttaattcagtttttttcgccttttaattttgtcaattcgaagtgtttagagttgtggatttgatgttcttgttattgattcaaacgtttgaccaaattatgtttggtagtgtatgatgagaaacatacagatctattaattatgggactttggcattgagatgattagatttttgattgtcaatgggaatactaaattgtatctttcataaacatcgttggctcctaatcttatgttagttccactaatctctctcacctcattgccaccaattctcatcatctcatcatccattgcttcaatggcttatgtttctggaatcaaagtgagagtcaaagtgatgatctttgttgcttcaatggcttatgtctatggaatccaatcttgagtgatgaagagtatgataagctcaaactgaaactaaagacatagaagttggtaggaatcttggaaactggattcttcgttggcttgatcggatgaaaccagcagctcagatccgtactcgaccattctggtg

SEQ ID NO: 41406 - DNA, 763 bp, Arabidopsis lyrata
  Intron number 2 from transcript 942815 (locus 942815) deri ved from phytozome v7.0 (chr-ID scaffold_6; pos 20040427 t o 20041189)
ctttcagattcttgtttcggaataatacagacgaagcaatagagaaatgatgtatattccatcagatggagactgaccagcggcaaagttactttacctgaaagccgaatgttactatcttaggcattggctatttttcatgtaagtgcctctgcatttcgaaatttagagttagaaatttatatgtgatagcaattattttgtttcgatttgataattagtgctgttaaacaaagaacaaactggtttatagatgatgactggttctctttccatttaaatcttgaaaggaaaattatgtacataatacacaaaaggcaaaggaaggttgaataggtctacattatcctaaagtatagtaacttaatacttgaatcatgtatatatatgtatcatgtatgaaataaattatcatcttgatttggttagtatgtacaaatgtcttgaaatgcagaaacttatgtttctctctgcatttttaatggaatcatatgacaaacattttctctcaataggaatttgctaaaactctaccatcgttccctaagtttatgcggtgtcttttccgagaatggtttacgggtgaggacacttccatcaatgcctgcttcaagtagcctgactttgaaatacctgttttgactgttatgtaagatttcttccctgtcgctatctagccagaggccacatttatattgcggttaaacattggtttggcttgtatacagtgcgactgttgttgctgctggactactaagagtat

SEQ ID NO: 41407 - DNA, 511 bp, Arabidopsis lyrata
  Intron number 1 from transcript 931379 (locus 931379) deri ved from phytozome v7.0 (chr-ID scaffold_3; pos 20685313 t o 20685823 reverse strand)
gcaacgcttctggttagttaatttgtatatttccgatgaacttgaaaaaatacccaagattttctctggttaatttcagtaaattgagaaagatctgcttcaattttaagcttcgttgtgctttaatcgatcgttaattgagttatttttagtagatacattgacgttttgagtttttgattttagcttgggacacgatggtgttacatctagagcttcttcaacaattctagaccaggaagagtacgaatccattttttgaagaaacttgaagctccttgattgatgttgtacccttgttacttaatggatcaaatccattcttcaatggaggtatgttacctagccacgcaacttgatatgtttgttgttgcttgtttctctgggaatacctcaaaaccttgtagatatttgggttgatacagctccgataatggttgagaaccttcactttctgactttacctctttatataggttaatttgcagctattagccaccagctaccttca

SEQ ID NO: 41408 - DNA, 939 bp, Arabidopsis lyrata
  Intron number 5 from transcript 481483 (locus 481483) deri ved from phytozome v7.0 (chr-ID scaffold_4; pos 6180973 to 6181911)
cacttgttgctgctgctagggctggaaaatccaaggttaggttattctctttgtctatcgctttgctcgtctatctgctgctgaccttccttttacctttccttttctatcttctcttgatacttttgttattctcacaaaggcagctgcccctttattgacatattattctctaaacgtgtttgaaagtcatgatcatgctatacattttgtagatagctctatactatgaggtttttctcagaagtcagatgattgactttcaaggaaagacggattgattcacatggaatagaggaaaaaaatataccataaaactataaaagcaataactgtgaaatcttttagttacattagacttagtagagcagagagagaataatttatgtttgttttacgcagaatttgtggtcttgactccccagagtttgttaatttgaagcattaagctacaaatctagaggactgaactttctatatgtctggacatcaaaaagatgtgggattatccttgcaaacttaaactaggtggcatagattcaatggtcttaaatgtagcctaacacgagatacaaaggatgatggagaaagcaacaatagtgtgagtacttgagaaatgattaagggagggttcctggttgcgcggtgtgatattccttcctaattaagaatatgaccttgcatagtaggatttatttggtctttatctggcattatttttttaggtttctgtgattcatgtgcattggaattatctctcttacgaaatggtgtgctgctagttaagaggtgctttatatgatcagggatctctctaaaatgaatttaggttaagatgcattgtttgcttggatatcttcttggacataaaatctttcataaattttatatttgatacgactgttttctgcttctttaatgtccagtttattataggtg

SEQ ID NO: 41409 - DNA, 756 bp, Arabidopsis lyrata
  Intron number 1 from transcript 893177 (locus 893177) deri ved from phytozome v7.0 (chr-ID scaffold_6; pos 5099502 to 5100257)
gtgagtattggcctcaattccttttataactcatcacatagaagtgtttgtttctaattgcccatataaatgttttcgttttgattatcactccactctacattgggtggggtctcggtggtgtgtttacatttctctaagaaactcatctcaatggattaagatcattttttctttgtctatgaaactttttcattgattgctgattttattctttgataaataatcttccacaggttctgtctggtttgctaacgagatgaaagcactttgtgatggttgtgaacagtttatgtgcttccccccaggccacatctattcaagtaaacaaggttcgcacttcatatctattttaaaatcaaatactgacgtttcttggctgactcatattgtagtggacacgctcacagatatcaaagttgtcaaattggttttggttatggatttccatctttttagtaagtttgtgttggggcttttactgtgtagtttcatggaacaaacctttcttgtaggtgggcttaggaggttgtacaaccccccgtggttctctgagttggttccttcaaccccatatgatcccttagcggtgcgcaatacttttgagaaggtaaattctggagctctatcctcctcaaggtctcgaatgtcaatttcattatactgtttgtatagctgcacattcttctctgatatttgctgatctggttctgtgatcaagcaaggggaggagctctttggagattacgagtggga

SEQ ID NO: 41410 - DNA, 389 bp, Arabidopsis lyrata
  Intron number 1 from transcript 933385 (locus 933385) deri ved from phytozome v7.0 (chr-ID scaffold_4; pos 13372296 t o 13372684)
tcttggactaaggttcttctctattcttctttgatttgaatcactttcattttttttttgttttttttttttgataaataactcactttcgtctttctatggctttacatatgtttgatagcctcacgttgaattgaggagctttccagtgcattcaaaaactggtccttctacgttaccttaatctacatgttttggaaaaattagaaaagggttttgatttttattgtcttggtaagatggctcatgtttgagtgtgaaaatattggtagagttaacaataatccgttgtagcatcttaacttatatctcttagttacaatagtaatggttgtttgttttgtgtttaaacagtcatttaaaactaattgttgcctcactaatttgga

SEQ ID NO: 41411 - DNA, 302 bp, Arabidopsis lyrata
  Intron number 3 from transcript 930656 (locus 930656) deri ved from phytozome v7.0 (chr-ID scaffold_3; pos 12735512 t o 12735813)
ctcacaaaggggacaagatcaaggtccattatcgggtaagttttatcgaagcttctattagttgtataacttattgctgggaatgttcattcttgcttgcctgatagtattttgattgagagaaaagaagagttatggaagagttttcttcttattgtaacatttaagaatgttgtgattaccttcattagtatttactaaaatgttgttattggatagcttagaacaaacaaagataatgaatctgatcgaaaaagtgcttgttgattaatgtagttctctcttgcagggaaagttaactg

SEQ ID NO: 41412 - DNA, 375 bp, Arabidopsis lyrata
  Intron number 1 from transcript 470757 (locus 470757) deri ved from phytozome v7.0 (chr-ID scaffold_1; pos 2694968 to 2695342 reverse strand)
aatcttgtctcggtgacaacccctacgtgcgagtaatttctcgattcaatcttagattttatgttacttgttttgtttcagtggctcctgaatcttctttgcggatctcatctcttgctcgttgatgtttttctgtatattggagtggttaacttagtaatttaggttttagggttcaggtagttatcaaattcgtcggaagtttggttttttagatccaaattcgtctagttatagttcgaattgagtatagctgctgattcctttagctttcagctgcaaatgttttgattaggagatagaagcagtttttgtttgtctgagatgcaatttctgattgagttttatctgttgatatgtagactaaagcgaatt

SEQ ID NO: 41413 - DNA, 652 bp, Arabidopsis lyrata
  Intron number 1 from transcript 908051 (locus 908051) deri ved from phytozome v7.0 (chr-ID scaffold_2; pos 10295851 t o 10296502)
ggtattgtgcaaggctggctcaatcatctagacaaaattgaataattggcctagttttcgtatatgttctaaataaatttatcaaatttcttctataaaataacatgttatatttatattcgtctgtggtgcagaaaaaaataaataataataattattttcgtttgttaattaaggagattggtcggttcaaaagttttttctaatttctctcatcctctatttttttttttaaattcaattttaacgccactttttagttcaaatattaatttcagtgtttatatataaacattcatcttcaaaattagaaaattaattaaaaaaaaagaaataaatcaatgaataactgaaaaaaacaaaaatgtaacatgttatattttcaaattactttaattatttttgcagaaacatctaagtaatgcaagatctcggccaagagagtcaatggtcttatatatccaatatacacaaagcctctttgttgatcttcctccatcttgtaatcttaatcttgatcctctccaccatactaatgaattcttcattttttctatgcacttttgcagctgcaatagtcttctttacgctttttagaaaattcatattccaaaaagataacaaagaaattgattctccttctatatctcct

SEQ ID NO: 41414 - DNA, 486 bp, Arabidopsis lyrata
  Intron number 1 from transcript 478823 (locus 478823) deri ved from phytozome v7.0 (chr-ID scaffold_3; pos 5830971 to 5831456)
ctctttaccatcctggtgttttggctcctcctcaggtttttttacctttgattacatcttcgatgtgtctaattctggtccgaaattggattctttttttgtaagttttaatttcgtttcttcactatcgtctctttcgtgggtccttttattccgggtctggtttagtctgtgttcatcattgaagctaaggcttgttcgtattttgtgtttcttttttctcatttgatgattgaatggatggctagggtttccagatcctgtaggctagcaattcgttcctttgtcttttgatgatttcttttttgtattggttttgttgggtcattaccaaattgagctggtatttaccttttcaagaattgcattttctcatggggatagaaaaagaaatgatttttcttcttttgttgcaatcttttttcattttttatacttttggcatttgcagttagagcctgttccaagtggaaaccttcctcctgg

SEQ ID NO: 41415 - DNA, 825 bp, Arabidopsis lyrata
  Intron number 1 from transcript 478627 (locus 478627) deri ved from phytozome v7.0 (chr-ID scaffold_3; pos 5071677 to 5072501 reverse strand)
gccacttcctcctggtgtcaaacgcacctctgaaggtatgctctttttattttaccttactatttctgggatctgcatcattttcttatttattgcttgaaaactatgccgcataatctgaaaattgaaagacttcagctttactttttatctgctcatcgtgattctctagtcctgtagcgaaaatgagtgtttttgatggtttgtttcgtcaattgcagcataaaaaaatcagctttaatgattttgttttatatttggtcaagcacaaggatgctgctttgtgttcctctgtgctttctcgttagctgaaatagaggttgcattggtttggccaattgctttgttttgagtttgaacaacgcaaagcttgaaagttagaatcatctttaaggggatgcttaggtattcagatcgaattgcatctacaaactatatagcttattctagtgttcttgattaagtctttcttgctttagaatttcctaaagacaattgtttttaaatttgacctcaatgtttttggtgtaacacttagtgattttgcagaattgattgatgatttatgttttgttgtaactccattgtttccaatagactttaaaaaatgattgtatgtaagccataatttctaactgtaagtttaactaaagatactattgatgctatactttggtttctgctgtagtgtatcgtacatttattaccccaaatttattttcaaattatacttatactcggtatatatcttctcatttcgttgtatattattgtttattatgtaatttagcgctctactatccgactctgttgggtgcccataat

SEQ ID NO: 41416 - DNA, 492 bp, Arabidopsis lyrata
  Intron number 1 from transcript 897020 (locus 897020) deri ved from phytozome v7.0 (chr-ID scaffold_5; pos 9347547 to 9348038)
tcattgaggttgttgtaatctgtttttagaataatgcttatgtaagaatgatagtttaagaatctgttttaattttgtaggagattccaaggagagaatttcacattcctcagccgttaatggatatcattgtgagtaaggttggtgaagatggtgtcgatgcgttgaagaacttgttgctcgctgggagagaggggaaggatgctgttctgtcgaagaaaaccttagcatccgttcgcatcgatatggaccatcatttcatgtggtggtcaatgccacattcaaagtactacactttctaccaaaagtgtcttgccgcgaataatccgtatgcacagtttgtagagaagcacaaaggactgtgttatgagtcgacgatagggtactttcagatgagatgccgttggaatgtcacacatgataaacgcatggtgacatgaatgtgtgcgtggtgcagccatcttttcagcccggaagggtcgggaggccaag

SEQ ID NO: 41417 - DNA, 179 bp, Arabidopsis lyrata
  Intron number 4 from transcript 481500 (locus 481500) deri ved from phytozome v7.0 (chr-ID scaffold_4; pos 6492372 to 6492550 reverse strand)
taaaggtaaattatttcgtttttttcttctagttttttttttttgtttttgtgtttatggaagtattaagtatgataattctttactagtctatatactcctgcctgtatccataatgatttgatttgtagtttaattttatagatagttgctgcgagctgtgtctggcttgcatcaaa

SEQ ID NO: 41418 - DNA, 936 bp, Arabidopsis lyrata
  Intron number 1 from transcript 340086 (locus 340086) deri ved from phytozome v7.0 (chr-ID scaffold_2; pos 18616255 t o 18617190)
aatcttatcaccggtaagtcgtaattaattttgacattgacttttttgacctttgtcctgttttttggttagatgttcaactttttgtttatcagtgtagaggtttttaacctctctacacctcaaagcttcatgctttgtcatcatgaacacacatacacaaataaagcatttaatggagaagaagaagaagagaataaacatagcaagagaaggaagaagaggagcacacaaaggatttgttaacccggttcacggcattaattaacgagccactacgtccggttaggatcgatagatcctcaactccactatgaagaagaaggtgtttacaaatgatacaagtgattatctaaagctcttaactagctaagattcactgtctctcatcatttgacttcttaagaaactacccaaagcttacactttcttgtttctaaaaccccctttcattctctctccatagatctacattgtgctctgctctcacacttcttcacctctatctcatgtcttcatatatgagagaaaacttcaaacctagtgtagccaccaaaaccccaaaagacccttctctttacacgctttggattttcccacaaacgctcctttagtttgaattcacatagagacaaattgtccttccttggccagctccttgtgctcctagaaatgtttaacttgaccagagatgattcacatttaactctagttaacatctctgtttttaccttgtttacttgagcataaggttctcatttgtacaatcagtttgatcgaaattatatattgaaaattgttagattcaggggaattatgttttcatccatttggtcaaaatcaattaaccttactcattgattgtttcttcatttcaagaagatttttttgctttcatatattgtttcaaattcactctttttcatatattctcag

SEQ ID NO: 41419 - DNA, 735 bp, Arabidopsis lyrata
  Intron number 3 from transcript 903003 (locus 903003) deri ved from phytozome v7.0 (chr-ID scaffold_3; pos 460934 to 461668)
gtttcagattcaagaactacgcaaaccggaatccggtttgtcatctctcagttgctgaagaagacattgtgaatttgtggcttgaaccaaatatttttttgcatgtattcttggataaatgtatttctcgcctataataaaataaattgattaattactcttgtcttgtttttctgttttgttaagattaaaccgtggaataaaaacggatagttaactctgtttttttacctaacttacaaattatttgacaactgtagtgagctgaaattgttttttttttttatttgctgaattatctggctaaacatagaggggagctagtattaacagaataaactttgattagtcatctacttatcttgaacaacacatgtcattacaattgaactaagttctcgtcttaatctcgttactaactttattcaattgcaacaatcccttagtttagttcataaatcgtttccgcatagataactaataatcttagctaactaacaacaaacaaacaaataaaaacttcattgagacttattgttattattttttattttttattacagcgtataaataaacaaatcctcataagtttatgtttaaatcttcttcacaatctcaggtgtgattcatctgtacaaattatcaatcatttctacaagacaaaaacaaagcgctctgtttttttcttcttcttaatcactcaatggaaacagaaactgaaaataaagaacatca

SEQ ID NO: 41420 - DNA, 952 bp, Arabidopsis lyrata
  Intron number 2 from transcript 488766 (locus 488766) deri ved from phytozome v7.0 (chr-ID scaffold_6; pos 7850620 to 7851571)
aaaggtcgtgacgtcactcgctgcgtgcttggcttgtacgtaatctttaactcattttctggttctcttttactagtttagtagttcaggctttctttggttgattgtgttaaggaagcctttgtgttgattttgaatatggtagtgagtatcacatgattgatttagggttccaatcttagtgtgtaagcttggattcagaaatgggagccgaacgggtcgagatttcggtgttgatttaaggacttcacgcaattaggaacttcagggattacttagttctttttctgaaatactgtactttcactaactgagcaaaagtatctgaatacagtttcgtggattctctttccaacaagcttgaactattcttagccatagggtcacctagatcagccatcaaatctttcatagagctcaggtcgttttgaacatgattaatcaacgagtcaaagtttgtatatggtttagagttcagaaagagctatacgtggcttgcttgcattttcagcatttgtgaaatccttgattccgcaactcatgccatgtaattttccccatcatgttttcttgtactggtacacaccaagaaataattctactctcatagttggccaagtagagatagatttataccactaaaagccattaagcggccatttactttccctccggctgctcttctaagacttagcattgatgtttataagttgattactcgtatacaatatgatgtagtgctctgatagtataatatcaaaataagaaagactttgaactctttgagcatagtgaccagcaatctgcatcactcagaccgtagattaatgatgttaggtcctccacgttcagacatcatatgattacctccggtaaagcattagttttttttttactttttctgttgtattttgcaggctgaaggatcttcaccagaagtgccaaaaggaga

SEQ ID NO: 41421 - DNA, 638 bp, Arabidopsis lyrata
  Intron number 1 from transcript 947423 (locus 947423) deri ved from phytozome v7.0 (chr-ID scaffold_7; pos 20599892 t o 20600529 reverse strand)
ggtctctgggattcacttcttaattggctcaggaggtaaaaatttcttcttttatcaattgtatcaaaaaccagtcttttttgttataccattgaactagtttatagttatggttctgggtttagttaaaacgttgccaaaaaccaattttgctcacaaagagtcaacaaaatggtgtcacttgttgtgtttcaaaatctcaaacttgtcttgagtttcttaggctgtatcttttattgttaccttatatgaattggttcattgagaaatctacccttatttatatgttcttgtgtattaattctctttagttgattgagattttaatccatttgtggtagtgatgctttgtgtgatgttgttatgcattaccaaaacttgtaaaacagaaaattgtctaatgattgaattgtggaaacggaggataattatagaatggttaaaagaagttggttttagttgattattaatgtttgttttgttgtttctagttatggtttttagttggttattaatgttttgttgtttttggttatacttatgtttttagtgtatagcagaatcacgttttggaaacattagattttgattctgtgtttgcttatatttgttgtgtcagcttgttcttcaaacaagag

SEQ ID NO: 41422 - DNA, 483 bp, Arabidopsis lyrata
  Intron number 1 from transcript 918706 (locus 918706) deri ved from phytozome v7.0 (chr-ID scaffold_492; pos 49 to 53 1)
agactactgtgttgccaccaacgaaactaaaggaggtaatctctctatttgttgaatatatatagcttttaaaacaaatttgtaaacacaaagacgaaatacatatataattttgaatatatatagcttttaaaacaaatttgtaaacactttttgaatatataaagcttttaaaacaaatttgtaaaccgccacatgtaataaataacacatgtaaaccaccacatgtaataaataacatacatacacacaaataggtttttttttttttttggttttcaatgttaaaaataaaaaaaataaacctatgtattgttttatacgtaaagtttatacataagaataaccctatatttttatgttatttgatatggaagacgatgttatgataaaatgttaatgtaacttattatataacgttcaaattcaagcctacatttcgtcgtttttttttttttttttcttttcttgtagttttcgtaa

SEQ ID NO: 41423 - DNA, 566 bp, Arabidopsis lyrata
  Intron number 3 from transcript 474623 (locus 474623) deri ved from phytozome v7.0 (chr-ID scaffold_1; pos 29423745 t o 29424310 reverse strand)
cactgcagctggtgcggcttctgggattgcatctggtataatctacaccatacctcttctttaacagtttatgcaccttctatattgatatctatgtattattggattgtcaatgcacagaacagcaacatagctccttcgctctagtaatatgctgcttaacattagctttaacctggtgaatttaattaataaatgtccatactaggttcctggtatctttttggcttatgcaatctttgtggccctcgttcttttcgctcactctcttggtcccagaagtgcgtatgtactatataattatagcctacaactgtgcctatggttcttaggttctactactagacaaagcatctagctgaaagtaattactgaaaaatagtttacgtatggctattttgaagtatgatcgtgggtaatggtgtttcttactaaaaataagatcactaagataggcagtacgtttctttgtttttcccaagcaggaactcaatttgctgcactttggcttgttcattgtttaaaatctgatttttttccatctttgtttctcgttacaggtttca

SEQ ID NO: 41424 - DNA, 410 bp, Arabidopsis lyrata
  Intron number 2 from transcript 496352 (locus 496352) deri ved from phytozome v7.0 (chr-ID scaffold_8; pos 20203198 t o 20203607 reverse strand)
actttggagcctgtttccactatcaagtaaacaaaacaatcttctctgactctctttttctttctatcctaattaggctttgcttgcttcatcaatgcttctacgctattctgaatgactctgtgctactattgaacttgcactctaaattatttccagttcttaaaaagaaataactgtttcatacaactttttctctgaattcctagtcatatctacaaattcaaatacatttctgtttttttttttgaaagatccatcctgatgccttggggttgagttgtgcacacgtttcatcatgtttccttatagttccttctggactgaactaggaaccagtagtctttaactcttgttcgtgtttgactgtggcaggaagagaaggcaataggaagaggaatactaccctt

SEQ ID NO: 41425 - DNA, 302 bp, Arabidopsis lyrata
  Intron number 1 from transcript 496352 (locus 496352) deri ved from phytozome v7.0 (chr-ID scaffold_8; pos 20203959 t o 20204260 reverse strand)
tctgagtcggagtcaaccaacggagcgaatttcaggtgatttctctcttatcaatctatggatttagtgaatgctcagtttccataattttacttggattaagcagcgcttgggattctccgtagtgatcttgtttagtcatcagctagtttgaatgagaagactaggggtttcttctaattgaatctagggaaaatgtaaatcaggatgcatattcatgcctcaattagccaattcgatactatcttgtttttgagcttctactttgattttgtatctctcatgtttaggtagtgctggtg

SEQ ID NO: 41426 - DNA, 681 bp, Arabidopsis lyrata
  Intron number 3 from transcript 495379 (locus 495379) deri ved from phytozome v7.0 (chr-ID scaffold_8; pos 15507069 t o 15507749)
cgtgtctcttcttcttctccgccgtttacgaccaggtctctcattattacatttctcttgttcttgttcgcggctaatctttcttgttcgctcgcatttgaggttttgattcttccgatgttgatgaaacttgattgttaggggttttgtatccggtttgatttttctctgttgcgttttgatgattgagaaaggttcgattttggtatgattcttggttttaggaaccctattttactctttctctctgcaataaattaaaaaagacatattttttcgtctacaaaataaagccattggtgggtgcaatactaaaaacttcgtctttttttggtagatgaatttcctaagttatacacttctataatcggaccaaccgttctctataaagtcttcaactttccaacttgtaagatttgttaattaatgttgtgaagatttagcttcgtgggtaattttctctcttcacctcttgttgatttggttctagggttaaatactaaacctttattagttctattttggtttcgagaatttgctgaatctattcaacggtgttagttttaagtcttgctacttattgattctgtgccttcaagttgtgtgtggtgtggattctcatggtgtgttgcttttgtttgtgtagtatacagaggctggagctggggaagaaaaggattg

SEQ ID NO: 41427 - DNA, 396 bp, Arabidopsis lyrata
  Intron number 1 from transcript 933088 (locus 933088) deri ved from phytozome v7.0 (chr-ID scaffold_4; pos 11023931 t o 11024326)
gaaaatacttttcagatcttcatcattattcgagggtaataggtttcttacatctataaaccatattgagtgcgtaagaaataataaaaattcaataaatttaattaatttattatattggttctgatggcataaaggtaagaatatattaatattaagattagatattttaaatgacaaaaactatttcgaataacaaaaatgaattcgttagccaagtatttaaaaaattttcatgtacatcatcggcacggacacgggacaccttgaagaagatctggaaaagccaaaggttataacattgaacttaagaatttcatcaaaaagtaaaaaacaaatttttttacaaaaaccctaaccttttatgagcagctttaggtttggagtttttggctg

SEQ ID NO: 41428 - DNA, 773 bp, Arabidopsis lyrata
  Intron number 1 from transcript 949602 (locus 949602) deri ved from phytozome v7.0 (chr-ID scaffold_8; pos 14039989 t o 14040761 reverse strand)
cgccgcagctctcaacgatctatctcctttgattggcgatgttaccgccgccgctgctaggtttcgatatggatctgtttcgatggaggtggtgatagcgtacagtccaaatgatgcaagggtaatcttttaaggatcagaatgtcatatcttgttcaacactgaaaatgtctagaacttatctttgattttatttgttaatacaataaccaaatcatttaaatcaaattgatcttcaacaaccaaggtagtttagtgttaggtagaatcttctttggaaatagtttatgactcctggttccagaactggtagctacgggatggtaattacaactttacaataaactatatagttgcatagatgaaaattgaatatatgcgaagattagcaaaagggttttcccaaaactataattaatactttactttctcatatgacaaaacattcttctcctttagactcttcttcaatcctatttatatatattcatccttctgagtcattcttcaatcttattcattgatctgagttattttgcttgctccttcaaatcttgacaatggcagtgaacgttgatgcagagtacctcaaagagatagagaagactcgtagagacctttgagctctcatctcttccagaaactgtgctcccattatgctctgtcttgcgtaagatctttgctctcagaatcattctctgttttcctttcttttcttaatctttccaaatgcaaattattgtgtgcatatagatggcatgatgcaggaacct

SEQ ID NO: 41429 - DNA, 954 bp, Arabidopsis lyrata
  Intron number 1 from transcript 490048 (locus 490048) deri ved from phytozome v7.0 (chr-ID scaffold_6; pos 22047621 t o 22048574 reverse strand)
tttttttccttccttttggagctcttttgaatcaggtttgttttgtttgaattaattaatttcaacgtttttggctttttcacaatgtttttgcttaatctttataaattattgagagtttttggatctagctagctgagttgttttttttcttctaatgacaaagattgaaatattttttcgttctctgcatttttaagacccgtttatgtttcgtcgtacattacaatattagtttccctattagattcttctgcagaaacaaacattttcacagtttcgaacaaaaattggtcgtatttgggaattaaaacgcacgcaattttgtcctcacacctaaaattctgagcccaaactacagtttttttttctttttttttcaaataaatataactctccataaatacagatccatcgtccttattaaaaaaaaaaactgaatagacaatttttttttttttgcagtgtttcaaaattgaagactgatgtaacatgtttaataaagttttgtactttattgttaagttttacgtgtgatttgtcaaattctcgagtgatgttttagaagtttgtcggtgttctctttaaatattagacctaccaatttaattttggttaaaaagatgttgaaatttccggtacatgtcacaatcactgatctctcttttttttctttagtaacacatatggaaaaattaaaagtaacgtattgaaggttacgacaaaataaaacaataggatttgtcaacatataaaacttacttatttgtgtcgactcgttaaataaacagaaaacattattttattttccactaatttgtgtttaaaagcatgaaagttttggagttcttatagatgttaatttattcattactctcgaaacaaagcattataaaataactttgttgatttgttgtgtacaggggaatttcaaattgaatctgaaaatatacg

SEQ ID NO: 41430 - DNA, 160 bp, Arabidopsis lyrata
  Intron number 3 from transcript 950456 (locus 950456) deri ved from phytozome v7.0 (chr-ID scaffold_8; pos 18244917 t o 18245076)
aaggtactttcattttgttgtattttttttttcttgcaactttttgagttatgtttttatggatttgaagaaatgggtgagatttttgtaatgatgtttgtttgttgtcctgaatttttgaacaggattggtttagattcagtgttgcgttttggcatac

SEQ ID NO: 41431 - DNA, 418 bp, Arabidopsis lyrata
  Intron number 2 from transcript 493010 (locus 493010) deri ved from phytozome v7.0 (chr-ID scaffold_7; pos 10781541 t o 10781958 reverse strand)
ctccttcttcctgaaaatccacgaatcgcctggttttttttggctaaattggtgttgaatctcataatttgattcctgttactgttcttctttgtttagctaggtttttggataatcacattgtttgatctgttatgtttctcagtctctgagattatcagacctacgttatgcgtcatatcgccttagagatagttttagaagaaactgttaatggaacttatgatcggtgtgataacatttgttcttctgtgctagtttagtttgtgacgtagtagcttgactttttttgttggttgctttgtgttcatcataacataacaggttaagtgttttcgtgagtgagtgctaaaatgattatgatggtagttttttttctttgcagttggttcaagggtgagactgaacagattttgcc

SEQ ID NO: 41432 - DNA, 432 bp, Arabidopsis lyrata
  Intron number 3 from transcript 483158 (locus 483158) deri ved from phytozome v7.0 (chr-ID scaffold_4; pos 19972222 t o 19972653)
cgcgtgcttcgacgatatacagagctgtatgctactctctgtcctccaaaccttcttcattttacttcaggaaccaattttgttaaaggtgcctctttgaaatgacctgtgatatatgtttgtcatgtgttagtgttcagatatattcatgaagataagtttggttctggtaaatagtttttgctgaggtttttttttgtttagaagcataatcaagtgcatttcttgaataggctggggaagaaacttagattaaggtgtgcagaaaattgtgttgcttgtttatgttttgagcttcattgtataaattctcttggatttgattatgttttcttgtttatggtgaagatcatttagacaacgtttgaaaggaacattagaacttactgcggtttgttttggatgcacaggtttagtaggtttgttctgtcc

SEQ ID NO: 41433 - DNA, 103 bp, Arabidopsis lyrata
  Intron number 2 from transcript 897601 (locus 897601) deri ved from phytozome v7.0 (chr-ID scaffold_5; pos 13285336 t o 13285438 reverse strand)
ggtatgtttttcttccttgcattatcgttgatgtgaataatttggtatttgttttgattttggtgctttcattgtttcagagagagtgaaggcagtttctgtt

SEQ ID NO: 41434 - DNA, 368 bp, Arabidopsis lyrata
  Intron number 1 from transcript 485913 (locus 485913) deri ved from phytozome v7.0 (chr-ID scaffold_5; pos 17255301 t o 17255668 reverse strand)
cgcaagacctacgaaggcgaaaggactaagtaagtgtacattgttaggatgacatggttttctgaaaaatattgagatatgaacatagataggtcatcaggtttagctttggatcttgagagattgtttgatttggaagataaattactcatgttaatgatgactctgaagaaagtcaactatgaagaaattttttgaattattgatgttgatgaacctaggaagaaatagtgcaatagaggggcatgtgatttattctctctgctttggtttctcatctgttagttttcaatacgaattattggtcaaaaaatgcgtttcaccattattggtgtcctgattggataaaaaaaattaattttgcaggg

SEQ ID NO: 41435 - DNA, 211 bp, Arabidopsis lyrata
  Intron number 3 from transcript 485918 (locus 485918) deri ved from phytozome v7.0 (chr-ID scaffold_5; pos 17266554 t o 17266764 reverse strand)
acaggcgggtttgatactgcttacgcagcagcaaggtaaaagaaaattcgatatattatttgttacaacattcgtcattttaatatgttttaattttgtcaatatatacacattagagtttgttgaagacaataaagaattaatatcaatttgacttattcataaatgaataccagggcgtacgaccgagctgctatcaaattccgtggtc

SEQ ID NO: 41436 - DNA, 669 bp, Arabidopsis lyrata
  Intron number 1 from transcript 484243 (locus 484243) deri ved from phytozome v7.0 (chr-ID scaffold_5; pos 1794608 to 1795276 reverse strand)
acctcactgtgagtgctctttgaatctatatcttcttcttgatttgtttcttctgggttcttgcatgtgattcctatgtcaagtttatgggtttttgttacttttggtctaatgttgtgattaaaaggcgattcttttgtgaaatcttgtagttggatgttatcgaaattgtacaagaatcatagatctaggaagatctgagatgggttttgccaagtgaagatgaaaattagttaagatcattagaattgttgatacatagtcatatctcagaccaattttgattatgagtcagaataatctttgaaattttgatataaagagtccaattttagcaatttgatgtagaaacaagatctgattttttaccaagttgagattttagcattagagagtctttagagtttccaattttagtcattgtttagtagaaaagatgaatcctttttggtaataatgtgttcatctcctgctttttgtgttcttgagtttgctatagttgtgccaagatttctattctaagaccatttctcgaacttgtatcattcgatttatctcattgattcactacttaactaagtatatggttgatttgcattgcctcaaatggttatataatgttcattttgttttccagactttctccagtactgttgaagagaaagcaaa

SEQ ID NO: 41437 - DNA, 913 bp, Arabidopsis lyrata
  Intron number 2 from transcript 475633 (locus 475633) deri ved from phytozome v7.0 (chr-ID scaffold_2; pos 9341987 to 9342899)
cacgagtcaccaaagtaagagccttccttatgatttcatttaggacatttatgatattttgatgaaacatacatatggcttaactggtatatcgaatagcaaatacattttagctactagaatttccgcaaagtactaataaaatgcttgaagcttgttgtagtagattgttaagttttatttttataattatatttttaatatcatttagtataatcacttttgtaaaatattataacttgatgaatattttgttaagatctatggacttccaactcaaaaccaattgacaatgagtggagtggcccatatcccttatatattacttaggatcccttccaacttccgatgtgggacattatgtcctaatacgccccctcgagatgatggctctttggccattaatctcggaatgttcgggcttagatcgacggcatcaattttgggccttgtcgatgattggaccatcttttggtcgaatcgggttggacatgtgtggatcgggctctgataccatgttaagatctatggacttccaactcaaaaccaattggcaatgatgagtagagtggcccatatcccttatatattacttaggatcccttccaactttcgatgtgggacaatatgtcctaatatattttgaatggcaaaaaagagagtgaaatcatgttttttaaatcttgaaaaacttgtataaaatgtctactatatttcctttatcagttgctttctaatttataataggaaaaaagtctacatattcttctcaaggatagattagaaactatgacattaattatttgcatgaaaagattagatcccctaggtctcggttccttagaacttttttttcatttcgatgttgatctatttatgttcagtgaggaagctgttcaagtttcggtgctaa

SEQ ID NO: 41438 - DNA, 549 bp, Arabidopsis lyrata
  Intron number 1 from transcript 919623 (locus 919623) deri ved from phytozome v7.0 (chr-ID scaffold_1; pos 3316808 to 3317356)
aattgggctgttttggtctgcacttctcgcttctggtaaaaccctcacactcctctctcgttcctaaattaactcattgtttttgctccatcttaattcgggtattgtgtagtttcgtgtcaaaaattcagctgatcaatgtagtttttttctgataagagagtcacaaatggtgataggttttgaagtttaagtcttctcaccatgatctctagacctttgaattttgagagacctgtttttcaattgatgatgggcggtgtgacttaacctctgctatagatctatatcataattgtgtgccttcttcgactggctgagaaaacctgaatttgtttctctagtcaactggtgttcatctttttgtttcttggtttcttctctttggactcaactagcatctatatctacttgaccacgtctgatccaaggacattgtatgcttgattgagaaacctgtttcagttatcaaaagtctatctctcattctcaagttacatattaacctattgctgtggctaccattattccaggtttaactaccggcac

SEQ ID NO: 41439 - DNA, 581 bp, Arabidopsis lyrata
  Intron number 2 from transcript 901545 (locus 901545) deri ved from phytozome v7.0 (chr-ID scaffold_4; pos 17562412 t o 17562992 reverse strand)
aataaacaggtgatcttataatttatatgtacaaatttgatttttttttttttgtatttatggtttcactattttcaccactaatcaatttttataatcaaaaagtttggtttcaacttttgagaaggtaatcatcgatggtttggtatgtttctttttgttgtaaaaagatgaggtacctcccgattttgttgaggtacatgttcttattattttcaaatatgtcttttctcagaagaaacactcaacttttgataacacagttgccacaaagtcagaaagatgacttatttcagggatgaatcttcagaggaggctaatttttgtcgttaatacaatttaagtattcctctctttagattagggataacaaacttggctgttaaattcaggaattactcttcgttgccaatctctctccccaaactaaaatattacatatatggaagtagtaacttaaagtttttggtatcgaggtcattctaaggcactgagattcggactttggtatgtataggattcgttttccatgcactaagatttaattattgtttaatttattggtttttaggtttctttcc

SEQ ID NO: 41440 - DNA, 663 bp, Arabidopsis lyrata
  Intron number 1 from transcript 905515 (locus 905515) deri ved from phytozome v7.0 (chr-ID scaffold_3; pos 11486753 t o 11487415)
tgagcaagtagctgctcgtactaagccttactcgggtcaccacagaacagtctctgattctccgtctaagacataatcccccggctacaccatcggggaaatttttcaccagcggagagaatagtggctgggaagaagacgcagagaagcttatttgtgtgggttgcatagggaaagagacgaaaagtctcgccatttttttttttgttgattttggaaacaaacgattggcaaaggcaagtaacatgatctggaagaagaggaggagcggaggagacgagaagcagcggtggtcgtgcgcagagaagtatacatggttgtggtgattttgagggtatacatggttgtggtgattttacaaccaatcaaaatcaccacaaccatgtatacctcaaaacaaccgtgtatttggttgtggtgattttgagggtatacatggttgtagagatagtaaatttgaggtaggatttgtaattattgatcttttgaaagggtttttggacatttccttcgcttttgatttagaaaaaatgttaaatgaaattagaaattaggaggtggcattccagcattttttttctcagatagtggctttctagccattgattcatttctcaatccaccatagctgagctccgagatcacttgtcgccaatcgccgtc

SEQ ID NO: 41441 - DNA, 398 bp, Arabidopsis lyrata
  Intron number 2 from transcript 905515 (locus 905515) deri ved from phytozome v7.0 (chr-ID scaffold_3; pos 11487420 t o 11487817)
ctcagaacagagccattgttctccaccttaagctggttcgtctcttatctcaaattcgatgattcgtgattactcttgtttattttctccctctgtctagattttagtttcattgtctattaggtctagctaatgattctacttcgtcaatttgaatactcaactcgtttggtgctcttcgattctatattcaattgcattttaacactcggtattcagtttttgattgaatttattatcgagattcagattctaggccttatgattgactgtacacaaggtcttgtgtattgatcttgagcctttttaagagtttagaatcagtttgattgatgtaaggcttgtttagggaagatttcttgttgatatagtgtatgatatatctctttgttttgcag

SEQ ID NO: 41442 - DNA, 544 bp, Arabidopsis lyrata
  Intron number 1 from transcript 495650 (locus 495650) deri ved from phytozome v7.0 (chr-ID scaffold_8; pos 17115812 t o 17116355)
gccactgctccttttgcgtctaggtttctcttcgggtatgtattgtctctctctgtatcggatttggatttgtttgactttcactggatcgtggtcgatatagttattggattgattactactttttgtgatttcgttctggattagggttagaattagaaaagctttattcataattgatcatcttctattgctcgattaaacaagaaagtttgcagatttctagttttaattgagcggtcacactgatccaaggctatgtcaattactagtaaagatcatattttgcaatcctgtttgaagtattggttattgtggtgagattataacatcaaggaatagttctagatatggtttttgatgtctgggcgtgttgggttttaccagctctgtttttaatctatatagatctcttgatagatttcattcatgtgtcctgtcgatgctctctcggtgattagcacttcattgtttcagtttcaacctatcaatgactcagattgtttatgttacagttcttttgagcctcgagttgcgtattgtg

SEQ ID NO: 41443 - DNA, 451 bp, Arabidopsis lyrata
  Intron number 2 from transcript 495151 (locus 495151) deri ved from phytozome v7.0 (chr-ID scaffold_8; pos 14190335 t o 14190785 reverse strand)
cagttttcaactaaagtttggtaagggagatgatgactctgattcttatgttaatcactgcaaacttatgtatctgtagttttcgagattgttaatgtgaaagaacttaaacctagtattaccagaacataagaactggttatgcgtctattatggagcttaaatcattgttttgtactactatttcatcggatatatgttttggttgtgggtatttgtttcctaatatgtggagaagttttaatcttcgtttgagttgttttacgtttctctcgagtcttgacagacattttaccatttataacttggttatgatagtatatcaattctctattaaatcgtaagaatatctttggaactgcattgtgtgctaataaggagtatttttctgttgattgatctgatcaaaaccaaaggcacccgaatattagtagccaaagcggagcaatat

SEQ ID NO: 41444 - DNA, 699 bp, Arabidopsis lyrata
  Intron number 1 from transcript 477458 (locus 477458) deri ved from phytozome v7.0 (chr-ID scaffold_3; pos 507566 to 508264)
agaagtacatcttcactattgacgacgattgcttcgtaagtttcctcaattccgtttatagatctgtttttgtttcttcataaataggtttagtttttgagatctagtgataaagtctgtggatttaacagatctttgatttgaaaattcgattacaattctctacgtcaactttgagaaaaacactgttttgacctagatctatatatttgtctgcttgatggttttcgatctgttttcagaattgaaattgtattagatgtttgctggaattgtcatcatctcttaagttaaggtaatttgagtggtgtaattgttgttggaccaacctatttatgttatgtcttaacagttaacttcacaagattcttgcatgtcattgtcctgcacatttatgttatgttgttgtcataaggctaaggcaaagaaaagtctaaactttatttcctctctttagggattagtggtttttttttttttaagaattgagcagttacgccatgattgtagcattgatgttgttttcataatgtgttggtttaatcatgtgtaacgtattgttcttcatggtcttttctttttcttatttttgctggctctagctgcttttaattattcctttcttagaatttaaatattattttgttgttgtcatgtgttataggttgccaaggatccatctggaaaagctgtgaacgc

SEQ ID NO: 41445 - DNA, 292 bp, Arabidopsis lyrata
  Intron number 1 from transcript 493629 (locus 493629) deri ved from phytozome v7.0 (chr-ID scaffold_7; pos 18528963 t o 18529254 reverse strand)
caccaatcacattcaatctctgaatcttctctaaggtctattatccatcgtctcctctcttttaaagtttgattttgatcatcgtcttttcttcccattacatcggatcgatttatcaacgccataattatctcaaaatcgttgctttgcgtgtttgtttatcgaattgccattttgatcttctgggtcaaaagtttggtcttttttctgtacaaattttctggttcctgtttgattaaagacattttatgttgcagggatttgttttgtctctctatctggtcttgattct

SEQ ID NO: 41446 - DNA, 347 bp, Arabidopsis lyrata
  Intron number 3 from transcript 900288 (locus 900288) deri ved from phytozome v7.0 (chr-ID scaffold_4; pos 10185009 t o 10185355 reverse strand)
atcaaatagcgaaaccactggtactattggtgaaggtaatgtgctcgtttttgccctcttcatgggttaatgtaaaaaaactttaattctttttgctttacagtttctaggattttaaatttgacaagcttttgaatttttgtatttaataatccattttcttgaaatttcatctaacacagaatgctctgacaatagttatcgtcgtactttcctagtatttgcctctgtttttgtttcgtaatgaaaacatttatcctgttattttttgatatcttccgttctttgatgactgtgctgtaaaacaagggatgtcatacttttgattatagggaccactcctgttg

SEQ ID NO: 41447 - DNA, 550 bp, Arabidopsis lyrata
  Intron number 1 from transcript 907629 (locus 907629) deri ved from phytozome v7.0 (chr-ID scaffold_2; pos 4648310 to 4648859)
tattacaggaataagtaagaggtttcagctaacaagtaagtcttttttccgggttatatttcaagtcaaaaaatagatttaatcttaaaaattgtaactacatataagatagatttaattttattaactatataataacaaataaaaaataaacataaattagcaaaaataatcaatattcacaattttcaaaacaaacccacgcgtagcgtgggtattcatctagtctcttatataatatgacaaagtttcttcttaacttgctctaaaattttgacatttggcattctatacatttgacatgtgtccacatattttttcctatttattatcttataattttttccttaaaatctttttaattactcattaaatttcaataaacaaaaacggaaaatttatttgcaaaaccctctttacttactcactgacgattttcattaaacgaaacggcaaaaaaaaggttcggctacttactgcctttcttcttcttattcttcttctctttcaattaggtctatttaccctaccagcttcgtggctaaaggta

SEQ ID NO: 41448 - DNA, 327 bp, Arabidopsis lyrata
  Intron number 2 from transcript 907629 (locus 907629) deri ved from phytozome v7.0 (chr-ID scaffold_2; pos 4648904 to 4649230)
tagtcttattccgtctcagccactattcgccggtattgtatgtttatcctctaggtgaattaacagtcgtttcaaatccttttaattcttacactttatccatgtttttagagggatacaacatccggaaaaccagtagtcatgtttgagtctatctataacataaaaacatattttccatggaatatttttcatcaaaataactaatattaaaaaaaatataaatgggtttaaatggatacccatttatttgtatgaaaatccatttaataaatgaaactcatggtcttctgttttgagtttcaaaacagtatatggtaaaaagga

SEQ ID NO: 41449 - DNA, 763 bp, Arabidopsis lyrata
  Intron number 4 from transcript 922760 (locus 922760) deri ved from phytozome v7.0 (chr-ID scaffold_1; pos 17727222 t o 17727984)
tagaagcaagacaggacggaataggcgctactaaggtttgctcttttgtctttctggactggattatcaatgattttttaaatggaagattgaaactgttttggcatacttgtcattatatattctggattctatagtcattaggctaggattaagctgcaggcaaatggaaaattgaatagatagagtcaagatctgaaaccggtttgtttttagtagcactgaaacgggtacgggaactagatactagaaacggatacggaaacgggggacgggaaacggcaaagtaaaatttcatagatacgggtacggcatgggtacttcaataaacatataagaaaaggtacccataccttcagtgagaggtgattagaaaagctaatggaaaaaggagagcggcaaaaagcgcttagaaagtagaagaaacgtgaagagatgaaagtatgcttttgataatagtgctcggaatgaaatgaaatggatgcaaatatcaaaatttcgatgttatcttcctccgaagcatctagagatgctattaaaacactaggggtctaatagtcccaaccctttcgtctccataattgcttgctgtcccgtcttgctggaaacgtcttggggacatttcggagccgtccccatactgtccccgtttcaacgtccctggtacggggacggctaccaaatagaagtacccgtgcttcctgccttgtaaagtctcattctttttttgtgcttgtgcagattgaaaaaccactgcagaaac

SEQ ID NO: 41450 - DNA, 326 bp, Arabidopsis lyrata
  Intron number 1 from transcript 482048 (locus 482048) deri ved from phytozome v7.0 (chr-ID scaffold_4; pos 14746385 t o 14746710)
aaagaaggagaaagatcatcatcgtctaacttttggtattgagagcatttccttctctaaacttttcattctctaaactaagtttgatttttaaatcaatactaaaaatgtgagagtaaagaagatatcaaaacacaaaatgcagaggatttttcttttccaatctaaaagaaaggggcttaagggaattagtttgagattaggttttgagtttatgcaaactttctttatttaatgtaatcaacttaacttagattggcttttgtcttaaagattaattatggttatggaaaattagttttgtttgcagaaaaaatcagttgaaa

SEQ ID NO: 41451 - DNA, 404 bp, Arabidopsis lyrata
  Intron number 1 from transcript 915021 (locus 915021) deri ved from phytozome v7.0 (chr-ID scaffold_1; pos 33087703 t o 33088106)
gaatacaagctacttcaagctttcgaaacctctgggttagttcctcaatttctcattctctctattagctgttcctgaatgataatttttcatctctgattctgaatttgtgatcaccgaatcgaaagaaactttggggtttttgattctggttatgagtattgcctatgaaaaattgcttccaatcgtttaggattatgatctttgtgaaagctggttctgattttggactctgtatatggttttgattctctctttgctcttgatttctatgtttgtgtttgttcttgactcttagggatacaaattatacataatcatgtttatttttcttcttttgtttgaatgttatgctttactctgtgattgatcttttggttttactttgataatcagaggaaagg

SEQ ID NO: 41452 - DNA, 636 bp, Arabidopsis lyrata
  Intron number 1 from transcript 358717 (locus 358717) deri ved from phytozome v7.0 (chr-ID scaffold_8; pos 21814452 t o 21815087 reverse strand)
tcgggaagccagaatcggagaaggagagaaattcggtgggtttctctagcgagagaagagaagagagaacaaaatgattttttttttccactgctttcgggaaaacgcaaccaatcaacagctgccatgtcatctgacactgggtatcagaagtttcactgggctgatacggatcaggcccgttttaactgtttgatcctttaaataatattttttgggcttctgatactgtaaaagtatcagccatacacatggtcttaattctatgcatcacagagtttagttttgtctaaaaagtaaacttattcttctcctctgttttcttttgcatgttttttgcaaggaaatacccaaaaagttgaaggctcgtcaaatatctctgtgttgaacgctaaaaaaaacagagaaagaagcttcaaacaaatttctccgtgatctcttcaccgtaatcaagaaccggaggtgaattcagaattcagactctgcttaaatattggtatgaagcttcttatgtccggttatttgtaacttgattttgagaactggactcataatgagaaagacaaattgttttttgaaaattttctgacatctaaataaattccacggcaacctttggtagaggaacctaacaaa

SEQ ID NO: 41453 - DNA, 661 bp, Arabidopsis lyrata
  Intron number 1 from transcript 478066 (locus 478066) deri ved from phytozome v7.0 (chr-ID scaffold_3; pos 3154218 to 3154878 reverse strand)
cgagagattgcgttccggttcgtgagattcacaaggtatgcggaatgagtttttttcaattgaatcttatgaatttgtagaactgagtatctttgaagttcttgaaatttattgaaggatactaatgtgctatatagtttgaatagagaaagataaattatcttacatatagagataattcaaatgtgctggattttgtggtttttcaatgttgagcttttgaatattttgaagtttcaggcttgccactaagaattcaaatgagaatcctttttaaaagtttgttagcttatctcattcattcgtcatcatctgaaacttttgagattcctttcaagggtcattttttctccattcttgacttggttgcgatttttgattggtcaagaactgttggacatgtgcattaagagtatctttagaactatgaaggatggttcctttatagggtcgtttttttctccttgaattggtctgagatttttctatcggtgaacaactgttagacttgtgaaattgggaatatctttagaactaggtaagagggttttgaaagtgttgcagtgatcagattcactcgtataatggaaaataagctaatgtgtcctcaatgggtcttcttgcaggttcagttggcattgtatcgagtagatcaaaatct

SEQ ID NO: 41454 - DNA, 759 bp, Arabidopsis lyrata
  Intron number 1 from transcript 493843 (locus 493843) deri ved from phytozome v7.0 (chr-ID scaffold_7; pos 21577143 t o 21577901)
gacaaaacaaaaacaaaaagcttctccggagaaaaaaagaaagtaaaattctctctttgattttgagatttttcaattcctcttctctgattcaatctcgagaagatgatcggttcttgtttggtgtttgtttgatcttgctagtgatcgttttctttaggtttttttttttttttgctttatgagcttgattttgtgtgaaattctgtggggttttttttttttactgttttgatccgtttttctgctatgtgtttatgctagattctgagaattctgatgttgataagtttcggtttagggttttacggattagcttgctcttaatggagtttctgttggagttgaattctgagtagaattgtttaagtttttggggtttagtgtaaaattgatttgaattcactgcaagtgtgtctagatgataattgtaggagattcacataggcttttagtctcaatactcttgtcccgattttaatcggctttgagaagaggtttttggtgtgtgtcaattgatgtttgttgtatcttgattagtgagagtagatttggactgtttgtagctgaaattttggactgttattgttggtagcatatgatgaatctgatcagacttttgtagacagctgaaactgttatcgagaaaacgacaaagcttgtttgagtttcttgcattatatgtgatgaatattcacataccgatatcgaaatgtaatttgtttcttgtttctttgcatttcttgtaggttagcatag

SEQ ID NO: 41455 - DNA, 347 bp, Arabidopsis lyrata
  Intron number 1 from transcript 476772 (locus 476772) deri ved from phytozome v7.0 (chr-ID scaffold_2; pos 17041249 t o 17041595)
tggtacatttctctctctctctctctcacctaattcgctttttgattttgggtcttagctaatctcgatcgtatgtagatctcatcatcggatttttgggctaattgattatctgaggaatttggtatctggaatccatttgattttctgtttcgggttttgaatcaaaaatttggatttgtaaaattagtgtatcggagctaatcaggtagatgttgatttgaatcagatattgtaatggttgaagaagtaatcgcctaggtttttatttttccctagcaatcacatcttaagaactcaaatttttgatattttcaggttctggattctgtacagggcaaagcaag

SEQ ID NO: 41456 - DNA, 433 bp, Arabidopsis lyrata
  Intron number 1 from transcript 941200 (locus 941200) deri ved from phytozome v7.0 (chr-ID scaffold_6; pos 6967993 to 6968425 reverse strand)
ctgctgctcttgctcaagcttacgctcccggccaggtaccaccgacaataatttacttcagttctccgattatccaaatctcctgtgaaattcgtatccaatgatttgagcttgcatggtttgattatttgagctcgtttcctcttatgtcttgagattatttatgtgattttttttcttctatatttggaaaataacgatatcttattataataatatactacttgacaaatctattaataaaatcaactgttctgtttttgtgttatatatcatttctgtaactgatagtgttacataaacgtttctcatcataaattagattagtgttcttgaagaaactgtaactctttgggttttgtttctactctctctatctctgtcgtgttgactgttgttccattgtgtgttttggtgcagccaatctttgggt

SEQ ID NO: 41457 - DNA, 362 bp, Arabidopsis lyrata
  Intron number 1 from transcript 898127 (locus 898127) deri ved from phytozome v7.0 (chr-ID scaffold_5; pos 15997333 t o 15997694 reverse strand)
tccaacgaggggaggtgttcgcggtggtcgagatcgtaggtttccattatagttggtttcgaattttgcttcaatttacaagatccgacataaaattctcaacttttagggtttctatgtatcatccaacttgttggttcttctctgctatttttatgatttttgttttggggtggttccttcatgaacgatctatgatttgattgtttggattgaattgtctataagcatttgtggggagaagatgagtttacgagaagcaaatcaatgatgtagaacatgagctgcttataatgattttgcatagttaaaaactgtattactaattggatttgtttataaatgtgcagaattcagttggg

SEQ ID NO: 41458 - DNA, 419 bp, Arabidopsis lyrata
  Intron number 1 from transcript 951336 (locus 951336) deri ved from phytozome v7.0 (chr-ID scaffold_8; pos 21729394 t o 21729812)
gagaagcttgaacagattggtgaaggaacttacgggtattcttctccattctttttttttaattattatttctgggttttgttccttgattcgaattgatttggtttttgttgagtattcgtgctaaagattgatttttttctcaaatttgagagattacgctagggccacttggcatataagttttttgatgcaaatttgattgtaaaattcccgtttattgatccatgtactgttgattgagtgaattggggaattctcagattcttaagacttgtcctctgaacatgtagatatcggattgcatgattatcatattcttgatatggtagatagatatgttgcataagcatatgaagctttctctttttatggggtttagatttatatatttggtttggttttgcagtcaagtgtac

SEQ ID NO: 41459 - DNA, 892 bp, Arabidopsis lyrata
  Intron number 1 from transcript 905044 (locus 905044) deri ved from phytozome v7.0 (chr-ID scaffold_3; pos 8900830 to 8901721 reverse strand)
tttgttgggctcattcatcctcattcttgcttccggtaaatttacaagttatcttcatttgcgtatcattataaggccacgtacgtttgttccttttttgaattctgtatatgcttgctagtctaacgtagttttaaagatgaaacgtgagacaccatttcataggtgttggatatatgtacttcattgacatgtacttacatcttttgtatgaattcacactcatacatactataactacatataatagttgacaacttgacatgagtgtttgataaaagaacttaaatatatattaataaaaaaaaaattgacaaataaaaagagaaaattcttgaatattttttttattaaaattcttgaatcttcatagagcgatgtgtcaagcaactttttcttactataggagtctgatgtcgggatcttctgttccattgtattcgccttttcctttaacctgaatcacttgtttgtctaggtagagaagacgacctatttcacattcaatatgattccagtttaatagtatagataatatacaaaagtatattcatatgtatgtaagatggtggggtctaaaatgtgtgtgatatggccacacccactatgtatttattatgcctaccttaattgaattcaaaaacttatctcatttatggattctctacccttaaatcctcattctttaacaaaaatatatttttatttgcacaaataaaaaatagaatattttcatccaaattcttagaaaaatctactttcttcttggtttaacatatcacattgctttattttcatccaaattctatgtataacaattttacaaggtcactaaatgtcattaattttggatgtagctagtgttgtggtagccgccattgtaggagccatc

SEQ ID NO: 41460 - DNA, 1008 bp, Arabidopsis lyrata
  Intron number 2 from transcript 894483 (locus 894483) deri ved from phytozome v7.0 (chr-ID scaffold_6; pos 11513467 t o 11514474)
ggaattctaggttatcgggttttctacagaacattccatttcaatatttgtcctctgtgttgccttcaacacgatgacaatatagtcgtatgcaaacattgttttgcctactattatgttaatatatttcgtttaatgtgttaatgtttgcgtaatattttgttggttatgtgtaagactatattttatgctgtcttcgtattatatttgttgggtttatctgtgttagtaaaagacactctttcacagagattaatgcccttttttgtgaatcgtagtgtttgtaataaagcggaaaaaatagtaaatcccacgtgcccacttttaagtcaacgatttaatggaccctttttatagtcaacgttgaaagactagtagagacgaataatgtggctatttaaccgagagagagaaaaccaacaaatatccccaactcgttgaataagaaccctagccgctttccgacaaacccagaagcgaaggacgattgctcgagtgcatttgaaccgatgaaaaacacgaaaaacatcaaatcgaaccccgaaacctctggatctgtaagtaattaatttattttcgaacctatcagaactttttttgaataacaaggatttatttagatttttcataacttctgatgattccttgtttcataggatgagttaagttgtaactcaattaacaattgctcaaatgaaagaggatttccgaaatattgtgtgtgtggcagtaatgtatctcttttcacatctcaatcaaaactgaatcccggtcggccttatttccgatgtgctgctacgagagctgtaagctcctaaatcattacttttatttcgttcttactctactaccgttgatttgcaacaactttgtgatattattcgtattactatttttgtttatcaaaggatggtcatttgtttaagtgggtggaagaaggaatgtatgaagaggttcaagacttattgcaaagagaatcggagattgtgtatatgaggatcgtaggtg

SEQ ID NO: 41461 - DNA, 586 bp, Arabidopsis lyrata
  Intron number 3 from transcript 492497 (locus 492497) deri ved from phytozome v7.0 (chr-ID scaffold_7; pos 7950548 to 7951133)
ctctccggcagccacgtgtcatcgccgagattgtcgtacgtttctttacttctttatgatttatcttttttttttttggtcaaagtttattattaaaaaatctcattatccatttttggggtctaattaaaagtcaaagatagtactagtttgatcaataattcgataagatgacggattttttcggaaatttacattattagttaaaactagtagccccaatcatacacttgaattagtcttcgggcttgtttgtgacgtatatatcgtaggaattttcatcagaatattcgttttcttccacaaaattcgctgacacgttaagcattgagatattaataatatcttataatatccgtttatgcatccacgttcctatgaatcttgtgggaagtgataaattcaacattttgaacagataagatttttaactttgattagtcagtcgtggatgatgaataatacacttttaaacacatatcactgattatttatactttttttttggaattatgatgtattgaaatatgagttttatgttgtggttttagggtggaatattacttggaccatcagcactcgggaa

SEQ ID NO: 41462 - DNA, 536 bp, Arabidopsis lyrata
  Intron number 1 from transcript 339776 (locus 339776) deri ved from phytozome v7.0 (chr-ID scaffold_2; pos 16977172 t o 16977707)
aacagattttggcctctctgttttcatcgaagaaggtaaagtcatcttcttgattacttaaattatgggtgtttcttttctcgtgttagtatattttacgaaccaaattaagtgttttgactcttgtttcaaagattaatttgtctttgcttttacattgagtagttagtgtgttttaggagataaaccataatgtttaaacttgtgttagaatcaagaaaaaagatgatagcgacattgtatctccgtgtgggacaccaagtcaacttcgaaaacgacttgggtcaacccaagtcaacagatgtttcccacaagattaaaaattgacaacaagaaagcaacagaaatcattttatagggaaatagtattcttttgaacattttgattcacaccaaaaaaaaaaaaaaaacgaatctgtttgaatgcaaattagctaaaactttggttctgtattttgaaagccttacaagtaaccatatctatatgattaaaatttgtaggtaaagtgtatagagatatagttgggagcgcatac

SEQ ID NO: 41463 - DNA, 222 bp, Arabidopsis lyrata
  Intron number 2 from transcript 489576 (locus 489576) deri ved from phytozome v7.0 (chr-ID scaffold_6; pos 12798405 t o 12798626)
ctgctgctggggcttgtacctctgtgttgacccaagtatgttttattttatactcagctctgcttcaaactatgctacgtttggctgttttatgccaccctttttgctttggtcaaaagttgtgaatctttttagtttctttgtttcctactccgttttctatcttctctaagcataattacttctatgtttgtgtagcccctagatacagcttcatcgagg

SEQ ID NO: 41464 - DNA, 544 bp, Arabidopsis lyrata
  Intron number 6 from transcript 491320 (locus 491320) deri ved from phytozome v7.0 (chr-ID scaffold_7; pos 3188609 to 3189152)
tcatttcagtacgctgtcaccattcatcctattatatcacatctccttattcctctctgctcttgccttattgttgaatcctttcgtattagtttatgccttgtgattgcatcttgcttattagaatgcatttcacttgaaaacgatttctggattgtgtatcttattgtttcttttgaacttaagtgaagattgtagcattttatatgaagggtacctgctccttttatgtgatttatgggtttttcgtgtaagaacccatgttggcactttggccccaaccctttaggatcacttggataactcttaactctaaacaatatgtgcttgatgtggtggatagcgaatctctagggttatttccaactttaaaaatgagcttcttgggcaatcattttctttatctgcctatgtttgatttggtttgcaacaacttcccttttcttgccaatatctgagttcccgtttatgttttcactgtcaatctttgatcgttgtgtgaacttcagggagttctctgcatcggctttctgaagcgtgctcg

SEQ ID NO: 41465 - DNA, 545 bp, Arabidopsis lyrata
  Intron number 2 from transcript 481487 (locus 481487) deri ved from phytozome v7.0 (chr-ID scaffold_4; pos 6196159 to 6196703 reverse strand)
gcttagcccaaaactcgaatccctaggtgaagcaggtaactacaacaactttaagctctccgattaccccaaactgcaaaatctctctctctctttatcttgttttcaacagcagcctttacctctttctttgtacctctgatcttgttatcttccatggatccaatcctatttcttccgcaaaggtttgctctttcttttagatatattcttatcttgatttgggttctttttgtgtggttgaataattcacaaatctggtttttgttttcttggattttcttaaaaatcttgtttttaataaagggttttcttttatttcagttatttaaagataccctcattcaatttctttttctagaatttatgaatttagtaattgggtttcaaaatttggagtcttttatatgtttgtctggtaagaagaacaatgagttgttttttttgcattatcataaataaaaaaagctgcaatggtttgacttatgaatttgtagccactgaaaaatgtatcttttctttttttcttgattaggtttggtaat

SEQ ID NO: 41466 - DNA, 670 bp, Arabidopsis lyrata
  Intron number 2 from transcript 472400 (locus 472400) deri ved from phytozome v7.0 (chr-ID scaffold_1; pos 9360139 to 9360808)
tccttgctcaggttcttcttcgaaatctgcatctatttccttcttttggtttcagtatttgtttggattattgggaaacggtggagaatagttcttacaggttttgaattggatctttgatctgtgggatcgttggtagtgaatgtgacgtattttgtcaaatttgttctttgccgggtgtttaataggacctctcttttcatttctggagcttgtagtcaagttgatgtgattctaatggagaatcttcttcgatcttgacatattctgagctaagaacgctaaaatgtgttttctattcactgtactgttatcagagtggcacatctggtgatacgattgagctagtatcagtctatcagatcaggcattgtgtttatgcagatatgcagatatgaatagttttatgcgtttttgcttttaattggagagtgaaatttgaatgaaaataagagaagcaatctagatgtgtctacttctctgtatcgtgcataagccaagaatattgcatgcaatgaggggaattctgcgtatttgaattttaacatgcttttctggaatttagaaaacatctccagattagttcggatataagctctttttgagcgcctattatacaattattctttggattgttaaggctataacttgttattattatcttgtaggt

SEQ ID NO: 41467 - DNA, 581 bp, Arabidopsis lyrata
  Intron number 2 from transcript 470496 (locus 470496) deri ved from phytozome v7.0 (chr-ID scaffold_1; pos 1743544 to 1744124 reverse strand)
gaaattgaaagctgctggtgaaggccttcaacatagtatgttcacttctcatcttttgtttacctggaaatcaatattttgaacttggattcgtggatactggagttattccacagaagaacatggcttgatttaggttctttgctagagacagaaggattgcatattttcatgttctgtttttacttccttgcttttgctaatgttgatcatgtaaattgcttgcccaaactaccctgttagggactgtaatggcagtaattctgatcaggttccagcttacttagagattatttgttttgtttggttatgaaagccaaagttatccgtggcttagggttagggttcacgaatgtgttatgtaataactgctttctgggtgtctgtttttgactctgatgacaaataatataagtatctctaacagcctggaaattgttgataatattggtagattcagaatctgttattgtcttttaatgttattgatgtcgtggagtgtttggaaagtttgcagtccactgaattgttttctggttttcgcagttggaaaggcatttgcagccgctactattatcatc

SEQ ID NO: 41468 - DNA, 538 bp, Arabidopsis lyrata
  Intron number 1 from transcript 932446 (locus 932446) deri ved from phytozome v7.0 (chr-ID scaffold_4; pos 2609789 to 2610326)
atcccattccttaaaaaatctgtaagtattttttttttcttttttaaaaaatgattaactaaaacggcatgaatattaaaattgaaggtacatgtctctcaatagaaaagtgtcactctactatatatttcgccttataatgttaaatttcgtggaaatatatttacaaataaaataacttttgattttaaaaaaataaaaaggtaaaagaatatctctattaaaaattacaatttttgaaattataaacttagttgacaaatttaataaaacagagcaaccattcttacatatataatctttcatgttgtaactaatagtaaaaatccttcttttccaattatcttaaatttagtggacagatctctgcaaagcatatttagtacaaaagaggttacaaaccaaatatggaagagtacatgcacaatgcttggatttcagtatcggctccaacaatatttgttcacttctaatgtgtattctccgaccaactctctattcaggtcttggagactttgtcccaacacaagcaaaacat

SEQ ID NO: 41469 - DNA, 505 bp, Arabidopsis lyrata
  Intron number 2 from transcript 471018 (locus 471018) deri ved from phytozome v7.0 (chr-ID scaffold_1; pos 3551559 to 3552063 reverse strand)
gtgggtttacatcactctccatccgagttgttgaggttattgccttatcttcttaccaaacatagttactgttgttatgttaagttcttatctatggaacatgtgcgtaagattcctttgctgggaaaatattcatgttttgatctcctagctcatctgactgaatgttttctactaaatcacaaaattcatgcctattctttgtatagtctctataactgatgatgaccttgatgttgtatgtgctgattaaatcttaaattttacaagattaacgatgacttggtgtcgagttaagcttgtttgtcttctccggacttcaaatgttttctttttgttcttagttcacttttttgcatctgatggatgaattttttgtcattgtgtcagaggtttgttcgactgtgactggacttccatagcctttttagcatttttatagatttgtggtattgtgttgtggtttgcaggagttagtgacctttagtccttgccctccccttaa

SEQ ID NO: 41470 - DNA, 479 bp, Arabidopsis lyrata
  Intron number 1 from transcript 471018 (locus 471018) deri ved from phytozome v7.0 (chr-ID scaffold_1; pos 3552156 to 3552634 reverse strand)
tcactgtatgcttctaatctccttctctgcatatccaaagttgtatacttgatttaacccttttctgagttctctgtctgattgagtattaaagccatgaatcgaaaagtctattcctttatgtgttgagaggaatgaaaagaaagtcttaaccgttttgaattgtacttttgattaagttcttgaaatcatgttatggtttgagttgaatctagtaagaaagtctagtaagttgttgaagttgaatgaaaggaaaataaaaaccaaaccttttgaagtgttctattagttgtttgattgaggattaaagttctccatgtgcagttacgacttacgagtgtaatccatattaaccattaaagaagcagacaccaaaagtttgaagcttttgctagagttctgtttatacggttgggataatagaaaactttgcttattggttaggttggtgggaaattaactgcattggaggaacatat

SEQ ID NO: 41471 - DNA, 479 bp, Arabidopsis lyrata
  Intron number 1 from transcript 496450 (locus 496450) deri ved from phytozome v7.0 (chr-ID scaffold_8; pos 20630824 t o 20631302 reverse strand)
ccctttattattggtaacactaatttgatcatttacccttcttttttttctctaatttataacctttttttttgtccggggaactgctttttttttttttttttctgttggttttatgaagtttgggaaaaatccagaaatatgtttaaaaaatatatatatatctatactagaaaaaaataaagaaaaacatcagtcttgctcgaagacttatttgtctgagcgaggagagttttgttctctgtgttgtctgtaagtttgacttagtcaacggtaatttaagacaaaaagagtgagatctcgaattttgtcttagattttagaacatatttggtcaacacaaatttcatctaggtcttgattcttggtatggtttctgattcaatcgaatgcaacgtttgaaactttattcacaactaatgataaaatcttcaatcagagacttatgctcttgtacatgttgttgttgttatcaggaa

SEQ ID NO: 41472 - DNA, 784 bp, Arabidopsis lyrata
  Intron number 1 from transcript 924923 (locus 924923) deri ved from phytozome v7.0 (chr-ID scaffold_2; pos 2670957 to 2671740 reverse strand)
gaagtggaacactgggtgttttcatctccacaaaggtgcgttaagactttaactttgtatttttgtactctttgactaaggttcgtgcatgtaaaacgtatcactacgtaagcagacaaggataactcactacgtacgaggctgtaggcatcacatgctgacatgcatggcccatatcacgtgcaaatatatacaaaatacgaatttgggcttttcttctaccacgaagcatatatttatagtttttcacatgttttgtatgctttttgaaaaatgaaaaatgcaacagtactattaatgtgggttaataatattgtcccacatcggttgggtttgtgattcataggcaatatatatgtgttgtggcaatcctcctcccttaatctagattttgggtgtgagttaggcccacactaataagtactttaagctatccatttcaggtgcaattttcattcagcaacaaatacaaaatcaaagaaaaattgtaattttttttaatatgtttacaaattacaaacacacgtacgctaagaaaaaactgatatttcgttttacgtgtatggtgttgaatgaattttgtttaaagtggttaagcttacgttaagttgtggccttgtaggtatacataagcacaaatgttaatattataaacgcctcttactcattccagtttacttgcttctttattttgtaaataaacaattttttccagtataatatattttaccctattataatttttatttcttaagggacgagatatatcgaaagaaatacggag

SEQ ID NO: 41473 - DNA, 779 bp, Arabidopsis lyrata
  Intron number 2 from transcript 925876 (locus 925876) deri ved from phytozome v7.0 (chr-ID scaffold_2; pos 11731759 t o 11732537 reverse strand)
ttggaacttcagaatcttctgctaggtaagactagtcatttgaaaagatctctattccatttcactttacactgcaccatagctgttatataggtatccaatacagcaagttgtcgtggattttgacaagtctgtactgggatgttttgaaagcaaagcttttagattctttagatccgtccaatcgtgagagtacacctgaaagcagattcctcactgagtttgtatgcaatatctgaggggcaccaacccaattgtacttgctctggtcatgttttcagaaacctgaagaagaggtaatcttattataccttctttctctagtatttcattttgaacatatttcttttatttccaatgatctctacttcacgggcataacatatatcatcattatcaaaaatagagtatatacctaaagaagcacgtgcactttgagccaagtagttacatcagtgtccgtgttctaccgtagcatattctagtatatgtcacaattttgaaacgcacgaccctgtgtggcaaaatttgaatcaaattacttttggcaagagcttactgattcgtttcattgtttccttcttctctagtaataatatctgttattctcttaccattagtaatatccgagatactaatttgatgtgattatctataccttgtgagcagctattattgtctttgctctgcagacaaataagacctctagcacaatcgattcagatgagtggatggttacttttacggatattgtccgtccgtgaagcatattaaaaggc

SEQ ID NO: 41474 - DNA, 631 bp, Arabidopsis lyrata
  Intron number 1 from transcript 494108 (locus 494108) deri ved from phytozome v7.0 (chr-ID scaffold_7; pos 23769246 t o 23769876 reverse strand)
accatttttgcttcttcactcctccattgactaggttaagctctctctgtctctcaatcttcaaacttcttcgtttcttttcttactcctgttggaagatttgttgttcccgacgaagccttcgtgtcgtttcatctccttcttcaaattttcctaaatttcttcgcgagtatatgctttaggttttgaattgagtagattaagcactgtttttgatttgtaaaatcttgaaccctagttgttttcacaaattgattaactatggatatgcaatgtaatcttgaagtcttcaaccctaattttctggattttcatttggtttctgggtaggcgaaacgagcttggattgaaattaatcgctcttggagctgggatttttgttagattgagatattactttcttgtttcttccttcttagcaattacgttaattaaatgttgaattttgttgtttaagggatcttgtgtggcttgatttggatttgatttgttgattctttgctttagggaactgaatcttgtgtgctttattttggatatgattcttttggtcttgaattaatggttctatttaatgtgtattttgttattgcatttctgatactgtagtttcttgtaacagggtattttt

SEQ ID NO: 41475 - DNA, 567 bp, Arabidopsis lyrata
  Intron number 1 from transcript 357318 (locus 357318) deri ved from phytozome v7.0 (chr-ID scaffold_8; pos 14055510 t o 14056076)
catcgttttatccggcggaggcggggaaggacgaagtggaatccctaatgttatcttagggggtgttattggtttattaatttgtaaatccatatagaatttgaaaatctctattaattatgaaatcaagatatatggattttgaaataacatgtgtttacccatggatttgaatccttctatttttctcttttaattccattcaaatccatttaaaacataatttggattctcaaatccaaaaacaaatgactaaacgaataacataggattttaattagtatttataaatcatagaaccaataacacatgattttaattaagattttaaattcaatgattgaataacaaatgatttttgtttggatttctaattctttataaatccatgaaccaataacccctccttaatctttcgtgttgatctccacaccaattctctctctgaacaacccgtaagttccttcttttcttctcttgtgtgaatcataattcacatttctctgaacattctcaatgtttttcacagattggtaggcttgtggttgcactgatctaccttatcgt

SEQ ID NO: 41476 - DNA, 439 bp, Arabidopsis lyrata
  Intron number 1 from transcript 475488 (locus 475488) deri ved from phytozome v7.0 (chr-ID scaffold_2; pos 7623987 to 7624425)
tggccaacatcgaatcccttacatcgctattggaggtatcagacctattcttgatattctctacattgttccttgttttctcgaaattgagaaaatttgtttctatgaaaatggtttattcttgtggctgtggaattgtgtgaatcagagttgattgagagatgatttgtaaactaattaagtcttgttcgtcttaatctttgattatcgtcttgtgaaattgtgagttagtgcttcttatggcaatggaattatgtgattctgagtttttcttactactttatttagtcgtctcatagtggatttgatattttatgtttcttggatcaatgaattctcgtttagtgttaatctttggtgtttttttgagtattatttagaaagattcttctaacttttagatttttttttttgttgcagccttgttacaagcaatctc

SEQ ID NO: 41477 - DNA, 440 bp, Arabidopsis lyrata
  Intron number 1 from transcript 929717 (locus 929717) deri ved from phytozome v7.0 (chr-ID scaffold_3; pos 7881895 to 7882334)
ttcctctcgttgtcgccgtttgggcttctcttcaggttagttcgtttgtatattgatttctgatattcaaagcttataaattaataagtcctctcttgtttaagtttgtccctttgataattttgtctggatccgtttaatctgatactttagaatcctcagataaagttggaagctttatgctttttggtgtatacctaacattttcaaacttggcatacacaacaacagtttgtagatagttatggtaaattgctttttcaggaaagaagagttacaatcttaggtagattagattaaagtttcgctcatgtgtttgtgttttactaaaataaggtttcattggtaaatttttcaagagccttaataagtgtgttcctatgcacaaatctgaacataaagttaaagttttgctgtgttcatttgtttttctttgtagt

SEQ ID NO: 41478 - DNA, 810 bp, Arabidopsis lyrata
  Intron number 2 from transcript 480794 (locus 480794) deri ved from phytozome v7.0 (chr-ID scaffold_3; pos 23179365 t o 23180174 reverse strand)
ctcaggtaattaattactcttgtacttgtaaattgtaatatataaaccctcacgggtcgtttatgtactaattaatctagcatcattagactattaattaacgcgatattactacaacgttatagtttgaattggctataaacattttcgtgaacttgcttttcagatgaaaaaaagaaacttgcttttcaaactctaaagtagccaagtaggttagtaagtattctttggttttggatttggtggacttttatatctcacattccagctcaatattcatataaattgcatttgtttatttttatttggtctcaatctcatggtatggttcacttacaataatttattgttgcaccgagctcttcaattatttattgtaattatttaatactccctccgttttacaaagattgtcattttaaggttttaattttgtttcacaaagaatgtcgttttatgttttcaatgcagtttttaagattaattctcttttttatctctattatttgagcttattaattatagagagggtattatctagtgtattaataaggggtaaaaatgacatttgtttagttttcttaatttgtgtgaaaaatggtagaatgacactttttgtgaaacagagggagtaattgtaaatcatgcgaaaagtctgtagttgaacgttggaaggaacttgctctctttctttctctacgtttctacttagaaagaaatcaaataatctcattatcgtaagataaaagaaacatttgtttcttgccacaaacgttatactgatccaaatagggggttttccctaggttg

SEQ ID NO: 41479 - DNA, 945 bp, Arabidopsis lyrata
  Intron number 1 from transcript 949200 (locus 949200) deri ved from phytozome v7.0 (chr-ID scaffold_8; pos 11061965 t o 11062909)
tgcaggtatgcttattataatcattcctcacatatcttggattgcggcaaagtttcctaagaaatgtgtcatactttgcatttcaggttagtatcatatgaggaaactgctacttttagtttcagaatgttgtattatgatgtcagttttatttttctttttcttacagaattagttcttagctcatttggctgattttttctatcatttgcaggcaataatgaacaagttgcagatataaagacacgagtctgctatgaactgtcctctggtttgttaacttttctttgactaatttcatattaatctgatcacaatggtgattcttgatttatggatactgtcaattctattgttgtagatggtttcgacagttgatgagttggtgtcccacttttgaaacccaaggttttgaatatttctctacttcaaaatttccagctctgatttccctgtttttacttaagttattttcattatgacaaggtgatatttctgttcattcgacaagatttgatagatttttgtaaggatattacagttgccaccataaatcttacaatcaaacttttgggtgctttacatcagtttgttggttcaggtcgctaagaattcctttaagctgcttctgcttattctaacttgttttgttagaagaacatatgtttgcagactacaaaaggtttcgtagtgaagtcaaacctgcactactaagacgctgaatatgagaaaaatcttttaaaggtacatttgtgtggattgtcttaatttttggatttcttggttttcttgctctacttatattctgttcatcagtagcaagattacccctaatctttttaatattctgttcattcggggactgcggttccaaaaatagttgttaagacgtatgttgcaaatcttcttaaaggctttgagattactattggtgttaaagtagcc

SEQ ID NO: 41480 - DNA, 823 bp, Arabidopsis lyrata
  Intron number 1 from transcript 932374 (locus 932374) deri ved from phytozome v7.0 (chr-ID scaffold_4; pos 2066441 to 2067263 reverse strand)
cttgaagaggtaacaacgttttcacatttatttttctctaaccaaacttttaatgaaccgttctaatatgattgaattgatcaagtaaccaattccatatcaatcgctagaaaattgatttttcttcgtgatatttttttttcttatacaattaatttgaatcaaccaatatttcaaaaactatatatatatgatattttaaattttaatgtattgagaaagaccgactggtacaagagcacgacacatgctctagttggtaaagcctgattacgcaatcctaccatcacttatataatttttctaactaatatcattatactggtgttatggtctaatttgatatattaatgcatattttgtgtcacgcgtttggtggcatcgcttaatcaaatttaacataagaaattaaattatgattggttaagtgatttagtcttcacaaccacaaattttaaattagagcttccttctccatataagctagccacctttccctacgtaaccaaaactagtccttgaagttacttcattatttatcttacaatttagtttgtagttgacattatcttatctcaagaatttagtatatgatgttccaagataccataaattgttaataagagaagaaaacacattgaactattgaagtatgtatgtataaataatatctaaacgaaataatcttttgataggtttgtattttattttgaaaattgggctgataacaacaaaacaaaaattcatcaatgtatatatagttaatttccttaaaatttaatttgtaggtagaccgacggtacaaccactactgcgaacaaat

SEQ ID NO: 41481 - DNA, 306 bp, Arabidopsis lyrata
  Intron number 1 from transcript 485844 (locus 485844) deri ved from phytozome v7.0 (chr-ID scaffold_5; pos 17021929 t o 17022234 reverse strand)
aatccgtccaaggtaccctaaaaactcatgctttcttcttaatactctcactcaattacttacttaatcgagagattttgacgtttcttttgccaaattgcttgtaaagaatgatccttttcaattgaatttcttctctctctatattatctttgctcatgatagctaaagttcgggtcttttggttctgtacaactcatctccgttttgagtctggttttaacttgttattaacttagtggagagtgaaattttatatgattgtgtataggggctttgaggtactggtatcagcgcaataacgtg

SEQ ID NO: 41482 - DNA, 419 bp, Arabidopsis lyrata
  Intron number 1 from transcript 906029 (locus 906029) deri ved from phytozome v7.0 (chr-ID scaffold_3; pos 17493367 t o 17493785)
tttcagacaccaatcgttgcctccgaggagccttggtatgctcatcttcttgtttttttggctatacatattattttcgttactataaattctaatagtgtttgtttttttaaacgattgtatgttttggatgaatgaaagcaaccacgatgcatgaagaagattcaggtgatgtttcaattgatcttttatctttaatttatcgattttctaattttacaaaaatgttctcaccgagtagaatatacttttgagttttgagttaaatctttcacagtctgttgtggattagcaacgtttcaagccatattaactattgtgttgtggcagttcgaaagattcatataaattggactattgctacaaaaaaaaacagaatcacaggtttcattctatcaaaggagataaagcctcttatc

SEQ ID NO: 41483 - DNA, 331 bp, Arabidopsis lyrata
  Intron number 3 from transcript 345055 (locus 345055) deri ved from phytozome v7.0 (chr-ID scaffold_4; pos 15632135 t o 15632465 reverse strand)
ttatacaaaacaaggtagataatttctcctttttacttgcctctaacactcatttttttcttttctttctggattatggtttatgtatctttcgagtttgtttatctatcttttctgccttaaagccatatccctcttattcagtacctactctatcgttctgaaaattgagaaacttgcgtaggatgttttggaaacatttgcttctgaggacgtcttaagactgccttatctttgattcagttcgtgaaccacttgttgaagtctattatttcacttttctgtttatataacaggatcgcatcattgctcgtctccaacaaccttattc

SEQ ID NO: 41484 - DNA, 367 bp, Arabidopsis lyrata
  Intron number 1 from transcript 345055 (locus 345055) deri ved from phytozome v7.0 (chr-ID scaffold_4; pos 15632812 t o 15633178 reverse strand)
atcttggtttcgccgtcgctcctcctccgtcgcatgtaacttaatcgaaatttcgtctccggtttagctcaaggttttgctattaggaaaatgcgtatgagatctgtaatttgaaggagattatgtttctgaggagtggggaattttagctgcttgtgagttttgcgaccatatgttttgattagatctctgatctcttggctttaatatattgaatctgagaattttgcttgaattagagaagacttatggttatttatctgtttaattagctacattttgtgagaattcgtattcatattgaatcgagattatgagctcaatcattttccaatgtaggaagaattacaaagcttggcgacttcga

SEQ ID NO: 41485 - DNA, 790 bp, Arabidopsis lyrata
  Intron number 1 from transcript 936721 (locus 936721) deri ved from phytozome v7.0 (chr-ID scaffold_5; pos 5505651 to 5506440 reverse strand)
tcttcttgttcttgggatccttacttttctccctggtaagaattcgaattcttcgtctattattgagtttctcgtgttgggtgatactcaatacataatgtttgattcgaaaacctttgtgaaatctgttgtttgatgtggtgaatgtgtgcattggatcaactagagacggaaattgtgttctttgttagttgaaattaagtttagtgtggagatggattttgtgttctttagtttaggtatttatgcctggtgagtttcttcagttgttttcctgagtggatgatgtttgattcaaaaacccttgtggaatcttctgttgtttgatgtggaaactgagcgagttatatatcaagtagacaatgctttgagttcttcttctgttgaaatgatctactctttcttcgtacttaatgcttgatgtttgatttgaaagccttgtggatatctgttggttgatgtggactgtggagattgagtattggatcaactagacacagattgtgttctttgttaagttgaaattatgttctctttatccatttatgcttctaagttccttcttattgctgggtgcatgattcgaaaacagaatctgttatttcacgtggacattgagtgagttggatcaagtagacatagcttgtgttcgttgtctgtttaaatcatcgtctctttgtttgttctctttacctatgtatgctgtgagtaaaacagtgattttcatggccttgacacatttcacaattgtggctacaggtttctacgagacccggattgcttactactc

SEQ ID NO: 41486 - DNA, 403 bp, Arabidopsis lyrata
  Intron number 2 from transcript 951924 (locus 951924) deri ved from phytozome v7.0 (chr-ID scaffold_258; pos 1203 to 1605)
ttctgtccacttcgatcttcctctcacctatgtaataatcctttttaatttcctttctcttgttttttttttttttcacattcgttttgtgtttatatatctactatattacgatttaacttttgaattattgtcttctctagtttgtcaccaacaaaatctctacattgacgagctagggttaataatgcgtgttatatgtcttgttttagtggtttctagctaggatcattatttctcagatttatatatacgtatcattgttttcagatttagataagtattgttgttttcttaccaaaaaaaaaaaaagataaggattgttgtacgtagtcaagagttacaagcattttcatatatatacacaggccagagtttatacaggcatacaagaagaaatcag

SEQ ID NO: 41487 - DNA, 399 bp, Arabidopsis lyrata
  Intron number 1 from transcript 487629 (locus 487629) deri ved from phytozome v7.0 (chr-ID scaffold_6; pos 3101252 to 3101650)
ttcagggtaaattttcatctctcttcttctgatcgttgctctgttgaaaagcaattcagtcggagaaactattactccggttgggtttatgcttaggcagatttggtaagctagatcgtcggatttatcatcagcaatctgtagctagttcgtgatctctgacattggatttttccaaaactcgctagcgactttgaatgttgaattgattaaagccttacttccccaaataggcagatgattgtatcatattatagactagagaaaatgttagatctcggttgagatttgagctcgagatctagagatagtcacagtgagagtggattagaagatcatatgtggagtgagaaaaactaatccatcttcattattgcttttgtgtcctcagtacaagat

SEQ ID NO: 41488 - DNA, 568 bp, Arabidopsis lyrata
  Intron number 1 from transcript 923881 (locus 923881) deri ved from phytozome v7.0 (chr-ID scaffold_1; pos 28471376 t o 28471943)
aagcagtgaccgctccaactccgtctctctccgaggttattcttcatcttatacatcatttctcattttgctctctcggttttcatccgatcttcgttcgatctactgaaaaatgagctgattctctttgaaattgattgtgagactttcttttgtaagatctgcttcaattcgattatgattaatccttttagaaggagctaaattagattcctttatctcttcaacacatattagggctttaaatttcttgattgatttgaacaagtcaacaaagattggatctttcctcagtttttagattattttctgatatttgcgttgaaaaattcaaacttgtttctttataggttacattaaaggattgtggtaccggctcctgtttcatcatacagttctgggtttcaggcgccttttcttccgcaaaagaatcaaggcaagaagaagtttccacagattggtcatgtttatgagattcttgtgagttcttgtgtttgttggttatgtttcttgaatgttcttggtttttataggttataggtgctctttctcatactggtttggagtc

SEQ ID NO: 41489 - DNA, 838 bp, Arabidopsis lyrata
  Intron number 4 from transcript 476408 (locus 476408) deri ved from phytozome v7.0 (chr-ID scaffold_2; pos 15536642 t o 15537479)
aagaagtggctattaaacttgtaagtattcctactcaaaagtgaaatttttaccaatttcagcgtttgattgatgtacagagatcattgaagtctgtacgtatatcttcattaaataaagagtgaattttctcggatagtaggaagaaagctttgattgttgtggcatatgtgtagaaagatttactattttattgcttggtcttacttagcttggagcttctccttttacatgataaaaccgcttagaatgaaaacattggtatacatactgtgtttagacgaaaaaggaaaagaatttatttagtaggctacacacagctctaaccaggttactgctcttttgtatgggattgtagcaatttatttagttgagttcttccttaacttcatcttgattatctataactgttttcactcagtattcaacatgatcaaaccaatttctttgtagtttaaatctgggttcagcctgacttttcgtaagaactgagagctaattattgattcttgagaagatagtctaatcaatgctgaatcaattcttagagtccacgacaaaattacctgcaactggtgggaccatcctattgaaaattttgttgtggcctacaaatggagaattatgaggctgacagctgtacatattactgtattgaaacattggctgttgcttttcttttgttacctgtttgtactgcttctgactgttgagtatgttaaatcaaatcctcatgtttgtttcacatttctttgtcgttctgaattgtaacagatttatctgctgtgtttgttgtatagtatgttctgacggcatcttttcttcttctttcaggaaa

SEQ ID NO: 41490 - DNA, 740 bp, Arabidopsis lyrata
  Intron number 2 from transcript 909085 (locus 909085) deri ved from phytozome v7.0 (chr-ID scaffold_2; pos 16359641 t o 16360380)
cgtacaaaaaacaaaccttaaaacaaaaaaaaacaactaaaaataaccactacaaggtaggctagtggtaggacgtatttcgtggttgagggggtaattctaatacgcctgggttcgattcccccttgctacatactagtagccaccagggaatttacatgcggacttgttctggcgcccgaaaccgaagaccgttacctggccatgacccaccatcgggtatacgtccgtgccgtaaaagttcggtctctagtttagaccatcttgatggggtcaggacactcggttataaaaaaaacaactaaaatagtaactagttaaacaataacgtgatgtaccatttaatttgatagatcgactagacatttgaataatgcagttctaaaaatgtcatttgaaaaataaacgtgtatcatatttttttctataaacaaaataacggggaaattattggatttgattggtgaacataataaaagtattacaagttgtatagtttttatttttaccactcacaaaaactttatcaaaagtgttactaaaagttttattctcagtttttttttacagctttctcatacagttctttcatacagatttacactattcaggtaaaactaacagctccagctaacagctaaaaatttgtacagcttttggttaccaatcggacctattatgctaatatttagacaaacacctaacaaaaaaaatcagatttctttgacaaaaaaaaaaaa

SEQ ID NO: 41491 - DNA, 568 bp, Arabidopsis lyrata
  Intron number 3 from transcript 475863 (locus 475863) deri ved from phytozome v7.0 (chr-ID scaffold_2; pos 12627785 t o 12628352)
ctgctgaatcatctgctactgatacttcagatcaggtaaacgattcacattttcttgaacgccttatatataggttttgtatggctgattagtggttactgctaattttgtgtaatcgtgaataaaagctgaaacttttagctcgggtttgtgtctttacatcatctagagatcgtattaggaagtatgtctattacggagataaggggtttaattatgttatgtcttcttgatagtagagtgttatgaggatacgacaaggactgtctctcgagtatttgattcattgatttgaacctagccagttattagatatcatctccgcgatatgtgactacatgcttctcttgctactgggtaatctctgttaggattgatttacatttatctcctgatctctagaagctctttacaatgggggcatttttctgtttttgttttaccttctcatcgattcattaataaaacaattcagtaatctacaaaacctaatgtcttttattgattccaatggaacctctttgttgttgcaggatctccaaaacgcttttgtaaaggtccgaccgaa

SEQ ID NO: 41492 - DNA, 730 bp, Arabidopsis lyrata
  Intron number 1 from transcript 471557 (locus 471557) deri ved from phytozome v7.0 (chr-ID scaffold_1; pos 5859402 to 5860131)
caccaagctttttgggtcttttctctcccgttcaggtttatgattcatcaacagttttttttcctcttttttggtttggttaaaagtttaaaaatctatttatggaaactgtatgtttgtgtcttttctttgttgagctgtttcttgtttttgttttgttggctgcttagggaaaaaataacacgttgttgttgttggcaaatctaggtatattccaacaaattatagattttgtaaccatttttctggaatcatcttaggtcaaaattggagattatgagattaagattgaattaggggttattagagatttggggatttctcctaaaggaaggaactttgcaactcaactgtattgaaaaggtaggaactttcaggagattgtggatcaaaatactcatcaagatttggggttgctcaaggtttttatataaattctcaggaagatttcttggtgccatatcccaaaaatcttgttcttatgacctgatatgttttgattatggaacaatatgtgttctttagtcgaaatggttctttagacatgcctttgctatattctcttttgatagggttatctagtttttgactttgggtaactagcgagtttcgtgtctgtggctctactttgtcttgactctgaatctgtctttacctattttgatgtgttctcggattggtattcgcggttcttgttctaacccgaaatgtaacaatgtgcagggagcat

SEQ ID NO: 41493 - DNA, 504 bp, Arabidopsis lyrata
  Intron number 1 from transcript 329301 (locus 329301) deri ved from phytozome v7.0 (chr-ID scaffold_7; pos 8046813 to 8047316)
tgcagtgtcggctattaaagaccaaggcacttgcagtgagtacttttactagtcttcacatctatacccgatatatatatatatatatatatttgcttaatcaacaaattctagcctttgttctatatatatatatatatgtttcttagataaagttagtgtcttttcctatatcgaaatatgaattggtgaccttaattagtttgttattccctttagaagttagttacttttgttaaattaattaatagtttagtattctttttatatcaaacctttttaagattgtaaatataaacgaggagaaatctcgcttgcatttacaattttcaatcaaatagtgttcactaatttattttcttttgaaaatttctgttttgttttaacaatcagaattttaaagatggaaagacatcacgattaaaaatgtaatatatcttttttctttgcatattaatttaaatgaaagacagctgctgggcgttctccacagtggcagcagta

SEQ ID NO: 41494 - DNA, 459 bp, Arabidopsis lyrata
  Intron number 1 from transcript 484168 (locus 484168) deri ved from phytozome v7.0 (chr-ID scaffold_5; pos 941222 to 941680)
ctccggcgttacctccgtcgatttcatcttctcaggtaacttagggtttcctctttttttactttttgatcgaaaaagtctgatgatgtctagcgttaactcttttagtcctcatagtcgtactcgtactcgtagtcttagggttttgctggcgacgatactttgatttatcaaaccgaacttcttctttgtgatcttctatgaatcaaaagttttcttagggatattaattaggttttgttacgggagataattaatccatcgtcgatgcttcttctttgtacttctggctttgtttcatacgttttgacctttgtgaagagcttattagagtgacattgctctgcctaagcgttttagtccaacgaatgctttattctctttttactgtgtaaagaaatttgagatccttgtttgattgcagttggaaggagtgaattgataaggacaggccaagat

SEQ ID NO: 41495 - DNA, 261 bp, Arabidopsis lyrata
  Intron number 1 from transcript 338817 (locus 338817) deri ved from phytozome v7.0 (chr-ID scaffold_2; pos 10647458 t o 10647718 reverse strand)
gctttgattattattagatacattgatgtaatttgatactagctactagctagtatcaatcagctaacgtttgtgaaacttcatcccataataaaatttagagagctttggtgtttatcaaaacaagagaagagaagttagcagcttatatattactactacccaatacagtagcaaatatggatgattggtttatgatttgaaacatgaatttgttttcgtatagccgcctgtcgtaaaccctgttcccgagaaggctcc

SEQ ID NO: 41496 - DNA, 732 bp, Arabidopsis lyrata
  Intron number 1 from transcript 311676 (locus 311676) deri ved from phytozome v7.0 (chr-ID scaffold_1; pos 2144570 to 2145301)
cgtttaggtgcggtggagtcctctgttttgcccttgttcctctttcttttaccatgagatcacagggtagatcctatcttcgtttttgagacgtttcttgtgtctgttgagcttgattagtctaatttcaggcgattcttgaggtttttggtctagttactacttggattagtaatttgcaaaattagggttctttctacgattgtgatcgatcttacacttttgtgggtttctctcttttattattagcaagtttttttttttttttttttttctgattctatactaatgattcgataaattttttgagatgaagatgctttttgagattgtttgatagtttccttaacctgaatcttgatgaggaggttactggaaagtattgtaaaacctaaatcttttctccaatttgcttaactattgaaaacaagtctttcttttcttccaagtaagttaatagcttctatatgaggaggcataagagctaagaaaacaaattctctctctataaaacaacagtcacttttttcagttttcactcacatcctcgttctctctctctctctctctcattttctttcttcctcacgctcttgctctctgaacttgattttggttttccgatcacaatgacgacaatccaagatggtctcgcgattctggtagatcaaaggactggaaaatggggtgtgatttgaaacacggcgactacatcagtctttggtctttcag

SEQ ID NO: 41497 - DNA, 449 bp, Arabidopsis lyrata
  Intron number 1 from transcript 924687 (locus 924687) deri ved from phytozome v7.0 (chr-ID scaffold_2; pos 1309858 to 1310306 reverse strand)
tcaccggatctttctactctaaaacgaaagctgtgagtgatttcttacattttcagtccctttatttatgaattacttcagatttgatccgtctctttagtttcttctctgattcaaccccaaaatctaagattttagctgatttgtgtgaattttagctctgaaaatgttgattagattcgttaatttatattttgatccctttatttaggacattattcagatttagccaattaagtttcgattcgtgttgattgcttaggttttaaatgttgaattagctgatttggcttcaatacttgtgattgcttagatcttagatgttaaattagctctaagaatgtttcagataaaatgtaatcattatcgtcgtaagctcgtttattgattgctagaatctggttttgatcttggtaaaatccctaaggtggaggagctgctcaagaact

SEQ ID NO: 41498 - DNA, 236 bp, Arabidopsis lyrata
  Intron number 1 from transcript 477178 (locus 477178) deri ved from phytozome v7.0 (chr-ID scaffold_2; pos 18929772 t o 18930007)
gcttggtcttggcgtttaccattctggtgttgaaggtttgtctttctgtttcttgaattcatgttttagatctaaatactagtaatttcaattcaaaagattctatcatatgttagatcggattttcttgggatttcaagtcatttataacttcaaaatgttagatattagtattgaggaaaaaattgattttttgaagaatttagttcatttttgttgttgttggtgtatagttc

SEQ ID NO: 41499 - DNA, 447 bp, Arabidopsis lyrata
  Intron number 2 from transcript 489005 (locus 489005) deri ved from phytozome v7.0 (chr-ID scaffold_6; pos 8888207 to 8888653 reverse strand)
accattcccaagactgtaagcttctttatcctttgcttcttcgtcttctccaatctcttgtaatttttattcctattgctttcaaaaatctcttcgcctgtttcttcagtgtatgttctttgttttcccatttgaacaactagtctgggtctgtccttcttttctgcacaagtgtgctaataaagatctgatttttcaaaaccagtcagtaactttaaaaaaaaaaaaaaaaaggtttgatttttcagctttttcctgtaaacgtagcttcttgaatccaaagttttcagatttgctgacaagtgtttcacttttagattcttgttcttgttttctccagttgtttcttgcactatattatttgatctacaatggaacagttcctctgactaataatagcttagatctgattatctgcagttgtggtggaactgtggaagaagaaaa

SEQ ID NO: 41500 - DNA, 741 bp, Arabidopsis lyrata
  Intron number 1 from transcript 896600 (locus 896600) deri ved from phytozome v7.0 (chr-ID scaffold_5; pos 3447785 to 3448525 reverse strand)
tccacgctccacgtaaatattccctccattttcgttgggatctctaaatgaatcttggaattcaaagaaatgagtcttctcatccggactaggtctatatttcagcaacattacatggaagctgttgctacgtctaagttgcttgggcgtgggaaaataaatgagattatcctcgtcaaaagcagttgcgttcaagacagcgatagtgactagactcttctccaacagatcaatcaatacttgctcaaatattgcttctcccttttctatatagcgcctgacaaaatcttcaaaataatgaacattaaaatacttcgggttgtatctttggacgccttccggaaaacttttggacaacgccagaatatcttacttctgaatgaaattattcgtgttggatatcttctagatccgttgttttttggtctatagatctatgagatttttggacaatcaatctaacaataacttagtcggaaggcattccaaactcgggataggcagagtggtagcccgaagggcctagccgttaacacggtggaccagtccactatgtagcacgtcggtgcgttcctaccggggccgaccggatagccgatagggtttatcaaaaataaaattaaaaaaaaaaaaaaaaaaaacttatctttagatctcatctgaatttttggacaattcatctaacattctcttttgtttttgttttttttttttttcagaaagcaagtttcactcggtggg

SEQ ID NO: 41501 - DNA, 519 bp, Arabidopsis lyrata
  Intron number 1 from transcript 888834 (locus 888834) deri ved from phytozome v7.0 (chr-ID scaffold_7; pos 3691818 to 3692336 reverse strand)
tggactcagattcctcgaaatcgcggattgatcaggtccgtttctctctctctctttttctttgattaatttgtctccacgaacttcagacgaatgtttgtgttcttcttcctctctttctccttttctctgtgtgcaaattcgtgcttgctgcaacaacttcaagtttctcaagacttcaaaaacttgtgctttttgaattctgacctatatcgatgcaaatgggtgaaatttgtactttgtagagtcttcaaatcattggattgttttggtagtgaaaatctatataatttgtaaagaaagtcgctttttaatgagcaaagtcttacactttgtcaaggattttctatgaattagataaaaagaattgttttaaaaagctttttctgcagtcaaattatgaaattagttatgatgaatgagaagtgggccaaaagacggattttgttacattgaagcataagtgtgtttgcactgactcattttccttatgtttgttgtcactgtactatcagtttt

SEQ ID NO: 41502 - DNA, 635 bp, Arabidopsis lyrata
  Intron number 1 from transcript 482166 (locus 482166) deri ved from phytozome v7.0 (chr-ID scaffold_4; pos 15312126 t o 15312760 reverse strand)
gtgtacggagcttccgtcgtgacttctgtacatttagatcttaatctcgctctcgagttttctgagaaattagaaaatgtgtttgatttagtgtgaaaattttgttgatctgctgaaattttgaggaaatgttgtgtatgttttggtattgatctgaaatctgagcttgatgagagaactctctgttggattgatactgtataagtctattaaacttgaccattacaaagcagactagtgggatctgtatatgcttgattcaagatttcatttggtttcagtgcatgttgttaattgcagttatggttccccagatacacaacattgtatgttgatgagagacagacattttgagtttctactatgttgaccagtttcatatgttatcaatgcatattgttgattgcaattatgctcctcagattcactgatgagagaaagagattttgagtttcttctatgtagaccagtttcacggttattagaattagttaagttatgaactttctcttacagttctgcaatgtgaatctttctgaataaactgctatggagctgttatggtatatatgccttgtgatgaagaaactgattatgactattcatttcttatataggctgctatactgggagag

SEQ ID NO: 41503 - DNA, 612 bp, Arabidopsis lyrata
  Intron number 1 from transcript 928456 (locus 928456) deri ved from phytozome v7.0 (chr-ID scaffold_3; pos 3242365 to 3242976)
ggttcaggtctcatctctctttctccgctcagatttctggcctttgttcttctcctagagacgaaatctggtttgatcgcatattacgagtctccggttttcggatttattgaatcgtacgagacttgcggcttttgaaattctaatttcgtttcggaatctgactaattctctgtaatttcgtccaacttctctgttaaattgctcatgtgaataatagtatacttttaggttcataatcagtttggttctacaattaatctcctagtttatgctttctctgatcaattttggattcgagttagtctttattgagttgttcatgtcatgttgaatgataattttactgatggaggagggtttaattttgtactcataatcacatcttaaattgtttagactactattggattagtggactatgactttgccattatccaattgagtatttgcatgctgactcaactctttgtttctttctgattgatttcagcttatacgatcgagggtttaatttggtaatgattataatattttgtgttttgagttatttatcttttgtcttctttgtgaccagcttaaacagaaaggaaccggaccaggagcaagaag

SEQ ID NO: 41504 - DNA, 567 bp, Arabidopsis lyrata
  Intron number 2 from transcript 473038 (locus 473038) deri ved from phytozome v7.0 (chr-ID scaffold_1; pos 12464598 t o 12465164 reverse strand)
tttcaacacactcttaggcgctaaacccatcgaaggtttgaactattttcttaatttattattagtatttctttcactttaattatttattttatacactcataaatacctcagtaataataatctctgaaacaactcaacttggctctgcattcgcatttactcaacattgtatacgtatatctataaaataatacgtatttcatataaaaccttcaaaaaatcatgacgcatgcatacttcgaaaaataattcaaatttcaaaacgttacaagtgggacctttggtacgtatttagtcaatgtttcgaaaataggtaaaaaagcaagagagtgactatgtacacttctgcactcatcagtcactgttttttacagtctggcacatcttcactacttcccaaaaaaataattaaaaacacacaactatttccattagtccaaaacaacagttaaaaacacacaactagttccattggtccaaaaacaaatctaacgaatattagttattgtttctttatgggttcgtgcaggtgctacggtgaaactagtgtgtaagagcaagaag

SEQ ID NO: 41505 - DNA, 443 bp, Arabidopsis lyrata
  Intron number 2 from transcript 359535 (locus 359535) deri ved from phytozome v7.0 (chr-ID scaffold_350; pos 5179 to 5621 reverse strand)
tctacggtgagtaacatgtactctgtttttattttattttatttacaacaaacaattatctgcacaatctttttggatattagtaaagaagtaaattgtagtatataattttacatcgtttccaattatgtttaaaatataattcaaagcggttttgtagtaaagtaaatatctatatatacattttaagaaaaaaaaacaattattctggaatttatttattttggtaaaaatctggtatttgtttattaaacttaaaataaattatccacatggtttcgttttcgattgtttggaagagaaatctcaattctcaagtaatcttctgttgccgtctaaaatcttgttagttgttaatccccgagaaatctccaagtaatcttctcttgtaaatctcaaatgacgtttgcgtttttctccacagagagtggaactcccgagag

SEQ ID NO: 41506 - DNA, 301 bp, Arabidopsis lyrata
  Intron number 3 from transcript 491858 (locus 491858) deri ved from phytozome v7.0 (chr-ID scaffold_7; pos 5500321 to 5500621 reverse strand)
caatcacaaatccttaacgcgccaatcaggcatccgtaagttttatcaattgagcttcatttgatgaaaaattcaaactttgggtgtttgggttgggaaattgtagtcatgcgtaatcttaactcaattgagtttgtacatgtttcatttgggatgatgaaattggtttaaagttttatccttttagatgaattggtgaaactaattggattaagcttaacgaaggttttatgacaatttcaaaattttcttctctttttttgcagaaaaccggaatctccaaaagctagaggtccaaggc

SEQ ID NO: 41507 - DNA, 938 bp, Arabidopsis lyrata
  Intron number 1 from transcript 941068 (locus 941068) deri ved from phytozome v7.0 (chr-ID scaffold_6; pos 6445490 to 6446427 reverse strand)
cgtggaaagctctacgagttttgcagctcctccaagtaattaaacaactctcactcttgatcactttctatttcttgatcgtttttttgctagatctgagcttataaatctttgtctaaaggacttgttttagaactatatatagatcacacgatcttgacgagtttaattagattttcttgatttcattttctagggcttttttcaattcttgaaatttaagatctggtttcttttttgttttttttgttgtctatgatttagaactgagaattttgtaatcaaatagagttgtagctagatggatttccaagtaaatccaaatccaggtgtgcacaatctgaaaagttctatataaagagatactattaattaatatatgtctgtgtgattggaaacttaaaagttggaatcacagatttctatgaaaattatataagtacccaacgtagaatgataatatatggttacatgcattaaccatttgttagttcatcatactttatggtggttaaaacttcaaacgtgtagatatctatgaaggctttgattcttggtttttgtttttgttttcttttttacaatttttttgatggtttttatatgataaaatagtttgcttacattcaagaaaatatagaaattgattcctttctttttcaaacgcacgaaacttaaagtactcaaacataagatattgcttgcaaatgatgatagtattgatatttgtaaatataaatgcaaaactttaacgtttgaaacaataaaatccgaagtaattcgtgagtcagataaataactgtaatcttctattttgatgaaagaatactttaaaacctgaagagctctttttaatggtcatttataagtttatctcttaagccaagtctatgatctttttgataaattcttatcctctttttgagttttgtttcagc

SEQ ID NO: 41508 - DNA, 583 bp, Arabidopsis lyrata
  Intron number 2 from transcript 490110 (locus 490110) deri ved from phytozome v7.0 (chr-ID scaffold_6; pos 22493234 t o 22493816 reverse strand)
taccgatttcgggttgtctgtcttcatcgaagaaggtgagctatagaggttgatctttgatagaatcattttaggtggctttggtatgtcaatgttttgaatctataagattgttttgcactagtctctttaagtataaaaaatcatcttaggagttgggtagttcattgcattgtgatctcaagcttgagtagacgtgtgcttcttgttttcgagtaacaatgagactgttgatcttattctttagcgtaatgatatatgagtgtgtttgataggttttggatgcgagtttgtttattaatgtttcggttctataagactgttttgcacaaatctttttagtatcgaaagtctgcattttttttgctttatgacgtatgtatgttccaatgcatagggatggggctcaaggctctttagtaagagaatcgggtttatgttgtcttattgtatagattgtgatcttcatgatattgtgaactataacattttcgtttattttgattcttatgttaatatgcttgatgctatgtttgtgaaatgaacaggaaaagtttaccgggatatagttgggagtgcttac

SEQ ID NO: 41509 - DNA, 443 bp, Arabidopsis lyrata
  Intron number 1 from transcript 481779 (locus 481779) deri ved from phytozome v7.0 (chr-ID scaffold_4; pos 12932775 t o 12933217)
tttcatcgccggctccatccactgataaccaggtttgattattcttctttaaccaaagtatttatgtgtgttttttaacaacatgtattattcgatagagtttgaaattaaaggtgatatataaaaaaaaacattagtagaaaccattatattttcttggttccaaagtaataatggtttaaatgacattttataatttgatatggtcaggaaaaaatcatatttcacatgttaattcttacgtatagtggatgtggtaccatatttagttgtatatatctgcaaataatataagccttcataaatatatgaaaaaataaaaataaaaacgctttcatttgttgatatttaattatatgttattttcattctacctatttttatttatttaattattatttttggcaggttgtggttttgagggtatcgatccattgcaaggg

SEQ ID NO: 41510 - DNA, 400 bp, Arabidopsis lyrata
  Intron number 2 from transcript 481779 (locus 481779) deri ved from phytozome v7.0 (chr-ID scaffold_4; pos 12933255 t o 12933654)
gaaggtactatataagaatcttttcttaatttcattctgcagaattaagtatcttattaatgtacctaaccttacaatttttttttttgaagagaacctaaccttaacattaatatatacaattcaaatgaaacattcaacgaatagacgatcatatgtaaattataatctaattttttcagaataaaaatatttttaaaatggatattagttaagagctttgaaagttagtgttttgacttttcctaattatcggatgcttctgagcaacaactttttctttattgaatcaagaattatcaaatgacgaatttatggataaattgtaattgttaatgaaatttacaactttgtttatgggacaggggtgacgtcatacaccatagatttggcgacaaag

SEQ ID NO: 41511 - DNA, 533 bp, Arabidopsis lyrata
  Intron number 2 from transcript 947063 (locus 947063) deri ved from phytozome v7.0 (chr-ID scaffold_7; pos 14798013 t o 14798545 reverse strand)
accgaaattccgattggtacgttttatgatttctattttttatttgtttggttctaatgaaacaatgagatagctaataaatcgaatactttaaacctagatacggtgggatttatcgtttatatcgactgacttatacggatcccttatgtttctggataatacgaaagggatggtggatgtaactgtgtctacttcatcttacagaatcataggtgagtttctttttcaatttgtatgccagaatttatttatttatgacgtttagttttggtttgaaaattaataggggattgaaattgagatgttgcgctgtaggagatttggccgactattttatgagagtataggtaaaccgagaatatggtcattcgtaccttcgtgatcctgtattttgtgttttgaggttttggcatgttgaagagtataaaggtattgacttatatttattcatcgtattttccaaaaaccaaaatttaagccggttattatcttctttagtctcatcggattgaatattttacagaaaaacc

SEQ ID NO: 41512 - DNA, 324 bp, Arabidopsis lyrata
  Intron number 2 from transcript 472333 (locus 472333) deri ved from phytozome v7.0 (chr-ID scaffold_1; pos 8982902 to 8983225 reverse strand)
ctcagtaccaccctgagcttcctccttgtctccaggtcccttcttctacttgatagatctacttccttccattgttccaattcattgacttcgttttcttctttgatattactattccaagtttttgtttatcctaattcgaggaacttgcaatgttggtgctgcttaagcagatctgatttctagattgtaatgtcctcggatctgtttcattcacagtctttttattgtttcgattgtgttttataatcagttgaactttgccattttcttattctgcttgatgttcgtttcaggggactactgtccgcgtagagcttggtg

SEQ ID NO: 41513 - DNA, 884 bp, Arabidopsis lyrata
  Intron number 2 from transcript 476099 (locus 476099) deri ved from phytozome v7.0 (chr-ID scaffold_2; pos 13885912 t o 13886795 reverse strand)
ttgttcaagctgttgtcgctatccttttgttcacggtaaagtttttctcttttcccatttttgagtttattgcttttgtgaaaagtaaggtaacaaattggggaaattttaataatctgatactgacgttttatgtgtggaattggatgatgaaggtttttgttttaaaaaggttgactctttttgtgttgatgtagtttttccacccataaagagaaatgggttacgcattaatgatctgatattggcatgtttttgaccaaattctaaagttaaattgctaaaataaaggatttttcatctgaaagttggatccttttatatcactaatagtggaatgattctcaatctttcatgaccgttaaatcgttatattagtgttagaaaaatagttttgaggaaagctttagtatcaatagggattgaagagatcagtgatttggcaattgtatttggacttgggagagcttaggttgctttagaagtcaccagagggctctatcttaggcccggttggtcctctgttcctcacttgtgtttagattcagagaggactggttcttatcagcttatctgatgagaaaactttagtcaaccaacaaacagctgatcaataatagaaaaccttgctaattatgatctttttgcttaagcaaggtcttttgttgaatataaatgtccggaatgttgttatattccgtgaagcggtatcatgggttcttggtttgcatttgtctgatcctgagtacttgtaatatagacatgcctctgatagattgattcatcaataacatggaatatcttattttctgtttgtactggtttttgtttttagccgtcttacatatatgcttctccattgtctatacaggtgacaggaagtg

SEQ ID NO: 41514 - DNA, 707 bp, Arabidopsis lyrata
  Intron number 1 from transcript 921548 (locus 921548) deri ved from phytozome v7.0 (chr-ID scaffold_1; pos 11040346 t o 11041052)
ttattcaggccatcgtcgctatccttctgttcacggtaatgtgatgaattgagtaaatgtttataagttgaaagaattctttgattgttctattcttttagtgagctcaatgtttgaataatctatctctgaatctttcatgagctgtgaattagattggatggtttcagggtttaatctacatgatctttatctcaacaaggaatcaatggagtagtctccttctctgactttggttattatatgatttgacgtgcgaaaacatcgtaaaccgttaggtagcataatggaattcttgttcctgaatggggtttataagaaaatatgttcacgactcttgtgacttgtgagcgtatgagtttgttgattgcgcaaaacgtgtctcttatggatgaaatacttttactcaatgtctgctagattgcatttgttcataccatcaaatctctggacctctgtatggtagaatttctcacagtgttgatgaatcctgaagcaattttcttatcactgcagtttcatgcttatttcttgtacgtgttctgtaagtctaaagctatgacctgtactcaatgtctatgccattacatctcttcaattatgtaaaaatgaactttcccatggtgttgccacatgttctgtatgttcgagacttcagagtctacaatttttttttttccatttacttgcatgaaagctctttgaat

SEQ ID NO: 41515 - DNA, 406 bp, Arabidopsis lyrata
  Intron number 2 from transcript 496505 (locus 496505) deri ved from phytozome v7.0 (chr-ID scaffold_8; pos 20882244 t o 20882649)
catcccgggaagaaaaaatcagtaacctcaaagtgagtttattgtctcatagttatgttacaaagtttgcttggtcttttttgcggatgacctgatcaaaatacccttggtatcatttttaattgaacatggtttttcttacgccaaaaagttcaacccctttccagaaataagccgatcattaaagtcatattgaggtaaccaacatttaagacttagatggggactaggatttcataaagttgccaagaacattgctttcttcattaaacatttggagaaagaatgatgatgttgctcttaatttcataatgctaaccccatttgattattggtctaatgtttcatgatgatgatgctctatattaaattctgattacccttttctgcttataggggttgattc

SEQ ID NO: 41516 - DNA, 808 bp, Arabidopsis lyrata
  Intron number 1 from transcript 900876 (locus 900876) deri ved from phytozome v7.0 (chr-ID scaffold_4; pos 14480754 t o 14481561 reverse strand)
cagtcttcttcttctctccttcctcttcagctcaggttacatatttcaacccatcattcaaagaagatgaaaacttttgttccagaaaagtagtcacattaaaaatattttttaagtctgtttaatatataacccataacttgaaattttgtttattcaaaagaaaaataaaataaggtttaataacttgaagtttggtatttaaaagctgcggaaagttaatctatgtctaagggattttttgttgttcttttaaactctgatccatgtcttagttagttttgtttttcttctacagagtttgttattattttctaaaatattttcttacgtaaagttccattttccgtttatattcttcgaggttcgtgtttttcttttcgttattattaatactctgaaaaggtaattcttctgcaatttcaaaaaaacaaaaacacgaagttgcttttttttttttttttttcttacacgtgaattggtgtggagtccaaatattctagtcgttactttttcttgttcagttcaaagattctctattgtctttttgtttttggtttctatggtttggtcttcgtttttttactttttgttttctttaccacggtttaaattttgtatccacttatataattacaaattggtgaaacaaatgttagagacatgacatttaagtgttctaactttaccaaccaaatcttatacttagacatcattattaatgttttcaacatcttaatcaatgaataaaaacattaactatgatttgacaggtacaaaagctagtattgaaccaatagaagaagaa

SEQ ID NO: 41517 - DNA, 735 bp, Arabidopsis lyrata
  Intron number 1 from transcript 478407 (locus 478407) deri ved from phytozome v7.0 (chr-ID scaffold_3; pos 4300059 to 4300793 reverse strand)
caacatatcgcgaaccgctcgagactttaattaaggtaattaactaaacttgtttctaattctgtttctttctttgtttgtttgtttgtttataataacttttatacattcctttacatattctaaagtcggtaataatctagttatatatggttggcatagagataaaaaaaataggaattgagggaaatatccaaaacagtatacagtatatgccttcttaattacaaacatggtgttgtgatataatataggtcaccacaattcaaacctgaataatgaaaggttatgaaaaaaacttttggacatacatgtacgatatatataagcctcgtagacgtatgggggacatactaagttagatatggtatgaatttacttgtttaggacgcacggaatgatttaatatgcgagcatatctaaattttctagatcgagtcataaatggaggtgctcttgatgtgtgtgagccagaacacgcgtaagagagtaaatggcacatggcctacgcaaattttagtacaattcaacaatgatcaaatgggtccagtctttgactttaacaaaagaaatcaatttggtccccattcggatccaactgtattcacgtgcataagagtgtccccgtcatttcatgtgtggctacaatgaacattgatattaaaaaggcatgagtctacatgctaatcatgtactaagaacgttttcttttctggtatagggtttacgtaaaac

SEQ ID NO: 41518 - DNA, 588 bp, Arabidopsis lyrata
  Intron number 1 from transcript 908250 (locus 908250) deri ved from phytozome v7.0 (chr-ID scaffold_2; pos 12110404 t o 12110991)
acaagtggggttgtgatcttcctttcctcttcaaggtaatggttaatttctctgttttttttgctctgttttgaagatgttgcatttgactctgtttttcttattaataaattggatttttgtgtgtttttaaaagttaaaatatacaggtttgggtattatcttattatataaacacgtatatatctaccaatcaaaatatacattttcagagtctgttttatggtcaatttctctgttttctttcctctgttttgaagatgttacatttgactctgtttttttttgttaaaaatttgtttttttttaaagttaaagcatagttttgaatctaatgataatttttttggtattgaattgtgaaaatcattgtcacatctaaaaaatttctgttttttttttttttttttttgttctgttttgaagatgttcacatttgactctgtttttcaaataaaagatttgggggttttttgcgtgtttttaagagtttaaagcatatagatttgaatttaaagagaagtgttttggtgttgaaatgtgaaaattttaggtgttgtcagtgacgaaagcattgtcgattcaagc

SEQ ID NO: 41519 - DNA, 759 bp, Arabidopsis lyrata
  Intron number 2 from transcript 496421 (locus 496421) deri ved from phytozome v7.0 (chr-ID scaffold_8; pos 20493620 t o 20494378 reverse strand)
ttaataaggtaagacatatttgggttactcttcttatttttcttttggctttttttaattgtaaagtttgaatctttaaaagtatattcctttgctcgagatttatatgggttgatctgagagctctgattgtggttattaagttctgtgatgtgtttaggaagaggttttatcaatgaatctgatgatgatcgtgctttgtagtaaaactgagacaaattgagaatttggttcgcctttgcatctgttaatttgactactgctctaaattctttgccaaggtcttatttgttatataatttgattttgggtttagtgtttggagttaagaactttttttgtgtctcaaattattgattgtctacaatgattgtagatatttgattatgcaatgtgtttagggagaggattaatcgaggaatatgtacgaaattatctttcattgttaagtcggaacagattgtgaattgggttccctattactagtttactactcaaaagttcttggcaaatgtatcgtgttcttattgattatatgattgtggattgtgtttgaattagaaacttttctcaggtcttgatgtcatttagtggttggaagaatgaaactatatcaaattttgagggcacaagcataaaagataaaacattgcatagtcatcataatagtcatcataatatatgacagttgttgcagtttctttcgagcttccaactaactcgttgcactgaacttggttctcgattgtacatttcagt

SEQ ID NO: 41520 - DNA, 913 bp, Arabidopsis lyrata
  Intron number 1 from transcript 930429 (locus 930429) deri ved from phytozome v7.0 (chr-ID scaffold_3; pos 11077628 t o 11078540)
agctactctctgggaggttcttatcttcttatcaacgtttcctttagtgtctttcatttccttgactgtattcgtcatttgatgctgagtagattgttcatttgttacacgccttagaaggatgaacaaactgatgacatcgcttgaatattttgcaacatctcaatgcttgtttaaaatactccaaatatttaggagacacacaataaagaatatttaatgagttcaccttatttttgcattagtttattatttgtctttttgttggtagggtataaattcagatccaccgacgctcaaaatatattcttggcctaagagtaaggtacattcaataataactatagttgagacacacacacaaaactataaatggggtctgtttcttgaagacatatcggtacgaatggcagatataatgggaaaaacgacactagtggacctaccaaactaataacaagatctatcaatatttgacagcaagtggtttcattcttgtaaaaaccctttagcgcgtagggtaaacgcgcttctccctcctctctcttcttttgtttgcggatctagaattttactcctccacctttgcctctccggcgccggagagggcttgttctcttttcttttctgttgtagttcttctctccctccttcgtctctgctttccgtcgggtttggctgattttggatgcgattctccgccttttccggcgtctcttggtggtggttgtcggattgaagctgttgcgtgtcgcttggaggctctcggcttgctggtcggattcaccttggttctttgcttggggacggctttgtaaccggcttgtttccgacagctccttttggtcggatctctttcacgcaacagtcctcttctccggcaagggttttggctttgttgaggtggctggat

SEQ ID NO: 41521 - DNA, 189 bp, Arabidopsis lyrata
  Intron number 2 from transcript 490823 (locus 490823) deri ved from phytozome v7.0 (chr-ID scaffold_7; pos 1014114 to 1014302)
tttcagggtttttgatctaggtttcttaaagttccgtactttatgtttttctttcttcttcgaattcatctgtgaagctatctattttgttccttatggatttgataataattcactgaggtttttgaatggttgaatttgaattgaagcttacagtgttagtattcttaactctgcagatatctggaa

SEQ ID NO: 41522 - DNA, 935 bp, Arabidopsis lyrata
  Intron number 1 from transcript 314188 (locus 314188) deri ved from phytozome v7.0 (chr-ID scaffold_1; pos 23529937 t o 23530871 reverse strand)
ggctgattgggctactagcaaaatcaggttttttttttttcttatttgtttattctttaacgtcaaaatttatcaggtaatgtatgattttggaattgtaaaggaatttcatttttatattagggttccaaaatatcaactatttatttttgctcgtttaatgaaaaaaaaaatggctatctgtgattattacaatttctttcaaattcaatcaaggcaaatgtttctagtttttaagtgaattatttggtttttgtttctttaaaaatctattttctcaccatttaatagttcttttaaaatgtacgaaaaatatttttttgagtggttcagccaagtatcaaagaaaaactaaaaccatgattttaaagattttttgtcaaaagcttttttctttctccaccgacattagttttgatttttgatttttttttttatttatagcaaaaaaaaaaaaaaaatccaaaagccaaaaactaaaaactaaaaaccagttttaaaattgattgccattcatagccattgactgatttctttgatgaatggtggaatagaagaatggtccacattgcaaaaatattttgactgatatagttttcacatatagaatgattataagacattttaaaacaggttctatttacttcttattttattagaaactgtttgtaataataccataatcacttttttcaacaaacaaaaaaacatttttttatcactatttagaatgcacaatgaaaatgaaaatagactagtttattttattatcaatttgttttaaatttaaaaactcatatttttaaaaatgatgtcaaagcttggttgatctgatggactattctcaatttatcgatatcatttgtatcattaaccattttttattttatgtttttttaggcatcctggcggtttagtgaaaacacccggttcag

SEQ ID NO: 41523 - DNA, 483 bp, Arabidopsis lyrata
  Intron number 4 from transcript 482576 (locus 482576) deri ved from phytozome v7.0 (chr-ID scaffold_4; pos 17074811 t o 17075293 reverse strand)
gatatcgaggaactcagattttggtgccagtactggtatttatattttgtcatccctttttattctatcctcagaacattcatgcatgtgtaaaaaaatcgattttagtttgatcaaatacagttaaaacgacaacttttaaaaaacagagggagtagaagacaacaaaattccgttatgttggggtcctctgtgagaaaaatctgtttgaatataatacacctatttttttttttttttttatagaaatacctaattttgttctacaagtctttggtttctaacttttattatatacttagtttgtgaattactgggacaattctattaggatattttattgatatctcaatgtatgtgatgcacgtaattctaatatatcgatagtttattgtcaatatgtattggaaaatattaatttatcaaacatttgtatttgaataattaggatacttttggcgctaatttcatcatttgagaggg

SEQ ID NO: 41524 - DNA, 835 bp, Arabidopsis lyrata
  Intron number 2 from transcript 945133 (locus 945133) deri ved from phytozome v7.0 (chr-ID scaffold_7; pos 5520480 to 5521314 reverse strand)
caaagcacaacttgtttatttacaatataaaaattgtaagttttagaagatgattgatacgtgttatccttttatattttaagaataattcaaatataaatctgtaagattttaaatcatataaatataagtttatattaaatgtatttgttaaatatgtttaaaattattaattatgatgaaaggataaatgttgaattttctacaacaagttttgattttccaaactacttttagtgtttgctttttttattgtttaaagttaggttttggttatttataagtttttaaaagaaaaaaactactttcatgtatagaatatctaaacgtgagaagtaggaaatcattatctttgttgatcaaacgaaagaaattatggaaataaaattccggaaacagaggattaaaattagatagcttgggtaagaagaaagatagagttgtctaggatgtaaatgcaatcatagtcattgtttgaggctttaactgcatgtagatttgaatttgtatgaagcttctttgtatcactttaactgcatgtagatttgaatttgtattctccttctcctcatcatcatccgcttcctcgccaccactgcggcctcaaggaagattgaagacagtgcattcgaggaggtgaaagcgatgactgcagccactttaagagatccccgatggtctcctccggatacgacattcagagagcgatggacgaatcttggaacagccttgattccccctgtaaccaccgtccgtgtaccctgatctttcccccaagaacatctttaaagagtggacaggtgcatttatcggagcagataaggagcagcttccc

SEQ ID NO: 41525 - DNA, 282 bp, Arabidopsis lyrata
  Intron number 1 from transcript 470357 (locus 470357) deri ved from phytozome v7.0 (chr-ID scaffold_1; pos 1172679 to 1172960 reverse strand)
tgtcaagaagaagagaaacctccctggaaatcctggtaataactaatcatgtttaatatagatcacaaattcaacctaatcaataaagcctttttttttctttttttttctctctgtttgctgaaaactcatcttcctgatttttttggttttcgatctttatttataaacatgcatgcgttctactgatttgatctttcgcatgatccaaagatcccgaatttgattgtttattcgttctctatagatccagaagccgaggtcatagctctatccccaaag

SEQ ID NO: 41526 - DNA, 625 bp, Arabidopsis lyrata
  Intron number 3 from transcript 489277 (locus 489277) deri ved from phytozome v7.0 (chr-ID scaffold_6; pos 10436762 t o 10437386 reverse strand)
ttctagctattggaaggtatgtttttgtcgggtgaaaacatgatgtttgactaacatttggccatttcatggaattttaactctgctttgaatggttctttgctcatatctaaatccagttctttttgtgcttgggatggatttcagttagatttagttattttgatttctaatgctaattggttcccataatggcatggttcgtttgcttctacttcttgatattttataggtgaaaatttcattctgagattgtagatagaaaacatgattactccaatttattatagttgaagccattttacaactttcatcgtgtccagctaaccgaggtatttcatagcgtttcttcatgattcctgccatggaatttttttactttgtatgacatttacggcttctggaattctgtttgaaagatcaaaatttagagctatagatttgttcccattttaagcttggttgcttgcttgcttgtgtaacttcaattaaagctgtttccattggcaagaatctgatgatattgtcttatatctaacaaaatctcttgccatttctaccttcacaatgttattcttttttaaaccacaaagatcactgtttctttggcagcacagctttcctc

SEQ ID NO: 41527 - DNA, 362 bp, Arabidopsis lyrata
  Intron number 1 from transcript 489969 (locus 489969) deri ved from phytozome v7.0 (chr-ID scaffold_6; pos 21127000 t o 21127361)
ctgagctcaaggaagagcttaattcccagtataaggttcttttttcttaatctcactcttgtggatctgtgatccgccattttaaaatccacgatctctcggtcgatgatctttttcttccttgtgatttagttgttctaaatttttggtagatctgtgtagttctggattttgaattttcaattggtgatgtttgttgctgttttattggaattggtttcgtgatttcgttagaaatggagagaaattggtaggtttttgagaatggctaatgtttggatgtgttctctttgcaaacgaagagcctatgttaatgatttaagaaggaatgatgctttttgtttcataggataagagaaaag

SEQ ID NO: 41528 - DNA, 437 bp, Arabidopsis lyrata
  Intron number 1 from transcript 929391 (locus 929391) deri ved from phytozome v7.0 (chr-ID scaffold_3; pos 6637010 to 6637446)
gaagaaattggtttgttttctttgtttcctctcgtaattttggctaatcaatgaagataaaagccttagaatttgttgtatgtatctgtgtagtgctgcaattaccaaatatttgtcttctttgtctttcaagactctgaatatggtagcttttggtggcgaatttttaagtataggtgaaaattatttgatacagatttaggtgatttaaaggttatagacttaaaaatggctcattttgattttgtttgatctacttcttacttttactgattcttatagatgttaagccacttgtaaaccttgtttaagctacattaaggtcgtctttaagcgttttgaaccttcgatttttcacatttttagaggttagcatttaagtcaaagtgacttgttttgcagttttacccgaacaaagtgggttcagtgaagaaaac

SEQ ID NO: 41529 - DNA, 494 bp, Arabidopsis lyrata; identical to SEQ ID NO: 39563
  Intron number 4 from transcript 485020 (locus 485020) deri ved from phytozome v7.0 (chr-ID scaffold_5; pos 12670721 t o 12671214)

SEQ ID NO: 41530 - DNA, 696 bp, Arabidopsis lyrata
  Intron number 1 from transcript 924243 (locus 924243) deri ved from phytozome v7.0 (chr-ID scaffold_1; pos 31136979 t o 31137674)
aggtaaaataattaaattttctttaaaaagttcttcatttttgtttctgctcttcctcttatataacccaaatgtgtgtattttgggttgattctgtgaaagatttcaaatttctttatgggttttgtccattttcactgattgaaattaggttattttttggctaaaagtcttaaactttgatgaaatacttgtgtgccaaacttatattcagattcaaaacttaaactttagtctaagaaagtatgattttctgggtataatcttcatttcttggataaaccctcgtttacaaaagtttacaacattgttgtgtagactttttcgataactgaaaacaggacaaattgatgaatgttgcctcttcgttggtctaatttgtggtcatgaaagaataaaaaggtttcatttttatgaatattcgcaagcattgggatagtggttatagatcccaagacttaacttgcttattggatcttaaccattgctctcttactgattctagaatctagctacctcttagtttggttctatagccttataatgtttcaagattaagcctttttagtcaattatagctgctgctgttttaaaagaattgttgtagtttggtgagtgactatgttatatagcggaatctgagtcaagtgtatgataaaaaggaattgttgtgcttcaggtcttcaagtggtcaaa

SEQ ID NO: 41531 - DNA, 699 bp, Arabidopsis lyrata; identical to SEQ ID NO: 39018
  Intron number 2 from transcript 887377 (locus 887377) deri ved from phytozome v7.0 (chr-ID scaffold_358; pos 8009 to 8707)

SEQ ID NO: 41532 - DNA, 257 bp, Arabidopsis lyrata
  Intron number 1 from transcript 942773 (locus 942773) deri ved from phytozome v7.0 (chr-ID scaffold_6; pos 19802855 t o 19803111)
atcgcgaagataaggtatcttgttctgttgttcgataaaccctaaaattgtcactgttgattctttcttcgatcaaagaattttcgttttctttggcgtgtttcaaggtcttcgattctgcatgaaactaaaaaatcggacattgtcattttctttagactgttttatcatcttcggaaattttgaaatgttgtgttagtttttgatttagatgatattatttgttcatggttctgatttttctgtgatttggtaga

SEQ ID NO: 41533 - DNA, 580 bp, Arabidopsis lyrata; identical to SEQ ID NO: 40226
  Intron number 2 from transcript 900871 (locus 900871) deri ved from phytozome v7.0 (chr-ID scaffold_4; pos 14459833 t o 14460412)

SEQ ID NO: 41534 - DNA, 690 bp, Arabidopsis lyrata
  Intron number 4 from transcript 948912 (locus 948912) deri ved from phytozome v7.0 (chr-ID scaffold_8; pos 5081333 to 5082022)
gacatatttgtttaggtaattttacattttcactcattgtttcttcattctttactctctgcatatgctcctacttttggtttctctgaaatgctaactcaagtcatgtgtgtgtgtgtgtgtgtgtgtagagaatctgtttttgtctgattagtcttataagatgcataagtcaatcaaaatagtttatctgtaaaacaagaaaatcagtttgatgcttatatatataggttgttcttgttcatggactgtattgtagcgaaaagagaagcaatattagttatgcctaaaatattatatcaacatttttatcagtcttaaccttttctcagtctgtctcataattaaagagttcctaataccagtgtcgcataacatgaaattagggtgtgaatgtgctttcaacgtcataaagaaaaccgataccgtcccttttggactctatggtgaattctttagcaaaatcagaatattttccaagaaatttgttcttttttcattgaatccttattcattttatgtttgctgttttcataaaacaagaagaacttgaatgtcttattgcgggtaaatcaggtctaatgaaattgtggtggaacctgaactattacgcctcattttaggagaaactccaataagatcatgcgggtaaataacgcactctcttattcctttttgcagatattctgt

SEQ ID NO: 41535 - DNA, 394 bp, Arabidopsis lyrata
  Intron number 1 from transcript 929022 (locus 929022) deri ved from phytozome v7.0 (chr-ID scaffold_3; pos 5207763 to 5208156)
ctcaatagaatgtaagattgtttctctgttttcactttacttgcttatgcttgactcttacttattgtatgttccattgtgtatgtggtctttttatagtgcatgtaccactgaaatactttttgctggttctagttgcttacgtagtttaatttcttctctcattgacaatctcttggattcctgatttcctgtcaagtcttatggtctttacttttaagggaatttgtgatgctactgcattaacaatactcttatttatttgattgttaaggtgatctcttgttttgtaaagtttatgtaaatggaaaacactcttatttatttgattgttatgcattattcctcattctctccagctacgcttggttacagcagaggcagccttcaaaga

SEQ ID NO: 41536 - DNA, 669 bp, Arabidopsis lyrata
  Intron number 1 from transcript 482023 (locus 482023) deri ved from phytozome v7.0 (chr-ID scaffold_4; pos 14564979 t o 14565647 reverse strand)
tctctctctatcttcaatcccgcgttttctcactggtattgcacttcctctctctctatatgtatctatatatctgtgtgtatatttctctggttcgtcttcttcttttcttcttactctgtttcctactctgtttctataacaagaaacacaatcttgagctggtttttgcctctctctgttcttctgcttctgattctttatacacaagtatgaatacgtatctgtgtatatttaggtttcgattggaaaacaaaaatatttttcattgtttaactaatttctctaattgatttggattcataaataatgggctcacgcgtatacatttgaatatgtatttctgctgggttcttgagtcttgtggggttttagaattaacgaagaaatattaaatcttgataagttttcaagaagctgagaaaagttccatcaaggcggcgaaagaatgactttatctatctttctgatatagagttttgatttttggaagtttttagttttcgaatttgatggttttgtgacacatttgtcataatcttgacttagattcttgacatggaagaataaaactagttgaagaggtttattgtgcaaattacttgatcttttgaagttattgcaagtcttctaatgatgatttgattatgccgaagcaaagggattttc

SEQ ID NO: 41537 - DNA, 310 bp, Arabidopsis lyrata
  Intron number 2 from transcript 471242 (locus 471242) deri ved from phytozome v7.0 (chr-ID scaffold_1; pos 4403603 to 4403912 reverse strand)
gaggtaacccaatcttttgatatcttcatgcatgcatgagcaactattatactcttccaattttcattctgatcgataacatgtaaattctacatatttctttataaactacataatttacaggatcatggtttatgatttttgtttatcagtttcgctgttttaccgtactaacgaatcaaagctcttacaataaaaactagtgttgatttgttatttttttatgtcgtctcatgggagaacacaatttgaataatttttttttatatataatgtatatatataggtccaggttgttcttctgtgggat

SEQ ID NO: 41538 - DNA, 482 bp, Arabidopsis lyrata
  Intron number 3 from transcript 483371 (locus 483371) deri ved from phytozome v7.0 (chr-ID scaffold_4; pos 20899651 t o 20900132)
acaattgagtggtcagactcctgttttctccaaaggtaatatttttctcctagttaaaagccttagtctcagatatactctgctttgattatatactagtaatctaggagaatctgggaaacatagttcattactggaaaaagaacactcttggaagtttttaagacaatgaatgggtgcatgttttgatgatgaatttgagatttaggaatacgattagtcccttgttttgtagtttgtgataattaggatgaatttagttgagttgttcgtttcccctctcctggattttgaggtagttgcattgtgcactctcttcatctaattgggtttttagtgatcaccattttatgtttctcttttggtttgctctgagagacataatttggattagcttcttccaatgcatatttcaagaacggttgttttgtgtggcttcttttgcagctagatacactgttcgttcttttggtaccagacgt

SEQ ID NO: 41539 - DNA, 677 bp, Arabidopsis lyrata
  Intron number 1 from transcript 480706 (locus 480706) deri ved from phytozome v7.0 (chr-ID scaffold_3; pos 22462914 t o 22463590)
atagaaacttaggtgatcacgccgagtccgtacaggttagtttattgtttcgatttcgaggattgagccaatgtttacttggatttgatttgatctacttaatagtttattgttttgattttgaggattgagtcaatgtttacttcgttattctattgccgccggttttgaattgagctttatgattgatcttgttgcctcttataatttgtgtagtcaatgattgagcatattattcgacgattggaagatgcttgaaatcagcaatgttctatcttaatagcttaattctgtagctgattagcttgttttgttgaattttggtaatgtgtgatgttattgtaaatgtgatttgaagttaaactaagttgatctgttacctcttcttgttcgactgaattcatttcgcttggatcgacaaatttgtgtagagaattggaggatgctgtatagacttaatgttttatcgtacttaatatcgaaattatgtagctggtttagcttgtttttctgagtttttggtaatgttagtgtaaatgtgattgaggttaacctaaatcgtctatgttcatctgcgctgttgaaaagtaatccttgtgtttccaggagctgggtttaaagtttctgatcctttagatttgtgttgctcttgctctgtaactgtcttcaggttgaat

SEQ ID NO: 41540 - DNA, 324 bp, Arabidopsis lyrata
  Intron number 2 from transcript 332725 (locus 332725) deri ved from phytozome v7.0 (chr-ID scaffold_8; pos 21768942 t o 21769265)
atttggaagactgtttctggtaaattgattttcttatttcaatgtgtggttaagaataatttgattttttgggtaacctacccagacagttttgacattattcacatgattacgaaagcgaaataaatcgtactacattgtcaaagatttggggtttttttttctctatattttgatgtagactcgtctcttcgtcaaggtctttaatcaaaacttagggttttctttactgccaagcaatgtaaagtattgattttgatgggtttttttcttctggtaaatttgttagagagaaagtcaagtcctggaattgaaggcttgaat

SEQ ID NO: 41541 - DNA, 439 bp, Arabidopsis lyrata
  Intron number 1 from transcript 487384 (locus 487384) deri ved from phytozome v7.0 (chr-ID scaffold_6; pos 2156312 to 2156750 reverse strand)
atcccattcacaaagacatcaaagaccaacctctcgtacttaaatcttcctttttttaccgtacatcttacaaaatttcatcgcaaaaccaattaacaataaatggatcggagtgctcgatgtattttatattgcgccatgaatttctaagtttcatttgattttgctataaaaccacaatttttactagtaaacaaattttctttgtcaatacaaacggaacctaaacgggaggaaaaagcatgtttgaatttaattgtacaaaaatattagatgaaaaaaactaatatattttttgatgaaaatttacatgtaaatgtgattgacttaaaaacaatagccatatcttgaattcttgatcgtatattttgatatcagattcctaatccgctatcagatataagaatgttttttcttttgtattggaaatccacaggag

SEQ ID NO: 41542 - DNA, 624 bp, Arabidopsis lyrata
  Intron number 2 from transcript 484723 (locus 484723) deri ved from phytozome v7.0 (chr-ID scaffold_5; pos 6496473 to 6497096)
gccatatttttttcaattttttattttgtttcggtgtataagcaactgaatttgcattttgttagaaatgttattcaagtatgcattgtgattgatttttagaatctcattatttcaaaatccaatctagcttcgacatgctaatagataataatatgtattgtagattctctcttgttatgtgatcagagacgttatgtcgtgccatgaaatcttattgccgaaagctcctctttgcttgtttgtcgttgagtaattgttgattcaacaacctaatacattatttctttgatgcctaaagtctgttcttttaagtagaatctttaaacatgttcaaagtttgaattggtgattttgtgagttgttatttttgactttagattggttattcgttgttgaaatatcttgctttctcatgagattttcgctgctctaaatatctcacgtaacgcacatagatcccaaatatacaatttgatcatgtcttacttctagttctccaagcataatcgtgtgaagtgcacattatttatcgtgatcgttctcttgatatggtttcttctgctttagtataaacaaaattttgaattgtaatctatttctacattatatgggagagcaagg

SEQ ID NO: 41543 - DNA, 773 bp, Arabidopsis lyrata
  Intron number 1 from transcript 345276 (locus 345276) deri ved from phytozome v7.0 (chr-ID scaffold_4; pos 16818337 t o 16819109)
aacattgccatcgtactcgacgaaggtaaatatctaatcctcaacacatatattacaactgcctagtttaagaagataggttgcataaaattaattgttgtacgtatattggttactagctagattgcttgtggataaggaatttacaaatatttttgaacttcatatagggatgtttttatgattataaatgggtgtatatatattaggtagtttaaatgtatgtaaaaagcttcattttatgatctagagggtgttggttataattgagtttacgctaatgttattttatataactatgtatgttattaagtgtgttgtaaagtcaaacggtatgtgttaaccgtgattacgaaccgttgttagtttaggaagttgcattaacggttgctttgtgtctttagggaaactacataaggtggatgttatcttattgtacaagttgttgaaaataatagagaagttttccactttttcattctctgttttttctctaccatgctctgtacttgaagctatatatggcttctagtgtaatacaagagcaaaacttcaacagagggaaggtacacattaaattagttaacaagaaaacaaaatgttgtgtttcacttgactaatttgacgttttctttttacaaaacaaagatatatatatttgaccacattttgaccataaataaataaattttgactacataagacataacaaatagtttatggtgatgaatggatcaggtttaccatctccaactgacagctacagggtgttt

SEQ ID NO: 41544 - DNA, 626 bp, Arabidopsis lyrata
  Intron number 2 from transcript 946287 (locus 946287) deri ved from phytozome v7.0 (chr-ID scaffold_7; pos 10498278 t o 10498903 reverse strand)
taaaactttcccctttgttcttctccccccaacaggtcagtctaatattttgttgttccccaatcccttcaaacattatcttcttcataatattactttgcttcacttcttttggtccttaaaccaaatctgtgttcttctttagtttccttttttcccgttttgatttgattctttttatgttatttagagagaaacaagatttaaaaattctctgatcttctctaagtactctttaaaacttttttttttcactgtctagatttaaattatcttcagaattcctttgttcttaagtagtttaacttgttttaccatcctttctttgccttcaaaaaatcagcaacagaatccatgatttaactcttgttaggagaaaatgaatgtaagatcaaaaaagttgtgtcggcaagagattagaattagatctttatagtttactttaatctaaaccataattcaaaagaatagaaaacatgaagaatcttgagtcttttcaagaaaatcttgattaatgtttttttttttgtttggattcttgtaattctggattaatgaattttgccctaaacgtttttggctttggagcagcaatcacggcgtaccaatcggagctaggaggagat

SEQ ID NO: 41545 - DNA, 462 bp, Arabidopsis lyrata
  Intron number 2 from transcript 485244 (locus 485244) deri ved from phytozome v7.0 (chr-ID scaffold_5; pos 14056887 t o 14057348)
tttcccagagcaggtattacttgagaaatgagaatctttacttgttcatgaaattatggtttgaatccaaatgatctcaagtttaattaccagaaataaacgatttaatccaatagtttcgagatttagggtttaggttagttaattatgtgaaaatttggggattttgtttgattgtttgattataataccattagaaaacttcgtcgtggtaattaggttttgggctagatgagataatcacttgagtgatcataccattttgcttgttcatagtgctgacatacacagacacactcatcaacgcacatacatgtcgatgtatatgtatgcataacttgttttttcttgtacatagttcatcagctgtactacatatctatatgaatcatattcacatgtctcaagctgtagtttttcaatcttcaaactctacttaactcttactactggtcatgcagg

SEQ ID NO: 41546 - DNA, 756 bp, Arabidopsis lyrata
  Intron number 1 from transcript 915259 (locus 915259) deri ved from phytozome v7.0 (chr-ID scaffold_8; pos 50671 to 5 1426)
aaacccttgccgcaggtaactgttcgtccggcgcaattagtctgtgagggtagttcgagggttaacgctgctgccggaaaatttaatggaaacctcttgtataggctttactttaagggtttggttagcgatgagaacgggaaggggaagatgacggacgtagtggctgggtttggggttgctatttgtgaccagagggataatttgttgtttgagatgaagggaccattgatggactatggcacgagtcgtcagggagcagagcttaaggcattgatccgaggattaaccgaagcattgaagttggggattaagcatattgttttcttttgcgattctttcccgattttccaatacgtaagtttccgattttcattgtttattcattgaatgtttaatatgaactactctagatttatgattccgactttgtttatgtatttctaaagatgatctggtttgttctctttgcaattcgtttgaactttttgctgattcctttgtcctggaatctaaaagtgtagtgtatattgtaaccattttctaagccactatcatatgtctttggtttgcatttatatagatctgactgcgctaatctttactagttaggagacagtagaccgtgacttctaaggttctatgcttgtgttttgagagatggtttaaattgcaatgagttatgcttctttacctagcttttcctgtcatatgtttgagaagattgtgttttacttgaatgtaggtcacgggaaa

SEQ ID NO: 41547 - DNA, 781 bp, Arabidopsis lyrata
  Intron number 2 from transcript 477955 (locus 477955) deri ved from phytozome v7.0 (chr-ID scaffold_3; pos 2687288 to 2688068)
gaactctctttctcgttgcgccggtatgatatatattttcatatacagatatagttttctatatgtatgttccacttccatgagcatctttcaagcataaagagccaaaggacaagtagcataacataattgatttattgctttttgttcaatccttttcatgtttcaatcaccatgtgtgattgtgtttttttcttttaaattgcccaacctttttactatttttaaagagttttttgaaaaaaaattattcgaaaatggtttctttccctatatgcatagatgaaaagacccttcataggtatgaatcaaaaagtgcatacctctcatgttttctctttctcgtcttcttcttatttctaaaaataatttcattcgaatgaataaagtattgatgatttgagtgagatcttttggtaatggattcaattattaaccatctcaaatttgaataaaatatccaaatttggttattaaatgggtgaaaaaaaaatgcgaattaatgatcatcatctataagggaagagcactaactcaatgggagaaagcttgctgaagaaaaagaccctttaggacaatttgcatcataaaacggttcattttatttcgttggggaatttgatataactttaccgaaattaaaacaattattataatgagtttcttccgtataaaatcatcatactatacgtagacatgacatgcaggtaaattaatcatcatttatatttttaccaatgaaacaggactccaacgtaccggtaaaagctgtagactacgg

SEQ ID NO: 41548 - DNA, 856 bp, Arabidopsis lyrata
  Intron number 1 from transcript 927919 (locus 927919) deri ved from phytozome v7.0 (chr-ID scaffold_3; pos 1272278 to 1273133)
ataataaggtaaactgattttattaaaattatgctcttaattcaactatttatttcatctttgaatattcttagttaaataatttagtgaaaaattattggttttagttgagtagtttcgtcttgggacggatacttgatttatatactaaaaatgtttttagctatttaatcacaaaagataaatgtaaaaagtattagatatgaaagataagggagtagtagatttggataaaattgctgtctagaatatgaatcctctacaacaaagaaatatttgttaagatgaaacaaaatagtgaaaaggggtggtagaaaattattttctgatgttaatggttcatgacgattagttggtatctgtctgcttaatggtaacaaaagttataattttgatttattgtataaattgtatgattaactgattgataacttttcattaaattatagaaataagttttgaatatttgaatctgacaaattgataaggtgaagtttacgtgtttaagtgaacaatctttaaaattgaagagaacgattcttattttatctttgtacgttttgttttctgattgttttcttgtgctaacgtcaaagtgataagaagaatttttcttcgtttactaaatatagcatccatgtaacaaaccccattaaaggcatatccaattcctaattaaagcattaattacaataacatacttgataactttaaacatgtttgtagtagtacaacattttaaaacataaactaatttgttgatcatcaatacttcaccaatctctctatctctgtgtggattttgaaattatgagttgttgatcaaattttgtttgaatattggtggatgcagagg

SEQ ID NO: 41549 - DNA, 716 bp, Arabidopsis lyrata
  Intron number 2 from transcript 486779 (locus 486779) deri ved from phytozome v7.0 (chr-ID scaffold_5; pos 20921890 t o 20922605 reverse strand)
gaaccttgcgccaagaggtacgcttttaattcacagaatgctgctgtatacttttattgattgatgtaagaatgctggcaaatttggttgattagtcactgacttgtagtttctggttctgagaatgcactaggtaaagagagtagtactgcatttgtatgatctcatttcacattttctttctattattagcttagagattgagaaaagtacacttttatatccttggtgactgctttgagctgatttacttgctggttttggatgtgtgtgatagaggccgatagttttgaccctgtgtacaatcaatttagtgttttcgtctctgtcaatttacttcgtttcaccttaaatctttagttcttagatgttgaaaaggatgcatcttttgcttactgaggtaaacctggtaatattttgaaaactataccttgtttttgatgaatccatcagcaagagcaatggttattacaaagcactacagcttcactgagtcttgtttcttttcattagtcactgacttaagtcctttcttcatcggttcctccgtagaaaaagtttcaagtatctatcttatctatcttcatcggaatcacttatcatgtataagatatgaaattttgtgattctaatatttaggaaatctcaaatgtatctgtgatccttataataatgccgtatcagtttggaatccatggcacaataatcccaccgtg

SEQ ID NO: 41550 - DNA, 451 bp, Arabidopsis lyrata
  Intron number 5 from transcript 316204 (locus 316204) deri ved from phytozome v7.0 (chr-ID scaffold_2; pos 15370598 t o 15371048)
tgaggtgagttatctgcagttatttattgggataaagccttccatgacctgccatctagtcaaagtaaaatagtagtcccaaatagtcataagcctttaaaattagttcttatcaccatacttctagttcctgcgttgcctttccataagttcttggaaacagtccaaatttatataaatattcaaaaagagctctataactttacttaaaaaaaatattatctacactaatcgagattgaaaaatgtcgtgaacgtgttataattgcatggaagtttgtcttacgaactcaattgtacgtgtatttgattgtttctgaaacataatggaggaattggaaccataagtaaacataaaataacttagttatattttttttttaattgactgctgcgtatcatcttacatcatcatgttttctttattttttggtacatactattgtaggtgc

SEQ ID NO: 41551 - DNA, 429 bp, Arabidopsis lyrata
  Intron number 2 from transcript 480400 (locus 480400) deri ved from phytozome v7.0 (chr-ID scaffold_3; pos 19830363 t o 19830791)
gcttggagaggttgtcacaacagtgcctactattggtatgtaacacaagcttttcttgtcttgttttttggtgctgttgagacttctctaagtgagggattgattatgaagttagagcaagatgttgattttcagtctatctatctattgaggattatgaaagaaactttgtttgggtagttagaacagctccaaaccatatatacttttgtgtattttctgtggatcatagctttgtctgtaaatagttactttttctctttgattgtgtttgtatccgtgaggaaggaacattttaataacttgataaaactcatgtagatgttgcgttctgcatcaggatcattacggtttaaccattttatccggttttggttgttttgcgattttccagggttcaacctcgagacagtagaatacaaaggcatc

SEQ ID NO: 41552 - DNA, 531 bp, Arabidopsis lyrata
  Intron number 1 from transcript 481099 (locus 481099) deri ved from phytozome v7.0 (chr-ID scaffold_4; pos 923312 to 923842)
gctcttccttcttccgtcgtctaccattgattacggtaagattcgccttcttctactcaatttcatcatcactatatacaaattaatctatgtgtcttctctgcctccgttagtgtttttttttctacgattgaaaccatcgaaacaattcaaggttttacacagtttcttatgcttgtccggagagggcgaaatcgcgtcttctgaaatccgcccagaaactctccgccgcttaattttccgcgcatctcggatttcgatagaaatgttttaccttttttggttttagtttgatgaagaactcttatgtgttgtgatggttattgcttatatcttctgtgaaaatttgatattcttgttctactttgattgaagtatgtgtattcaattgaaattgatatttcttaagtttgaatttttgaaatctgtttgtttttggttgctttctgcattttttagagttaaaaaaaaaaaaaaaaaaaacagattttgaggctgggagctattttaattgtgttgcagggaggttaa

SEQ ID NO: 41553 - DNA, 531 bp, Arabidopsis lyrata
  Intron number 1 from transcript 332063 (locus 332063) deri ved from phytozome v7.0 (chr-ID scaffold_8; pos 18301585 t o 18302115 reverse strand)
ctcaacgtttggtaagtaaccatctttctccttctctctttatcttctccaaattacctctcttgtagattcttgaatgatataagattattttgataagattatccttgaatggcttgtttgtgtgtgttgtgttcttgttaccttagtagaagagtttctctcttggctctgtttctgtttaacacataattttttattcctctgttctgttgaactgttagtttgattcatctactcttgatctttgattcatctgttcctgttctattcgaggtccaaaactgaactttgttgccgaaaagtaattttcaatattagcatgtctggttctgttcctgatttcttaggagtttggttctgttcctgatctcttaggatttgctatgttcagcttcaaatcttattccttaattaattcttgatctctctttggcttggtttctttatcactaagtggaacgttaaacctacgtgtgccattgtcacttcttaggtaatcccaagaggttacaacaagtactatccaaa

SEQ ID NO: 41554 - DNA, 645 bp, Arabidopsis lyrata
  Intron number 2 from transcript 484960 (locus 484960) deri ved from phytozome v7.0 (chr-ID scaffold_5; pos 12220922 t o 12221566)
ggttacacttccaaagaggtcgtcggcagaaactggtaaatattttttcaaaatttatagcaatttttataataaaaaactacgtttcctttctataattactaccaaatttacaaagttttttcttcttaaatatcatgggttttgtttttggtttgattaaagtttagaaatattttcttagattattaagtaactctttgtaaatttctaaaaaaaatccataaacctaacttttatgttggttttagaacttttccaaactctgacgtgtgccaaaattacaaagttttagttttaggtgtggttactaaaagtatagaaactaggatttaattagtaactcttactaattttcaaaaaaccttttttttgtttaactctttctagaaatcttttctaaacctaacttttatgttgttttttttataaacgaagtttctttttttaatgacacttatctttaaaatcagacatcttactttgcaaattcgaatcatcttactcttcataaacaaaatttcccaccatttttagtttaataaatgaattttgtttacaaaaaagaagaagaaaataacataattggttttgtttttgtgtgtttgttttattgtagccgatttttacaaggatcagggacag

SEQ ID NO: 41555 - DNA, 943 bp, Arabidopsis lyrata
  Intron number 1 from transcript 912607 (locus 912607) deri ved from phytozome v7.0 (chr-ID scaffold_1; pos 12190092 t o 12191034)
gcaagcttatcgctccctcatctccgcttccagaggtttatattctctcattcttagccctcttttctgttttatctcttccgttcgatttagttttaccgattggatgattgagaatctgccattgtcctggagttgtggagttcaaattttgcttttgattgagttttgtggttttagatttctctgtatgagaaagaatacttcttagttggctactcttaactgaattaagtgaagattagggttacaattcattagctctagcattatgacttctctgccacaaatgtgaattctagagtccggtattgttgttccttagtacgctgcactaaattgtgtatttgtagttaggatatcacagaattcattgttcttagagtctcctggctggaattagatttctcaaccattctcagacgtgataaagccatgtataagctggttggagcatctgtttcttgcccatgtcacactgtgtcagctttcatgagttccttccatttaatattaccctccatagattccttatgtatgtagatgccaaaaagtatcagtatctagagtttatttatttatttctcaatacttgagaaaagcctgctcttgtggggttcacaatctgtagttccattcatgtgttaggtggggatggtgtgtagttatatgggaatcattctacgagaggaaatctagtgcaacagattaaagttgcaaaactttaattctaaaggtagaatttgtagttgacctccggaattttcagcttgtgtgaaactcatacacagtttaaactaagaattctaatctctggacacctcctagagtcattttgtgtaaaagaatagaagccttagattgaagtttgttggagtaatgatttagttagttgcttatacttgcaggttgtactagcgtaaagcgccttgtggctgatctc

SEQ ID NO: 41556 - DNA, 449 bp, Arabidopsis lyrata
  Intron number 2 from transcript 473118 (locus 473118) deri ved from phytozome v7.0 (chr-ID scaffold_1; pos 12803487 t o 12803935)
ttgtggttattccgagattttgaattttcatttcggtaattggcttcgattcttctggtctttcgacttttgtttggtttctttgttcatgtgtatgaatgattcatcgttgcgaagtttcatagtgaggatttctcgatcatagatgtagtttaggattgctcaattgaatgtcaataatagtagtatggtgtaatttagatagatgaagagctcaaattcattgctatgtacacagatttttccctgtttctgtttatgcaagagaaaagaagatttaagatgttaaacgattgtgagaagctaagtagaaatggtgatagtatgattttgtttggttaagaattagctctgttcttcttttgatttatagctttttccgcgggttcatttgtttgatttctctttacgcaggctcaagcagaagctggaaccaactgggactcagg

SEQ ID NO: 41557 - DNA, 971 bp, Arabidopsis lyrata
  Intron number 1 from transcript 904679 (locus 904679) deri ved from phytozome v7.0 (chr-ID scaffold_3; pos 7332903 to 7333873)
cagttatcgtctgggaacgattctaccaagttcgggtacgttactatatatacttaattggctactgtctttagagatctggttaaaataaaatacattgatttatacagaactcatgttttataatcaatgtatatatcaatatatacagatctgtcatatgagttctgcatttagcaatgtattttataatctaatacgtacataagttaatgtaaatgcagtttttttttgtttgtgtataaatgcgagaacctttccatatatacgaaatttgcatgcatgcatgtgtatggttaaatacttaaatatactaatagatgcgttcgaatgttttttctttttctctttcgcgtttgtatgtatacatgtaatgtaattaaaagtgtactagaacataattaaaaaaaaaccacaagatgatttcagtgtgatctagtcgacaagtaaagctaataaatcaacccataataaaatgtagttgacaattacaagtgaattggaattctgttttcagccaaacttcatatatttttttagcaaattaaattttatgttggtgtctttcttacatattatgaaaacaataaatttgagtccgcaaattaaatttcaaaagtacagcttctcagtctgtctactcgacagggaatgggtaactttttttttcacttacacaatgcatgttgtacttgtgtgtgcagtgtgtataatgcagatttacatcaacaatgaaaaaatatttttactaaaataaagacttaaatgctcttaaatcaaaaactaaattttcttcctgaaactgttatgcttttgaagtttcattaatctctctaacgtgtttaatttcattctaaaagttatagattatggtttcaatgatttctcttatcttataatgagcaactggtgatgtatgacatgtctgtttgccagctccgcagtgacttgttacgtagaagcagttaagc

SEQ ID NO: 41558 - DNA, 599 bp, Arabidopsis lyrata
  Intron number 2 from transcript 477933 (locus 477933) deri ved from phytozome v7.0 (chr-ID scaffold_3; pos 2539386 to 2539984)
taatcgtgggagattcttcttcttcttcttctcaggtacattcataaattccaaaatctgacctttttgtctcctcctaattcgctttttctttctgggtttgttgatagattaccaggtaaatatgaaatcttttcctgattaattaattacctgtgtctaatctctaaattacaacatgggtatctgaagaatctgggttttttcttcttttcaataattgatataaggtttgattatccatgaaattacctgtgaaagtctaggcctttatattgatatacgttatcttttggctcttttctcttcctttgttcatatataatctggattttgatcaaacctgaatcacttagtagccatagactctgcttttcattttattatgtgcttttttttttattaagagaacaaactaagccacttgggattgttttatttatacatagaattatgttttcctctcaaggattagcttagcaaatataaagctggatttgtcctttaaatggtttaagcattttttccttttttggcctcaacttcaacatgtattacttataggttgatcatcaggtaaaagaaaaatctactgaaga

SEQ ID NO: 41559 - DNA, 304 bp, Arabidopsis lyrata
  Intron number 1 from transcript 923994 (locus 923994) deri ved from phytozome v7.0 (chr-ID scaffold_1; pos 29049707 t o 29050010)
gcaaaaagtttgataaaggtatatactttattaacctcactcacgatttctagtacttcttatggcttatatcgacgtttgtttcatagctgtttagtttatatattggtaatgagttcttccgtttatccttttctggtctgagagtgtgggttttgtggaaaaatctcaactttttaagtttttagtcttcccaaattttgttcttttttcagatttgagtttttaagctttctctttgttgtgggtgtgtgtgtttgtggttacagttactcgcgttcaagctacgagccacaacttggaa

SEQ ID NO: 41560 - DNA, 561 bp, Arabidopsis lyrata
  Intron number 4 from transcript 938043 (locus 938043) deri ved from phytozome v7.0 (chr-ID scaffold_5; pos 15769281 t o 15769841 reverse strand)
acgttgctttgaggctcgtacgtcctggaaagaaggtatccctagtactatttttacatgaaagttgaaagtataggcttttggtttatttggttcttgaatgattgtcaaggttttgtaaagcccagatgatgaacacttataaatggctatggattattatccatctgatgcttttttgtcatagttactctgatgggatttttttctttctgaactttagtatgatccctcattggatttactatgagacgatgaaactttgtctaagttgtgcctctcttggtcttgcacgatgctgaatggtttgcttattttttaacggatttaacatgtaaattgttgtgggaagagatttctggataaaggctgtaattgctatggattcacttccaagtgaggccatagctactttgatgtgggaattttttttaaataaagtttcttgctatgagtttgtagtttcttgtttaatcatacaacatattgcaattaagacattgatattctgtttttcttatggcagaacactgaagtaactgaagccattcagaaggtggc

SEQ ID NO: 41561 - DNA, 543 bp, Arabidopsis lyrata
  Intron number 1 from transcript 476691 (locus 476691) deri ved from phytozome v7.0 (chr-ID scaffold_2; pos 16683437 t o 16683979 reverse strand)
tttaaaagtttatcatatctctctctctttctcaggttttgatttttctttttcatttctttaactataatgattcgattgttcttagtagtttcttgattcaaagctatgattgactttgtactctgtttctttttaataaaaagatttcctttttagatttttatcataatcttctctgttaattctcatgaaagtatgaaatcatcagaacccaaaaaaaaaaaaaaaactttatagctcaatctttcatgttttcaacatcatcctctgtttttttttttgtttgcgtcactgaattgaagtggaaagtttcatctgtacaaaagattaactagggttttgatatcatctttacctaaattggggatttcgtggtttcattttttcatttcttgaattcatctgttattgcggcgtataagattacgatgttttaacatcttcaaagaattgttcttttattatccacaaacaattcagtttcaaacttacacgtctctctctctctctctttctcttttcagacaaaacatcaatcgg

SEQ ID NO: 41562 - DNA, 1001 bp, Arabidopsis lyrata
  Intron number 1 from transcript 479891 (locus 479891) deri ved from phytozome v7.0 (chr-ID scaffold_3; pos 11058794 t o 11059794 reverse strand)
acgcttctagaacttgtcgcaccgttcactttgaggttagtatcctctctattattataacttcctctgtttcttgatctttatgttagtctctgtgaggattcatagtataattgactaagacattgagcgaattttaagaaacaagagaactttaaaacattgtgaacttagattgtgatattcttttagagatgtacactgtggattgcataaggaccactctctcagtgtgaattttataatgcaatgtagcacattttgaggagaatgtgctactgtgtaacacatatgtatgtttctggctgtttatgttgattttgaggagaatttgtagtgttttggctagaaaactaccaaaattcatcatattttgaagcaagaagaagaaatttgggaaccctatgaattttgtagtgtttttggctttgtttcgagattgaaatacaccgaaaagagacttggagagtctatcctagtttttgtggtggctttatttcattcaatggagagtatggcttagatctcagtgtttgttctaagcaaatggacgttttcgtgtcgatgtgggagcgttagcatgtcaaatgcttctgtttcttctttgattgatgaatctatgatcatctgagtattaacaattgactcaagtgatggtcataattaatgataagctgaaatgagacacaacagtaatctaagaaatgagaatagtgagcaggacgtaggaatattttggactacactaatttagaggttccaagccattcatccttgactttttgatgggaaaattttgattgtgcttatgatagaaacatagtcccatagcattgttttcagtgatacactcaagtatatgcctaggtaaagttttacagtcgattttgtagatgtttattggttacagatacataagcgctttagtaagtttctgagactagtatgggattatttttttacttgattcaaggttggaatcttgaggccaaattggctag

SEQ ID NO: 41563 - DNA, 474 bp, Arabidopsis lyrata
  Intron number 2 from transcript 350793 (locus 350793) deri ved from phytozome v7.0 (chr-ID scaffold_6; pos 6904933 to 6905406 reverse strand)
ttactgccaaaatcgtgcttgccaaagaaagcgaagtgagtttctttctcttttgtttcaggtgtcttgtcttcctttctcatggtctagtttaagtgtatattttgaatgtccgaaatgcgtttcttacaatttgataagataagattcagttcgtaacgttttaagttttgaatggcttttttcttttttaagaagctgcaaggttttgtaaagtgtagattttgaatgttgtctatcaatttcataatgtcatatggtttaagagtgaattttaaagccgtgtacattagatgggttaattacaaaagttctagaaaatcaaaggtcgccacttttgtaacatcttgattatgatctaaacttattttatacttgttcgtttaatgttagagtcaagggttattatttttttggttatatatatgtttgatagttttctatgtcttgtacagatatcagatctaataagat

SEQ ID NO: 41564 - DNA, 608 bp, Arabidopsis lyrata
  Intron number 1 from transcript 491840 (locus 491840) deri ved from phytozome v7.0 (chr-ID scaffold_7; pos 5403288 to 5403895 reverse strand)
ttggattgcattatcaggaacaagagatcacggtaaatatactctggacgattgttctactctacttgtgattttgtttcgctaatgaacctctgtgatttgtgcaatctctttctgggaaaatcgagtgattattctccgtcattctatgaatcgtgattatcgtgaactgatgagcttagcttgtgtttcttcagcttcctaagagaattttgatgttttgattcgacttatttgcttgaatgtttagtagtcaccgatgtgttttctattcctcttcgggaaactttgtttgagcttgtcgtagtttgggtcgatagtactgtttctatcttccgtaactcattacatatttgtttgaggaatttccgcaaacacttggactgcatgacgggaatcgattggtgtctcgaatttgcatatatctagcagccaatttttgcaatcagtgtagtcgcggaattgactgttgacagatctttcttcattcaagctctgaagattttgtaaattttcttaaactaatttctcatttgaactgaattattactttctattgttgatgatattcagtcaaagaaacgggggctttcgctggaggagaagcg

SEQ ID NO: 41565 - DNA, 697 bp, Arabidopsis lyrata
  Intron number 2 from transcript 481030 (locus 481030) deri ved from phytozome v7.0 (chr-ID scaffold_4; pos 417731 to 418427)
agaaactagctattgaggcgtatcaagttgccgttagggtttattaccttatgttatctcttttttggtgtgcctaataatgttgtttcttgtttgctaagttagggtctgagaattcaatacaatcaggtggctatagaaacaatagttctagtctattcattagttgcatttgctagcaaccactagttcttagaatcgaaatcgttgcttagtttcttctcttgaatcaaacactactagttctagtctattcatttgcaaaaattgttggtgtgtatgagatgagccaaccgctgatggagaaactcgctgtcgaggcatttcaagttgccatggtgccttatgttatctctttttttttggtttttctggtaatgttttgtagaagaaactgtttcttaagttttttggtcttttactgtttcttgattgtttaagttagtgtctgagaatcaaatacaatgaattagttggctactgaaactatatgtaaagtttgaagcttagaatcgaaatggtcgatgtgtagcttagttttgtcccttgaaacactcgttctagtctattcatttgtcgcatttgctaccaaccgtgttaatacaaaacctctggtgtattctttgaatttaatgacttaacttgatactgattttttatgtttaggtaaagagtgtggctcgtattgttgaaggcg

SEQ ID NO: 41566 - DNA, 634 bp, Arabidopsis lyrata
  Intron number 1 from transcript 900246 (locus 900246) deri ved from phytozome v7.0 (chr-ID scaffold_4; pos 7166764 to 7167397)
gcggagaagaagaagaagctgagaggcgggtaagtagatcttcttgatggtcttttatattctctgaaaataggattcatagggactagaacagtggattgtgtaagtagaactcgtagatcttaaccttaaacatattttggtcattctcgtttgaggactcaacttcttcaactatgagattttttggatttaaaagcaattatatttaatcaaaccaacaaatatttgctaaggtatatatcttaactaagatgtttttcttaagtttagaagtgcacacgtgtcgcgatttgagtgggagaaataaaaaacaaaaccaattttattttttgttatttcttgtttttttcccgacatttttcatctctctctcgagacccttgcagacaacaatgagaagatgcgaaatctcttcgattccggtggagatattggtgaaacttcagactcgtaagtacccagatctctgattttggttttctgatctggatgtttcggatcttgctaaagtttgggttttttcgattttggggattagagttttggttatcttctattcttaagttgagtcttaatcttgtttgtttttgttataggaaatcgaagaatccggttcgattaaggacgccca

SEQ ID NO: 41567 - DNA, 819 bp, Arabidopsis lyrata
  Intron number 1 from transcript 896757 (locus 896757) deri ved from phytozome v7.0 (chr-ID scaffold_5; pos 4531545 to 4532363 reverse strand)
cgaggaacccggtggctgcggtggtggctgaagccgtagtttcgaagcggcgcacgattcatccttacgatctgtcggcgagtgataatccagggaccttgatatcgcaggttcttcttaatggggataactttgaagattgggctcgtgaactacgaacagcgttgcgtgctcgcaagaagttcgggtttgtcgatggatcaatccatagacccgctgaagatgctgcagagattgaggattggtggacaattaattcattgttagtctcttggatccggaacacaattgatccgtctctacgtcgtgacatctcacactttgaagttgctaaagacttgtgggatgatatagcggagcaatatggggtggtttctggaccaaggattcaacaattaaaacatgagttagtgacttgtaagcagaagggtttgagcatcaagtcatattatgggaaattgaaaaagctatgggaagatctttcagattatgataaggaggatcaatgtgtctgcagtacttgttcatgtgatgctaagggacgtggaaatcggaagagagagaaggataaagtgcaccaatttttaatggggcttgatgagtctacttttggggcacttaaatcaagtcttttgactcgtgatccgctgcccaccttaaaccaagcgttctcgattgttcaaagagatgagactatgaggatcgggaataaggaggtagaggtgcgacctgacgtggttggatttgctgttcagacggtttcacgtggacgtggagattacagagataaaatctgtagcttctgtggcaagaaaggac

SEQ ID NO: 41568 - DNA, 759 bp, Arabidopsis lyrata
  Intron number 1 from transcript 480745 (locus 480745) deri ved from phytozome v7.0 (chr-ID scaffold_3; pos 22750111 t o 22750869)
catctcctactgtcgactgcactacgtacgttttgaatgatatatgcatctcctactgatttttgtagttgtctagtatcttgagttttagttcacctttctatagaaatgaacaagctttaaagttcaaaatactttaaaatattaatctttagtaaagaacatacggtgaacataattacacgaatataatcatattttgaaacttttatctattttctgtttatctcttttttaaaaaacactaactctaggtagtaagaatagacgaaacaataatttcaatctgaaattacaaaattgaataaataattttgttaaatgatattttactttgttttctatattaattgaccataactttattgtttagaaacaatatgtttttactcaattttggaataatttgtgtcaattataggaaagaccataccactttcctacaaaatttcctacgaacaagtttcataagaaatttctgacgaatttcctaccaaattctatttcctacggacgattcccttcaaacatttttggtaggaaattggtagacaacgtctatttcctaccaatctcctacgattttagccgtaggaaaacgctgcatttcttgtagtataattatgcaattataatatttaacattttttaattttgtctgtttaatttaaattctaaactttaaaagctgaaataaataataaattgttgattttttttcttctgcagggttggttgagaaattcacaacatcgatca

SEQ ID NO: 41569 - DNA, 555 bp, Arabidopsis lyrata
  Intron number 2 from transcript 908621 (locus 908621) deri ved from phytozome v7.0 (chr-ID scaffold_2; pos 14350289 t o 14350843 reverse strand)
tctcagcaatcaaaactggagttgcttatccgaaggtatgcctacttgtgttcataatctttctctgccaatgaatttgagttacaaactcgttaatctcgtttatgattgtgggaacgtacgagtcacccgctgatttatatgtagaattgaagccgattcgattctgtattttctgtttctagataaggagtaaatgtagtctcaatttgttaataggattcctttaacgatctgcttgacatgctaatactagtactcagttttgtatagtatatcaagtgatcagctttatagaaaacgatctttttcttcgcatgttttatcacgaaaacgtagcattgtgaggacctatcactgtctatctgtctttccagactatcaccttaaagagagtagaaccttatccaacggtagtaaaatgctgtgttgatttaacatgtactaaacgttgaaccagtggattagatagttcagagttgtgttggtctatttgcagagtgactaatctaagtttggattttgatatttgcagggtttgcttcaacactataa

SEQ ID NO: 41570 - DNA, 467 bp, Arabidopsis lyrata
  Intron number 1 from transcript 476678 (locus 476678) deri ved from phytozome v7.0 (chr-ID scaffold_2; pos 16642090 t o 16642556 reverse strand)
ccaaaggtttgggctttagggttccatttcattgtttcggaaatttccccaaggatgagaatttgtttatgaaattcgttcttgcaacaatcctttcttttatcttttttttctgaggataatttgcatgttggtatgcggattttgattttagcattcgaaaatgagaaaatgtggctcattattgccactattgattcagaaactacgcaagtttgatacttttactgctttcattcatttccataggattgtgagattaatctttgcggttccttttttggattaagctcatatagcttctctaatgattagtcatccgattcatttattgaaagcatggtggtcttgatcatctgataaaactgtatcttcttcttgtctcaagtcaaaattattaactaaaaccctattttgcttgttgttttgcaggaaagtctgacctgaaagactttctggccatagat

SEQ ID NO: 41571 - DNA, 712 bp, Arabidopsis lyrata
  Intron number 1 from transcript 476797 (locus 476797) deri ved from phytozome v7.0 (chr-ID scaffold_2; pos 17132585 t o 17133296)
agaaggttccggtgaactcgaaaacccatttacaggtgaaacctttgttttcgtctccttcgtattcgactttagctttgttcagttttttgggtagtttctttaattttgagcttaataatgcccaaaagtctcttggaatttgcaaagtttaagttttgaggtctatctagggttttattttgggtgtttcggagaatgttgtgtgcattttacatgagtgaacttgtgttttcttcgacttttggttaagcaaataagattacttttaagcagctcttggagttatgaaacctaatctgaaagaaattgctgctaataaaatttgacctgtgatttgttccaatgtccagcattgagctattgcaggagtggttggtttgtgtctcacacactcactctctgcttggagttcttgtaggattctgtattatcattttgctgttagggttttgggttttgagaatgtaatctagtgtagggataagacaaaaaaagattatgtctgaatggttaacttctttaatgattgtcaatggatattagcaaaacgaacgttcatacgcttcccagaatcttgattcactagttgtcagtatgtatactgaacttgcttgttctgctctagatgtttggctttctgttactatcttgcaatcatatttctgtttcttattttcttacatggttttttttgtttggtgatagcttc

SEQ ID NO: 41572 - DNA, 506 bp, Arabidopsis lyrata
  Intron number 1 from transcript 343817 (locus 343817) deri ved from phytozome v7.0 (chr-ID scaffold_4; pos 1098600 to 1099105)
tgttcgtcgtctcttcgaattccttgtccaatttggtaaaacctcactctctctctctctctctctctcgctgatttctctgttttgggtttcgaattcttcgtccaatttgggagtttttgacttttttcgatttggtctatcctaaaattagaaacttttttttagggttttgtcaaagaaaggtttttgatgatttggagatttgattttggtggtgggttagttgaaaagtttcagctttttattttgagattatcagatttgatacaatttcgttttgggcgttatcttcttgtgatcctttgacttttatgctcttagatccatgggctgagagagagtaagaggtctttgtaatgatctctttgatcttctcaatgtgtttatgaaactttctttttttgagctgaattgagtatcgaagtcattaatgtctgtgagttgatgtaatttatctgtgtgtttcagaatcgaccacaaagagcaagttggcgtctttgaat

SEQ ID NO: 41573 - DNA, 686 bp, Arabidopsis lyrata
  Intron number 1 from transcript 321374 (locus 321374) deri ved from phytozome v7.0 (chr-ID scaffold_4; pos 17433355 t o 17434040)
cttcctcattggccttcttctccttccgacttcaggtcagatttcccacatttacattttataactagaaagttagctagacatgtgcttattttcccatttactgaaaacagaaaatcttaaatttgatatattccatcaagaaactccacaaaaagattttagcacatgtgtttttaaataaactcaaaaacataggtggttcaacatttacctacgtgaagagaattagtcagaggaaatttgtgatattacacacaattttagaatctttcaagagcatgtatacccaattcttccactttggtcacaaatcgcacacccaataattaactagaggcaagggcggttactaaattatatttaaaataatatagatatgcatgtaactatgtaagtggcggcttgtgaatctataaagatgagtggaattattatacaactaaataacaaagaaaaggtcacattacgacttactttatcttcatagctacaccaccaccatataatagcagtcacggggttactttacgtatcacgaataatgttaataaatcatccccaatatatgttattttatataaatgtcgataaaactttagtacatgaacgtctaactaaattttttatgtataaaaaatttgaaaacaggagtttggcggctacctacgctaaagagacgaaag

SEQ ID NO: 41574 - DNA, 481 bp, Arabidopsis lyrata
  Intron number 1 from transcript 479553 (locus 479553) deri ved from phytozome v7.0 (chr-ID scaffold_3; pos 8865117 to 8865597 reverse strand)
agacggttcgtcgaggctacaccaatcagctcaatgtgagtttttgttttcattttcctgatttcgtttcgaattttgtatccttgatttggttttcttgaaataatttgaatttggggttctcgatttttcggtggaatccttagattttggggattccgagggcctacgattgaaatgattttggcttttttccgacaatgtttgaatctgtcgtgttctgtcgaaaatttggatcattccagatcttgtcgcactatgagtagatcaaattaacaatctgaaactctagaagaagttaaaaggtttaaacccaccattgaatctcaatccataaatctttggtggtggtgttaatgataaagtactttgaatcttgaaaatcgtctttttacttgctacacaagcatttcaatgttttgaaaccacaactttatgttttgcagagatcgcttaagattctatcctacttcgtcactcc

SEQ ID NO: 41575 - DNA, 706 bp, Arabidopsis lyrata
  Intron number 1 from transcript 948904 (locus 948904) deri ved from phytozome v7.0 (chr-ID scaffold_8; pos 4963094 to 4963799)
ttaaagatcaaggaagctgtggtaagaataaaatctttttgttttgattttattattttttaaatttaaaaaataaaaaaatcgtaaatttcgaatctgaaaaaatcccacaaattcctgaattttttaacggattaatcagtttttatttcgagtattgaaatgggtttttgtaaaaattatagaaaaatcttggattgtttcataaatctttttttttttaattgataaatattttcagacatatcttgaaacttgtctggggaatgatgagtttggtctgaagtgttgacttttacttttaggtgtacgtttcgaaaagccaacatggttttgaatttttggagatgaataattattatggttaataaatcaagagaaagtcacaaactgttgatgatattttgtgtttatacaacaaaatcaaatgttgtattttaggtgcacgtttcgcaaaacgaatattttgaataaatgtgttcaaatctgagaaaattgatgatttattgtctttaaactttaaagtggtagtgggaaacaatatggacccattacgagatttgcttttttcaagaatttaaaggaatggtagggacgatgatttggtatgtgttagtgttagattgtgacaattttgattgataataacaactaatcttcttgttctttagggagttgttgggcattttcaactattggagcagtg

SEQ ID NO: 41576 - DNA, 330 bp, Arabidopsis lyrata
  Intron number 1 from transcript 497147 (locus 497147) deri ved from phytozome v7.0 (chr-ID scaffold_9; pos 1737971 to 1738300)
cttcttcctcttgctgcttctcggcctcaccaagggtatgcaatcattcttcctcttctaatcttcttccttctgtccatccataagattgcagagaaagtctcaagttttgttaggtccagagttgttgaatacctgaatatgacgttttgcactcttcagattagattttggtatttgaattcagattaataattagcctatattgagtaatgaggtttattggtacaaaaccagaggagtatctaagcagagcactgtaagttttcactcttgttttggttttgtttttcagccctgattgttggtccagtttcatctgctataatt

SEQ ID NO: 41577 - DNA, 679 bp, Arabidopsis lyrata
  Intron number 2 from transcript 470518 (locus 470518) deri ved from phytozome v7.0 (chr-ID scaffold_1; pos 1810296 to 1810974)
tggctaggagaaagcttgcttgaggataaaccagggtgatttctcatttcataacttttttttatcacatggtatttgatgatccatgtgaaaacattatgccttgagagattttgtttaagttaactcagcaacaatgatatgttttccttggttgaacttaacctaaacataatcaaaaggctaaatgcaatgacccttttgagacactcattaaagaaagtgtgagctttccataaacaatctcacataagcttacaaagaaaggtgaaaaaccaatacttgtataagatatttatacaaaatagaagaaagacaaactccaaattcctgatgaggttccatctaaccacaagaaggaaagaaaaacagtaactgtaacacaaaaagaaatccgaaaacattctttctaacctagtttctttttttctttttttggaaaaattcagtatgtggcaggggaagtcaattcccgaacctcgtaaaaccatctgcatattcactttcaagtaaaaagtttttcactgcttagtttcatcaaataagcagaacaaaacttaacactacaaacactcaatggtatatcttttgaggttcgatcttgactcctccgctttttcaaactgaaatctctctttttcaccgttttgttatttcctgcagaaagaagaagaaaagt

SEQ ID NO: 41578 - DNA, 742 bp, Arabidopsis lyrata
  Intron number 2 from transcript 948886 (locus 948886) deri ved from phytozome v7.0 (chr-ID scaffold_8; pos 4795939 to 4796680)
actactacactaccgctcgtgacaaacccaggtttggtttctctacaaattcgctcttagatttagattttgtggagggatttaggtgctctattggttaatgtaaagatagtatttttttttttgggttttctcttggaggggatgatttgggaagctttgacatgttagcaaagttgtgcttgttttgatatctacagttttctcagataggttattactcttggaacatggataaattaagaagatgtcttggttaggtcatggaagactagtttttaagggcttttgtatgctaatatcgggttaagctttgttgtcattgccaatagcctgtctagttgcttgttgagtcattaaaattggtcagtgtgatgggactaattagccagggtaggtaataggttggtgatgctttagtgtttggctttattcttggttcactgcaatcttgacgttggtcgtaattttctgtctctggtactggaagtgatctctttcctcttactccgcgttaaatattgaaatacaattaggttgtgatctgtggataggtgtatgagagctactaaatatgcattttgtatgcatcatctgctacaacaaaatcctggcttttgttccttttttgggcattatctgatttttcctccagtttaacttgtgtttctagtttcatcaaccagttttttgaattatttctataggaaacaatcactctcccaaccaacagtttgcaaca

SEQ ID NO: 41579 - DNA, 372 bp, Arabidopsis lyrata
  Intron number 1 from transcript 931778 (locus 931778) deri ved from phytozome v7.0 (chr-ID scaffold_3; pos 23019025 t o 23019396 reverse strand)
tttcagacaccaatcgttgcctccgaagagctttggtatgctcatcttcttgttttttggctatacatattattttcgttactataaattctaatagtatttgtttttttaaacgattgtatgttttggatgaatgaaagcaaccacgatgcatgaagaagattcatgtgatgtttcaattgatcttttatctttaatttatcgattttctaattttacaaaaatgttctcaccgagtagaatatacttttgagttttgagttaaatctttcacagtctgttgtggattagcaacgtttcaagccatattaactattgtgttgtggcagttcgaaagattcatataaattggactattgctacaaaaaaaac

SEQ ID NO: 41580 - DNA, 270 bp, Arabidopsis lyrata
  Intron number 1 from transcript 315881 (locus 315881) deri ved from phytozome v7.0 (chr-ID scaffold_2; pos 13259506 t o 13259775)
ctcacatttgtacgtaccaaaacgtatatctcttcgtgttttgattgatctttcttcttctttgttgtctcaaaatcaaatggtttcttttttggatccataaaggtgttcagacagctataatgccatgcgtctcgttcgctcaaaacgtcgagatcgtaaacagaggaaccatacgtaagaaaaaaccgataattaacatttttgtaatagcattgatttgtttttataagaatctaaaaatttgaatttgggggaaatgcagcttgt

SEQ ID NO: 41581 - DNA, 563 bp, Arabidopsis lyrata
  Intron number 1 from transcript 928417 (locus 928417) deri ved from phytozome v7.0 (chr-ID scaffold_3; pos 3132886 to 3133448 reverse strand)
cgaaagcgttaaacgttggcttcaggaactcaacagtatgtcctcgtcccttctctcaactcttttcttcctttctcattggtttagatagatcatctgaggaaattttgttgatgtcggttttgtggttaatcttttgataattcagcaccattgatggatgctacaatgtgatatattctctcttttttggaacatcttgctttcaatttgtgagtcctaacacttagaattgatcaccatgtattacattgtgctttattttgatcactgaagtagttcttatgattttgtcattaatcttgtgaaaaatggtggaatataatgtaaatcaagattatgctgaagtattatgattctgctgcaataaatctgagtcattcttcattgattctatttttagcttgaggatgggatatggttctctgagccaataagatgctctgattagcttcctcaagtttaagattctttttccaagagtgttgtgaatccaaaacaaatccctaacactttggttttttgttacctcccaagctcattgtgacactgctgtggcacaa

SEQ ID NO: 41582 - DNA, 448 bp, Arabidopsis lyrata
  Intron number 1 from transcript 911763 (locus 911763) deri ved from phytozome v7.0 (chr-ID scaffold_1; pos 8235200 to 8235647)
ataaaacggtataaggtaggtaaacaccctttttctttcatcacatgtattatagacaaattaatttctgaaatgcataactgctatattgatgtgtttggtttggtgtattatttctggacatatatagtggaccttaattttgcatcattatgatcttaattagttctgataataatctagtgtgccaattagtaagaaacaatagatataatttattataatcttaaaaataatatcgtttcaaataactccccttaagaattcccaaattttttgggtcagtcccaatttgttacgattaaaacctggccttgataaaaaaaacaatttgaagagatatttatttgattaaaaaaaagaagaaaactactaatgtataatttgaaacggattgacccgacccgaacaaggtaacaacaaagttcgacccgacttggttagccgg

SEQ ID NO: 41583 - DNA, 637 bp, Arabidopsis lyrata
  Intron number 1 from transcript 947943 (locus 947943) deri ved from phytozome v7.0 (chr-ID scaffold_7; pos 23574144 t o 23574780)
cttgacgaaagagcaaattacaggtatgatttgaatcttaattttgaacacagtattttaatacattgcgcctcagttgtaaaagactactatagaaaataactgcaccagtcagctcaagctcatttaatactttctcatgttgtggttttgctttactatcattagtgtcatgtcctcaactgaaccattctaagtacattctttatgtgtaccatgattagctgattagagttttggtggtatttcgatttccttctctgtgatttcaggagccacatatatatagccttgaagtattcttttttgctattttgagtctccaatgatctcgatatacctctagaagaatatgtatatgggatctcgtcaggctagtttgttgctttagtttcatggttatgccacatcaaccattcttaagtttgtatttgtacttggcgatattgatgttctatccacccctttcacgaagatctatcaacagcatttaactctgttgaaatgcattgatattgttgatacaattaatggaaatctttgtttctgttatgttcagtagatctttcaaattgttaaatgagttttttttttttttttccttttttcagacacaagcaagcattgttggaagcat

SEQ ID NO: 41584 - DNA, 624 bp, Arabidopsis lyrata
  Intron number 2 from transcript 359466 (locus 359466) deri ved from phytozome v7.0 (chr-ID scaffold_269; pos 410 to 1 033)
gtgaaatccccagtggaggtactgtcttagaggacacttgtgatgttggcaagaaaccagatatgcccatttagtttttttgttctgtttttggtgttaacaatgtttgttgaaccttttgcttaagttgatttgcttctttagaccaatcatgtgaaacaagtagatatttaacaacaatagctactgcattgttgttatccattatctacatacaaattcaagtgattgctagtgtagtagtcactagtcacatatatgcatcaatcatagtactacagacttttttagtaaacacaccaagaactagaagagtggatcatgaaactttattttacttaccaaagggactgttggtgggacggtttgatgtttctcctcttagataattcacattgcggtcattgatattgctctctgcaattctcatgggtaataacacatctgccatgagcaagtgaaaggaagaggctttctctttcagctgtgagttctcgtgcaggatttggtggttgctttccaagaagttgatgactttctcatgcaagtgatgattcaacatcatgagctgtttgacttgttgttgcagctcttcgatctgcttctttttgcgcatacgtgacc

SEQ ID NO: 41585 - DNA, 589 bp, Arabidopsis lyrata
  Intron number 1 from transcript 326855 (locus 326855) deri ved from phytozome v7.0 (chr-ID scaffold_6; pos 11812164 t o 11812752 reverse strand)
ctgttctttacctggtagaccatcttgacattatttttgctattttcttgtttctatatttcttctctttctagaaatcattaccttagatgaccaacaacattttggggtagatggtgaaccaattttcgtttccctaatttagataggacaaaaaaattcacaatttttgttttgttttgtttttttttttggttctctcagtaaaatcttgtttttaatatatgtagataatgtctttaattttgtttaaacgtacatcatcttatagaccatccagatgaacaaacgaacaacaccatattcggccaaactgatttaaatgttaatttctacttttgtgtttacatgtgaaatatatttgaaattcttttcatatttataaaaaaaattaaagatttcatttcatatataaaaaatttatatgtaaaaatgtttgattgcattaaaattaatgttccatataatttcacatgacatttttcaaaaagattaaaaacatttaaaatttcatccatttttattgagtagaattaagtgtgatttgatttaagtagtagaaaacttataatttcaatcccgtagggat

SEQ ID NO: 41586 - DNA, 501 bp, Arabidopsis lyrata
  Intron number 1 from transcript 930275 (locus 930275) deri ved from phytozome v7.0 (chr-ID scaffold_3; pos 10212629 t o 10213129)
gatcgtatcttatctcagtctgtgagttgttttgtataacgcttcttaaaaaaaacagagcattttcagacaaaaagacaatttttttctgttctgttttgtctccattctcttaatttcgtcaatttgatcttattcgattcaattccattgaaatttgcaaatgggtcatcacaatttcatgagttaagcacgattttggtctaaagatcacgtttttttttctttcgcaattctcatgaatcataaaattttcagtgggttcaaccaaagtagaatttttcatgcgcaatgatttgtaattatatatatatatatcttccttaataaaatcgatatgattttcatgggccctataacataatcacaaaataaaaagtttggatttttcttcaagtcaaaaagctaacaattccactgttctttctttgtcttcttcttaattcttatgattttgttattgcagcaggaagtgtcgccacgaacatctggtcggctttc

SEQ ID NO: 41587 - DNA, 324 bp, Arabidopsis lyrata
  Intron number 2 from transcript 950397 (locus 950397) deri ved from phytozome v7.0 (chr-ID scaffold_8; pos 17954742 t o 17955065 reverse strand)
gctctcgcttttatatcaaattctacgattccccggtgagtcttattttgcataagaaagatgtcgtttgccttccaagaaatgaattacataagatggtgatctcatgttcaagaatttatatatagaatcctcaattagattaaagctagattcttgcgatgatgggctatatatatatatatatatatatatggatgcacactttgatgatagcacaatgttctgataaacttgatcaatgaatagaaagttagttaaattctttgtttttttcttcctttcgcagcgacccttcttcggattcaacggatcaactttctg

SEQ ID NO: 41588 - DNA, 403 bp, Arabidopsis lyrata
  Intron number 1 from transcript 950397 (locus 950397) deri ved from phytozome v7.0 (chr-ID scaffold_8; pos 17955231 t o 17955633 reverse strand)
aggccgtcgctaaaatcatcggcaaacctgaatccgtaaaaactctaatcttctgtttctcccatttttacgagaattcaccaaccttctgtttttgttctttttgttgtctttttttttattcctgtttagggttttgattatgaaagcaggttagaatgggaattgttagtttttgggtaggctgacgacgttactggtctatgcacacgaactgttcgacgaaattcctctgtgaatagtgaattgctagtccttcaattgctagtcctcagaacttaactcttgagaattccttttgaattgtatttcagtggaactttgttcaaatcaataatagagtacgttgacatatcactaaaggagtcgtaacttgtgacttatgtttaatcatcttttcagt

SEQ ID NO: 41589 - DNA, 1012 bp, Arabidopsis lyrata
  Intron number 2 from transcript 945946 (locus 945946) deri ved from phytozome v7.0 (chr-ID scaffold_7; pos 8875955 to 8876966 reverse strand)
ttcaattacttgaaagagcctttcctcatttcttggtaagttctttcacaaatctttacttatttgccgtatagtgtggcataatgcgttgccgtgagagttgaatattcttggacagaaagaagcaatagagattgaaaaaataggataagatcttaacttttgattttgtgaattttgtttttgttttccaaaagaatgcagctattggacaaatgtgctttgagtacttctcatctcacacattatcacaaaagaaatgatggatactcttccaaagaacaataattctagatgcatgaaacagaaatttagaactctttaatttttctcggtgattttaatgcttttaaaaacgtatgtttgcttgtagcgttaatagaagttttaaagcaaatgaactacttaacattaacaatcaatgttttcagtttttttttttttttttgtgcttaaaagaagtatttataaattataacaatgagataagatccttaactcaaaggaacaaaaagtctttctttactctttagggattaatcaacttttaatttgtcaaacctgaagggattgataacacaaatcataaaatctagcattctagtgtttcaagtaaaataatggctacaaagaaatgaaaaatagttttcttgttttatttcatttgagaatgtcaatttctttttctttattgtcataaaagctctttcttacacccgacatgattggctgtcaaacatacaataatatataatatcttaatatagatatgccataagaaaattaaaatattccacttgatccatccaaagtccaaactagtcacatgcgatgacacatgtgagctttaagtgtcagtgggaaacaaaaggaagtcattcaaattaacttctaattcccggatctatttgaatatccataattaaccccatactcttaattcgatcatatatacccctaatctttgaagactgtttcttcttaggaacggagtgcaacagaggaagaactc

SEQ ID NO: 41590 - DNA, 561 bp, Arabidopsis lyrata
  Intron number 1 from transcript 915183 (locus 915183) deri ved from phytozome v7.0 (chr-ID scaffold_9; pos 1416442 to 1417002)
tcttgtaagcctagtgactcccgtctatagaattatatttcaattacttgataatgtttgagattttgattatgaattgttcaaggggaaactatatatagagggtatggtcataaatggagtaatgttttgcaattggcaagggtgctttttttttaggtaaagctagtgtctttgtcattttatttaactttagtgcattattaatgaaaaactgtaaaactataaaaaaatttaaaacgccagttataataattgtaaatatttaattacatatgatttgtacaatactaatctaatatgtagaaattttatatgaaaaagtgttttcaaaatcttcaaacattaattgtaaataataaaataatttgtaaagtaaataagcaaaaagaaaaaaaatctgtcaaagatgttggtttatgttaactgggttacatatttagattgaataaacagaaattaagaatctgggtcatgacaatgaaccagaaggcagaaactagtggtgtttcgtttccaagtctaaaattcaagcattggagaagaagaatctaattatca

SEQ ID NO: 41591 - DNA, 699 bp, Arabidopsis lyrata
  Intron number 2 from transcript 951815 (locus 951815) deri ved from phytozome v7.0 (chr-ID scaffold_185; pos 372 to 1 070 reverse strand)
gatttccttattggctctttcgtgaactgcacttagtggtcagaccttctgcgatcttttcggaaggtgtcatgcaaatttctgattcaggtataggtttctggataaagctgttgagacttgcattttagcttacacaaatactttgaattgatgaattttcttagtttacatgtttgttttttttgttttttttaatctgaaatattttaaggggcctagtggtgtggtaaaagtagaatttattgttagtatctcaataaggaaataagagattaatcagatttccttaacgatttttttggagtatacatacaaaatatggaaatttagagaaggaaaaaactgctatcaagaatttaggaaaactcaaaaaggaagatgataagagttgaaaacacgtcaaaactcctttgcttatagaaagcttatatgactctctgaattctcttttacgtctttgttggacaattgaaacatgatcgtttgcatggtatctttgttttctgcagggctgatgtttgcaagttatcctaccttcacatagtcctagagtgtcatctaaatctgttccctgcagtcaaaaactagttagtccctcttccatatcctgttggttgaagaaggatgtatcagttctttttcaagttttgacttttcatagctgtgtcttttcctcgagtctctgaaccccttgag

SEQ ID NO: 41592 - DNA, 634 bp, Arabidopsis lyrata
  Intron number 1 from transcript 951815 (locus 951815) deri ved from phytozome v7.0 (chr-ID scaffold_185; pos 1170 to 1803 reverse strand)
cctattggctcctgaggtataatcgagatctcccgtgttcttttttgtttctcgtgttttgactgatgcgattttgattctctcttcgttttattgttttgcgcttaatcgttttggttttcgtttgctttgagtattgttttatgattggagtcacgtatctgagattttgtggagtcggatttgaacgtatatatacggattgtgtttttgattggagttttagggttacgctttttgttatgttttcgttttggattgtgtatttcttcgttcattcagatctgatattgagtctatggttggttggtttttgtggttaaaactttgacgaagttgagatttggtggtgtactaggagttttagacattgctaaaatttcacagatatactttttgattacagtttgagttcttagggtttcattggagttatgacttttgctgctatggcttggagtctattagaactgaatttcattgttaatttgtctttgtgtatttggccttacctgcttattggattgttattattccttttgtattctttgcttagctcgttgcatttctaatgttgttgatttggtgctcactatcaggttagattaagcttcgtttttagtggattttcttc

SEQ ID NO: 41593 - DNA, 571 bp, Arabidopsis lyrata
  Intron number 3 from transcript 478965 (locus 478965) deri ved from phytozome v7.0 (chr-ID scaffold_3; pos 6410599 to 6411169)
atacagcatcaaggcaacaacaacaaaaaagccaggtttcttcatctttttaatctaccatccttcaggtttgtttctggatctctttttttaaatctgtagatttagtttttgttattgttaggatgagtaaagtatgttctacagtgcactagatctaaatcgcagcttcgagattctgttggtgttgtagtaaattgatcttggggataatctacgacaagggtttcttttaatgttccttaggaaatcggtaatgtaactttttagggggttttagagttgcttaatctagctgctgagatgtctgattgatgatgaatctcgatccaagaggtttttatggagaggtgagccttgtcgttcttgattgaatttatcttaatatactgtttcgtaattcttaagctttgagcttgatgttgcgtgagaatctgggaacttatatgtgtcggctgggtgttttagttgcttcttctttctatatttggttctgaaaactttactagagttctaacatttgtgtttgctgataggtttttgtgtttggaacgagcctaaactcaagatt

SEQ ID NO: 41594 - DNA, 596 bp, Arabidopsis lyrata
  Intron number 1 from transcript 920939 (locus 920939) deri ved from phytozome v7.0 (chr-ID scaffold_1; pos 8465400 to 8465995 reverse strand)
ttcattgggactgaaatctccaacgtcagatagaagttataatcgcatttgtcttaatctcctagcttctaatgtcagtcgtattacttgtataacgtaatgtcttgctagtgcatgtttccatggttctttctccattctgcatgccacatttggttgctcttagggatgcatctgtctgactatgttagttttcatatgtcattaactggatcatgatttgaaactgcaggcactatctgaactgcatgaccgagtccctctttttccctggcctgaggctgtaaaaatcattaagaggaattaggtggtcctgtcgaatctttctttagccagttttctcaagaaattgtagctgcagcatcttttggtcagtttctcaagaaactatagcagtagcatcctttggaggagaatcatctttaaatggttcttagattgatatgtttaggtttggttttcagttgagctcaaagtcttttttgaattgagtctgaatttgaattgtctgacgatttggttattgacattggaattgtgatgatgagaagaaatgtaaagaaaaggagaagaagcagaggagctctgtaaaaaag

SEQ ID NO: 41595 - DNA, 437 bp, Arabidopsis lyrata
  Intron number 1 from transcript 891309 (locus 891309) deri ved from phytozome v7.0 (chr-ID scaffold_7; pos 19978093 t o 19978529 reverse strand)
ggacggattgatgtataatgttatgaatggttggagtctcccttttcattggtcgaaaaaataatttctaattagtcgaaattggttttttttcttaaaaaatcgattttctaagagtaaattgggatatttgtatttggctcattaaaaacagagaaatgtgtagattttaggagaatgtgagaaattggtttttcacatttaagagttcctcaaaatttgacacctgacaaataaagggatttttttgttcacccgaattatattaaactcaactaaacttttgagcacacaatcggagagaactctttgctacagcgtcagcattcgatagatttgagagtgatatcttcaatggtgtaacttttgttattgaaaatattttggtttcttgttgtccagagaatccatagaatccaagaggccaaggtaacacc

SEQ ID NO: 41596 - DNA, 244 bp, Arabidopsis lyrata
  Intron number 1 from transcript 928658 (locus 928658) deri ved from phytozome v7.0 (chr-ID scaffold_3; pos 3882106 to 3882349)
ggatcggtcccgaaatagctgaatctgtcaaacaggtgcctttttataatctgttttcttctttgttcgttcatgtgtattgttggaacagaagatgtcgtcattgctagttatagaatgtacgagtttgatcgtgtcttgcataatttgagacgtgttcgaaattttgtttatttagtttattgttgatgatgtctctgaaaatgttttgtctttatgccgatccaggtgtttactgccgctg

SEQ ID NO: 41597 - DNA, 425 bp, Arabidopsis lyrata
  Intron number 1 from transcript 487145 (locus 487145) deri ved from phytozome v7.0 (chr-ID scaffold_6; pos 1109652 to 1110076)
attcgcgaggtttgattttgaattacattatttcaattcgagttttggtgtgattcacttgctgctttaagtttcatagtagtgtagattagatcaaattccaatggcttagagagaccaaaagggaaaaaaaatcaacctcgtttttagatttagtagttgaatgttctaaaattagaaagctggatttggtctggttttagggtttttccaatttttagattctagatttgtggagtttttttttgtaattttgagcataatttgtgttctaaagatgagctctgtgtcatgatctaaacctgattgggaaaagaagaagctatggatcaagctctaaactgaatttgtggtcatgtatgtttggtgagtttgaagctttaatggttaaatgcattcaggaacttgaaggttttgctgatccc

SEQ ID NO: 41598 - DNA, 588 bp, Arabidopsis lyrata
  Intron number 1 from transcript 355644 (locus 355644) deri ved from phytozome v7.0 (chr-ID scaffold_7; pos 19714400 t o 19714987 reverse strand)
aaggcgctgaaaagtaagccaacagtaaaatataagacgttagttaagaaaatcaaatttattaataaatcaacataaaatcaaatagtctatcgaaaaatatggaggaaatatatatatatatatatatatatatatatataaatttattaattgtaaaatatataattttaaattacttgttttttaataaattatgaagataaataatattatcagcaataattttttatatttttaattcaaaattttagattaagattaatgtaaccatagtaaataattttttaataagtgttttcataattttttattattaaaaaattaattacgtttctagttaaatttttgaaatataatcattaaaaattagttttagattaaatttttagtatttaaaattaatatttaaaataaacttagattattacaaaggttattatggtcaattttcaattaaaaaaaagtagttttcaaattagtataaaattaggtgtaattttcaaatttcttattatatttagtatattataagtgatttatatatctatatgtctgtttttgaaatagtgggattcgaaaagggta

SEQ ID NO: 41599 - DNA, 988 bp, Arabidopsis lyrata
  Intron number 1 from transcript 928580 (locus 928580) deri ved from phytozome v7.0 (chr-ID scaffold_3; pos 3640587 to 3641574 reverse strand)
agtcgacgccgatttcgtggattgccaatgatgattgaaaattttgcgcaagggttttgagtttcggatgattggaggttactctaatataaatgaaccgtgacaaaatcattttctaataattcattctgatggctgctgatcattgctagataaatcaaatttgatttcgatttttgggtacatggtttaatttggatagttaattgtagtttgtttgttgaaagaagcttggttttgggggatctttacgacttttaggattgaggttttcaattcttttagccttaatgttttgaattgttttgtgtaatgagtttctgaggatctgaggaattatgagaagtcatgtattcaagttctgctattaagttcctgacggctgtgatcaagtcgattttttttctttctattttgattgtttgggttgcagtgtattgttctatgagctacaggactatgctagattctggtctggacataagttgctttggatgtgtgaaaattatgcctagtggattgggattagcattttgttatctaagggaatcattgagttagtgaccagctccaaatatgcaagaaattgtgaaaatgcattagtttagtcctcttttcgggtatctatatgccttaacactacaattgctcagtgcttgtgctccttgctgttcttaattttgattatgtactagtttgtttaggtgctattgttatattgcaggatatggcggaggcagaagacttcttaagcgctaaaggcaaaagacttgtaattggatttatttttgtgttgaattgaacaatattatgttctaccagttagttgtgacaatgcagatggagttactggaatactgttgtaactgttatagctagctgatgagtcctactagttagataaaaggtctccttatgttcttcagcctacaatctaatacttgctgcaacagtttagtaattcaaatattttaggattttagcaaaa

SEQ ID NO: 41600 - DNA, 725 bp, Arabidopsis lyrata
  Intron number 1 from transcript 914444 (locus 914444) deri ved from phytozome v7.0 (chr-ID scaffold_1; pos 28088820 t o 28089544)
catcgattctggaggattttcgaaagcaaggaaacgttcgagttggcgtttgttgatttcagttcgaaaaaaaccatgaaatttataggtttgtcaatttgtctgttctttctatttctctttctgttaagactttgagactttctgctcaatccgtaaagtatcgatttgtatagactatagacgtgaacgtaacatgatcatcggccatgacttgtgaattgtataaaaacttaatcggtgtatgaagacagaaaaaagtgattatgcaaatatgtattgttgaaacctgttcggaaaataaatgtagaaattaaccaaaatcgcttgaattatttttttgtagtcttctggaaaaatttagagtgaattatttgattctctctgtttaaaacctttctattaatttgattcaagggagtattaaatttttttctttttgttgattcaaagttattaagcttttgatggaatcttaagcttctcttttggagtttgtaatgtatatgcgcatatcatttgtttttgagttatgtggatgttgaatcaaattacctctatctacagaggttttaaggcgttttagagggattgagaaactgttaaacccataaaggtcgagtggtcgactaacatattgctaaatcttgataaagggttttaacactcttctttgttgtcttattgcaggaaaggaacgtagagtctctgaatactacaagaag

SEQ ID NO: 41601 - DNA, 666 bp, Arabidopsis lyrata
  Intron number 1 from transcript 482805 (locus 482805) deri ved from phytozome v7.0 (chr-ID scaffold_4; pos 18374967 t o 18375632)
cccaatcaccgcttcccttctgctccttcttcaaggtttgtcctttctcgtcttatctatctttcgtgaagcttgtgttgagttcttcggtggcggcggcttgattttatatttgtttaatctttatttagttgatttgatgtgggtttatcttcatacttgttgtaaactttttgattgctgaattaagaaaagtaaagtatggatttttcgtatgagtgattattaacaaaagctttgatttctagttaagtgtttctttttgctgtttaaaagtggatatggatttgtgaaactagctagtctgcgagacgaacagtaaccctatttgtcatgttaccttctctgtatctgttttggattaagattagttcgtttaagagatgcatttctctaaacatcaatctcggaagtacaagttaaatatcttaaaccttgacccaattgaaaaggttgtgtcttttagccacctctctgagtgttgtttaagagatttgggagttgaacatttttctcagttacatttttctgtaattaggaaacaatgctttgtcgctatcaatacaatatcgtctgagtttagttacttgtttctgttgagagtttgttctgtttctgttattgatgactgtttctcccatttttatattagggaggagcttgtga

SEQ ID NO: 41602 - DNA, 796 bp, Arabidopsis lyrata
  Intron number 1 from transcript 474813 (locus 474813) deri ved from phytozome v7.0 (chr-ID scaffold_1; pos 32505505 t o 32506300 reverse strand)
tggatcctcaagccgcacacaaatttggttcccaggtaaagagagacttttcaccttttcgtatccaacgtctgtccctagcttgatataataatatccttaactttaagttcataaaatctatattctaaactcgggttattatgtatttgtcttttatattgttgtttgtttgtagattttggttttctattttctttgttgagtctccgtgttctgtaaaaattcgaaaattggtataaatcttcacatgtttacaaatttttttttttttttttgttagaatatttattttcctactttgcatagatcttggattttgttttattagctagtgttatttaacagattacttggatcataagtttttgaaatgattttgcctcctctgttttacggtatagcggcttagaaactctcctttatgtcttgcagtagttatgacttttaccacaatgatgcaactaataaatcaaattaatgcatgttggggaagaagtttgatataaatgtatcgtcatgctagtagtatattttctttctaagaggtggaataaaataatatggttgaagggtactgataacacgtatgtaatgcattgtactaagtcccattcttctaatttctcttcaattttttccgaagagtcgatgactggtcataactattatattgacaccaatgtgatattctatgcaaataatatgtataatagaatgcgactaatcagatatttttaataatttattatattcgatagggtttcttcaatctgacatctcggaggccacaaca

SEQ ID NO: 41603 - DNA, 250 bp, Arabidopsis lyrata
  Intron number 1 from transcript 894117 (locus 894117) deri ved from phytozome v7.0 (chr-ID scaffold_6; pos 9373963 to 9374212 reverse strand)
aggtttgtctactcaaaatcgactttatttttcttctgccagtgattttgattaagtggttgatttggtataatcgtagataggcttagatgtgaaaaaaaaactgattctttgtctattcagtcattgattgatttcatgaggaaacaaaattgttaagagttgttgatttcaaagttatgatcttttcattttgggtttattgaatggtgtagtaagcttcagagtgaagccgtaagagaggcaatat

SEQ ID NO: 41604 - DNA, 913 bp, Arabidopsis lyrata
  Intron number 1 from transcript 943328 (locus 943328) deri ved from phytozome v7.0 (chr-ID scaffold_6; pos 22962775 t o 22963687 reverse strand)
gtgagcgattctctcctcagctacatcgccgataggttctctttcttctctctatcccttcattacattcgctacttttgaacggtttttcatggaaacctccaaatgctgtttagaggaatatgacttttatttgatttcactgtctgtgaatcagtcacaaaatgccctgaggatttagctacggcataattttgataacttataatcgttgatttttttgttttatcatatgttagttaaactcagtttatcatgtcttgttatttccttttacctgatctggcgatctgctatgaatggactttggatattcatttacttcaaggtttcttttctgtaatctacgtttggggttagatatgcacagatatgaaggctaattttcatgccttaatagtcttttagagtaaatcgtttcgatttttgttctttcaagtaactgttgctataaatttattatagtcctttgttctcacattgttctagtctagttttgtttcacccgttattatttaccctcatcatacttgattaattacttaatacttatcctttgtcatgattaaagaaaacaactagttatataggttattagcagatataagaatatcgttagcttatagagctcttgtcatagacttgcttaaagcatcattacagttttgatcttttaagccatgcatgtactcgtcgtcccagtttgatcaaagggattgtacataacacattattctttgctcttcatattttacatgcttctgagttgattagtactatatatgagaatttctagttatggttttttttttttataacatatttttgttactcatcttcttagtttatgatttaactcttcacgtaactattttcagatcaagtaatctgaaaagttttgcacttccagtct

SEQ ID NO: 41605 - DNA, 637 bp, Arabidopsis lyrata
  Intron number 1 from transcript 313201 (locus 313201) deri ved from phytozome v7.0 (chr-ID scaffold_1; pos 10335365 t o 10336001 reverse strand)
gaagaaacttctctctcagtccaagagcaaggcaagttaccctaagaagaagagtcgtggaaacgtttcctctgtttcttctttttcaagtttctcgggaaatctaactggaaactcttgtcctttagattcatctgtcggaatcaaacgtgatacgagtgtaaattcgaggtttgagaataattcacgaggtgagttcggagatttctcagattctgggagaattggctatagttcaacaatacggataaaccctaagtttttgactccaacaacacaaaccctgaagcttcgtcctaaacagaactcaagaaccagttcaacttcactaacctccattgattcagcttccccatcatcttatctggaccaaaaagagaaatcgaaatcgaggtttttaagatcatggtttgataagttacccctagcacaagccatgggttgcttacaaggcaagtcttcatccaaaagcaaaaagacaaaagagagctgcgtagaaggattgttttgggaagaagaattcaagaaggcgaagaagagagtcgaagaagagtcgaagcaaaagaaaataatgttaaaaactcgtcaaaatgtcaaagaaggccaggtctgactgattcaatacttaatcgactac

SEQ ID NO: 41606 - DNA, 319 bp, Arabidopsis lyrata
  Intron number 3 from transcript 931357 (locus 931357) deri ved from phytozome v7.0 (chr-ID scaffold_3; pos 20537531 t o 20537849)
aagcagttagggaagctgcaattttgtgcattgaggtaaagtttgtaccatcatttatgtaactcgttttcaactactctaagtgatgatttcttctttgcagaagctttctatttaattattcattaaggcagactctcacagctaattctatttttatgactgagatagtagtgaacccaatcaaatttgagtgcagtttgagtagagaatttcacttcctccgtggagacctgtttatttgttctagataattcatagaattcagatgctctatttcgtgtttgattttaaatcataattctgtttttctcaggaa

SEQ ID NO: 41607 - DNA, 510 bp, Arabidopsis lyrata
  Intron number 1 from transcript 477837 (locus 477837) deri ved from phytozome v7.0 (chr-ID scaffold_3; pos 2073295 to 2073804)
gcaacgagctcgtcgtccaagcttcgccgacacaggttctctcttattcgttttacttggcttattgattgctgcgtaaccctaattttaaggattggcaagtaattcgtgagaaactcgcaatttgatttactataagttgatttcgtcaatacaaactgacgattagggttttttagtcgatgattactttatcgccgttagtttacccaaaatcatgtgtctacgaacccaaaagttggttcatcgattttctgcgtaattgctttaagaggctttgggaagaacgctgtgttgattgtatctgtacctatatttttagctcaacaattcgtcacattactctgattttactgtctacaatgccctatttctattaagtttaaccagatttgaattatgtacttgatgctagtatatctacagatttgtgaagtactttctgcgccttgttagatctaatttattttgttttgtcaaaacctttgcagctggcattgcacactttaa

SEQ ID NO: 41608 - DNA, 501 bp, Arabidopsis lyrata
  Intron number 4 from transcript 488986 (locus 488986) deri ved from phytozome v7.0 (chr-ID scaffold_6; pos 8818543 to 8819043)
tgttttgatttcatctgaattatttacaatatctgagaactttgatttagcggatctaatctggaactgtgagcttcgtgcgtttgtggtatcggattcgctttgtatctgttgattttgctaggaaaagtgaacgaaattatgtaaaaacttagggtttgatgttcttgagataagaattagaccctaatatttgggaaaacattccttgataatgacggctttgggatctgcctctgtgtgtatgtgggtgggtcctctgttttgcttgatggtattcttttctttattttggtcaggacctaacctatatagtaaattagtaatgcttcaaattgatttagagaagtcaataaacttagttaattgatttttaattctctctctttacatagagttgtgtgtaatgtggatttcccttattttgatgcaattgagtcaaaaactaaccaaatagtttgtgatattgtaaatgcagctacaagggaagaagaagatcat

SEQ ID NO: 41609 - DNA, 381 bp, Arabidopsis lyrata
  Intron number 2 from transcript 496078 (locus 496078) deri ved from phytozome v7.0 (chr-ID scaffold_8; pos 19136762 t o 19137142 reverse strand)
agagagagattagtagcactctcagaaatctaaaggtactgtcttttttttttctttctctggagaagtagctttattcatgtgacatgaccttggatttgaaactcaaggaaattactgaaattgaattaaattcgagcttggaaattgtagttttcttctctattttgctggattttgattcttgaacaaattgataatccctttgaggttgatttcaccttggggtaacactgagcttagcacctgttatagctttgtttttggggataaagttgcaatttttcactgaagaattgtgttatagcaatcatgtagctcttagttgataatctgtttttttgggttttaataatgattgatgctctctgtgtatagttt

SEQ ID NO: 41610 - DNA, 701 bp, Arabidopsis lyrata
  Intron number 1 from transcript 475880 (locus 475880) deri ved from phytozome v7.0 (chr-ID scaffold_2; pos 12714304 t o 12715004 reverse strand)
cttcaaggacctgacggagacgttaccatatgttagtttattccttttgaatctcatctctgttaggtctgtctatttgagttaaagttgaagatttttctattagttctgtttggttttagtttctactgcaaacccatgatttgaattttctcttgttaagtgggaatgttgctaagattctttatttcatataaaaaccgaatctttcactgaaaggaacaaactttaaacatgtgagagttagctgttctctgttgtgtataatctttgacaatcttgttttcatcagcaaacgatggtgcaacgatcttggagcaaatggatgtggacagtcagattactaaattgatggttgaactgtcaaggagtcaggattatgagattggtgatggcactactggtgttgttgtcatggctggtgcgcttctggagcaagctaaacgtcagttggatagagggattgatcctattcgtattgctgaaggatataaaatggcgtctagagttggtgttgagcatttggaacgtatctcttagaagtttgagtttgatgttgataattatgagttactggttcaaacttgcatgactactctatcctcgaagacgtaagtattgcctatcttcttcaatatttagtagattgctttgttaagaatttttcgtaactttttggctttgtgttgcagtgtgaatcg

SEQ ID NO: 41611 - DNA, 807 bp, Arabidopsis lyrata
  Intron number 1 from transcript 489282 (locus 489282) deri ved from phytozome v7.0 (chr-ID scaffold_6; pos 10484175 t o 10484981 reverse strand)
cactaagaagaatcgcttcacggatttttatttcgaggtatggccattttttaattttactttcttggttttttcgatctctatgaagaatcggtcaatttcttgcttgtgttttttccgatcatgaatcgcgaattttataggtttcgatgatcgggaaatgtgtgtagaaattcgaattcaatttttgactttgggagatttatgtcgcgcttttctctggagaaatactcgttagatgatccgagacttatctttagtgattaaggattgaattattggtttcgtgttttgtgattagtgatttacttcgtctttgattttgtaaaagtgtgagaattagtactaaaatcttaattttcagaaacctaaattaagattagtaatcggataaagttttaagacttaggccagcctgtttggttttgtgatgataaaatccgattaagacgttgacttaaaactaattttgtggccgttgtttagttatgcttttaagctaattttagctttgaagaattctaattatatatagatgagaaccaaagtttttaaggttatatagtttgcttatgttcaagagaaaaaaaaaaaaaaggttatatagtttgctaagataaaagtagacgcatgttcatcatctatacaaagaggtttgtgtttttggaatcttttttttttgtgcttgatccgaatttttaacatttgtaatactctgagcttaattagaaaatggtgattgatgttgttactgttccatgactaattcctgtggtcattgtttctcattcaggttctttgcgattg

SEQ ID NO: 41612 - DNA, 657 bp, Arabidopsis lyrata
  Intron number 1 from transcript 482996 (locus 482996) deri ved from phytozome v7.0 (chr-ID scaffold_4; pos 19280356 t o 19281012)
cctgcatctctgttctaaaatcttccatccgaaagtccggttttctcataatctctctctagttgtaatctattttaggaaatgaaaattatgcgaatatctgtgagatgaaatagcccggatctcgttgagccagatgctgtaacaattttgattacacaagttgttttttccatttcgacatcttctctgagtttgagtagtttgctgatggaattggaaaatctttgttggtcacaattttgtcctcttttgcttattctcaccagattttgagttgtcttatttctttttctaattcaaaatcagttccaggaattgcttagtgtgtctctcagcttctgttcaatggctcatcatcatatacgcttagcaagtcttgggatatattttagttgttgacaatataagatttttaatcacaatctgaggccaacattgtctgtttgcttgaagaacccgttctcttgtcgatttctgcgtttagttcatcgctatgcactgcatgattgttgatttgcgtagcaaacttttatcttattgattgtttgttcatcagtcactgcacttctttagctcaaatgcttgttatgtgctcagtatatgacaatattctaaaatgagcttgtttggtttactcttttgttaaagaggaaa

SEQ ID NO: 41613 - DNA, 565 bp, Arabidopsis lyrata
  Intron number 3 from transcript 478745 (locus 478745) deri ved from phytozome v7.0 (chr-ID scaffold_3; pos 5514214 to 5514778 reverse strand)
ccgtgatctgaaatctcgccgactgaatctggaacgggaaagctcgaattaggtacttcactcatcatttcttgattttgcatctaggtgtttcattttctcgcattgtttgtcttagcttgagtctgaactagcttttgattgtatcttccacattcttcttttctctgcaaatcctgttttcagagcacatgtctgaaagaacgaaacgacaaaagagtttagattaaaaaattgtgtcttttcgaatgctcgatgggtttgtttactgtttatcccagttctattctcagagcgttgcttagcttacttctgtcggaaatcttttcttatatatccatgagttgcttacttgaatttaccaacaacaacaacaaaaaaaagttgcttacttgattttagggttcttgccatatttgaccaattatcctgaaaaggaaaaaaaaaacagtgccttgtgaatttagagtgagaaatctacaatccatgtcatgttaggttctaaatttctgttacaatcattagcatatgactcaatttttgtgtaggttttaggttttcaagc

SEQ ID NO: 41614 - DNA, 905 bp, Arabidopsis lyrata
  Intron number 1 from transcript 914143 (locus 914143) deri ved from phytozome v7.0 (chr-ID scaffold_1; pos 26263881 t o 26264785 reverse strand)
ttccatcctggttaacagactttaaccctacaaaggtaattaaaaaataacatcatttgttccattaatctcattactaaaacattatatattattttgtttgtctctaaattggaattttatatgtatacacctataacaaattctatcaacgtcccttaatactgaaatgtgttttatatttgctaacaatcccactattaaaatgtatactttcatggccaaaagtgatatcaacaccaagataacttgtttttttaaaattaaatgtgtgttcttacaaatggtctttttcagtaaacaatatcgatcttcccgtttttcttaattttgttttgatagatgttttacactacatttaaaaaagagctcacaaaataaatattcaaaatattatccaagaaagaatccaccatgaaccaaaaaggacccatgtgatgtgatgatacccaacatattttattttgaatgtttgttcttaaaacattggtttgatttcatttttttcttgggtttaaaaactattttgataactgttgttactaaatttctagatagtgcaatttgaatcgaaaacgtttgtatttgaaagttggtttcatgttcagtttttatttcctcggggttttttgtaaaatgttttgcattaaattttaaaagaacaaaatgtagcccatcataattggaaaaagcccacaaaggagatatttaaaatatcaaagaaagaatccaacatacactaatgaggccccatggaagaacatcccaaatatctatagctaaaaaaaacccgaagtcttcaaatcagcaacaacggagagataaattttgacacatttttcttgtttttgtcaattgcttattaaaagtttatatgttgttcattgtatagacactcaggggtc

SEQ ID NO: 41615 - DNA, 754 bp, Arabidopsis lyrata
  Intron number 1 from transcript 313816 (locus 313816) deri ved from phytozome v7.0 (chr-ID scaffold_1; pos 14850793 t o 14851546 reverse strand)
tcttgcctagagatttataacaaagacgtaagtaatatttaattaagcttgtcccttcaattgtttctttatttgctttgatatattaatcagagtttggagtaatggacctttacttttcttccttataagattttgattatctgattaaggctcttgtttcttgaatttcatatgtgactacaaaaggaaatttttttcttgttaagtaactcattgttatagtaaaaactttataagcttttggtggctcaataagagcatgatcaaaaggacatgcttagtgcaatggaaagtcacgatctttatgtgcaacaaacatttagctcaacatcttttctttttcttcaaaaaaatatttttaatagacaagcttttaaattaagctctataatattggcatattatatctaatcttctttatatatatggatgtaagtatttttcttttttagtgctccaatttaaagtcgagtataaatccaaatataatcttgaaagtagtgtatacaaaacgagaattacgtggcaatgcagaaaattagagttaaaagaaaaaatcgttttttgtttttggtcaagttccggaaaaacaaaaaccatggaacttatgaatcttctccgtaacatgagcaaaaaaggtggtacatactagtagagaattaaacatatatagcatctttctatatatttatagataaattgatgtgtgtgtatcaactaattaaatttaactaaatgaaaaatgcagaca

SEQ ID NO: 41616 - DNA, 982 bp, Arabidopsis lyrata
  Intron number 1 from transcript 493718 (locus 493718) deri ved from phytozome v7.0 (chr-ID scaffold_7; pos 20107939 t o 20108920)
attgtgagaatcatcgtttctttagggcttgattggttctcccgctagcaccctcctagcggttactagcggtcggttgcggttattagcggttgataccaatcatagaaaccgctccgtaccgcttcgaaccgttcgaaatcgctgaatttcaaaagctccttcccgcaagcgtttgcggttgcgggcggtagcggttggattttttttttttttttttttttttaaaaaatccaaacgtttacttataattattataatatatattaatcatatataaattttttatctttgtatcacgttctcatcagaaaccctaataatattctaaaactctatttctctcaatgtcttccatccaaactgatgaaaatcaataaccaaacgtaagcatcatatatccttttattcattcatcacctcatatataactttttgaatattttttcatgacatcgttttttttcttttcattacgtattgctttgctttttgattgaatatatgtttcgatttgttttctcgaatagaaactcacttgctttttgattgaattcaacgttatttacaatttgtcccattacttgatgttaaaccagatgcataaagtactatcttgttacagaatttatttatttttgaataattatttagttctttatttatggttttcattattaagcatgttcaatttttctaatattatcataataatatattggtgtttttatttatttttttgtaatattttttatttattttggtcatttttttatttaactgctaccggacccgctggtttaccagtcataaaactcccgcaaacgtacccattttcaaacgctaaaccagtcgttcaaaacgcttgataacgcttgaagccgcaactgcctgcttccgcaaactcccgcaaccgcaaccgcaaccgctgcgtttaaaccagtcaggcccttagtagctgataaagttggcgtctgggaag

SEQ ID NO: 41617 - DNA, 636 bp, Arabidopsis lyrata
  Intron number 2 from transcript 475472 (locus 475472) deri ved from phytozome v7.0 (chr-ID scaffold_2; pos 7260093 to 7260728)
tgcagccaataactttgctagaggccattacactggttattaacattttccacctctcttctttttttgttatgaatttttctttgtcttgctagattgatccacctttaggggcaaccgaacattgctattttaaactgaaaacgtatgtgctttcgtttggtctaacggtaattagcaaaacattgtacttcttaatcatgtatgtctgagttttgagttttgtaggttattctagagagtctagcaaagctaagacaaattttaatcaagtaattgtgtgagctttaatgcatttttattcggtttttgtaaattgtgtcatgtgttttcgtggtaataccgggtacttcatatctagataatagcttcagaagttaaatatagatatcactatgtatcaattcatctataagctaacaagtagggtatcaatgtgcacatgattgcttgccatagtaacaatgaactctgtctttttttctttgctcaaaatggctccatttcatccattgcttatgacgagaaatggcatatttaaccatgactggttcatcatctgctaattttcatggtactgaaatttgttccatcgatgcagttggaagggaaattgttgacacctgccttgaaagg

SEQ ID NO: 41618 - DNA, 283 bp, Arabidopsis lyrata
  Intron number 1 from transcript 312467 (locus 312467) deri ved from phytozome v7.0 (chr-ID scaffold_1; pos 6219935 to 6220217 reverse strand)
ctctgcttcgagagcttcaggtttttctttgaccctcttcttctctgtttcttggaaatttagggtttcttgataatggtgttttaaggacaaagtctgtgtttttttgttctttatagataaaagtcttctcctttttttcccgtcaactataggtttaagggtcactgtgaattttggtacctcgacttcttttgaactgttcttctacaagtatctgtaagatatctgattttgatgtatggtttaatgggaaaattttatttggtatggggcagaaaat

SEQ ID NO: 41619 - DNA, 628 bp, Arabidopsis lyrata
  Intron number 1 from transcript 489069 (locus 489069) deri ved from phytozome v7.0 (chr-ID scaffold_6; pos 9256809 to 9257436)
ccacatacagaaaccaagaggtagcattttgcgatatttgctatcttcttttgtattatttggtgcaatgtatgtatggatcagctaattttagtatgttttaacgttaaagtcacaaaacatcacccatctttacatatgtctaagaatttcttagaatcaattcgatttcacaatttttttcctgttaaatttaatatttatcatcattttgtatttataataacaaatctgcaatgttgaaaaaccaataccaacgaacaataccaacatatgcatatttgtgtaccacttgcagaattaattttcttttcttttcttcatcttcttaaaatgtcatcctttattcacgaataattatagaatatttacaagaatagaaggctctagagtacttactgttaagggaaatagaaatttggcagaagctattaaagttgaaatacaagaaaaaataaagtcttttataatatgtttacagtttctaaaatgttttaaaagactttaaaacatttataaggttttgattttcttcttctaagcatttacgtattaatgtattaattctaactttattttttcctattaattaggtgacggtggcgaggctattgccgtcgacgtatca

SEQ ID NO: 41620 - DNA, 432 bp, Arabidopsis lyrata
  Intron number 1 from transcript 474415 (locus 474415) deri ved from phytozome v7.0 (chr-ID scaffold_1; pos 28201183 t o 28201614)
gattagccattgccgccgaacaaagaagaagtgtcgtaagaatcaatcacttttctctctttactgttcgttgctctctttcagatttcttcttctcctgaagtcaaactttggttatgagattctaatctttatttgaatagtgtttagacttttaaattagttttggtaccgacatctctgtcggtgcgatttcttgtagtggactctttatcagatctgactcaagaatcttgtttcttgatctatacggatcttaaaattgtactttaaagatctttgtagactttaagacctttgtagataagtgcagcttactgcattgttagatctcagattagtggttttttgatctatcattttgcttaagttttttggtttctttgtttgttgttttgtagggtaaggttgttccggacaaggagaaggatt

SEQ ID NO: 41621 - DNA, 491 bp, Arabidopsis lyrata
  Intron number 1 from transcript 470808 (locus 470808) deri ved from phytozome v7.0 (chr-ID scaffold_1; pos 2878138 to 2878628 reverse strand)
ttcttcaaggttcgtttttttcctgattttcttcgaaagttgtcgactttaatgcgatccatgtgtttttgtataatgggtttgatcgatttcatatctctgcttcgatcaagttttttcttttgagggtttttgatcttttctatgttctgatcttttgtttcttcaaaagttgtcaactttatggtgattcatgcaaattgactactctgatttggtttattgtgatgctgattctgtgatctattaagctgatcttattcttgtatgattctgaaaaatctgtagaaagtgaaaaatatgatagtcaaatagatcacgactactgtgtgcaggaaaaaagttgtcttttgctgtttttgttttgcttaatcacgtcttaatcgttgatttgatcaacctcgcgtgtaaggaattgaaagcttgtttatttgactttttcaaattctgtttcaggatctggaactgctggaattgttctcccagagcag

SEQ ID NO: 41622 - DNA, 633 bp, Arabidopsis lyrata
  Intron number 1 from transcript 484837 (locus 484837) deri ved from phytozome v7.0 (chr-ID scaffold_5; pos 10694713 t o 10695345 reverse strand)
ggagctcagaagagtatccacgctggtagaggtcatcactctatcctctaaagccatctctttactctctcgatttttcgattttgtgttggatcagtattgatgtgatcatgtgctgaaaatggtacaattctggaatttgattgtggatttaaccatacccaatggaaggctttgatttgtttccatgtttcttctattatctatcttcatttcccatgtattgatatgattcattccatatgcatagttatgattatgtgtatgtggtgtggttattgatgaattagaatgttgtaggcatgagtatacattgttttttttttgtaaaaggaaacatttttctaagacttttgagtgtagtgactagtgagtctatgattatgatcggattggtttgatatgtggctttcattgatgtttttcgagaaaaaggatcgattttgatctttctattagatagttgtaggatacattaacgttttctgaaccattgtgttactaactcatcatgtgggatatgtcttgctgttgaatttagtgaaagattaagatcgcattggtttgcaatgtggttttcaagcggcggcatcgattttgatattcttgtgttgttgattgcagccaagattg

SEQ ID NO: 41623 - DNA, 340 bp, Arabidopsis lyrata
  Intron number 1 from transcript 946645 (locus 946645) deri ved from phytozome v7.0 (chr-ID scaffold_7; pos 12250898 t o 12251237)
tctcttcccctcgaggtacacatttcgaatcacgatccataattcctccttctcttttcatgttttgatcttaatctgtagtattcaatgtttctatctcaatttcaattattcgaaatatttcaatttccttttgattgagagtcatttggtagaagattgtgaattgttccttgatctgttccagtctttttccaatggtagttttgtgatgttttttcttttttgtgatgttattgatgttggttcaatcttgtgttagtcgaaatagtttacattgatttctcgatctgttataacttcaggagaatatatttgagtggcaattcgcgatccgagg

SEQ ID NO: 41624 - DNA, 477 bp, Arabidopsis lyrata
  Intron number 3 from transcript 922872 (locus 922872) deri ved from phytozome v7.0 (chr-ID scaffold_1; pos 22303835 t o 22304311 reverse strand)
tggaactcgtttgtgaggaagcagcggtatgtctttcagtacatatgatgtcgaatcttacagtatacaagtttagagtcacatgtgtaataatagtttgtggatgttgttgcatgagttcctctggtaaaagcaaagtgaacaaatctggttgtatgttttctgactcatgcatgataagcattttgtttttgatcctttgttggctccagaagtccttgttctgcacctccttcttctcaggccgtaggttgagtggaacgtgtataggatcttccgttctttgaattcttggttgaaaaaggcataaatttttcttctcacattccatgggcatgtgaggcattctcaaaattacatggacccatcattgttcgaacaccgagcttgatttggtaaattgaactcccatttcctctattgttttgctaagttgatacaggtgagtttttgtgatgtaggtgctggagagtgttt

SEQ ID NO: 41625 - DNA, 513 bp, Arabidopsis lyrata
  Intron number 2 from transcript 931350 (locus 931350) deri ved from phytozome v7.0 (chr-ID scaffold_3; pos 20510506 t o 20511018)
tttgttacaagtacctacctattgtttcaacatttatatactagatgaagttgatacttgtttcttgttcgtcttccggttgatttggtttcttcatgtttctggattagattgtgatggaggattgatggttaggaatgtcccttgattacattttggagtttctgttacaaaaattagttcgagtagttttgattggacaaaagattggcttgttgatgaagaatcaacgtggttagggtagtacatctaatggcttaaaccttagatattgaagatacacttgccttcctttggatctttgactgtatctttctgtttcttacaaactgttatccaattgctatctttttagtaatcttatctcgtttcaagatttggtgactttccataaacatttgttctttcttgtcttgtttagtttttctgggtaaatcatctctgccttcatgatattggtctgaaacatttacaaatgttttggtccaggttcagaggggccgcagctacaaa

SEQ ID NO: 41626 - DNA, 770 bp, Arabidopsis lyrata
  Intron number 1 from transcript 473652 (locus 473652) deri ved from phytozome v7.0 (chr-ID scaffold_1; pos 16870861 t o 16871630)
gcttcaagacattcaatcgttacaataatcttcaggtacgattcatgaatatatctcatgcgcattggttaattatccatgcataacaaagtataataaattcatattcaacttatatagttatatctccgcatattattcatatacataactatgaatctatttgaaaaatgctaaacaaccaggagttaattacttttttttttttaaatatctggtagtacatattttaatggtaatattttcatgaaaatatttcatcaaagctttttacgtttattgaaagtattacttaaatttgaatattaaaaacttgaaattaaattgtttactcaaatttgattgactataattttttttttagttttctcatatatttttttagttttatagtagtcaaagaatttcactcaaacttaaatacacagatttcctaaatgaaacactggtcggtcaataatatgatttaatgaatttatttcattttattacttatgcaaatcttgtttttttttttttttttttgactcctaaataatattgactataattttaaatagtttttaataggtttctcacatattattcaattttagttgaatagtagtcaaaagatttcttcaaactaaattacacagatttattaaaatgaaacactagatatgatcgatcaataatatgattttgaaccatattgtttcattttattacttatgcaaaccttgtttctttgttttttgttgactcctaaataatatgaatgaacgtag

SEQ ID NO: 41627 - DNA, 813 bp, Arabidopsis lyrata
  Intron number 1 from transcript 477669 (locus 477669) deri ved from phytozome v7.0 (chr-ID scaffold_3; pos 1358950 to 1359762 reverse strand)
ctcttttctccttggcgattagattacccgctcaggtttatacaattctaaagatccaaactttttcagaatttttgaattttttgtcagcttactgttttgggtttacttggtttcatagatttagtcaatatttgtgatctgtgatagtttttttcaaatgggcttgtgtattatctgcgaattagaatctagttttgtatgaatccttgaatctcaagctatatagtatatgcttctcatgagatttgtccccacttgtatgccccgttttagattggttgaagttagaattagacttttttttttcttgctcgatttcatcattttagtacaaatgagtctgatcttctgttgttcgtatattctcactttcatctgtttagtatactatactcaggtttgatatttcttggaaagaagaacacacagaatcagattcttttttttttttttttaatgtttgttttttgttgatgtatgtgtttcccacttaatttaaagcaggaaaacgaaaccttatctttctcgtcgatatgtctttgttttttctttagccttttctggagtttcttgcgtgtccatgtgtttctgtgtactatagtaacataaatagatagaaagactgttaattggtaaacctgatttagcaaggagtaatttgtactcttttgagagttgaatcgagcaagatgactttatttcctttttactgtttcttgatttcgacgggatgctgtttgaaatggagatatgatattagtacatgtgattccaggcagctggtgcggcaggaggtgcattggccatcat

SEQ ID NO: 41628 - DNA, 876 bp, Arabidopsis lyrata
  Intron number 1 from transcript 312791 (locus 312791) deri ved from phytozome v7.0 (chr-ID scaffold_1; pos 7719488 to 7720363)
gcgttaaccctacccaaggttagtccttaatcatttagattcaagattagtttccatcactcgattctgcacatagactttagaacgatactttgaccaattggcagagaattgacccaaacttttaataatcttgttttaagacatattttgactttttcaacttggtgttcggtacgtgttctgttttccatttatcatttaaacagaatttgtcctaagcaatgcgtctatcttcgctccaaaaacattaggattacagctggtttttcgtaacgcgagcaggcggctggatcaaatcttgggctttttgggccgaacacatcaaacccggtttacttttttcttgaaaaacgactttttaatttcttgtgtttgaagtttctgctagtagaccgacgactctaaccgaccctctcttgaacaaacaaatcttttttacagaaaccccatcatacttccattacaatgatttttccagttttaaaaataacaattattaagagccctaaatttcccattacgatttttttctttgtggggtcatcttcaacctcagagtcagaggctcaaagagacaaattaaaagtttcagtttttaagtcaaattgcagtctttattttctttacaccaagaaaaattagtattatactctttgcgcacactagttgagcaaacttttttaactctcacccactcctttgaaactctttgatttctttctgttttgttctcttcttcttgtttcttcttcatctaatttttttctccttaccctaaaaatggatcattcaacaccaagtttactctacacatctatcttctacttcacaataatagcaactcaaaccctctctcttgatccaaagttcaag

SEQ ID NO: 41629 - DNA, 636 bp, Arabidopsis lyrata
  Intron number 3 from transcript 947478 (locus 947478) deri ved from phytozome v7.0 (chr-ID scaffold_7; pos 20973726 t o 20974361)
tcaaacgtcatctttgcctgagtttagttaggagggttggttttcacaatcagaatgctaaaattgcttgagatactatactagatggaggccgtttaatgaaatgatgttcataatccgaggccggttagagagtgtaacactagatggaggaagaagctgtttcttcaacagagggttaatattgaaagaaggagacttttgtggtgaagagcttctgccatgggctcttgaccttaaagcaggctccatcttaccttcttccacaagaacagtgacggatctgtcatcttcttattcctgaaggtaagtgtcttattatggttagtcgattgattttgctcttatagtttggaattacattctccttttatttatattctacagtagcggatgagtattttgttgtctatatatatgactttgagcctatcttagaaacaaacttttgatttgaggagattttccttttcttcataaagtagctttgaatgatcaaacttccatttacttctaatgtgttttaggtatgacatcactctagactgttgcaagctactttacttctgtggatgatggtaaacactcttccatactatcccatatttgtatcacatgattttttatttcagaatc

SEQ ID NO: 41630 - DNA, 432 bp, Arabidopsis lyrata
  Intron number 3 from transcript 916441 (locus 916441) deri ved from phytozome v7.0 (chr-ID scaffold_8; pos 12439953 t o 12440384)
cggctttctgagcaagagaaagtgtttgctaccaggtttgttttttacttgtctgattttatgttaattggctgtcttcttcagttcttccttgtaagctttttgcctttttatgtgtggttctaaatgttataggtttggtgtagaatctgtgtggaatatagatagtgttaagagatatgtcgggtactctctacatgttaagagttgtgcccaatgggatagaatgaacccacatatgaatacaattattgttcatggaggatttgaactctcccggaaattaaaaacctcaggtagcctaggcacttttttcatgagtatctgtttgagtgttttttttttcagactttaaacttgatttttacagtttacgttaatggctgttgttgtgaaacatatactggaatgatcacattcacaggtgtgctg

SEQ ID NO: 41631 - DNA, 350 bp, Arabidopsis lyrata
  Intron number 4 from transcript 491344 (locus 491344) deri ved from phytozome v7.0 (chr-ID scaffold_7; pos 3258741 to 3259090)
cgaagaattttgtatttcagaatcctgatcaccaggttaagtttcttgcttttgcattgtgaataatgtgtttgattatttgttaaaggatcttactttttcccatctttgttttctgtattgtcaggtgttctttctgacttgtattgttgttttatggttgagtaggtttgtggttaagcatctttttccatatcacagacagccttaatccaaagctttaattttgttcgaaaagaagactcattttgttgtcacttctgaggaagatcagttagtaacatttggattttcaagtaaaaccgctcattctggcctcatttgaacgttcttgttcatcgcaggtagtg

SEQ ID NO: 41632 - DNA, 493 bp, Arabidopsis lyrata
  Intron number 1 from transcript 925932 (locus 925932) deri ved from phytozome v7.0 (chr-ID scaffold_2; pos 12050662 t o 12051154)
cttctggtttcgccaacttgtagaggtgtttatcatcaaccaaagatttctcgatttgttttctctttatgattttctcttccgaatcgatagctagtgaattagggctttctctcaattgttgaagctgcctcttcttcttcactgtggctcggcgtcgccaccatctgaagacccctattcatggctttcgggaaattctcactgtgcatctctatcatccccgcttacatttccagattctgtatcgaaatctctcattcattcaactttatctcttattgttgcttagttttaaccagtttgacttgggattttgattatgtagtttttctgtagatgagctcattgtgcactctagatgttcgataaaatgtctaggtgagactcaaactggaaaaattgcattaagccggtctgtttttttattggtgttgtagggtaacgatctgtagtaggaggtaagaacaagaagacaaaaagactgttccta

SEQ ID NO: 41633 - DNA, 529 bp, Arabidopsis lyrata
  Intron number 1 from transcript 486603 (locus 486603) deri ved from phytozome v7.0 (chr-ID scaffold_5; pos 20190431 t o 20190959 reverse strand)
actccaaagcccttgctgttgtcgagagtaagttctctctctatacgcatataattatggattacgatctctgataatcctctgctttaatgataaattattggttttggggttaactttggtctggattttaaaaattaggttatttggattgggttcctccagagataaaattggtccttgagaaacgatgaaacttaaaatttattggtttcgattaaaagtctcgagatttatcacacggcaattgatgtcatgaaacgcctttataaaacaaaaaaactatggaagaaactgttcttgattggtaaatattgtttttttgttatacataccttatgaattcaatgtatatggtcattaatcacccaaaaatcgtagctttatttcagaatcatgcctatgttttgtatgtgtttgctttctgcctctctttgtgttgaggcttggcactttttgctgtttatgttttaatggaatgaaaattcttgcagaacctgtagaagagcctgcaccggtgaaatcttcg

SEQ ID NO: 41634 - DNA, 454 bp, Arabidopsis lyrata
  Intron number 1 from transcript 477126 (locus 477126) deri ved from phytozome v7.0 (chr-ID scaffold_2; pos 18732646 t o 18733099 reverse strand)
agtggttgatcaattatttgtaagcttactcgctagaggttctggaataatttttcactgttctatctaagtcgttagaatttcctgaagcacttagattttagattttgattttgattctaaaatgacgtaatcgttgtatcggctgctttagggttctgggtttttgtgctgttggtatcgagtgtatttggtatttttggattagttgaaaatggttgggtttagttcgaaatcctatttccgctgagaattttatgtagcaaactaaggagaatcttgtttttgaatttcatttttgatcattcacataagagatttcctctagtgaagaaatcgaagcttgtgaatttttcccttttttcttttgatgtctgctttgctgcattatcatcttttgtttttgccatgggacttaaaacttatatcctgattctttcattgcagcagctta

SEQ ID NO: 41635 - DNA, 1013 bp, Arabidopsis lyrata
  Intron number 3 from transcript 476859 (locus 476859) deri ved from phytozome v7.0 (chr-ID scaffold_2; pos 17446352 t o 17447364)
cacaaaatttgagctttttttttgaagttcttgaggtaacttttctcagtctcttatagttttattttgtttgattttgtcaatttcgaaactttgaattctggtttttattgttttcataatttttctggagaaaacccagaaagttgtaaagattttgctgaattgagtatgttctattgaaattgattcgacagatttttgagaacgatgtatgttttaaattcgatttcgacgcaccataaattttatatatgaaattgagattttgaaaacaacagatttggtctcatcttcttcaagttgttgttgatgtgtctgctgcctgctgcttagagtagtgtttgttgcaagttggcttattattgtctaatcagttatattattattttattttttagtgtttcgatttgtaacattttagattccgtctttgaccaattaaaatctttcctccataacgttttattttataacgttttttttctttctttcatgtttttaactttgacagctacttctaagttcgttttaagcatcaattcgtttatgcaaatagagagaatctcatgtcatgtcttagaaaacaaaattgctcagaaactatctttttggttttgattttaatattagtaggaagagatcttttaggaatctattcctctgtttttttctttggttgagaaggaccagagaaactctcttgttttgtttcagagaatctctgtttgtggtctctctttatgaaatctttatctctatcttctttcagattctgcttcttctgtctagttacttagtggccaagattcacttatttgactcggctggcaaaatctatcgaatatcttatcttcttgcaacttgttgagagacttaaagctctacttactttgtttgttgcttcttcttatcctttgtcttgttcttctgtgtcttggtaatggtataaattacttctttttggtgaaattgcagaacaagtgaagagcttaatatccacaagactctct

SEQ ID NO: 41636 - DNA, 437 bp, Arabidopsis lyrata
  Intron number 1 from transcript 496250 (locus 496250) deri ved from phytozome v7.0 (chr-ID scaffold_8; pos 19821318 t o 19821754 reverse strand)
gaattaggactcaagcttaccagtcttcaatcgacgtaaacagtaagaacatataatctttaacatgtttgattttcaaattcttatgagctttcttatcttaaatgcaaaatcaagaaagagatgatcaatcatatcaattttgctttgtttctatgtgaattttgctccaattttttttttaaaagcaaaaaatgtcatcacttcacctcaatttcattccattgaaagctataattcttgtcttcttgatttatttttcattaaattggtcaatttctttccttattgtttcagatctgttctttataccaaattgagtgaagatcttgttgagtgaattaaaagagatgagatcaagagaatgtgatgaagaggagatacaagcaaagcaagaaggagatcataatcaaaatcatcaagtaaacttaaaccac

SEQ ID NO: 41637 - DNA, 763 bp, Arabidopsis lyrata
  Intron number 2 from transcript 493108 (locus 493108) deri ved from phytozome v7.0 (chr-ID scaffold_7; pos 11342703 t o 11343465)
ttaaatcccatctacaggtaatctttcttaagttacttattataatgtataggtatataaataatcgattagaccctataaaatacatgaatttattgtaatatggatttgaatatgcaaatgaaccaaacccactgcacttttttatgaaatgactgaatattttctgtgattagtttggacaaagttaaattaagtatccttttttgtcgccaccatatattgataaattatatacaaagtgaaaaaaaaaaggatcaaaagagaaggaatcaaaagctagatatagccaaagagaaagagaaagagtccttttattactagagatgcagtagaaaagtaaaagtacaaaggagacatcattcttcaatgatgatatatgcacacatatatgtatatgcatgattcttcaatgataacaaatagtataacttatttttcttgtataatttgactatagttagaataagacacgtagacccatgcacatctcccatctctgtgtatggctgcacattttcatgaatcgtaaatgctttctgttttactctgatcttttttttcttactttatccatctctgtctctgtgtgcgtgcatatctaatatgtataggttataggtatacacacacgtgaatagaacacgtctatacacacgaacatcacacaaacacacattatatatgtgtatcgatataacacattattcttataactagcatttttatatatataatagtaatctaatgttgactgtttcag

SEQ ID NO: 41638 - DNA, 840 bp, Arabidopsis lyrata
  Intron number 2 from transcript 492921 (locus 492921) deri ved from phytozome v7.0 (chr-ID scaffold_7; pos 10237322 t o 10238161)
aaccaaacaagaatttagaggactccattttcacaaggtatgcatcatttttgtgaatttcttttttatttgaacgtattgtaacctttttatagttatgcaagttcgatatttacactcagattgttatcatttcattataatacaaaatataattgaatatttggttttagtcttgttagttataactatatagggttgccattaatgaatttcttatcattaatgtgaatgacatcgaagctgttacttcgggaattgataatttgatatgattcaacacatttctctgcgatccaacaagttgaatatgaataaggggatgatatgattttcttacatagtaaaagttgagatgatgtgaaagggtattttttggtatctcaaaatacaaacatcccataatagcgattagcaatgttaactgtaaatctgtaatggattatgatagatttgtaatgatagtaattgtttagtggagcaaggtaataattacagacaacttgaaaagttggtctgagaaaagctataagatatttatacacgcacatggacgatggatgtctttttctggccatctatctacattttaatagtctaaatttccaatttctaataacgtggattcgtggaatcttaaaacaatggattactataatagtataattatcaaaattattatccactcgaaaatgtaggtcagttcaaaatgaataaatttgtcagtccgcatgttaccatattaaagcagtaattcgcattataaatgtataattatattattattgaaaaaactaaatcgttagcttgtttatttttattttttctcagaattataga

SEQ ID NO: 41639 - DNA, 563 bp, Arabidopsis lyrata
  Intron number 1 from transcript 483701 (locus 483701) deri ved from phytozome v7.0 (chr-ID scaffold_4; pos 22211795 t o 22212357)
agccgtggcaagctctacgagttcggtagtgttgggtatatatatcttgctccttcgaaccaacttttgtgctctttagattcattcaataaagttaggtttttaatgaaaatttgattaaatgggttcttttattactggttatatcgtacgattcaagagtcggatcatgttttgatcttgtgggtattcttaatggttgtgtcttttatcctgtggtaattagggttcatcgttatatatatcttctgtagctctctcttggatccttaatcataagctaatgggtccatccgtacgttataatttgacaaattaaatttgttgattgaattcgtttgattctttaatcttaaagatgccagattgcaaaatgggtttctagcttttttaaaaaattccaaactagggttttaccttttagaccatgcgtgtaagatataacttgagttcttgttgtaagaagaatctttatacatacttgagccaatgatctctcattttttttttaaattgaatttgctgtagaattgcaagaacaatcgaacggtataaccgttgtt

SEQ ID NO: 41640 - DNA, 972 bp, Arabidopsis lyrata
  Intron number 1 from transcript 329260 (locus 329260) deri ved from phytozome v7.0 (chr-ID scaffold_7; pos 7822081 to 7823052 reverse strand)
aagctgaaaatcttaaggtatgtatatattatttatcaattatgttaggtttagtacgtttttaatctaatttcgagttttcgacaaatgcttagacgtaggtcaacttaacataagtcttacgagtcttagacccatcgtgaccgttccaatgattgttaacagttaacacttacttcataatttccttaattgtctctttccattagtaatcttttaccgaatgtaaaaattatcattcattttaattacgttgaattgtggagaattaacatattttataaaggaaagaatatgggaccaaaaaaaaaaaaattgtcgtggaagaagtaattcattatgacaataaaaataaaatgagtagaaaatgacaaaaatagttatttgctaaattaatgggagccattgttgtgttgaaagggtcactccttcagaaccttatcgtatcttgtccacgatagtggcgattttgtcctttatgacctaagactttggaagactgtgacattaccttgttcatttatatgattttttcactaaacgataagaataagaatcgtcgtagttacctaaatgatttctcctaaactgataagagcattagttatctaaatgatataaatttttatttgtttgaattttcaaacatccatgattgcacataagtgtacttgaattgaaatttcctaccacaattactattaagcatttctttttggaatagatatgttttttttttctttgttaaaggaatagaaatattgttccttgatattcatcaattatgagttaaatattaaacagtaatattaaagttggaacttctaaaacaaagtggaaagtctgtttgacaacaaaatgatttggaaaaactggttgacatagtagtaaaaatattttgaaacagtgttataaatcaactgtacgtaataaactatacaagacaaaaatattcattttgtggtgtaacag

SEQ ID NO: 41641 - DNA, 1005 bp, Arabidopsis lyrata
  Intron number 3 from transcript 935945 (locus 935945) deri ved from phytozome v7.0 (chr-ID scaffold_5; pos 727295 to 728299 reverse strand)
tgactgtggtaccatcttctctaggtaactaatctctatccatttcatttaaataatttgttcgtatttggtttaagtgatgaaacgtataatatatgtgtcagtgtgtgtggtatcaagatataccttcttatcttggtaaagtataacaatggaccaccgttattttgtattatattgaaaatctattctaagtaaaagctgcattcaacactgcatgtaaaacttagcttatttactaatttacatggaaaataccaaatatatataatcatctgtgattgaaaaattgtatatttggccacggagtttgaacctcgagtacaccgcttataaaatgtatatagtcattatgtacataggatctatcaatgtatttgtttggttgttgatgagtagtgaatagagaaagacagtgaatagaaagtaagaaaatttaaaagatgctaaatttggtcacatgtatgagttggattttgtttttctattttctacttttgttttcttcttcttcactttgcaggttcccctttttacgaaactcctcttcatttgtggaccctcttcttatctctatctctctctatgtatgtaatatatacatacatatttggtaagagtgcgttacttatatttattacagtgttctggtgaacactttaatgctcttctagggtttctttctatattttcatggtttgagtaatatacgttgttgcagaatgtgactgacttatattaacattcatgggttttgcattaaatgaagaaggtctttcactaaattagcaattgactcgacctctatattcttctaacattctctcctatatatggtagccacaataactatagcatttattgattatgactcacggaattattacataatataaagtttatatatatgaattaatagctttatttatcgaccgttgtcttatttacatttttattttttgctttgtagacgtgatagttacatcacacatagggctttctgcg

SEQ ID NO: 41642 - DNA, 505 bp, Arabidopsis lyrata
  Intron number 1 from transcript 935945 (locus 935945) deri ved from phytozome v7.0 (chr-ID scaffold_5; pos 729170 to 729674 reverse strand)
agagatatacagatagagagagatagggctttgaggtttgtatttgtattataatacataatatataggaatagtgtcttcttcttcatcaccttctatatcatcatcatcttcttcttggttctttctttagctccgatttatagcttttaattttgactattttttcttccttcttcttcttggtttctttctcttgatctcaggtacaagaaaaaaacaactcagaaatctttcctcttaattctttcaaaagtttaggaacaaaaaacaaaagtataaactcttaatttgtttttctttgtttatgtcttctagtgaattgtttttataaaaattcttcatgtcgtcaatctctatggatttttcctgttcttataattcctcccttcgttttcttatcaaaagattagttgatttctttcactatcttttttttctaacttttttttcttatgaattatttgtagattattctcttccacgcaaagaagaagatctaaag

SEQ ID NO: 41643 - DNA, 522 bp, Arabidopsis lyrata
  Intron number 1 from transcript 488966 (locus 488966) deri ved from phytozome v7.0 (chr-ID scaffold_6; pos 8749691 to 8750212 reverse strand)
cttcaaatctcttcctaacgattctctctttcaaggtacgtgtttctctactggctctttttgatttagcttctgatctttcgtttaggtttttctgatgttcgattctggttccttagatgattgaatcgatttcgtttcatctatgcttttctagatttgatggtttatcttgctttgatatctcaacgccgattactaagatctctattcgtagttcgtcagatttgcatgtttgtagaattttgtgatctttctggccttttatatctttggatgagaagtgatatcgttcagatctgttcaatttcttgcttgattgtgaaattctcactatgaattgttctattctctctttgatttgagttattatgtcaattgcatcaaattattcgtcatctcttatatgtgattgtctgccgataacgtttaagttctctggcttgttttgaattctctttacggcttctaattccgtttatgtttgctgatcgattattactttgctttctttcttcgcag

SEQ ID NO: 41644 - DNA, 542 bp, Arabidopsis lyrata
  Intron number 3 from transcript 492673 (locus 492673) deri ved from phytozome v7.0 (chr-ID scaffold_7; pos 8895329 to 8895870)
cggaatcgacactcccggcctcgttgctctcctaggtacctttacctttctcttccttgtttgtcactcactagtctcgggtaaaaacgtatcgctcgaaattcgaaactgttgaccatccaagaaatgttgttggcttgttgctaacgccttagttcaagggtattttagttaatttcctcatgcattaaaatgaaaccatttaagctaatcttgtcaaatcacgaaagtagtatgctatctgagtcggaaagttgaaagttatccttaccgaactatcactagtcctcagaaaaagacaaatttattcttgtttatgctccggctcaatggtctagcagaaggttattctggtcaatcaactcatgcatgcttaaaaatagtaatcaaactaattgactttacacttatgggatctgaatttaggcgatcggaatttaagtttcttgttagattttttaagcttcgatattgaaagattttgactttttgttttgacacgtgcagggtcacatagcgtgggaagaactcactgtgtcaag

SEQ ID NO: 41645 - DNA, 553 bp, Arabidopsis lyrata
  Intron number 2 from transcript 935382 (locus 935382) deri ved from phytozome v7.0 (chr-ID scaffold_4; pos 21680606 t o 21681158)
cagcaacaaacctcgagttactaggtgagtttcatcttgtccttcatggtaaatatttctctgcatgatttcaagctaatactgttctagtcaccagactcaccacttgcatatggttttgtttcttccccttactaaacaggatgagtgatgtggctgatgtagctagcatgttaaaaggtacaaagagattgctaaaaaaactgaaaaagataattgttttgatctgattcaagtttcactctgttgtacttgtaacattgtttctcttgtgtctgaaatcttagattggtggacgagtgtgcagattattgcagaacatgcaatgatgatgctaagcctgaagtacattaaggtttctattcaggatgtcaggtatagtccaagtttagaaccatatcttattactttttattccttaagaattcttctgtgatatcattagtcatcttacccttataagtctcaaagagttttgcgttttaagtgatacacaattatgtcaagtaatgacttaaatttgttacttttctgtgactgtaggcaatcttgt

SEQ ID NO: 41646 - DNA, 379 bp, Arabidopsis lyrata
  Intron number 2 from transcript 473445 (locus 473445) deri ved from phytozome v7.0 (chr-ID scaffold_1; pos 14919673 t o 14920051)
actggtcccgtcgtacagtcctcctccggctagtaatatctttcttcaattgaaaaacaaattttaatccaaaaagatcctctgttttcatcttctttgacaaaagctttagtgtttttgtaaaagaattaaaatcattttggattttttactttattaaataagattgtttttgttcatcgatttttctaaagatcaaatattttcagattctcaatttgttcaccatgttgataaattattttcccagaaacccatttatttattccacatatattcaataatccattaaattttattttatttttcccaaaaaatataaataaacaatttgagagttgtaggaagtacaagtgggcagagccagttagtgtgttca

SEQ ID NO: 41647 - DNA, 294 bp, Arabidopsis lyrata
  Intron number 1 from transcript 919961 (locus 919961) deri ved from phytozome v7.0 (chr-ID scaffold_1; pos 4587861 to 4588154)
ctcattctggctcctattgcctattttttggaaaggtttattgatattttgatgtacaatttcaaaaggtcaaaagattattttcatatttatataccacttatcaatacctattataagaaaaaagtacgtcttgaggctaataaaattgaagattgtgagaattctctattttaacatataaataaacaccactgtatgttactaatatatgaagtttattgactttttttccctaaaattttatgtcttattgttaacaggaaaataataccgcaaataacgtttaggcta

SEQ ID NO: 41648 - DNA, 976 bp, Arabidopsis lyrata
  Intron number 2 from transcript 486186 (locus 486186) deri ved from phytozome v7.0 (chr-ID scaffold_5; pos 18381874 t o 18382849 reverse strand)
cttcctcagcactactcgaagatctgtcttttcaggtatgatgggtttgtatggatcagctgatttcgatttaattagcgttttttttttgctgctcatgaattggatctctggttgttttacttgaatctcagtctctctgtctgcttcgtgcttgatctctgctttaaattgattgttttcttctttcggttctctgattatatcagcttactttaggaattctcaaaactaaggctttatccgttaaggaacaagaacgaacaagttgataaagttcagggtacactgatcattggattatttttgacccgaaattcggtcttaagtaggctaagccagaattgaagtttgcgttgatcttgaaaccaatacaagtggtggatacctccataggatctgtgagtgtgttagctagttgtttgtggttactataacgtgaaatgcttgagatccatggaattaaaggttaggtgtaatcaatttagagccttgctactgtagttttatggattactgccattatttggtggcagaaggaaggtttgatttagaattcatcgaggctaatcttataagagtgcactgcatttcctctgctgctcatctccagagccgtatattcacaacaacgcttatagcaagacatgaaactctgagtaatagccaggctcagtttagaacccctgaattactttccttgaggaatcatcatatttttaatgttatatagacaaagatgagttgtgggagagaactgagacctctttgcaagattgttgttgagttaatatatagctcaaacacgcttctacgtaatactgtataccctcatacatgattgtcgtttagaaaaaagcttgaccttcgtgttgctctttattgttttataggctcctatccaatcgccagtttcagcttataaaacaatctcttaccttcttattttttttcttctccctttggcaggtagttt

SEQ ID NO: 41649 - DNA, 595 bp, Arabidopsis lyrata
  Intron number 1 from transcript 476400 (locus 476400) deri ved from phytozome v7.0 (chr-ID scaffold_2; pos 15511930 t o 15512524)
ccggcgacaaaacttggtttccggtggtaagcattagaaattcaattattttgattcgtttctgtattttcaagctctgattgcgttctttcttggctgtttttatgtgttatattcgtaattcgatggaataataataccgaaagttttcaaattgattgtgagaattcaagggctttgtttgtcaattgtgaaacttgtgaattctttggaatttcaagatggggaatttaaatttgtagtctttcttaattttgtatactttcctcttcaaagtccttacttttgtttgattatagatacttctcactttgggactgctttgttttcgtctgatggttattatttgaatgagaatccgttttgtgtttaggtttttggtttgaaattgtgcagagatgctgtcaatttgtatatccaaatttgcaaatagtaaaagattgttttctttctttggtagagtaagttatattggactgcagcatcctttggtggattgttttttagttcttacttgaagagtatattgagcatttatcaatttgttttgcctgtttgggatttcagattgtgtatgttttaagttggatttgcg

SEQ ID NO: 41650 - DNA, 311 bp, Arabidopsis lyrata
  Intron number 1 from transcript 483562 (locus 483562) deri ved from phytozome v7.0 (chr-ID scaffold_4; pos 21631862 t o 21632172 reverse strand)
agctctttcagcttctatcgggtctttttgattttgtttttatttcgctctcgatttctttatgatctgtgaaattcgtttcttctttattttgattttaatttcaatttcgagtttctgttctgttcgtcgaatttcccaatttctgtctaattcgtcaacaaaaaaaaggaagagcttttgattctttttgatattattcttgttggacagtaattgttactacattggacttactttgaatcatttaccaatgttttggatgatttttctcaggtggaatcattgacaaatacagaagaggttgagct

SEQ ID NO: 41651 - DNA, 505 bp, Arabidopsis lyrata
  Intron number 2 from transcript 497320 (locus 497320) deri ved from phytozome v7.0 (chr-ID scaffold_219; pos 4127 to 4631 reverse strand)
gcaggacttaacctctctttggctgaggtcagtgctgcgttgttgattttatttctgtttgctgatataattttagctaatcgtcctcttgacaatatttagatggattgtcacaaaaaagtatgagatagaggtcaaggtgtaacttgtaagatgcgtattagtgacttaattagtgtagtataaaaaaaatgcaaatattggattttgaagactaatttacattttagataaatgtttattgccaagtgaaggagcaaaacccaaatataaattttctattaattataggttagattttctacttaaaagtatatgatttttttggtaatggcgtaagagtgtacgctagtgtcattgtaatacacttctgcagattttgatcattttcttatttaaatattagtataaccattttaatgtgtattagaagaaaaagcacctaagtcattattcgtacatggatgtagttctcattctttggagctgtcttaacaattggtgg

SEQ ID NO: 41652 - DNA, 640 bp, Arabidopsis lyrata
  Intron number 1 from transcript 497320 (locus 497320) deri ved from phytozome v7.0 (chr-ID scaffold_219; pos 4633 to 5272 reverse strand)
gcactgccgtaattttcttcatcttctcttcttttgtttgtttctttgtgctttttctaggttaaacacagaatcttagcccataattaatcagttaccataaaattttaaccgaaactgtaagttttaaataaatcgttatttatttgaaaaagggtccaaatcaaagagaaagatgtatcaataaaaataaggattatgaatcaagttgctttggtccagtggtaaagggaggtaattctcgtcatttgggttcgagtagcattggccaccggggttagagcaatttaacatggtttccccaggccccaagattagtctttggacctatatattgggcctacttgggctttgtatatatcgacaaatataagtcggtttgttggattaggttaacgcgcattctcttgtatataaggcacttggccgtcgcatatgatcaacaagaaataccttttacaactactaaggtgttcttaacactataaagtttttaggatcacctgagttatcatcaaaaaaaaaaaaaaaaaaaaggattatgccgtcgcgaaaaaacaacattttttatgattagttaataggtttgttttatatttgggcaggccggctttacatcaccagctcaaaccgggattat

SEQ ID NO: 41653 - DNA, 580 bp, Arabidopsis lyrata
  Intron number 2 from transcript 474163 (locus 474163) deri ved from phytozome v7.0 (chr-ID scaffold_1; pos 26273725 t o 26274304)
ggcgggttttctcatttttgagtttctaagttttaaaggtattatatgagctagatcgaatcaatttcacaacatttctatctttatgtattgcctcatttcttatgaaatcgattaaagtttgtatcttttttttttttttttttctgatttgtgcttgtttctagaaatacgagaaatggtcttctgctgatgaagaaagtgtcattatttcttttagaaatcattatataattcaagattcagtctaaactagattgttttcgatcagatcaatatttatatgagtaagatcaatctttagatttagtttagtgtgatctttggtgaatatacatccactggatcttcatttagagagagaaccagaacgtctctgcattttctggttctgaggattgtctaaatttagaatcttttctttgattttggaactctgtaatagtgactcaacattacattgaaagagcactttattctaaagtatggtcctccccctattatatgttctattagaaaattgttttctttatggtctcattgcttttgaacttaacacttctgtctcttacaggaaaat

SEQ ID NO: 41654 - DNA, 646 bp, Arabidopsis lyrata
  Intron number 1 from transcript 348875 (locus 348875) deri ved from phytozome v7.0 (chr-ID scaffold_5; pos 18720583 t o 18721228 reverse strand)
ttactgtgccactgaggtcaatctcattgcagatcatcaagaatcgacaaatacatgcccaaacttatggatacacgccacaacgctagaccaagaactccaacacaaaagggtcggcttattgcgcagagtcaatatggtgaagcaggacagaaaggttacactcttatgccttcaaattggaaacatttgaatagtcttttgaaaatatcatcgcttgagtatacggtattggaagactagtggaataatggaatagtagtcagtagatacattatagatgaaaactttttttgtacgattatcaaaattgctaaaccaattttagtagataaatttcgtttcgtttaaaatagtcatattttcaaaatgagtttgacatatacgtgtctccaactttttctatttcttatatacaacatgtctctgacttgattctattcaaaaaacaaattatctttcacttaattcaaaccttaatagactcgttccaagacagatgtagaggttgcttgttgcacgactcctcgctgtgattcgtcaagcaaattaattatttatacactcaaattataaccctgtttgtgtataaatgatgcaagcacaaccacaaaaatgcaatcgcagagcaacgaccatcttccca

SEQ ID NO: 41655 - DNA, 828 bp, Arabidopsis lyrata
  Intron number 1 from transcript 911913 (locus 911913) deri ved from phytozome v7.0 (chr-ID scaffold_1; pos 8880521 to 8881348)
ataagcactagagccactagaatcagactaccaaagttaattaagaccaaagagtagttggatttgagtcttaaacttgtgtgctactagtaaaccacttcttgtatattcttaatatagtaaaagaaatacttctaaatggttcacacatagacctgagtcctccttactcaatcagaaaagaaaaaaaaaacaaaatatagagcaaaagtggaacaattggagagatattgaaacaatgtgtcttccattttacttactatagcaagtttatgctactagaagccactttttcaacgtttttacatacatgaatctgtaaaattaaaatagcaatacatattctggtggttactgaatggaagagaaagtatgatggtgacagaaaacagcaaaagctaaatccaaaaatggataaagaagctcttaagcgcgttggggtacttacgttggaagaagttgacaagttaaggaaaaagcagagcacagttgaatcatctctcggctataaatacagagtaggggtcacaacacaaatcacaacaagcacaacagagagcaagagattcagatagcaaaaaaaacttatatattctttcaaaaacaaaatgggaatcgtagcattcaactgggcagagggagagggaaacaacaaccaactcacgctgctgatgaaccgagaaaattgggaaaataggcaagtttaacattttcattcgacgtgtttgttttagtttgtgtataagacattgtttctgaatacttttctgattttttaatctttatttctatgagtgattaatagggtcataagtgaggcatcttgga

SEQ ID NO: 41656 - DNA, 533 bp, Arabidopsis lyrata
  Intron number 1 from transcript 909109 (locus 909109) deri ved from phytozome v7.0 (chr-ID scaffold_2; pos 16470114 t o 16470646 reverse strand)
ggagaagcaaatttcaaattctcctcgtgatcaatgtacgtgagcaacaagacacaaagccaaataccaaactcatttgtcaaaacttcatcaaacaaaataatttcctctgctttttttcctttggcttccattttcagaaaaattcttctcatcgtcaccaaaaagaaaatactgacctgaaggacggatgatggtgtgattttagtgggtttcctacgttttctccttttgagttctcctattgttgaactgtgaattagaattgttctccatacaaggattaatcccattatgtctttttcaacttttcttttaattttttttggattattcttaattaacttttgtatttctacttccttaccatattaggaaaaggaaatctaaacatttttataagaaccggagtcaacaaatcaagatagacaatactttcaatcttaaacattgtatcttttttctagcattcccaaatgacagtttctgtttctctagattctctacctgaagaccttcttgtagaaatctct

SEQ ID NO: 41657 - DNA, 421 bp, Arabidopsis lyrata
  Intron number 2 from transcript 489420 (locus 489420) deri ved from phytozome v7.0 (chr-ID scaffold_6; pos 11506432 t o 11506852 reverse strand)
cattcccaactctctccataatcttttgactcttggttaatatcttttactataccggccgactttatgtttgttcttaatattagatatacatattatttcctaattcctctaggatattgacatgttgttctgaatttatattttggttttgactagtttttaactgtttttttttttgtcattttaagacacacaaaaaaaagaaagaattatatacataaatgcaaatgaagatgtgtttgacttgtattatcacaatttctttatttttcaacatatttttgaatctatacgttaatataaagcaaacaaatgtattctcttttggttgttaataaaataaatgtgtccttaccattaccaaaccattttttattctgcagattttaccgacgagaaaagtaccaacgtccaagta

SEQ ID NO: 41658 - DNA, 845 bp, Arabidopsis lyrata
  Intron number 2 from transcript 488016 (locus 488016) deri ved from phytozome v7.0 (chr-ID scaffold_6; pos 4775788 to 4776632)
gaggcattgtctcttggaggacaggtacgcttttttctggtctttttgatgagttttagagagattttgtttggttactgagaaattacgggaagaagaagatagaagaaatggtattttttttttttttttttcttcgagctgctttgttcctgataattattgtttctctggattatgacaagttgtttttagcaatttctggaatcgtttgtagtaaaccaatgctgcgaaatatgttcatgttgctaatttttgtcgcttcgttcatttttagagctgaaattagaatatcatgtttttttttgtgtcggtaattttgacttgtgttgacgataatccgattcgttttgatttttgggttcctgagatttttttgtatgttgggttctaatgtcttccccaattcgtggtttagttgacacctttatttggaacatgtgtatttatttgatcccattcttgttgtattggatcacaagtatataacttttggattttccacatttgttttttttttttgcattgttccaagtttctcaagattttttttctcatattctataatgaggttttgggttccactgttaatggttaatgatcctttttgtttgaccatgtcttatttgctggttatgcgtttatgattttatgggaaagtttggtactttttaacttgctcactaatcaatttatatgtctcacaagggaaatcaattttctaggtgtggtcctaatctatgtgcatgttcttaccttctcatttatttcatagagaatttagttactgacttaaattctacttttgttttttttttggtaggaacaccttgtggagactactt

SEQ ID NO: 41659 - DNA, 388 bp, Arabidopsis lyrata
  Intron number 2 from transcript 327303 (locus 327303) deri ved from phytozome v7.0 (chr-ID scaffold_6; pos 21383667 t o 21384054 reverse strand)
agaaatacaattttgagtcatcataccctgtaacagtaaggatccgtgtttgttggtttctttaaatgcataactgagctaagaaaatttgttgtctgaatggcatctgtgtttaagtttgatacagttaaagcttttcttgattgtgtttttgactcgatgggaattatagcttgagtaaacacttccagattgtattattagtgtaaagtctccagttctaacaattggaagtcaaatgttttgcaatacatcctccttaaaaatgtagctttagttttagacgtaaacaccaatgcctttattgataaaaacccctgaagatgattagttttgatgatttgaatttgcagatacactctgagtctagagattccttttttcttgt

SEQ ID NO: 41660 - DNA, 513 bp, Arabidopsis lyrata
  Intron number 2 from transcript 938194 (locus 938194) deri ved from phytozome v7.0 (chr-ID scaffold_5; pos 16400079 t o 16400591)
agatattggaactggatcccgacggaagaatctaggtactatagaacaaacgcttcttgatttgaatctcaaattgaatttagaaagatcaacaagtgtgtcaagaatcttgtttgtggtaatgtcatttgacttgaatttcatgagctgttgatactttgtttcttaggtcttgcttgaataatgatctcttaagtatataaaaaaaaaaagaattggagaagtttgtgtgaaggttactctttgattaatggcctgatttctctttgtgattctgcttttgagttttgatgagtagctaatatagataattagtgttcttacctaatctttatgattatggatttgaggtgttattgtagtgatgattcttcctcgacagtgatatatttctgcatcaggttttgtgtgagactgctttataccataaaacttcaaacgggtgctttatgtttttggttgtgttcgaacaaaaagtaaaatccttttttaatcttcccttgaacaggttcc

SEQ ID NO: 41661 - DNA, 811 bp, Arabidopsis lyrata
  Intron number 1 from transcript 948374 (locus 948374) deri ved from phytozome v7.0 (chr-ID scaffold_8; pos 1367444 to 1368254)
ctctctgctcaaagtgtaacggttagtacattcgttcactcgatgtcattcttttaatacgtttttcggtgtagctttgaattagctgaagcttgaactttattttgatggcctaaactggtggttctatgagcaacatgccacactttgaaccttatacatgattcttcagtttttaaatttgacaattaagtcgtagatttggattttgctctataatggtattggttggtttgttctgttttcatctatctaatgatacttacattgtggactgctggattcagccaaagctacttacttgatttgaatctagaatgaaattaggattagcttctgattgtaaactatgtttgttagtggtattgcagtgttctctctcttttgatctaatctttagctcgttcttgaattctataatggttttaggattgaaaaagttgtgtgtatggagataattgcctctaaaatgtcttattctctaaattgccgcttattatttttacagaaatttagaaattgccgctgtttttttagaaaatttgtttagagaatatatcccattaatttcggttggttttaccacaactattaatacccataacctcttatgttaaccctaatttttatttagcgatccccactccacaagttctttactactcttcacgtctcaccaccgtaactcttcttttctacaggtaattttattacttttttgatcataaaactggctttgttgatgaattttcttgttaatttcgaactttgtaactgagtttctttatctatttcatgaactcatgtagac

SEQ ID NO: 41662 - DNA, 671 bp, Arabidopsis lyrata
  Intron number 1 from transcript 326030 (locus 326030) deri ved from phytozome v7.0 (chr-ID scaffold_6; pos 6449699 to 6450369 reverse strand)
cttttatcgctgcttctcagagaaggtaaacaaaagcttttacaagttcatttatctcaccacacatatttttggaaaaacactcaaaatccaacttttgcccaatctttcatcttctgaatgaaaacccttgtcgtataatatccaattttggatgaaaccgtgttaatttgtttgttgttatgtgataatgatgatgattgtagtagctgcttagaattgcaatgtgatttctgagccaagagggtttgatttgtatatttttttcatcctcaatttgctgaaaatctgaaaatgacaagactttaagagtttctttgtgatttgtagtttgaaaggatagattttggtctcactctccaatggaatcacttttcttctaagttctcactatgtgaaagtaatggtttcctgaaattctgtatttgattcttgaaatattcaggtattgaatcattcttgatcttgattatggattctgtaaatcttagctttgtaatgagagagactggtataggcatagtctcagaatgttcattgcggctgctgatatcttcaagaaatgttcttgggtgttgtatgtcgattgttgaatgacattagacttgttcttgaatctataacttagcagcatcgtatgtttctaacacaacttttgcagatctcttgga

SEQ ID NO: 41663 - DNA, 486 bp, Arabidopsis lyrata
  Intron number 2 from transcript 475532 (locus 475532) deri ved from phytozome v7.0 (chr-ID scaffold_2; pos 8451181 to 8451666)
ttttcttgcagctcaaaggagaaacccactctcgggtatgtgaatttaaagcttttctacattttttttttgtagtttgagccttttgtctatgtttattctttgtgatttgtccatggaagttgaaaacttaggttctgatattttatggttagttttcgttgttttaaccgatttagctctgatactttgaagctgtcttctattgattcttgtactcttttctgctgaggctaataaagtatttgaagtactttgaaatgaattgtgagaagactctcttcgcttgacccctgatctggctagtgacactttgaagttgttacatttattgttagaaattgttaacatgagcattaagtttagaatgactgaaattaagttgtgtttttttttttttttttgacttaggaactgcttgtatttatagtttgttcaattttgtgtgtagaggtacgcggattaagacccgcaaaaggaatattg

SEQ ID NO: 41664 - DNA, 951 bp, Arabidopsis lyrata
  Intron number 2 from transcript 496708 (locus 496708) deri ved from phytozome v7.0 (chr-ID scaffold_8; pos 21707445 t o 21708395)
tttccgtcaattcaagtctcatacagtctcaccaggtactctaaatctatctgtctctttcaatttcttcgacgattctcggatttagtcgtacctgctctacgttgacttactattcccaaaccgagatctcttgagattcgaatgctgagttagataattactagtctgagacgatttctgttcagtttcttcattgtggtttctgggaatgggaacaaaagtaatggggaatttgcaggagttttatggaacttgaggggtttagattgcaattaagaattaagtggcagccataattagctgggaagtagtagcccacatttgaatgttagtgttagctaaaagttgaaatgatggctttttcaatattctgggttctgaaattagtaaatagtgaaaagttatctaaacataggaaatgtaatcatcctaattatggtttctggatcatattcgttgcggttaatagtcttcaaggtttttgacattaacgccataaccatcagggttttacatgtgtatgtatgtatgtatgtatgtgttttgatgttctttgaaatgtctctctcaatgttgttggttgtggcttttaggtaacgaacccaggatggtgttgttcccttgtttttaaagctatttgcttgcttagttgatatgtctagtcatttctttaaccaacaatattagattcctctcttggctttctttacacagatatgtctagtgttgattccagattatgactcagagattcttggattctaaaaaaacatttagattatggatccgtaaaatggttagaaccaaacagtcctcattaagtttgtgtggtttatatgttgactggattcatcgtgacgtgcattggtgtcattgtttgttaatgaacctatcggtttttgtaatcacacagattggaagctctcaaagcataaaaggagagataac

SEQ ID NO: 41665 - DNA, 254 bp, Arabidopsis lyrata
  Intron number 2 from transcript 488497 (locus 488497) deri ved from phytozome v7.0 (chr-ID scaffold_6; pos 6706249 to 6706502)
agagtttctctgcatctgaattttgtctgatccaggtaacaaaacttgatctgatcccttccatacaaatattttcaaaagttttattctttttcttctgggtttgttcgactgtccatgacataagaaacagattcggtgatcatagccatcaagctatcgaaaatctgataacttaaaaaattcttgccttttgattgatccactctcaagtctcatcttttgatcatagctgagaacaggaaacgaagaaa

SEQ ID NO: 41666 - DNA, 481 bp, Arabidopsis lyrata
  Intron number 1 from transcript 495538 (locus 495538) deri ved from phytozome v7.0 (chr-ID scaffold_8; pos 16657938 t o 16658418)
ttcgtttctgtagtgacgatttcgggtaacacatttctagcaaatttatatgatgcttttgtgttagttaaggttagggtatatttacgataatagaattttagccatggttttaacaaaaagtttagtcatggtgattaaaaaatgtagaaacttaataatttgtcgagtatctagttgttattaacaaaaatattataacaacgtcaatgtaatttataaagataagtatgaagattatgaaagataaaatagaagataaagatcgagttaagatgctattttgtggataaagattcgatatagttgagaagtcaacatcagtatgtttgttgtttatttgagtaaatagaagtagtcgtaaatgggaaggtaaccataataatataattaaaatatgtgattataaaatggcaaaagaacatagtatagcgattaatgttttgacgtttttaattgttttatgggttttgcaggagaa

SEQ ID NO: 41667 - DNA, 362 bp, Arabidopsis lyrata
  Intron number 2 from transcript 490003 (locus 490003) deri ved from phytozome v7.0 (chr-ID scaffold_6; pos 21596155 t o 21596516 reverse strand)
gaccttgtcctttattagccatttgtatgtttctatttctccattttcgttcatcttagggttgattcaaacttcgtttagatcgtaaaataggatttggaatgtggaatttcggtgttatgatcattgattcattaggtttgcgttactgattttgtggaatttggaaaagaaattgaagaatcggtgttaggtttgcttgttccgtacaatgtaatcaatgttattactaggtgttttcttcaatcattgatttgatgctgcttaatgtaccaatcatcagattttgttggtagggacagaaatttttctgagtactctacttataaaatgttgttattgattgttggatgcaacaggta

SEQ ID NO: 41668 - DNA, 429 bp, Arabidopsis lyrata
  Intron number 1 from transcript 490998 (locus 490998) deri ved from phytozome v7.0 (chr-ID scaffold_7; pos 1849375 to 1849803)
cttctcttaccactcccgaaactgaatctgagtaagttttctgttttgcaaacctcagttaggagttttcatgatcttaaagttttgatttttatgagaattttgccatattcttgtttgtttttataacttaattggtgttagccgatggttggagaacctaaagtttcgaaatttaaggaatcagagtgccaatctagttccagaaatcatttaagtcaatctgtttgtggaagattatgctcatcaatccataggttgtggaagattatgttctatctttcaagttgtgcaactttgcaatttacaagcgattactttcaatatgtggattgtgatttatagcttatatagatgctaatacatttcttttcgaattctttcttgctctttgaagcacactagattctgacgttgcatcgaaaggtc

SEQ ID NO: 41669 - DNA, 518 bp, Arabidopsis lyrata
  Intron number 4 from transcript 334284 (locus 334284) deri ved from phytozome v7.0 (chr-ID scaffold_1; pos 3834786 to 3835303)
ccaaagaatctgagttagtggaatcaataggcgaggtttagttccagatttgatgcttacattaatgaaagttcatcatatatctgatgaaacaaatattggtttctcctaatcttcacaatttggctatcatgtatatattaaatggtcgatcactctgaccattcctacttatatgacaagaccacttactttgttcctaaaagaaactagctcctaatcaaaattcatgccttttgcagagatcaaagatgaactatcgtgcatggtatcaccgtttgattaattagtgtagagatgggcacggtatgaagatctagcacctatcatagggatctgttattaaagaaaccaccaagttggattttgtagacgcaccccaagtacataatttctctcagagttttttggacgacaaagatagtttgtaaacagtttgttgtcgacttgtcgtgctactatggagatgatcgaattagtgacttatttgagttgttacaaattttctttcaggccct

SEQ ID NO: 41670 - DNA, 352 bp, Arabidopsis lyrata
  Intron number 1 from transcript 328078 (locus 328078) deri ved from phytozome v7.0 (chr-ID scaffold_7; pos 1610453 to 1610804)
gtttttcactcgccgcctccgctcttgttgtctcggtacggtttctaggtgttcgacaagctacaatctcaaaccttttacagtctagttcctcctatgatcgctaaattagggtttacgaaagtgagctatttgcagagaaattgagtaacatgaacattgaattgaaaattaagatttctttttcttcttcacaatttcagtttttaatgcaaaagattcagccttttagtgtacttgatgtgatcttgataaactaaaggttaggtttaagaatctgatcaatgcatagataaagataatggtattttgatgattcatgtaacatgtttttgtgtatttaagggtgcaa

SEQ ID NO: 41671 - DNA, 1055 bp, Arabidopsis lyrata
  Intron number 3 from transcript 894153 (locus 894153) deri ved from phytozome v7.0 (chr-ID scaffold_6; pos 9593950 to 9595004)
agcactccaatccgtggctaagaaacataagagaggtaattctagagaaaatacttgttgaaaacatcaaatcttttgcatggtaattcgatgagaacttatagggtcttttgttttgatgggttgaacttatataatatgctgtaagtttctcttgtgttcgcaaatcagaaactcataatgttgcgtacttctcaggcatcgtgatgcttctttcaggtctaccgcaaatgacttcagacataattagcgtatatcgtttcttaggttgactccttctcccgagtatgttgctccaatttttttttgcagtagtctttcgattttgctattatagtatatgtgtttgagtgtgtctgaaaaacaaaaaaggttctatttggcagacgggtcaatatatgagaactaatcaaataccatttggcttatttttaggaaaacggtcctcctagatcgtgatggttctttaccaaaagcaccttgaaactgttttgtgtcaaaatataattgtgtaagaatattcagtttgctgctgtttctacaggtaagtaaatagaaaagatattgagcttatgacgtgcttgttcagattgatcatgcatatgcaaatgaagaaaatggtggagacaatgagaaattacgtaggtacttcaataaggtatgtttaattcaatcctaacaagtcactgtaagattttttacaggatctttgtttttctttcttgagtcaagattgatttttgacctctgctataattgtaacaggtggttggttgccttgatggaaagatgatatggccatatcaaggcttctttcaacattgcttctccttcagaggaaaaacaaggaaattacaaaagttagtggtcttccctttcaacgaggatacgacttaatgttgctacgaattagccatttgtctcgcttgtttatcaacgagactcgtgaatggttttccttttttttgaaatctacaaccaatctatttttaaaaacctgcatatttatgtttgttgaaggtgtttgtggcctaaaaccacgcgaagaactacat

SEQ ID NO: 41672 - DNA, 562 bp, Arabidopsis lyrata
  Intron number 1 from transcript 479799 (locus 479799) deri ved from phytozome v7.0 (chr-ID scaffold_3; pos 10284002 t o 10284563)
gtaatcccgtcgctatcctcagcgagtaagttcttcttcttcttcttcctcaatttcgaattcagatgattgattaatagagaagaaaattgagatttgaatttgattttgaacttatcggtgttgagattagtgactttaggccatgttcgtttcataatcgcaagcgattgcgattgcgattgcgacttcagggatgtggttcgtttagcaatcgggctactggtcgctgtgactatttaccatttaaaaagcctcatcataagtcacagcgactgatcgctcctgcgactgtcaaacgaacaattttcagtccaaacgaacattggactagatctgattttttttaactctgtttatgtatcactgtaggatttgtaaaatcaaagtatcaaacttcaggctatagagtatttttgtcagtagatacactttgagattagtcaatgatatagattcatgattgaacttggctatatatatgtattattggttactcaaatttgtttttgtttttgtttgattagcattgagatttataagcatccaaaggaagaacgga

SEQ ID NO: 41673 - DNA, 305 bp, Arabidopsis lyrata
  Intron number 1 from transcript 491286 (locus 491286) deri ved from phytozome v7.0 (chr-ID scaffold_7; pos 3051242 to 3051546 reverse strand)
cacagtaataatcccactcttccttctcaaaatcaaaacttgtttaaggatacttacttcttttgactcttttgactacgtttttgatggtcaaaattatgtgatctttattgccttgatcattccaatataaaaagatttggtctttgtgaacttatttaaatttgtatactcactttgctccgttaacatgttcaggttttgtggtgctgtaatttgcctcttgaattgattttgtaagaaatcatgttcttgatagtgaattaacaggattgttttcatgattgcagaatttgcaagagaac

SEQ ID NO: 41674 - DNA, 593 bp, Arabidopsis lyrata
  Intron number 1 from transcript 492509 (locus 492509) deri ved from phytozome v7.0 (chr-ID scaffold_7; pos 8011354 to 8011946 reverse strand)
tgctcaggcctatatcaaactcgaaagcttcactggtaacttcttacttctgtcatcttcgtcgacgccttttggggttctgggtttttcatgttttcggtttcttatttcattatagctgaaagatgttgaatttgctggattatgtgaatctagggtttagttttgtgtcctgtcgcttggtagtgtcacaattcttcttaaagttttgagctttagaatcaatttaatgcaaatatgtttctcttttgttgtttgtggaggaacaatgtatgagaattgctttcatgagaaacgaaattgagtttattgttgtcagcagtgagtgccctttacaagttatgcatctagaaacattgatggagttggttttgactgtgctagtcttttgatccgttgattatgaatatggagaatttggtattacagagagttaacagtagtgaaagtttcaatctttgcttgagtgattagtctttacttccactatttcttgcccattgttacttgtgttgacgttagttttatcgaactttactggttggattagatttgggtctgatttgtttctcaatgagcagaggccgtggcag

SEQ ID NO: 41675 - DNA, 466 bp, Arabidopsis lyrata
  Intron number 4 from transcript 487416 (locus 487416) deri ved from phytozome v7.0 (chr-ID scaffold_6; pos 2270623 to 2271088 reverse strand)
gaataatcttctttggtggtctcattgcacctaatgttagtacttgagtagattccacgtttctttcctttatgttctcctataacatatatcaaagctctcgattttgtttgtgaaatcttgtttgagttaatgcttttcacactgtcatctcagtttatcgcagctcttagaaccctacttatcttacaacaatgcacgatattgagctctttaaaatagatgcatttaatttaccggatattttgctaaaatacatgcattttgttgatagcaatagaaatttgtggagattagtaattttccttctttgtgatgtacagttttctggttttctattgatttttgctactttaactttaccagaagaataatagctattcttggttttcttaatccttgaatgacaaattgatgattttacatggcagctggaactgaaggtaggacttggaggaacctctta

SEQ ID NO: 41676 - DNA, 443 bp, Arabidopsis lyrata
  Intron number 2 from transcript 351970 (locus 351970) deri ved from phytozome v7.0 (chr-ID scaffold_6; pos 18702287 t o 18702729)
tctgcttcaatcacttttctccttcacatagcagagtaagcatctttacttctttgttcctcaaatatgattttatagctaattgagaatttcaccgaatttcttataaccaagatggtgaataattaaatttccaacacattttatgaattttagatggccggattcgaactatggttataatgtcgcggttacatagctttcaaaacttaattttgttgtgtgtggatatttgaatacactactggtggtgagtaaaagtgtaacaaaggctttcgagctctcttgcttgtgttacaagaaaatgagtagtggtagaccgtaaattttattttgtaaaccggtttgaacttgtttatgtttttttactgatcatttttcatctgtgatctcttctatatttgacagtatcttcttgaagtgattgttcaaaattgttatca

SEQ ID NO: 41677 - DNA, 683 bp, Arabidopsis lyrata
  Intron number 2 from transcript 888608 (locus 888608) deri ved from phytozome v7.0 (chr-ID scaffold_7; pos 2723558 to 2724240 reverse strand)
cttcggtatgatttttttttgttattttatcatttcctattcaatctctttattttcttaccttattcacaaagttatttcgagaccagaaaacaaatcataaagactatgattgcattctagaccatagtattattagtcaataagattagaattttgatacctgatttgtttgtttggactagactatagagaaaattaggtcaaaggatataaatatctgaccatatcaggatcatacaacaaatattagactgccatacgtatttctttaaaagataagatgttttcagctataaaggtaaatcttttcttctttttttttcgattaatctcatctgcagatatacgcatacatatactttttcaaatattttagaaaattaaatcttattttaaaattcagaccaaaaggatttatggaaaaatttgtcaacattttctttcctaacatcatttaatgcaatttcaacattttataaaattaactatgaagaaaatgaaaagaaaaaccttagtatgttagaaaaaaaaaacttagggtatcctctgcttttagatacgtatcataatgcttatatcagataatatggaagttcaacaagaagatttatattgtcgacttgtcgtattgatgaacataaacagattcttgagggcaagaaagtttgacattgagaaag

SEQ ID NO: 41678 - DNA, 528 bp, Arabidopsis lyrata
  Intron number 2 from transcript 475168 (locus 475168) deri ved from phytozome v7.0 (chr-ID scaffold_2; pos 2404542 to 2405069)
gcttgtaagaacgtatatcaataattgcatatcaaattcattatcgaggttttttcctttgcacaatgttaatgttccgtgattatttatttagttatgacataattgatacgcatatgcatatgttttaagttataggacatcccaaatagaattctagagaaacaaaccactcctcatgatttttatatttctaagtcaaatatcctttgggctcatttatctttaaatactttagggtaagaaactatattaaaaaatgtgtttggtcataatatggattaattaagtacgcatatatatgatcttgtcgtttctttttttggtgtcacgtacatagtaagagaatctttttcttgttagcatgatacaatagttggtgagaccactttgatatactattatacacgtatcttcttaatttactctcttaagaatatgatcagtaacatttgattcataattattatatatgtttatggttcatatgcagtctgaggtcatacttcttggacaattaaagcaccc

SEQ ID NO: 41679 - DNA, 455 bp, Arabidopsis lyrata
  Intron number 2 from transcript 479468 (locus 479468) deri ved from phytozome v7.0 (chr-ID scaffold_3; pos 8451037 to 8451491 reverse strand)
actgagatcgccaaagcaccaaagctgctgttaaggtcaaaaccataacttttctcatatttcttcttttattttctcttaatcaaatgctattagccacaacacacatcataaaaggtcgacagaacccacataactcatcatgttaattgctttatatataaatatgatttctcttcatatatttcgattttataaaatttaaccttataaaaaaacaaaaaaaattatcatttgtcaaaatctagctaaagaaaattcataaaatagtttcttaattagcaaatattttttctataattttgatactatataactagctataaaatgtgtgatccataagtagaatatagaaaatggaggtttattaacatatatacaaaagtaactaaatataattttgtaataatgatgatttaggagttggaagcaatttcaagggcgagcagggataa

SEQ ID NO: 41680 - DNA, 420 bp, Arabidopsis lyrata
  Intron number 1 from transcript 891115 (locus 891115) deri ved from phytozome v7.0 (chr-ID scaffold_7; pos 18053005 t o 18053424 reverse strand)
accgacaagcctaccattttccacactcgttctaagtataaattatttgaacataaattttcaaaaaattaaactattgttatttatatagtttttttgttgttaatataaaacttctgaatttagatccataagccaattattaattcatcaatttacaataacgagctaaatgactatagatatctcaattactttccacttgttcttgtttcttcataaaacagttttgaaacaattataatttaggttcactttttttttttaactacttaagagtgacatggtaacatgcactagtcggctacatgtccaataggaagtgttattatagaatcattaatttgttggttatgaattgatattccaatatttgcttaaaactatgcttttgaaattgtaggtccttcagtaaaattt

SEQ ID NO: 41681 - DNA, 678 bp, Arabidopsis lyrata
  Intron number 1 from transcript 944275 (locus 944275) deri ved from phytozome v7.0 (chr-ID scaffold_7; pos 2065674 to 2066351)
tacgtcatcactttctgtccttctcctaacccaaggtaaataaatatttctattgccattatttacctaaaaaatacaaaagcatatgattgtctaacttcaagtggaaacacgaattagaatattttttaaaaaaaattggtacattttttgctaattaaaaggttggttccgatgatccgatcaaatcatattaaaaaggggaaaaaagtttggttctgattcctttagaagaagtccggtttcgatttttttatatcacattcaaaagtttgataatgttggagttgaataattcaccttgtgttgtttgtgtaacgttttgaatgaggtcaaatcaccgaataaaaatcatggcacatactttttcataatggtccgtgttcttttgtcaatttgtgaaatcatattgacaagacgacattcacattttcacccgttggcagaattatatcaacattaataaatcaaaatagaaaatatatgatgttctctgttgtgtgcatttagattttttttcattcaaacgtcggtaaattgtggtccaacacggctctattgttcacattgcaaaataattcaaatatattggtagaaaacgttatttaataaaatttgttttcttgtataatttggtttttagtgtgaagagtgcaacgaagggactccaacccgaag

SEQ ID NO: 41682 - DNA, 474 bp, Arabidopsis lyrata
  Intron number 1 from transcript 929571 (locus 929571) deri ved from phytozome v7.0 (chr-ID scaffold_3; pos 7350725 to 7351198 reverse strand)
tcggctgtattccttcaaaggtgattttagaaactcctttttcgattacctcgattcgtcagatttttctccgatttttgtttcggtgatcatcatttagattcgatctgagggttagattgagcttgaggtttaagaaatgattgtgtgatgatacttattcattactcagatctgtttgtgcttgattcctcagaaatggaactatttgcctttgaatttttgtatctcttaacaaattttgttctcgttgcatatgctggatcatgatcctctcttgattcgttgtccaaagcaaaagttctatggaactcgcattttcgtagagcatgaatgtgatagatgttaatagcattactttttttgttgtctgattgtgttagtctcttccgcaaactgtttagctttgataaatatatatgacattatctaatttagcttatgttttattaggcccttcttcactcttctcac

SEQ ID NO: 41683 - DNA, 501 bp, Arabidopsis lyrata
  Intron number 1 from transcript 942788 (locus 942788) deri ved from phytozome v7.0 (chr-ID scaffold_6; pos 19878256 t o 19878756)
tctaatcaagagctgtcggttggagaaggagatccgccggcgattcagacgactatgaggaagataagttgatttctgatttcattttcttatgtgtagatctagggttttgggaaatacgtttgagaaggtgaaattggattagggtttggattagggttaggtttttgttggattagggtttggtaattgttaatttcggtttgaaattgaaaaaatctttgcttgatttttgtaatttctggaaattgaatttcgttatgattaagaactgtttttagggtccttttgggataattacgcattgaaattgactagaactgttttgaattaggattaagaactgtaattggttacactgaatcaatccatttccttataaacatattctttatcccctctttgatgaaatttacatgttttagatgttatttccattagttcattttaaacactttgttgtcttgaataatgcagcaattcgagctgttctatccggtg

SEQ ID NO: 41684 - DNA, 971 bp, Arabidopsis lyrata
  Intron number 1 from transcript 889979 (locus 889979) deri ved from phytozome v7.0 (chr-ID scaffold_7; pos 8899094 to 8900064)
gtggccacaattgcgggttaccattcaagcaattggttcgtattttctatttctacttgttttaaatggtgggagactttaaatgggtttttggtttctgttttgataaactgactaataataccaatcaagattttgttatttaatttactagaaaatttaaaaatcatttcactttggtttttatcaaaaactaaaaagaaagtccaacaacccaataactgtttagtctataatagtaggggtttttactcattctaacattttttagaaaagatcttgtggatactaccagtactaaagattgtcaatttttccttcttgtccatcgaaactttatctatagtggttttaatgtatcagaatttttccatcaaacctaacatttgataacttgttcattaattatttgtttgtttaacacatcatgcatgtgattcacatgtactagttcagtgcctgtagtaaactaaatataagtgtttagttaaaattgacatacatataccaatttaaagagctacattttgacggacaacttgtgatggacaagatttgacagaccaaaatgtattatatatggacatacaaatttttgatagataagagtacaaaaaactgggcctttctacaaatatatttcgatataataaacacatctaaatatctaaatataatataggaagaaattcaagaaatacttacaataccataaaaagaaaacaacttttagttttaaaaatacaaaatgtcggaaaagaatacagagtgcccaaatttgtggtatgtttttaaatttttaggatttgattatattttgggaaaaaacatatatgatattttgagaaatatacatgatatttgttagttttatacaatatagagcccaagaaaaacatataatttgaatgtacatgagatttttcatgactatttaatggatgtattaatctttccttttgtaagggata

SEQ ID NO: 41685 - DNA, 827 bp, Arabidopsis lyrata
  Intron number 2 from transcript 471284 (locus 471284) deri ved from phytozome v7.0 (chr-ID scaffold_1; pos 4600031 to 4600857)
tatcttgatcttctccagctcgactacactgaagggtaagcttacaatgtttctctcttcttgctgctctaatcatcatacttttgtgtgaaaaagagagtaatttctttgtgttttagagagaatattagcccagatttcgttttccttctgtcgtttgatgtaggcagataataagtgaagtttcagattattcaacaccacttctctaattgagaaaaataagctatctaagagatttgttgatgaatgagttagcttgttataatctcctgtttatgttttattgtgtcatttggaagaggctgtgtcctgcctagtatataatctctttgtgcctatctagatttgctatccaatagacacttgttagaagtgaaacttaatggcttctgattagacgtgtgcccatccacatgattcttattggactaatcatactttgtgtgaaaatagactactttgtttgaacatgagagaatggtttataatgcgtcaagtatgtgattagttaacaccattgcgctattcgagaatcggatcgattaagtttataggcttaagctaatgatctgctgtttatatgttattggaagagactattttgcctatcttgtttagtttgtagtttcgctatctcgactgttatatgtatgagtgaagactcgatgacttgttattctcttttcatctgtagaagggtctagatattcaatccgtgttggttttgcacttcttgtgattttgcttcatcaagcaagttttgtttgagagcacattctttgtggctcttattgttgtttaagctcctcaatgtgtatgcaggg

SEQ ID NO: 41686 - DNA, 602 bp, Arabidopsis lyrata
  Intron number 1 from transcript 489503 (locus 489503) deri ved from phytozome v7.0 (chr-ID scaffold_6; pos 12249037 t o 12249638 reverse strand)
catcttcctcgatctgagattttaggttttcttccgtaagtttaaagatctctcctttttcttcaaatttctcatctcaaattctgggttttggtttttatttggaactaccaaaaaatttatgtgttttagcttcagatctgctttctatgcactcggatacatcactggattttgattggttgattttttttctccaacgaacttaatttgggtttagtggtctaaatcttcttactttaatgtttgggtcttttgaatttgcatttttttttggcatagaatataatttttttaaccgttaaaacccctttcctatttcgtaattttagtttctaaaatgtgttgaataaaaaaaaacaattggtaaaaaaaacttgtttttctttacttaatttcgtaaatcagatttttaattttataagaaagatttttttttgttgttaaaattgaatttataaattttgtattgttttctgctatgaactaatttagtaaagctacaaattttacacagtggactcatatctgtggttattgttgcagccttgagattttgaagagttgagataaagaaagaaactatttttgtagcttgaaaa

SEQ ID NO: 41687 - DNA, 629 bp, Arabidopsis lyrata
  Intron number 2 from transcript 938635 (locus 938635) deri ved from phytozome v7.0 (chr-ID scaffold_5; pos 18050829 t o 18051457)
aaggtcgttcttctaagcttggtttgtcttaccaggtattcgcatttggtgtcttgtgttgtgagttcttcttactcgttttaagaattttggggatttactttaggatttgctgtgtgaacctaggatctgattctctgtccgatttgttcgattttgatatattagaacaataggctcttcggcactagacattggtactaagaatggttcttattttggtcattagtgtggtgtttagtcagtgtagcttgtaagcattcatctgcacaatcttggtttgctgctttgttgaaacaaacgacgtttcattcttggaaacatgccataatcatcatttatcagcttctacttcgattttaatcgccgtgtggtgctgaataatagatgatttgctaagagggttttgactcactgtcaagtgttaattagttcgatagcttgcatctaattatctgtttctgtttgccagtgacctgacacctgaatgatgtttgattccagcatcccggtttatgattctaagttatttgtagttgttgttatgtaaatctaatatctcaaaatacaatttgtctttataatcttcttccaaacgcgctgcaggatatttttgagaagtttcggat

SEQ ID NO: 41688 - DNA, 329 bp, Arabidopsis lyrata
  Intron number 1 from transcript 324277 (locus 324277) deri ved from phytozome v7.0 (chr-ID scaffold_5; pos 18614557 t o 18614885)
cgggtaatttcaccagcacttttgtgtttacctgttgattcttctatgtataatcggttttggtctggcatgggttttgctttgcagcttggttaattgttttttgctgagtcttagtttcctccatttgagctgaattgggattctgctactgaaatgtttgttaaagggtagctgtttcttaataatcatagtacgcttgcttagcctatttgattaagttgaataatagatctgttgccataaggcttgcttagcctggcgatttatactgtttacactcttgaactacagactattgagagaagaagaggagctgggattggagg

SEQ ID NO: 41689 - DNA, 990 bp, Arabidopsis lyrata
  Intron number 3 from transcript 899272 (locus 899272) deri ved from phytozome v7.0 (chr-ID scaffold_5; pos 20943834 t o 20944823 reverse strand)
agaggtatttaatttttccttctctccctcttttaatgctcctctaccatccaatacatatagtataaactataaaatacgtgctctatttgagccaaacatttaattgaaaataatgcatatactcctttgtatggtctggccagagaaaactcattaatgttgagtgttttgttatagcgacgtgctttagatagagtaattatcgaatgagattttttttgtggtgatccatgatttatgttctcgagcatgataggttatttattattttccttcagtcttttcagaaattagtgtatatatgtggcatcgaccatatgtgttcattgaagatcccttatttcgccatctaatcccggatcttatgttgctagtttttgtttctatagaaataatagcatggtagatatcataatatattgaggataaaaaaaataaagttttttaatcagaggagattagaaagaatagaaaaagaatcttattattgcaaaagttggtgttagttgcacttttgtctgcttcgtagctttcgatttagttgttgttatctttattttggggaaacgttacactatccttatcttcacatttttcgtatttttctgctctaatttgtgtaaataccggtgaggccgagtttttctattcatggtaacagaaaaaactcggtggtaaattcatactaataattatgagatttaagtttgttgtggagttatggtacctctaatgtctaattatcacgaataatttatcaacgtgattgtgtgtacctaactagaaaagtaatcagaaatataagacaagagtccccacggatattaatattagttatgttccttttatctttacacaacgagaaactcgtgaaccgtaatcgattgtgatctttgacaactaattctgcttaaccacattgtcgatacattgtctcaatgaaattcaaaatttgttgaataataaatttgtaatgttttaaataga

SEQ ID NO: 41690 - DNA, 315 bp, Arabidopsis lyrata
  Intron number 1 from transcript 935464 (locus 935464) deri ved from phytozome v7.0 (chr-ID scaffold_4; pos 21997110 t o 21997424)
ttcatcttcatcagagagtcgaaccacgactacaggtcagaatcgactagttttcttttctcttttctggttttgatctgatctcctctcatacggtttttttttttttttttttaaagtaacttgaattacgtgtttcatttgctccgatttcgttctaaatcgcgtgtaattcttttctatcaaatcagaattaataaattaggattgattccggttatgtatggctaatttgaattgaaaatagaattgttaaaattattagtccgtatcttttcagctatagaagatattcagaagaagcctcttattgct

SEQ ID NO: 41691 - DNA, 620 bp, Arabidopsis lyrata
  Intron number 1 from transcript 311401 (locus 311401) deri ved from phytozome v7.0 (chr-ID scaffold_1; pos 841365 to 841984)
cctctgagtaatatatatatatatactctgttttaaaaaccagttttgtacctattattaccaaaataacaacactatttcgtaaaaatggttcttgctttttctgcattcacatctttgtttcttcaacgcagattcgatgataaaactgtcagaaaacgaataaaagatttgttctttctgatgaaattttagcaatgttgtatgtgatgtgaatctgtagccacaattcatttattgctaaagtctttctgttcatcgaaaccaatgatttctccgtcttattttgtatctatgtggaacatatccgtacattaacacttcatctggttctggttctgtctttatttgaaaaagttggatgttgacacaaccttttacatgtcccctctgaatctaaatatgtcttcaaaaccaggaaaagtttacactacttttggcgataaattcactgtttcgttatcctagcatcttagcgtcggagtcatggaatacagaagcagttcttatatgatcatcaaattcaagtctctttgattcgtaattcagaaatcctttttgttatcgaaaattctcagaatcttgatgtgtttttatctgttttcgcaggccgatatccg

SEQ ID NO: 41692 - DNA, 935 bp, Arabidopsis lyrata
  Intron number 3 from transcript 485459 (locus 485459) deri ved from phytozome v7.0 (chr-ID scaffold_5; pos 15494457 t o 15495391)
aaaaaagtggtcaaggagtttgaaaaggaacagaagcaacagcgggacgaggacgccgggactcaacccaaaggaactcaagggcaagagcagggacaagggaaggaactgccggatgtcgaacaaggaaataaacaagggcaagatgtggaacaaggaacgaataaagggcaagaacaggattcgaacacggatgtgacattcacagatgctaccaaacaagaacaacctatggaaacggggcagggcgatacatcagagaactcaaagaatgaagaaaacggacaaccagaggaacaaaactcagggaatgaggaaaccggacaacaaaacgaggagaagaccgcggttagtgaagaaaacgggaaggaagagaagagcatgaaggatgagaatggccaacaggaagaacataccacagcagaggacgaaagcggaaacaaagaagaagagagcacatcaaaggatgaaaacacggagcaacaagaagagcggaaggatgagaaaagacacgagggttcagaagcgagtggttttggctctggaataccgaaagaatctgcagaatcacagaagtcatggaagagtcaggcaacagaatctaaggacgagaaacaaagacagacatctgaatcaaataccgtagagagtattatggatggaaatgcatgggtgctgtgcaatgcaactgcaggaactgactatataccatgcctagacaacgaagaagctataatgaaactaaggagtagaagacattttgagcacagagagagacattgcccagaagatccaccaacgtgtctagtccccctcccagaagggtataaggagtccatcaagtggcctgaaagcagagacaaggtaaaatattctatccaaaaaaaagttttcttcaggtgaaataatgtgaaattggatagaagttgactcac

SEQ ID NO: 41693 - DNA, 354 bp, Arabidopsis lyrata
  Intron number 1 from transcript 929969 (locus 929969) deri ved from phytozome v7.0 (chr-ID scaffold_3; pos 8906785 to 8907138)
tactgatttcggattgtctgtctttattgaagagggtaaaataatcaaactttgttttctctaggacatagataagtgatggattaaaggggttttagtatattgattaagttgattgtctctaggacatagataggatatggatcaaggttctggttatactggtatcttgtgtctcttggttccgtgaattgcatgaagatcagacctttcttaatatacggactaggcttatagagaccgctgtttttgttctctgattgagtttgatgtttcttactgttcaacagttggttgtttcttcttcttgtatttgtaggaaaagtatatagagatattgttgggagtgcatac

SEQ ID NO: 41694 - DNA, 435 bp, Arabidopsis lyrata
  Intron number 1 from transcript 492175 (locus 492175) deri ved from phytozome v7.0 (chr-ID scaffold_7; pos 6684318 to 6684752)
gggagaagacatttttttcctctggatctcctaaaagtaagaacatttacaaggtttgtttttatatttgttttgttttgattactccgtgagaattgagagttttcttttcatggattagctctggtttctattgttctctctttatagagacaattttggttgatcaagtctttttttgtgggtcaattattgcatagaaagcttacgttttcctgtctgaatcttgagctaatgatcttgatgaagatgataatatcctctttttattgaaacttttgggaatgccattctctctattgagatctgctgaaactgaattcaaacggatgaaacaaaggtggaaactttataggtttttcttcatcatgcatttttgtgtttcttctggttgtttcagaaacgagatatttaggtggggaagggaaggaggga

SEQ ID NO: 41695 - DNA, 669 bp, Arabidopsis lyrata
  Intron number 1 from transcript 483462 (locus 483462) deri ved from phytozome v7.0 (chr-ID scaffold_4; pos 21268420 t o 21269088)
gactctgtttgccgtgctctccaggttgattcacttttctctccctctctctctctctctctctttctccttgtttctagttctatttgcttatatgtatgtttgtgtgtatattactgctgccaccaaggtttctgtatttcattagttggttcttcaaactttttcaaagtagaaaatagaatgtcttcttttcgctaaagtttttctgcagttatttcattctcacacagaacattgtctctatcacgttcaacacatggtgttgattctttaggcccttccaaacattctaggcaaaaccattgacatagagaacttgtgtcaattttatcttgaacgatctggattttgatgttttttgcagcagcaagtgcatgtatataaacaactcttaaatcttatgcaagcttgatttagggtatgagaatctttgttggcttaagacctgcctgagtactctgcctttgtcaatgaaagcttccacggcagctctggagacagtttgttgtggttgcaatctgaggttacaaaacgtagttattgaatacttgtactgtatcaaaaatgttgaaaaagatagtataaaatagtatagggtctgagagattcatgttttccgtttctttttcaggctgtaaacttacggacatcagccattcctcgtcc

SEQ ID NO: 41696 - DNA, 757 bp, Arabidopsis lyrata
  Intron number 1 from transcript 938680 (locus 938680) deri ved from phytozome v7.0 (chr-ID scaffold_5; pos 18240275 t o 18241031)
tctccgctcagcatcgctccgattcttctaaaaaggtatatcaaagtatttcgtactgattgtgatttttcgatttcttagcggtttttgtctttgcatgttgtggctgtgaagaagatgatggaatataaaatttggactcttcgaattgaagtttgaattgccacttttgtggattcagatgactaaactttactactttattgtcctaatcaagtaatatgcctcatttgtttgtcctctgaaactttgtaatgtgaaatgtttctggtaacaagtgattcttagatatatgcatctggctattgaacatttttgacaatatattgtgacgcagagtgacctctccgatctttagagcatggttaatgtcaaatgtgcgagttctgatgataactacaggttcccattattgattgtagaatgagactgaactgcaaaagaatggttatgttgaatttttgttgaaagtcttacccttttttgtattggttggttcgtttcatgttgccactgatttggtatgctcattggcatgcttgtcacttgctttcacaactagtccaatttcatatattgattgttacaagttctccggaatgccttctattttcaactcaggatgcttctagcatcagctctagtcttatggcataacgacagatatctcataatgatcttctggatttaaaggtttagttcaagaaatttggcgattttgttctttcaggtcaaggttgtcttttttggtactggt

SEQ ID NO: 41697 - DNA, 457 bp, Arabidopsis lyrata
  Intron number 2 from transcript 942110 (locus 942110) deri ved from phytozome v7.0 (chr-ID scaffold_6; pos 11402335 t o 11402791)
ttaatcatcccttgctccaaaacaacacaatccaggtgcatagacctttcaaaaattcgtctcctacatgattttgattattttttaattaacttttataaaatgtgattttaaatttgactataaattttattttttgaaaagatgaaaccatcaatttcaagaactgaattgaggaatcacattgggaacaacaaatcatattcgaagaaaacaggttgtcctgatggaaccgttcctatattgagaaactcaaatgaatacaacatcaaggcataaacttttcgccgaaaaatatttccatccgctttcaacccatagttctggagcacatgtaaacatttaattttcttcttatacactagatctaattatttttgtgtatttcaactagtaatgtcaatataactggctcttggtagattgctggagtaaggtcacaagctggtccatttta

SEQ ID NO: 41698 - DNA, 288 bp, Arabidopsis lyrata
  Intron number 1 from transcript 942999 (locus 942999) deri ved from phytozome v7.0 (chr-ID scaffold_6; pos 21156642 t o 21156929 reverse strand)
gtactggtctcacagctatcgtcacaggttttcttcttcttgcagatgtttttcaactttttatgatccacagtttagtttctgcgttttgatactgcccatgaactcaagttgttgttggtatctgttaatggacgaaaggattaaactttatcggaatatttcaatcaggcttgttgtaagaacatatcttgaagcaaaagagaagactttttttgctgattcttgatgtatctgttttatttgatttcaggagcatcaagtggtattggggaagagactacccgt

SEQ ID NO: 41699 - DNA, 500 bp, Arabidopsis lyrata
  Intron number 2 from transcript 487493 (locus 487493) deri ved from phytozome v7.0 (chr-ID scaffold_6; pos 2586302 to 2586801)
tgtggagtgcgttaatcgcattggtggtgctgatagtaagtcaaaaccaatacaagatgttctcaaccattttatctagctagtcactttggtttagcataaagtcatattacctagtacatgctacaatagtgggaccaattgaacttgctttggtcttcggtctcaagaagtcactaaaacctagaacttcttggttaccccaaaaaagttgttagatatgcatataaatcatgaacggtcatgaataataggatggatagaatattattgcatgagatcaaatcaaaagtcatcttatgcgcatgtggatttaaaactttcttcttttgaagaaattatgctgcattatttggatatatgtatctgcattatttcaataaaagtaattttgtaattgttttaaggacaaaagtgtccttgtttctttggtgggtcactaaaaagtgtaagtggtggaaaactatgcagaggcaacgcccaaggcgatattgaagttg

SEQ ID NO: 41700 - DNA, 520 bp, Arabidopsis lyrata
  Intron number 4 from transcript 493534 (locus 493534) deri ved from phytozome v7.0 (chr-ID scaffold_7; pos 14646740 t o 14647259)
ataacaagtaagtctgatcaatatcctctattaatggttttggtaaattctgttgcaaatcactttttacatgtttgttatctagctagagatgttgtgacttatgcagtattgtgtgcttgggacatgttttggatcttatcactattcaaacactctcttttagcaagagaatgtttctagtcatttatcagatggttcatggaagactcctggtttaaatgatctaaattttggttttatattgagacatcacagttctgtatgacagatatctgatagcttttggaagagtaacatcattagattgatctcaaatcacatatttgtgataatttggctaattttatcctgggattaaggagctacgaacaagcaaaaccatagaaaaattgttcaaatcctagattctgttggatttaatatcaatgggcatggagctttggttatgataactaatattgtattcctactaattcttacagtgattgttggggagatagccaattttgcagcttat

SEQ ID NO: 41701 - DNA, 606 bp, Arabidopsis lyrata
  Intron number 1 from transcript 895564 (locus 895564) deri ved from phytozome v7.0 (chr-ID scaffold_6; pos 22650322 t o 22650927 reverse strand)
aaaaagggacgaaagagagaatcaaaggatcaaaggttaacttttcgtaaacgggaaaattcccaaaaaaaaacccaaaataatttttatttggacgtttaatacccaattctttttgattggattaaaaatacctcatctaattatttgtggtcttaaaatatctcgtatataaattattggtggaatcgagcccgcaacttaacgggcgttacagaatgattcaaaggccgttaaatttagttccatatttttaatgaatatatacaatattttaatttcaaaacttggattacttatcgtggtctagtggtaagagaaagggttagtttttaccctttagaatttgacccagggttcgaattcacttaaggatgtcattaatgttttttttttccttttcttcttcttctctggcagttctcacatcaataaataaaaaatcgctggcgattatatatttttctctttatccgggggttcgttgataagctaagacccatgaatcgaacttggagtgaaacccagaaacttctagtgatttagatttgcgatttttggagattgaaagggaagactttgtggaaagagttacggtggattgtg

SEQ ID NO: 41702 - DNA, 623 bp, Arabidopsis lyrata
  Intron number 1 from transcript 935400 (locus 935400) deri ved from phytozome v7.0 (chr-ID scaffold_4; pos 21756317 t o 21756939 reverse strand)
tacgacaaattcgacaatacttaccaggtagatttcatcgttcaaatctaggtattatctcgacgatgcacaacgttcgcttttatttcgaggggattatagtcgggaaaatcccagggtttgatcgattttgagatccgttttcatggacgggaatcgtgtttttcagttcgaggttttaattcgatttcgtgatttcgcgttcgattttgcgtagttatgtgtgatctgatttgtagatcgcgtttgagtcaatgtataggacgtaataatcagctgaatgagatcatcgtttgttattttggcttttgtaatcgctcattttcgtttattgtacatactcaaagagttcagtgccatagaagatcgtagttacactaatatgatgatgtttctgtgatcttcttatcattgtttatctaatcgaatttgttctcaattgatgaatcaaagcatctgatcttgtcttttttttgaatatgagaattgcatttaagctccttatagtacatgaaccatgcttgtttatagtcattgtacagaatgttcttgtttttctcattatcttatgttgtttcataatcataggccacaattggtattgattttctatcgaagacaat

SEQ ID NO: 41703 - DNA, 463 bp, Arabidopsis lyrata
  Intron number 3 from transcript 484122 (locus 484122) deri ved from phytozome v7.0 (chr-ID scaffold_5; pos 621523 to 621985 reverse strand)
tctacaaaggtgagacctatactttttttttaatattaataattttaaggatattatttagtcatttagaattcaaatgcatggtacaacatatgaaagaaggttacttgaactagttgtcggatataagttttatacattcagctgaccaaggttctctttttcttatttaccgctattttttttcttcttaaaaacaaatgaatagcacttttataaaagttttgcttttcatctttggtaatcatttcgtccaaacatcactggtttttaacatatttatggtcctcaaaaaaacttaaatagtttagacggtcttgtttccaaatgacagtaaagtttcttaaagtaactaattttgatccacacgttgattcgattttcacctttgataaattttattttactacaatgactaaaaataaataaaatccttttaattaatagttttactaaaatacag

SEQ ID NO: 41704 - DNA, 608 bp, Arabidopsis lyrata
  Intron number 1 from transcript 343491 (locus 343491) deri ved from phytozome v7.0 (chr-ID scaffold_3; pos 22928613 t o 22929220 reverse strand)
gaagcaatctgctggtgaacttcgtcttcacaaaggttctctttctcttcttctctcagttttgttatcttattcagtgtctgatgttgaacaaacagtaaaatctctgtagattttcggttctttaagtgttagaacttagacattttagggttttatgttgtcttctagttggtgtaaatgataatcatctctttgcttttgatattgttcagtatgtaaaagatttctgttgaatttggttctttatgtgttagaattataagcattttagaggttttatgttgtcttctagttggtgtaattgataatctctccggtgtgtttcgatctttcttctcgcagttttgtttttgttgctgatcttattcagtttctgatgttgctctccggtgtgtttcgatctttcttctcgtagttttgtttttgttgctgatcttattcagtttctgatgttgaagaaactgtaaaatctctttagactttgagagttggcactataagtatttttagggttttatgttgtcttttagtaggtgtaactgataatcatctctgtttatttgtgcatagatatatcggagctaaacctgccaaagtcttgtaag

SEQ ID NO: 41705 - DNA, 698 bp, Arabidopsis lyrata
  Intron number 1 from transcript 926152 (locus 926152) deri ved from phytozome v7.0 (chr-ID scaffold_2; pos 13278213 t o 13278910 reverse strand)
tctcgcaccatcctctctcttcaattctaaatcaggtttcttcttctctatctttggttccgtatcaaccaacacctctttgttctgttcagagtctttgaatcaaagttggaaactttaattagtaatcaaattctgtgtataatttgctcatgccaattgatttacatacagattttattggttgatattgatttgtgagacaattaggcgcagaaagaacgaagctttagccttttaccttgtctgaaactctcttgtctgaaagcaaattgaatttgaataaacaaaacagaatagaattatagggtttttgatgtctatgtctatttcttacatacagataaattttgggtcgttgaagtgattttgatagacatgttgatgttttgctctttctaaaaagattcagaccctttttaatctttgtggcttttctagttgtgatttggtttccagctatatttcctggattcttgttaactcttaagtcttaaggcgttagggaagtttataattgcagcagcaacacacttgaatcttgaagaaacatgtggaatgagtttatgatcttttttcctctgatttcatgtttttgcatcacctgccatttagtttccatggatatcttctgataacagtggatatctctcttacttgatgtgtacaggggacaaacatttagtctcgaaaggacc

SEQ ID NO: 41706 - DNA, 601 bp, Arabidopsis lyrata
  Intron number 1 from transcript 943043 (locus 943043) deri ved from phytozome v7.0 (chr-ID scaffold_6; pos 21435118 t o 21435718)
caccattcttaccatcttcaccatccttgctataggtttgtacttatatttacaaccatttaaatatttatatattatatcttacgaaaataaatattaaacactataattgcttagctaggagaacataatgaaactcaaaaagtaattcaaaagccatagcacccatagtttgtggatcggataactttattttcttcccaatattgcatatccattatccaaaaaaatatatatatatatataggatatccaatattttattaatgtaagcaaaattatttaaacattaatcttcaaatagaaactaacattttaatttagaggaattcctcaaaataccaccattttagttttctttccaaaaatatcactaatatcaaattattgttcataggtgggaattttaaatccttggtttgggttgattattttgcaatttagggtttagtatttatggggtagggtttactgtttagaatttgaaatttaaagtttaaaaattttaaattttattttattttggtgatatttttgtcctaaaaacaaaaatggtggtattttagagaagtgccctttaatttatgtcttaataggggtg

SEQ ID NO: 41707 - DNA, 454 bp, Arabidopsis lyrata
  Intron number 6 from transcript 485328 (locus 485328) deri ved from phytozome v7.0 (chr-ID scaffold_5; pos 14692070 t o 14692523)
gacaggtttgtttcttagttttcttcaaagtcatgtcctttactgtattgagttggatcaaaccaaacttaatcaatgaatcaaagaagcttgtttctgtgagattaaggttaagggatttgaaaatatgtgagtaatttttttattttgtttccttgttttttaaagtcatgtcctttactgtgacatgttatatgaaatgagcttaatctgtggcactcgatacaaatttaggaggttaaggcaaggatttctgccatctactgactactgaatctacatttatctattgcgcggaaaaatacttcttatatctgctattgatgatgaccgatgccaaggaatgtgttgtagttgtgattggaatttaggattgtatgagtcttattagtgtatgttcttttgttgcttgtttgtagggattgtttgaagggctaaaagcttacagaaagga

SEQ ID NO: 41708 - DNA, 881 bp, Arabidopsis lyrata
  Intron number 1 from transcript 894883 (locus 894883) deri ved from phytozome v7.0 (chr-ID scaffold_6; pos 17657713 t o 17658593)
gaggttcttgaccgagattcctattggtacgttttcgttttcttccttttatattttgtggttttaatgtaaatatgggttagctaacaaattaaatccctaaaacttagatacggtgggatttgtcgtccatattggtggtcttaaaagaatcctttacgttcgtgggcaattgaataaggataatggatgtaactgtgtttatttcatattaaaaaattttaagtaattttcctttcaattttgcatgccagtattttcgtatatatgtcgttttattttggtttgtaaattaaaaggaattgaaattgagatgttgcatggtgggagatttagccgattattttatgagattgtgggttaacagagaatacgatcgttcataccgtcgtgatcttgtgttttgtgttttaaggttttggcgggttgatgaatataaagatattgatagatatttctttatcatattaaaaaataaaaaacttaaggcagctaatatgttatatgatcttatcgaattgtatattttttaggaaaactatgtctcatgaatagaggtggatgttcaatgttttaccttgacccagagttttacgatcttgaagagatcaaagaacgttaatattcagagtttatcatgatacattaattggatgttcgcatttgtttcaattcataacctagaaagttttccatacatagtacactctcgacggcttttgcttgggttgcgaggatgcaagatattcataggaaaatgtctgtgtctacttcgtcataaagaatcataggtgagtttatttttcaatttgtatgccagaattcatttattttatgatgtttggttctggtttgaaaattaataggggattgagattgag

SEQ ID NO: 41709 - DNA, 355 bp, Arabidopsis lyrata
  Intron number 3 from transcript 477469 (locus 477469) deri ved from phytozome v7.0 (chr-ID scaffold_3; pos 578039 to 578393)
tgttacgaaattccggaaaaagtgatttaacatttgttgtgtcgtgatctatgattctgttggaaattctcattattatgttgattagatcggtattttaattaatcgattcttcgctcttggtgttagtgtatgttacgcaacgatcgtaaacaaaaaaaaaaaaattgagatttgtcatgttgatgtattgactctgtgttctaagatcttggagatcttattcctggtttgaatctttgcctttattttagatcaatcatgcatgaagctgtttcttttttatacatcacttggcgcaaaatctttcttagatttgagatttgttttggcagagcgaagaagaccaagaaaa

SEQ ID NO: 41710 - DNA, 623 bp, Arabidopsis lyrata
  Intron number 1 from transcript 896790 (locus 896790) deri ved from phytozome v7.0 (chr-ID scaffold_5; pos 4825867 to 4826489 reverse strand)
agagagctgaagtcagagataggcagagaggtttacatgtgaattaaggtatggagtgctaacgtgaacatgaacgtgaacggcggtgatttttgcacataatagcaattagatcgagttttggaaaagaatatggatcagcgtgacatgacgcatatggataccatgcatgtctatctattgtaaatcaaaaattatattattgttccgccttatttttgaaacagaaaggaattttcccttaaattttaatatattttataagatagtatcagatatagtagtaaatctaaaatagttgttattattccatatttttacggaaaaaagtaaatattattttaaataaacatggataacaatgaataaatggcagttttacaaatatttattattatgatagtgatttgcttattaaaatatgtaaattttcttttcttttattgtatttatcgtcgaaaaatttagaaaccctaaatcatgcaccgcctcctattcaatataaataccttgctcatggtattcaatttcagatcataactaacccttgtttttttgttcttttttttcaaacttttttttgcttctacctaattttaatttttctttttattgtagggtgg

SEQ ID NO: 41711 - DNA, 410 bp, Arabidopsis lyrata
  Intron number 2 from transcript 476035 (locus 476035) deri ved from phytozome v7.0 (chr-ID scaffold_2; pos 13552359 t o 13552768)
ccgtcttcgtcttccgtcgtcgttgtcgagagaggttagtttgattttcttcaaatctttgctcacttggatccttaaattagtgggtcgttttcaaaattttgatttgattcgattttcgttgatagaccataaaacctagcaattacgacgattaggttttcaattacgacgattaggtttcgtttggtagattctagaaacttagttcatgtctatgatcgtttctagtttcgtagcgtgtagtgaatagtttatcaaattcacttttgttttgagttgttacctaatttagttttagctgattttgatgaatatgtgaagagagtgctttgtgggaataagaatctggttatagttgtaatgatatccaatttgcgtttcctctgcttataggtggttttagctat

SEQ ID NO: 41712 - DNA, 479 bp, Arabidopsis lyrata
  Intron number 4 from transcript 902008 (locus 902008) deri ved from phytozome v7.0 (chr-ID scaffold_4; pos 19784656 t o 19785134)
tccgtactcctccaccgcgttttgccagacgcaaggtaacctctctctctttctcaactcaatgatcatttgtaggtttaagctccatttgtcgatctgtaattacttctgcttgctccattttgccctgttagatatgaagatagtttcaagtaaaactggtttgtttgacatgtacaaagtatagttgactctctcgcaggaacctaattgtgtgtttgattatcttaagattacctattgaactataatagttgtttcaaaatagtcttttatggcttcaataagtagacttttgaggtggattaagcaaaccagtaccttcacttaatccctaacagtactgctttctacgagactattctgttctatcttttgttgttgaaatgatttactcttctgacattttactgaatggttttctttcgacattatgattatcaggaggatactcccaagcctgggcaaccaggacaggc

SEQ ID NO: 41713 - DNA, 730 bp, Arabidopsis lyrata
  Intron number 1 from transcript 900722 (locus 900722) deri ved from phytozome v7.0 (chr-ID scaffold_4; pos 13622351 t o 13623080)
cttgctaacgctgttagattcgtcttaaaccaagagttagtatcttcttttgaatccttttgaatctgttgtgtatatagaagaagaagccatacactttcacagttagctttatagtctcatacttagttcttgactctcaaattcttattattgacttcatagtttctctcattaagaattaatctcttacctctctgtaccatagctgccggttttgtttttagttcgaattattgtttgaacaatcagtgtgcactttgtatgtgtatgcctttataatgtgattgtgaagttgagttcgattcaatgttggtcacattattggttaaaagtagtctagaattagctcctaaatatcccaaagtaataagcttttaggtcaaaatagatattttacagactttattgttccgatatgtttcggaggatgagttcggtccattaggttcgccattatattgtgattgtgaaacttgagttttacaaaagtgttggtttgcattaatgttatgttgtttagagattctcattgtatgctaaaacgtttcgaatgattctgaagaaaaggtctttacttgatattcaatgaatgccatcttatcttatcattgtggttgatatgctgcacaagtatgcttgtgtgcagacaatgatgatcatgtcactaaccagtactgtttttaattctgcagtccgagagtaaccgtggctgcatacaccatcccac

SEQ ID NO: 41714 - DNA, 612 bp, Arabidopsis lyrata
  Intron number 6 from transcript 322019 (locus 322019) deri ved from phytozome v7.0 (chr-ID scaffold_4; pos 21245192 t o 21245803 reverse strand)
aaaatccgggagaacatcaatagccttgtcaaaaagtaagtaacataatcatcaattctgcaaaatttcatggtgtctatgtttgattctcttgattgttttaagtatatcattagtttctttttgatattacagtttgaatgagaatgtgtcggagacatggaagcagatgccaccattgccggagaagttgaacgatgagctatttttttatctctataaagcaatctctccttcatcaaatctaccatgaatgactcattcatcttcttcttctttgcttttttcagaactttcttctaaattgattctttcaatttttaggtttttttttgtttctatctcagcagaaaagcattagcttagaccacaagttttagacttttgtaatctgttgatttattaatcaaacaatccattttattgaagcttttttttttctgggataaatttaaagaacaaaaaaaaaaaccaaactttctcatgttcagaaaaaaaaaagaaccatttttttagaatcagaacgatttcactatggagtcttcgagaaaagtcttgaactttgctccgattgagtaaaaaatggatagactgagagattgtttagaggag

SEQ ID NO: 41715 - DNA, 635 bp, Arabidopsis lyrata
  Intron number 1 from transcript 486615 (locus 486615) deri ved from phytozome v7.0 (chr-ID scaffold_5; pos 20252686 t o 20253320 reverse strand)
ttacgcttgtattcttcttatctattgctttctcatcgtgattctccattttatgtatctctctatgccgtcttctgcttgttcgattgtatcgtttgttcatttgaatgttgtctctttctctctcgctgttgttattcactctattcctcttttaatttcactctccattgtttcaattgaagttttggcacctctgttttttgtttcttatttggtattttagcacctctcaattcatttttgggcttagggttttacgaattcatggttgaggtgcctcttcacattcaaaagagacttacttttccatcgagaagagaaaaagttgaatccgaatccttgaactgaaattactaatctaggctcgtggtttgtgtggacctagtgaatgcattttgattacatgccagattcaatcttgagctttctgagtgattagcatgtttacaaagtttaattttccatttatgatcatatctctttcttctttttgaccagtttagtgttaagtttccggaaattgcttgagattgatgtctcaatgctcatagacctgaactgttgccacttgtgtgcagtattgggaaacttgcagatccaagaaaaatataactactttttatagtggggac

SEQ ID NO: 41716 - DNA, 875 bp, Arabidopsis lyrata
  Intron number 2 from transcript 899750 (locus 899750) deri ved from phytozome v7.0 (chr-ID scaffold_4; pos 2527656 to 2528530 reverse strand)
atatttccaaccgagtaagtacattaattgttttttaaagatggagtactaatttttatgttatgattacaaaataccagaacctttttttagatcagaaaagtcgtcacaaaatcatttagaaaagcatttatgaatgtttctcagatcagttgaattactttagaaacactttagaatcaatagataacaaaattcacaataattaattcctttgagtcgtttaagttaaacggtttaacataatgtgctgaggcataaaatagtgataaacaaaaaactaagaactaatttttttttttttttgcaataataactaaatattttgtttttgtagaacaatttggaattatatgtgtgtagaaaagagaagataagatttttttaaaatgatacaaggacacaggtccgcattgatagttattaacgaaaaaaatccaaaattgatagttatttacgaaaaaagaagataatgatataaataacaaagttacactgaaaaacgagactgaaaataattaaatgttataaagatttataaaataaatcaaaatttataatttttcgtgaaatcaactaaatggttcaatcaaacggtgaagaattacgagaaaaagacgcaactgtttattcagattgtaattttttaaaaaaacacaaccataaaatatatgtattctattaaaaaaaaaagaatttaactaaaggttacgttaaaaaacacagctcttcataactgtaaaagatatttatttggattgttattattatatagatttacttactgatataacaattcttttgtttgtacaaatggaaaaaaaaaaaaaaaaaaaacagaagccggaattcttttttaccgagttttacaagat

SEQ ID NO: 41717 - DNA, 442 bp, Arabidopsis lyrata
  Intron number 2 from transcript 926759 (locus 926759) deri ved from phytozome v7.0 (chr-ID scaffold_2; pos 16015618 t o 16016059 reverse strand)
ttttgaggaaaaggtttttgattctgtccttgaaggtaatcttaatcctccccatttttcggttaaatactttgtttcataattgcttcatcctgagtgctcactaactaagtagatagatattcatcacaaactcttctaataatggatgaaaatttgtggccacttatcccatttgaagcaaaacgaaatgttgtgactttgatcttctacatggggtgtttccaaacagtcttctcatttggtaaattaatttgaactagtttggttagatgtttacatgtatgaattaatgaaacgattgcattcatggtttgatagaactgtcagttttcttactgtgtacaagtaatacaaacattcttgtgtcttaatatctttatctcatcaagttggattttgtcacaaatctgcagatcttaataacagagaacagtcgctt

SEQ ID NO: 41718 - DNA, 517 bp, Arabidopsis lyrata
  Intron number 1 from transcript 894732 (locus 894732) deri ved from phytozome v7.0 (chr-ID scaffold_6; pos 13213769 t o 13214285 reverse strand)
ccggaccaaatcctacagaagctgagccgatttggtccggcattttccgcggctgctgcttgactcagtcgccgtgaccgccgaaccggaattcttctcttccccccacgagttttagccatcatcagtcggaatttcaacagagggaagcgagagagagagattgggattctagagttagaaaatgaaatcgatgtgtctaaaatggcgagtcaaacaaacttcgctaattaattgtaaagtcaacaaaaactttatgatttaaatgtcttcatcgtagtcaatgattaaatcgtcccaaatttgaaagttcatgatttttttgacatttttcccaatttttatatacgcttccaacaggtactcattttctataatttctataaaaattgcttccacgtttccaaacgcttctcttccgcgtacccgcttctgattccatgcaagttcaaaccaagcttgcgttctgtagaaaatgattggagatttgtaaggcttgtgtagttacgggttttca

SEQ ID NO: 41719 - DNA, 534 bp, Arabidopsis lyrata
  Intron number 1 from transcript 472931 (locus 472931) deri ved from phytozome v7.0 (chr-ID scaffold_1; pos 11969394 t o 11969927 reverse strand)
tcgcttccaagtgtttcttctccagcgtaatcgtatgaatgcgatctcattcttatcgtttgttttgtcgtttggataatgaggatctgaattcatgttttgattggctaaaattatgctttgtatcgccgatctgattcaatatgtgtggtattatcaatgatttattcttatgtttgaattttgaatcatggtatatatcgcatcatgtcaaattgaacatttaatctgttgattagttagaaatgatggatctgttttcgaaatttgtgtcggattagctgagttcttatctgcattattatgtgtattgttactttgctttagatgcatggccgaatttttacctgtcctttgcccaatttctctgatgatttgcataaatacatgattttggtacccaaatttggatgttttgttgagtgtgtaaaaaggagagattctgatttgatatataatgatgcttattggatggggttgatattgataattgttgcagacaacctcaaagcgactcgcagacaggaagattga

SEQ ID NO: 41720 - DNA, 395 bp, Arabidopsis lyrata
  Intron number 1 from transcript 927229 (locus 927229) deri ved from phytozome v7.0 (chr-ID scaffold_2; pos 18068348 t o 18068742 reverse strand)
ggctaagctcgcctgcctagctggaagatgtattcgtattctcacatatttgcaaatttcaaaaacagatagttgattttggtttaaacatactatcttgggagttctttaggaagttgattatcatattggtttttttttttcatgttgtcatcgatcaatcaaaggttgtagagtttgtttcaaaaaaacaaacttatggttactcggatcataaaattacaaacgaagttagctctcttacaaacaaatttatctctcttagcaatgcatagaattactcttgtgtacgaagaaatcattgttgctactttatccatctttctataacctcataaggagtaattaaacggctaattattgaatctttttcaattgatattgttgtggcagat

SEQ ID NO: 41721 - DNA, 620 bp, Arabidopsis lyrata
  Intron number 1 from transcript 899415 (locus 899415) deri ved from phytozome v7.0 (chr-ID scaffold_4; pos 344285 to 344904 reverse strand)
ttcgtcggtccggaagttcatctagctctagctcggtgagattctgttacatatatagattctgatttattttttgttttcttcaaataaaaaacgataagttatactccctctgtatttgaaaaaatgtcgtttcaactgtttttgggtgaattaagaaagggcacagaattacaaaactaaccttatgagaaacgattatttacaattatatttttggtatatgtagttttggtaatttagactgattaattatgatcaattaattgggggtaatttaggaaattttatgcaaaagttgttaaaatgacaactaattaaaaacacagaaaaaggctagaacgacatttattcaaatacggagggagtagtagttaatacgttctcactcatatttacaactatataaaagtagtaactaaaataatattactttccaaaaaatgttataatttttgtttcgaaactttaagagtaccaaaacaaatatagggttctcaaacttacaaaaaaaaaatcctaaactagtcctatgataggccccttttttaacaaaccgtcttatgtatttggatcgatcttttaatagtcaacgatatatatgattttgaaataggagg

SEQ ID NO: 41722 - DNA, 366 bp, Arabidopsis lyrata
  Intron number 1 from transcript 938189 (locus 938189) deri ved from phytozome v7.0 (chr-ID scaffold_5; pos 16376973 t o 16377338 reverse strand)
agatcttcgacagccgtggcaaccccaccgtcgaggttttcttctgatgatttttttttttttttgctacttgagatgcttagtgagtgatgatcggtgttttaaatttgtaagaagaagaagaagaagctatgtttgatgtttcaatccgtttttatttatatatttttctctgatttggttcttttctatatttgataatctgtacgatggatcggaattagtccctagtttcttttctttctcgaatcattgtaccactctttgtttatttccatgtcttgatttgaattgaatcatatcgttcgttttattagcataagaggactcatgattgtgtgatttatctgttaatgttttaggtag

SEQ ID NO: 41723 - DNA, 625 bp, Arabidopsis lyrata
  Intron number 3 from transcript 472410 (locus 472410) deri ved from phytozome v7.0 (chr-ID scaffold_1; pos 9408548 to 9409172 reverse strand)
cattcaggtttgttttttctttctttttcttcaattcatgagtttgcatatactttgaaaataactatgtttatatgctcatttatgttcgaggtaaggctttatgtagtaccagcttttgctggttagtagtcctgtagtatatattgtgattggattgagaattagtcaaaagggtttttatgctggtatctcctaagcgtataagactataagttcttatcttccttttgtctactgcatggttcttagtttacattattaatctgaaagcgactcagtttcatatgatatctttctctacgttcccatgttcagtgtgatggaaaggaagaggtattagaacatttgtacatgatctctgtatcaataaattagagtacctgcaggcttgaagtagccttaggtgacttatctcagaagtgcatcttgaatagattatgcaagtgatgtccttttaaaatttcatttcctggattcatgttcctcgaatatatcgtaattttcttcttagtttatttttactttctgatatttttgtatacaatgctcaaatttatgcttctacttttgctgttacatttgagcagattggtttgcaccaaacacagtggatcgacttgaa

SEQ ID NO: 41724 - DNA, 703 bp, Arabidopsis lyrata
  Intron number 1 from transcript 345437 (locus 345437) deri ved from phytozome v7.0 (chr-ID scaffold_4; pos 17725090 t o 17725792)
agccaagttgatttctccggtaaggtctctctttcgatatcttgcttgaatcgatataaatgttatattgtaaattattggttaatggatgtacgtaattctattgtatcttcgtaattgtttatatgcttctccgttttgtatagatggttacatatgcgtctctgggacgtcgaggattacccaatccctcaagatttcgaacctcgtttgatttttaagaatatcaactcagctctttcgaaactgggttttggtggttcgtttttgggaatcgaggcttatggtatgaaggagatccccgaagccttatctgaagaattgatcgaagacggaatgatcatgtacaatgttaaccccaaaggtatattcctttacctaaacatcttaacactttttctacttatatttatgtatgtcagtcatgactcatgacctacctaaatctctgttgatatgtatataggttcagttaatttaatgatacgggacattacgaacatagaatctaactattctgataagccacacaatttgatggtaatctccaaaaaaatccctgaagacaatgagtccatgagggttctttcggctttgaaatccagaggtcgcaatgttctgttggtacagcctgacgatgagaccgcatcagaaaagctatttcttactccagagtccatatctgactgtacaagatatttaa

SEQ ID NO: 41725 - DNA, 582 bp, Arabidopsis lyrata
  Intron number 2 from transcript 945888 (locus 945888) deri ved from phytozome v7.0 (chr-ID scaffold_7; pos 8662840 to 8663421 reverse strand)
aggtatggtttctgtgatttgtttgtgtttctcagtttcttattagggaaagtttgtaactttgagattcctactatgtcattaccaagctgtattgggtgattagagcttcatgagctagtagtttatcagctgttatctgatttgttcttaatgaaaacttctgtttgtttaatctactttagttccttgagataattcgagcttttaactagttaaatcgaaggcttttattatgacaatttgaaaacattccaatgcactaaaggttctggcttctaagattgggtataagtttaaggaaattcttatcgtgtgtgcaatgattctgtagaattgtgtagaattagatgtcttccatatcctgaaattatgttctttactagtttaccaagagttgttgcatgcattttggcatgatgacagcttgttttttgtatttcttctcgttcttgtgttgtctctttgtttttcttaagacaagattgcaatgtacaagatatttaccagcggtttctcagtagtatagtgtgtctgttcaaataaggttactcagacataagtgttgttttctgcaggaaa

SEQ ID NO: 41726 - DNA, 335 bp, Arabidopsis lyrata
  Intron number 6 from transcript 476925 (locus 476925) deri ved from phytozome v7.0 (chr-ID scaffold_2; pos 17720698 t o 17721032)
gttacaaatttgacaggtcagtgcctcttcctagagtctccttatgaattacaatgacatttgcttgttatgtctttttgattttgatatgccatcattttacttctattaaactagataatcatgtgatggcatcttagcccaaattgaaaaagcgttcactttaatggggttttgtgacaaagttgattgatgtatctctctctatttccgattaagagtcaatcacatctccttttgagaagtagacctactaatatccatctgcatagaagaaagatttgatttttttttttctctgtttttctttatttagcataaacactgtatactat

SEQ ID NO: 41727 - DNA, 497 bp, Arabidopsis lyrata
  Intron number 1 from transcript 929245 (locus 929245) deri ved from phytozome v7.0 (chr-ID scaffold_3; pos 6132099 to 6132595 reverse strand)
aacctgatctacaaggcattaaccaactcaaagttgtaagtattaaaccaaaccaaaacagtttcaagctgatgcattttcttcaattttgttttgatcatgttgttgtatgatgtattttacagatgcaataattatttatgaagtcttgaggctatatcctccagtaatccagatgaaccgtgcgatccaaaaaccaaaccatagaaacagagcattttaacactaaccaatcaagagtaaaagaaacagaggatctctgtttttagttcaaatccaaccgcttcttaccatgatccttaactgtctgtagtatcagaggcatgacacgaggcgtgtaatcatctgttagactgatgggtctggactttgcttgctccaccatactggcttccttccagagagaccttgtctctttagataagcctcatatttctttggtttaaaccaagctagattcaggccttccatatccataccgcaaccgcagttaccac

SEQ ID NO: 41728 - DNA, 641 bp, Arabidopsis lyrata
  Intron number 1 from transcript 900013 (locus 900013) deri ved from phytozome v7.0 (chr-ID scaffold_4; pos 4658358 to 4658998)
ttcaaggtctgtggctctttcgtttctttgctcgtgtgttttctagaaattcgatatactgggactctgttaattgtcttaattcgtttgattcatgtttctttttggaaatgagttctattttagaattgagttttagtagttgcaggtttctcttcttgacttgagttcagtttcagtttcagatttgactttgagtagtcgcatgtttcttttttggaaatgagttgcaggtctcttactaacttgagttcattttcagatttgagtttaactagttaagattatgttttatgtttagtgattgtgatatcgttatctccaacgttaataatttatttgtaacattgattttaatttgttgtgcttgcttgaagaatttaataaatccaaggatagtaataaatttactattctgttctttttttaatccatctctgcaatttctcatggagaaagcctctgtttcgtatagaacttaggctttaagttcgtggatcactaggccaatgtagagactagtttactgactatttttaagactttttggtacttttcatttgtggtttctgaagccttattggtcgtattgctgttgtttttgtttttatggtccttgctcacttctagaggcggaagag

SEQ ID NO: 41729 - DNA, 806 bp, Arabidopsis lyrata
  Intron number 4 from transcript 487108 (locus 487108) deri ved from phytozome v7.0 (chr-ID scaffold_6; pos 959710 to 960515)
ttatctagtgagtgtttttgctattgacttagggtgttcatagatttgtggtcatggattcgttaaagagtccaacattgatgcctcagttaaaggatgaatttttctctctgttcgtatgtttagcttggaatagagttacgggtcttatagagacttcctctggctagatttggttcaattattcagtttaatcatgggcgtttctcgtgaatatgtttgcttttgagtgagaaggtttacggatgtgtttgttcatgaattcattttaaagagcttgtgttcttgagatgtttcgaggtctagttttgatgtctctttaactctctgttgtgcatcagtgtttatcaatctgaaacatggaaatttgatagtttttatttttcccattgattgagaatgtccaaagactaatgttcatggacaagaaactgtcgtctagagatggtctgggttccaacattgatgtttctttaatagtactatgtgtagctaaggttgtctaaaatgcaggacattcaaaggttggtggttatggagaaaatttttagtttggatttggtccaattacggctatgggttacaagaactgcccctaactctttcaatcagtttagatttgtttcattggctttttagacacccttttgtgaaacaggattgtttcatctatgtcacagctcacagcctctcacatagcttcttatgcagtatagttcttgaattggttttgggttggtcttctgttaactggtctctttcaaaactttttcagggctgtgtctttaccagataactcagatttc

SEQ ID NO: 41730 - DNA, 655 bp, Arabidopsis lyrata
  Intron number 1 from transcript 488410 (locus 488410) deri ved from phytozome v7.0 (chr-ID scaffold_6; pos 6387241 to 6387895)
acgattgcttcgtaagttactcgaattttgagattttgttctcgcttttatgcttgatttgagtttcgtcaattttggttctagatctgtgtttttttagcttatttgtttgtgtttgtgtgaatttttcaagttcgttgcttgaatttcgtagatttggtgagagatcaagtcaacgattcactaaatttgacggatcttaggtttgtgagataatcctaggtcaattgggcaattcaatgttttgtaccagatccatagatccacttgatgagtcctggatatgttttcactcgagtgtaattagccatgatctctaatgtttacgtgtgagctgatgtcacttttgttgacgacattgttgttgagctgatatctctgtgtcattatagctacctttacgatatggttgactgtcattgttcatcactttttctttggtttcacctttttgagatttgtggggcatatccaaggatgagtctcgattacgcttgtgtttagtttttaatttactgagcttttttggaggatttctttcaggtcttctagataattattaatggcttgatctggattttaaccgcttttcattcatgtgttttctttgatgtgtatatgtaggttgccaaggatccatctggcaaagcagtaa

SEQ ID NO: 41731 - DNA, 488 bp, Arabidopsis lyrata
  Intron number 3 from transcript 313081 (locus 313081) deri ved from phytozome v7.0 (chr-ID scaffold_1; pos 9476922 to 9477409 reverse strand)
ccggccatcaccttcgtcttggccattattttcaggtttacgttatttcttattcttataaatttatcaaacattttatgcctctggaaaccctttgacaaaaataaaaaacattttatacggaatatatttttactgtttgataaattatgcgaaatatttctactttgattcttatcttgggaatatttttgttgacttttcccataccgtgggaacaagattaacggaatcataggaaaacacagtagtatgttcgtggaacatgataccacactaattagataatttaactacttatacactgaaagaaatatactgggtgagatcatcatttccacttacgtaagatgtcattataagtctatatggaatctatagaacattactgtttgttacatgtaaatttaatacagtaattaacgaatttgatttttaatatataaatttcagattagagagcgtgaactttaagaaggtacgaagca

SEQ ID NO: 41732 - DNA, 978 bp, Arabidopsis lyrata
  Intron number 1 from transcript 480231 (locus 480231) deri ved from phytozome v7.0 (chr-ID scaffold_3; pos 15054288 t o 15055265)
cgccttcaggtatttatctctcccttctctttctttctatccgttgacttctgttcagtgatacttaggaatgtgttgctcatcgaatcaggaagaattaagatagatagagaggttaagattttctcatgtttcgatctctgactagttttatcattcatcagtatgaaagtagaacgagaataagcatttaagtttatgtggaggacgtagactactatattttaagttgacttgcagtgtattcacctgaaatcaattccaagttgttataggagcatgtgaacttagcgttgccagatcgattgtatcttgctgtttcttattgagcgcgttatagtagccactttaaataacttgaagcaagtatatactccatggatttgtaggggaatctagtttacaatagatggaaaagtacacataaagcatggacagctagtttctagagttttaagatgaaacaacaaaatcttttcttgaagatggccatctccttgtgttttagacccatctctatagtttcattttcatctgccttctgcattttgccaatgaaagtgaaaaaaaaaaagttccaatctagagaaattaacaaaaccttatgatttcttttactcatttacttataactgaagacttgtgcattttttctaaagctgatatctgaatatctgtcttaacttatttctacaattatttgaaggcttctctttgctacctattgtaatctgttgtgtttctgtggtttgtaatcttttggctttcattattgtttcattattgttttgattccatggctttctccttaattttctgatggctgtccaatgatattacatcagggcttaatctatcccactcctttcactgattacagttctctggaaaaaactgttttcaaatctgaagattatctctctctctctttctctatctgtagttttcaagagaaaatttgattagcccagttttacc

SEQ ID NO: 41733 - DNA, 610 bp, Arabidopsis lyrata
  Intron number 1 from transcript 940390 (locus 940390) deri ved from phytozome v7.0 (chr-ID scaffold_6; pos 3700226 to 3700835 reverse strand)
ccgtcattctcgggctttccctcaaatccgcaattgtaagttttcagattattacagatacctttttgattttgtttttccaccgatcttcgtatccggggaatttgggaatgttagattggaatcttttgatctggcattagatcctatgaaatcgtacaatcttgctggcatttactgtttcaatagcgtaataatggctatgagtgttgtcttgacagtcttaaaccttgtggttattgatttgcaagtatcataatcgaactactttgatgcacggatacatgataggtctgttggagttataagatttaccgtctgagaattgtctattggcttattcaggttcaaatcatatgaacttttcacatttagtgtgtagatgaccattataatttataggaagcaatcaatagaataagttaatggggagtgtctaataatccagtggctaatgtgatgttctatcatctatgatgattatacattgagttatgtcgttacttctgatttaagaagatttagaattttaaacttttgtatctctttctcagatatgaaacatgtacattatcctctcttacacctttgaaatcctctgctgatgcag

SEQ ID NO: 41734 - DNA, 597 bp, Arabidopsis lyrata
  Intron number 1 from transcript 479168 (locus 479168) deri ved from phytozome v7.0 (chr-ID scaffold_3; pos 7251045 to 7251641)
tctcttcctcttgaggtaacatctccgatgattcgagcttttgagatcgggaatttttgattgaatctatactttcatttttcttctctctttgtttttttttcaatcttcgttgtgttttaaattcgagattgggttatctgaaattcgaaattgaaaattttgaaaatctgctcgatctgttatgtagctagaatgaaattctaagccttgcgttgtgctgtgttgtgttgtaattttgtatctgtcaagagtgatggtgtttgatttaggcgatcatgatcagggaggatcgatatctgcatgtatacactgaatttactaagtctctctactttgaacactcgtgcaacagatgaagtttggatctttctattgggtttttttttattggaataactgagtcaattgaggaagattatgacccattcctttatccacttcagctgcatactagttcttcgtttcaataaaacaattaatgttattagctgtttttttacaagtttttgtgtgataccaaatagtttacgtgattactcttatctatttttaacttcaggagaatatctttgagtggcaattcgccatccgagg

SEQ ID NO: 41735 - DNA, 651 bp, Arabidopsis lyrata
  Intron number 4 from transcript 484102 (locus 484102) deri ved from phytozome v7.0 (chr-ID scaffold_5; pos 492363 to 493013)
caatacagtatcctctggtctgattctcacatcatgtaagtaacaaatcctaatctctgttttgtttcattcaagtttttaaaggaggttaggctattgaccccatttgttttaaagctttatggattcaataatatgatcttctatttaaggaaacccaagtggggttttaatgatgggaggatctttttgttgaaaaaatatgattcaaattcttggtgggtattaattttttttccttcttgtggaaagttttgtgatgcttgggacatcatttgcttttggttgtattgttcctgtcaatttcaagtgtgtgtgagcccctaaaatggtttacagctttcgatttttggcatcaacaatgaccccatagagagtatgtttttcctttgggggtccaattcacaagttgagaatcttttacttagttcatcaaaagctggaaatttttatgccaaaaatgtaatatttctaagcttataatttcagggtattgatcaaaatcataattttctttttatccaaaattggcattagtgacccatacaaaatctaacttaccttatgtttttctctttagctaattatgttgtgggtactgatcaagtttgtgaaattgttctttttggttatgcagattctttgtagaca

SEQ ID NO: 41736 - DNA, 759 bp, Arabidopsis lyrata
  Intron number 1 from transcript 947573 (locus 947573) deri ved from phytozome v7.0 (chr-ID scaffold_7; pos 21481753 t o 21482511)
gtgttccactcactaaagaactcggttttcaccaggtcagtaattatcacttttattttattttttactataatgtttttagtaacaaatattctcatagatttatatgaatctagttatatttaagttggttaagtaactgtaaaacatgttcagattattattacaacaaacacaattttttaaacgaatactttgattttattattatttactactactaataaatattttgatcgattaatacgaatctagataatctcttcgtgttttgttgcggttggttaactagtaagtagttttaactacagctagatttattgatcattgtgtttaatactttttagcaaatgtgtatttaatgagctttaaataggtaatcgagattataaattaaaacgtgttttggattttttttcataaaaattacacgcttttggttaaaatctattgccttttaaaactcaatttatgatataatgccacgtcactggaccacaattttgccgtacgttatattgttgccggagtaaggtacacgtcgtcacggtgtcaggccgtttctttaaagagttgtcacgcctttaacggcgcgtctgtctcacgtgacactttccttgtttgttggtgatttgttcattgattacataaccaatcgtcggttacctaccaataaccggtcggtttggtaactgatctcaaattagtttttgaaccgttccatattaattggtactgtcttttctgtgtttcagtacg

SEQ ID NO: 41737 - DNA, 582 bp, Arabidopsis lyrata
  Intron number 2 from transcript 895912 (locus 895912) deri ved from phytozome v7.0 (chr-ID scaffold_6; pos 24523032 t o 24523613 reverse strand)
aataaacaggtgatcttatagtttatatgtacaaatttgatttttttttttttttgtatttatggtttcactattttcaccactaatcaatttttataatcaaaaagtttggtttcaacttttgagaaggtaatcatcgatggtttggtatgtttctttttgttgtaaaaagatgaggtacctcccgattttgttgaggtacatgttcttattattttcaaatatgtctttttcagaagaaacactcaacttttgataacacagttgccacaaagtcagaaagatgacttatttcagggatgaatcttcagaggaggctaatttttgtcgttaatacaatttaagtattcctctctttagattagggataacaaacttgtctgttaaattcaggaattactcttcgttgccaatctctctccccaaactaaaatattacatatatggaagtagtaacttaaagtttttggtatcgaggtcattctaaggcactgagattcggactttggtatgtataggattcgttttccatgcactaagatttaattattgtttaatttattggtttttaggtttctttcc

SEQ ID NO: 41738 - DNA, 452 bp, Arabidopsis lyrata
  Intron number 1 from transcript 895912 (locus 895912) deri ved from phytozome v7.0 (chr-ID scaffold_6; pos 24523670 t o 24524121 reverse strand)
tctatctattgtaaatcaaaaattatattattgttccgccttatttttgaaacagaaaggaattttccattaaattttaatatattttataagatagtatcagatatagtagtaaatctaaaatagttgttattattccatatttttacggaaaaaagtaaatattattttaaataaacatggataacaatgaataaatggcagttttacaaatatttattattatgatagtgatttgcttattaaaatatgtaaattttcttttctttttttgtatttatcgtcgaaaaatttagaaaccctaaatcatgcaccgcctcctattcaatataaataccttgctcatggtattcaatttcagatcataactacccttgtttttttttgttcttttttttcaaacttttttttgcttctacctaatttgaatttttctttttattgtagggtgg

SEQ ID NO: 41739 - DNA, 968 bp, Arabidopsis lyrata
  Intron number 1 from transcript 900858 (locus 900858) deri ved from phytozome v7.0 (chr-ID scaffold_4; pos 14386557 t o 14387524 reverse strand)
atcatcgtctcctccgttctcttggccaccagtttgtaagtaaggaatcggccgagtccgggttgactcgtatagcctgccttctgcgttgttgtgactcatcactgccatttttaactagggttttgtgtgtttctgatttactagaggatttttagtgttggttgcagttatagagctcatgaattgcctctcaatttatagcaatttctggtatagattctcaagaataatcaacagcacacgcttttttgtaaggttaatattaaaagttttagaaaataatatttatttagtttatgagaaaagaaaagaaaatatttattctcacgtgatcatgaagttctcattgttgtccagtctaattataggaatcgttataagaaaaaagtatgaggtaactaagaacaaaaagaaaaaaaaaactgatagctattgtaatagactatatatatatactctatttacagtctcgagctatgaaatgaaaatgtataaagttcactgtttagaaatttatcatcagatctgacaataagatattttcttttaagaaaatcaaatctataactataaggtcaaaaccattgtgtcatagatagagacatagagttgaacgaacattgactcaatactcttaactttatattactttttttttgctatttacacttgacttaattcttcttgataggacgtcaatgtgcgtctatatatgtagtcataaacacacatgcatgttttgctctcaaatacaaaaaaaaaagacacacaattttatacataatcaaaggcaccacattgaattgataatcaacatgcttaattagacacataaaacgacaagtgaatttgaacaacaacaaaaaaacgacaagtgaaataccaaaaagaaaaaattaatattccttttgtttctctctatctacgacatcttttggtttctttgccctttgtgaaaagctaag

SEQ ID NO: 41740 - DNA, 645 bp, Arabidopsis lyrata
  Intron number 1 from transcript 905933 (locus 905933) deri ved from phytozome v7.0 (chr-ID scaffold_3; pos 14612222 t o 14612866 reverse strand)
gtggatctactacaccgcaaccattctaaaccgaggtgctacctgcatttgcaaaccatgtgcgtgctagatcagagttgcgtgattcaaatatacatcacgaactgcaagcagatctagtgaaacacatatgggcaaaatttcgggattaaagagttttttaaagtcttttgtgtgatttaaaagctctaatgtttgtgagttgagtttattgtactaattatgttttgtgttttattagttgtgttgtgtgtttatctgtgtattgtattaaatttcaaaaatttcataattttatttgttttataatgattttttttgtttttattatttgcaaaagaaaattatttatttatttatttttatattattttaatttatttttaattgataattgttattaatatgtcattagaaaacaataaaaaatgaaattaaaatatggtggggtaaggtgttgaattttattaaacaaaaccattgtagatgataaaagttgaatggatgttgaagtattggaagagagagaaaatgatgtggagtgttaaaaaataaaaaatatggtgttgaatgttgaaaccattgtggatggccttatatgttaatgttaacatcgctaatcaactatcactgtccgtagaccaa

SEQ ID NO: 41741 - DNA, 1047 bp, Arabidopsis lyrata
  Intron number 1 from transcript 896245 (locus 896245) deri ved from phytozome v7.0 (chr-ID scaffold_5; pos 1447932 to 1448978)
atactttaacccaaagagtaaaaatcaagctacttgtatgtttacagctagagaaagatgctcatgattcatgtttccgacaaattaataagtgcttttaccttttttcttattctcctaatctaaatgtcacatttgcgttcttttttttctttaaccaaatttgagtttcctttctcggaaatttatttggaaattttgaattatacaaacgctataatcttaatgtttagaactaaaaagttgcaaattctacactaaaagagtaagtaaagaatcaatagtcacatgatataaggatatacaacgaagaacatgacaaataggagtgatacattatatttatagaatatccctagtgaggaaaaatgatttccagctacacgaactatacaccaacacatcaccacacatgcagactattttaatgtctcgctaactacacgaactattggtattacatacgaacatccccgtactatcaccataatcatttccagataatataaatgtcttgttaactacacgaagtatttccatcaattttttaaaaaaaaaataattagaaattgaaaaaataactaaagttaattagaaaatgaaaaaataactaaagttaattagaaaaaatagcctcacacttttagttagagccatatacttagattcaatagttgagaaggctaccaacggttactagtatgtgaaacctttattttccttagaaaaatgccaaagattaattcaaaatcttagctgtgattatgtaagcagattttgtctatataatgcgagacagaaaattcccatttgagtgataaaaacaatttgttgattgagtgcattaatttaaattgctggcaaaaagttcaatgtgattacacaatatagttgaacccaataaggtgaagaagcctatgactagtagtattagcccattccttaggaggatatgaaatgattataatcagtaatcacccaaaaaaaaaaaaaaaaagttacataatatcacttgtcgattttaggttttcagaccaaaagtctcag

SEQ ID NO: 41742 - DNA, 565 bp, Arabidopsis lyrata
  Intron number 1 from transcript 940520 (locus 940520) deri ved from phytozome v7.0 (chr-ID scaffold_6; pos 4196034 to 4196598)
ttcctcctctccttatctcctcgataatttctgtacctttcttttttcttcttctcctctctccatctaccaaattttctcattctttttttttttgtacgatatatacatacgaatgattgtggtgtcaacagtacacatgctcgtgtaagttataggctctctgagtagtaaccgacttggtagcttatcctctctctctaaccgagttttgctgaactcagcctccctagctcgtgttttctctctgactttgtctctttcccgagaaaaggcaaaccaaaccaaaaaaaaatctaatttttattttcttctagctcatacggaaaaataatagagacttctcgtgatctttcttctttgattttttccatatttttgttgcttttaatcttctgggtatctaaatccatgtactttctccgttatgaaacccaaagtattttccttttctcgttttctttcattaatttccccggaaaataacttgttcttggtgatgatgatgatgatgttttttttttttgaaggttggacgaaccaaaaaccacaggagtttttcaaa

SEQ ID NO: 41743 - DNA, 720 bp, Arabidopsis lyrata
  Intron number 2 from transcript 941601 (locus 941601) deri ved from phytozome v7.0 (chr-ID scaffold_6; pos 8694637 to 8695356 reverse strand)
cgaccctggttaggatttttctctctctatagccttaaagctctgtggttttctctcaagctgtttcatttattcctgattttgaattctgtgttcccgttaactcctttaatgcttatggtttctcgtttataggagtttcttttctagtgattccttatgctggctgatgtggttaatgtacagctttgcttttagtataagttgagatgggaacagaggcttatccaaatcgataatttttagtcacactgaaaattataagatcttgctttgctgcttacatgtgttttgatactggtactgattatgttgaacatttgagcaacgttttttttctagttcggtggtttggtctccccatgaactatatagtttttagcatttggtgctgttatctttttatatctcgcttttgacttcatgctttttggcttcattgacacaacaatttaaaggttgcatggttctaagtattatgaaattttttgtagctctaaaccttgttttttgttagttaggaggaagatattaatttaataaacatgatttctttattcatcaagaaatacaagctgctcggtcttgactatgtagctacatatcgttttcggagagtatttcattgctttctctgctaatttgagtcgagttgataaactgaaatttgtattgtatgactatttaatgacatttcagagaaggaaaatctttgcttgt

SEQ ID NO: 41744 - DNA, 1036 bp, Arabidopsis lyrata
  Intron number 1 from transcript 888403 (locus 888403) deri ved from phytozome v7.0 (chr-ID scaffold_7; pos 1759155 to 1760190)
ggttccctaaacgattgttcaaagactacatcgaggtgattattactacgcaaagttaattcaattattttcttttcttttcgtgaaaacaattaatagtagatgatattccgtaatagtaaatgattgcattagcagccataatttttttttagtgaaaataattgtgtagtttctttagcagtaataatcataattgttttttttttttccaacaattcctcacattattatatttagtgtcccatatggatcacgtttccaagaaagagtgattgtgagagtttggtggaacttgcgaaatatatttgcctctctatgtcaaatctcctaacttggcgcctccacaaactatggattgagtttgctaatttcattcagatccattattattcaaaaaaattaggctttcattcattctgttattttatgaaaatctagtactgtttgtgggataataattggattctgaatgtttttataaaaatactatttgatcattgttataaataacaagactctcttcaaatttagcaaatctctttataaaataaaccaactctattcatgtttgtaaactaattacggttacccagttttaagatacataattattttcgttattttctatcattcataaatttaaattagttaatttttcatgttgcttttctattcttcaattgaaaatgaattggaactttaacattatgttaattctaattcgttcccaccaaaaaaatgttaattctaattcgttgcctaaaattatctagaagtaagtgaagaaaaatagattatagataaatctacatttatggtaggttatataaaaaatactattatatggtaggttagctaaaatttgttaaactactctcaactatatctcgtatttatctagtaacaatatttagtctaccaatgattgatttagaactagttcacatttatttagtccaagtctttttagttgaatgaatgtgaacgtatggttctaaattatgttttaatttactggtgaacttggtaggta

SEQ ID NO: 41745 - DNA, 463 bp, Arabidopsis lyrata
  Intron number 2 from transcript 474587 (locus 474587) deri ved from phytozome v7.0 (chr-ID scaffold_1; pos 29219006 t o 29219468 reverse strand)
ttccgacgaaatccctttggatttgtgtttctcaggtaaccaattttaaagggtttctctttttgcacattatagagggttaatcccccaaagtttcttcctttttcttaaatttttgtcctttactcgggaattatccttttgcaatcaatgatatttggctataaattgtttctaggtttgagattttgattctcagtactgaaagtttggttcttgaatgatgttttgcctgaaatacattcttgaatctgattaaggactaaagtttgtgttttgcattgtctccgggagcaacttaaaattgtgaattgtatgttttgtcagagaagccaaaaacattcttgttgcatttcttgaataaagtttgtctagaaatccatttgcattgtctctggagcaaacttgatatttaatgtttgtgtgaattgaatttgcagaggacgggagaaacgggacgttt

SEQ ID NO: 41746 - DNA, 520 bp, Arabidopsis lyrata
  Intron number 6 from transcript 475826 (locus 475826) deri ved from phytozome v7.0 (chr-ID scaffold_2; pos 12360663 t o 12361182 reverse strand)
attttgggtgcttttataaggtaattttggaatctcctccgagctctggttcttaaactgtagtcatctagtgtttctttaagctagacttaggaattggcaaaagctattgtaatcaaatcccaagaaggcacgcttaaaattgttgaccatttcttcattagagatagtactgatacctgcaaatatctagtgactgttctagtacatatatttaccagaagcaagatcctatctcagggttacaacatgttttcgattctctgtttcatttctctaagaaaagacttacagtgctgaatgaagagaaatcttgcagatcaaattaaataaccaataatctttccagtattctgatcccactcactaatgtatattctgatgtgccatgtgtatttgatgtagctcatatcaaaatattatgatcctttagcaagagttggcctcgttttcattattttggtttgttgtttatgcaaaatgtgtttctctcagtggagttagcaacagcttagctgtg

SEQ ID NO: 41747 - DNA, 865 bp, Arabidopsis lyrata
  Intron number 3 from transcript 491894 (locus 491894) deri ved from phytozome v7.0 (chr-ID scaffold_7; pos 5659002 to 5659866 reverse strand)
attgctacaactccctgaccattttctctcgacaggttcttccttaatctcatctcattcttctaaaaattgaaagagtccactaacacatcagtcgagttttatgaactaaagaataaagaaaacttgacggcggtttaaaattaagtcatttgatttaaataactccaatcttactattttcgtaagagaacaaaaaattgattagtagaaacttttctttaaagtgttatgttttatagcaaaatattgtagtacatttttacatatttcctgccgcccaattataaattcaccagtcgaaaccataatacaaataataatggactaattaatcttatagtgtgtttcatcaccgtattattacaatgagatagatttgtataaccctaaaatctacgactagtctatacttagagacccaacaacaaggtggagattttctcggattcctaaatcctcatctcctcttttaattcaaaagcaagcacaaaagagctcaaagctatcccaccatcatttgtttaagtgaatgtttttcctcaatcactttttagacaatgttgtagatgattatatcgctaaatctgcacttattgcagcaaactgtgcttccatcaatggagtgtaactctctttatctaattcaagtcaagcgacccaacgtttctatgaccatacgtacatatatgacaaaaactttattacggtacatggcaattatatcaaatgaatagaacatgcaattgggaccatataggagtaataaggctgtccaaaaaaaggaagaaataatgtagtaacaaacaaaaaaaccgagcatttaattctatgatttaacataaatgaattattaaaaaaggaa

SEQ ID NO: 41748 - DNA, 419 bp, Arabidopsis lyrata
  Intron number 2 from transcript 491360 (locus 491360) deri ved from phytozome v7.0 (chr-ID scaffold_7; pos 3310741 to 3311159)
aacactttcttcccaggaaaacttccaaggaaaacgtaagtctgattctgtcattaagaattagggttttgattttcgggtgctctttattagttcatcagaatcgattatcgttatgggattccgttcaaattagggttttgatttgctggttaattcttcagaatcgataccttctcacaaattaggatttcgatttgtgggtttttgttctttttgcattaacatctgtttgtcccataataataatattccccttgatttggatactagaattgttgattctgttggttttgtcataagaaaaatcatgtaattgattggttgtttcttgcataaattggatttgtgatattgaatgaattgtactgattgcttttgcttatcagctggacaggttcataccaaacaggtcagcc

SEQ ID NO: 41749 - DNA, 933 bp, Arabidopsis lyrata
  Intron number 2 from transcript 913843 (locus 913843) deri ved from phytozome v7.0 (chr-ID scaffold_1; pos 24446704 t o 24447636 reverse strand)
ggactttactcaatccatccattacttcaagtaagacctcgcttctgtaatcgtgattctatatccgctcgctgttaaacatttttgtcttttgtcttttcttatagtgttatcctagtgtgatcacttagattgagctagaaaatggaatctgctttatttactttacttactcttgttgtgttgttaagatctctccttgttacccatgtgtggatgtgttcaaccttgctacgaattgttgcctgatacaaacctgcttgttatcaaaaccctggtctctgatgttaacgttctgctttgttttatcccatatcaacctgatccaaacttttttcatagataatttgtcatttatatcatcaccaatttcaaactttgatctggaggttttaagagtggttccagggatccctacatttttcatttatggtcagcattaggtcgatcttatggatatggaacttactgcagcaattatctgagtctttagatgtttatgtttgttatgatagtgttaccggaatttcaccttatgtttctgatttttttcttcgcaaattctttatcaattcatgttgctatttcttgaatttcttttgttttttgttgcatatgattacatcaggctcagatggagaaataacttatatagaacttgtttgtttcaagcactttttggccaattgcaagacttcagatgtgtttgtatttgcatatgcgtatgcattgatactgttgcatgtaaatagctagaccttaacacacagaaatatatgaatatacatttggcttgctgctttacatgatttgcacgaaaagactccacctgtgagaacactgcaagttgtttgctacagacatatgatgtgctccttgtgttgatgtatatttgcagggaagcatctgctgcagaaaattgcagagttggta

SEQ ID NO: 41750 - DNA, 289 bp, Arabidopsis lyrata
  Intron number 2 from transcript 919580 (locus 919580) deri ved from phytozome v7.0 (chr-ID scaffold_1; pos 3145791 to 3146079)
ttgaagaggtgattaatcttaccatttcctttgataatatgataaaaattccgccttttgaaaagagattacattgtttttggaaatgggtcatttttatgctccgtttcttgtataatggtttttgttctcatttcacatggtggctctattagtttgatagtacttttctcttttgaatatagatgcgtgaatttttcgggaattggtcattaactttttagtcttcatttcttgcattatgaaatatttgcttatttgatttggtatttttttgcaggctgagaaa

SEQ ID NO: 41751 - DNA, 312 bp, Arabidopsis lyrata
  Intron number 3 from transcript 482806 (locus 482806) deri ved from phytozome v7.0 (chr-ID scaffold_4; pos 18379102 t o 18379413 reverse strand)
tcccgttatcaagacccctgtttcgttacccattcgtaagtctccttccatctttcctgatccttcaaaattttgtattgacacctttagttatttgatcagctttcattgaaagtatcaaacttttatttgagtcttgattcttagtggtactttcggtgattgttttctctagcttttgttttttgatcttcgaaatgtcaaagtttcatcatttcctatgatcttccaaatgtgaaagtttcatcatttctgatatcttcttggcgtttcacagctcaagctattggttatccgagtgcatctggagca

SEQ ID NO: 41752 - DNA, 254 bp, Arabidopsis lyrata
  Intron number 2 from transcript 483607 (locus 483607) deri ved from phytozome v7.0 (chr-ID scaffold_4; pos 21819723 t o 21819976 reverse strand)
gtttatttggtctcaggttcttaaatatagaaacagttaaaaaaaaaagaagaagacaagaaacaattctttacttgttttagttctttacaaatttatacgatgttgaaattgagataacttattctacaacaaaactcatttttagtaaccaaataatttcggactattgtcccataatcttcttaggtatggcataactatttacttaggttttgaattctttttatggcgatttgaaacagagttcaagt

SEQ ID NO: 41753 - DNA, 572 bp, Arabidopsis lyrata
  Intron number 2 from transcript 488152 (locus 488152) deri ved from phytozome v7.0 (chr-ID scaffold_6; pos 5389160 to 5389731 reverse strand)
attgaagcaaaaaaagaactggaagacaaggcaaggtaattttgattaaacgttgtctttgtctttcagattgtagtatactttattagtttgttgtttgaggcaatctggttttccagagttttaggattgtaaaaactagcctatacaagttttgaattaagtttgttattcacagtggtatctctatggactatatatgtggaattttgtaaccttaaaccaacatattcatttctaagactttattttgctagtgagcaagttgacatgcaccaaagggtaatatatttcttgaattttctagaggtgaaggaattatatagctctgtttttgttcatggacatattatttgcggattctcggttgtgaaaaaatgttattagatgtaaaatttgtgattgtttgtcaacctctttatttccttatgtaaattaaatactgtgtgggtagtgaatggaagaaaaacggatcaatttgtgcgtttatctgatctggaaaagtttttattggctagtgttattagtctcatctttttaactctttttccctactaaattaagactgcagc

SEQ ID NO: 41754 - DNA, 554 bp, Arabidopsis lyrata
  Intron number 1 from transcript 329873 (locus 329873) deri ved from phytozome v7.0 (chr-ID scaffold_7; pos 12140593 t o 12141146 reverse strand)
gaagccatctttgcagacaatagtagaggtagataacttttgatagtttgtttcgctgtataatcttgctgtggcttgaagctgaagtagcaggagggagagaagttttgataacaacgcagtctagtagttgtaaattttgtgttcagaagatgttgtgactgctaatatgtaaagttacagttcttgtaatgggtttgtttttggaaacctattactaaagaatgtcaaagttattctgatggttaagtgtttttgtttaaaatcttaatgttaatcaatcacttatgtggtaatgaaaatttggagttttataatgcgattaaagaagagaaagatgatgcctttccattggatatgaagaaaaggaagaaactttgcaaagcgatgcgatcccccttattcccttctttattctcttacacaaagtctttgtctggtaatcatcacgaggaaaagagacaaaacccattttccggacaaaagcatcatcttagaatgacgattatgtcccttcacattctctaaacttaggggtattcaagtcagtaacc

SEQ ID NO: 41755 - DNA, 849 bp, Arabidopsis lyrata
  Intron number 2 from transcript 326529 (locus 326529) deri ved from phytozome v7.0 (chr-ID scaffold_6; pos 9252723 to 9253571)
ttacactactttcacaaaattgccagaagcagtagaatattaagacgttttaaaaatagttcaaattaggctttctacttttttccataatcttcttgttttattttctgttattatattaagaccttttttcttccacacaattgtgtaaactatattattcctttataagcgcctttaagaaaagagaaagagatcagaactccactttcaaatgctcgatttataagtttcgataaatagtgagaactcaattatatttaaaaaaaaaaaaagcaaaaaaaaaaaaactgtaaaaaacataaattatcgctttttaataaaattaaaaagtactgttgagtgttgacatcatatgtgattcctaactagttccgatatcagtgttaaaactaaaattaaagtagttccgatttcctttaacagtatttgttatctaatagtactaatttatactttccctagaattccgatagatatcccttaattagatttgctttcgaagcaaaatattaaaaaaaaacttttaatttatttatcatgtagttctatataagtagaagttatttttccatcaggaagtgttaaaacttccataatgtcaaattctcaatgtacctcttgtggccgcatgcaccaaagtggccaatgtcacatacaaaattcaaccacccctttcagccagcccatcgatgttactccagcttgctgctgcaattgttacctttacaccatttgtttctccatcgttattatactcttttctatagggctttcgatgattccgtctttaagaggttattgttacgtggagctttttgccaattccatctccgtctcaaacgcgaa

SEQ ID NO: 41756 - DNA, 578 bp, Arabidopsis lyrata
  Intron number 1 from transcript 887682 (locus 887682) deri ved from phytozome v7.0 (chr-ID scaffold_298; pos 9518 to 10095 reverse strand)
aagctgtaattagtgattacttgcatttatctccattcttttcttggtaaattataatctaatatctatactttatacaggaacttgatgaccctctcccagttcctgatatagttaaaaatatcattggaaagacttaccagttcgtagtctgtgttgagcaagacaacatctcaagaggaaatgatgaatacaaagtgaatgaggttttaacaagtcagaacctcaatcaagctgaccttaaagctgaagttgattatcctgtggatctttcatccatgagttccagtgaccaggtaatacattttaatattttcagtgtgatttatatgatatgatgatctttattgttccttactcgcctaaataaaaattcattttgttttaggttttgatgctgactaatagttctgataaggatgagactattaatacttcactgtctacaccatcatcaaagagaaaagaagatggttcggatggatatgatcaaaactccacaagcaagaaacaatgcactggaaaacaatctgatgctaaagacaatggtgtcattggtgtagacaattcgaagaaaa

SEQ ID NO: 41757 - DNA, 894 bp, Arabidopsis lyrata
  Intron number 2 from transcript 495292 (locus 495292) deri ved from phytozome v7.0 (chr-ID scaffold_8; pos 15012520 t o 15013413 reverse strand)
ggagaaaggataaggtgattatcagtttaaacccaatttcttaatttgatttcttttgtccttagtctctctcttgattatcttctgcatgttttggttcttgttattgtagtaatctttattgaagtaccaaattctttgattctgtctctctgtctctctctttcagtctcagtttctgattgtatgatattgtaatgctggaaaaaggtgaaatcttttgtgtcgttacagtgaatttctcttgcatgcaatgcttagcttttagggaaagatagacactagattaaaagagaagaggtctacttaaataattttagatcaaggtgtgttagtgtcagaaaatggtctttacaggactttttgttttgttatggatgatgtagtttgatcaaacctttgttatgaggctacattttgaaattccattgattttacttggtattactgtggctttgaaagctcttattacttgtgtggagatgttaattttaaagtctcagtttgcctcttaggaagtgtatgcttactctgctgagatggttagagtaatagatcttgtgaaaatgagtttggtttgttaagtaaccatcttcgagagaaaactgtaacattcgtaagctgtaaaacttctgacctttcgtgtatgcaatgggaaagttttgagatgaatcacattcatattgtcaagggtctggtatcagcttgttcatggaaagttcataagcacggaatatcttagagttttgtggtgtttatatgtttggaaacaatgtttattttgttctttgtgatccctcagattttgacatttatacgtctctttaaaagaaagactctttatgtttaagtgatacaggttatagttgagaaatctgcagctcaaggcttacc

SEQ ID NO: 41758 - DNA, 529 bp, Arabidopsis lyrata
  Intron number 2 from transcript 486829 (locus 486829) deri ved from phytozome v7.0 (chr-ID scaffold_5; pos 21120201 t o 21120729 reverse strand)
cctcctcacttctcctcacctcattcacaccgtaagtaaatcctttccccatcctttttctgttgtcagtgaaatctctgagcagcaaggcttttgtgtgtaaataaaccctagatttttaggtttactttgattgatttgagtaaatgccatgggtacccaaaagttggatgaagtaaagcattctcatttccattaatggtttgttgctccagggacgtttgaacacttttgctattaagcagctatataagattactgattcaactgccattgataatatttaaacttttcgttgtctttagtcttcatattgcttcatagtgtggtaaaatctcattttctatttccaaatttcgtttgcattttgagtcaggaaggtagctttattgaagctcaaaactttataaaacaggattacgatttggttttgctattttacatgatggattgttgtacctttatttagctgcttgtatttcctgatggagcaggtgcatctcgattaccttgaagctggtgctgatat

SEQ ID NO: 41759 - DNA, 859 bp, Arabidopsis lyrata
  Intron number 1 from transcript 337983 (locus 337983) deri ved from phytozome v7.0 (chr-ID scaffold_2; pos 552854 to 553712 reverse strand)
ggagagagtgattcgcacagtagctagctgttcaggtaatttttacatcaacatgcaatttttcttagatttttttacttgttcatgagtttttactgaaaggacaaagtttttattatgatacatacactctgttttttttttcctgtttgatgagtttttattgaaaagacaaagcttttcattacacaaactctctggttttgagattcgttgtgggttttgtcgttttgaattgaaaccctaaaaaaatgattctggttctgttcatgaatttttagtaaaaagccaaaagctttcgatcttaacattcactctgctttttggattattttagggtttgaattaaaacctcaaaacttgaaatggatttatgtattattcatgagtttgtagctttttcattactcacattctatgttcttgaaattcttgaaaccttcaaaaatgaattttttgttctgttgagtttttattgaaaaggcaaagcttttgattacacacacacatatagtctgtttatgggattctttatgggttatgatatgatcccttaaaaaatgattttgatttttgtctcgttcatgatttttttaattgaaaaaccaaagcttttaaaatcacacattcttgggattctttaggtatttgagtttgagtgtgagtttaaatttaagttttgtcttgttaatgagcttttgctgcaaagctttgaataataatacgtcttgtttttggttttctttatggatcttgatttgaaatttcaaaagaacgaaccaccttaaaaagatcttcctaagtctcaaggcctaaatctttacatttttttttttttccaggaattacaactattaca

SEQ ID NO: 41760 - DNA, 419 bp, Arabidopsis lyrata
  Intron number 4 from transcript 472327 (locus 472327) deri ved from phytozome v7.0 (chr-ID scaffold_1; pos 8961007 to 8961425 reverse strand)
aagtggtaattatccaaaaccatatcatttttagttcgcagtttatacgtcttggttatttaagttggcttgtatgagtatcacctacatttttattgtttgaattgtggatgacatgtgaactgtataaggtataactattgaatcggtaagctaattgatgataagggtatctataaccatgtggctttcagggaagatttatgactttttagtgaataattaagcaggtgtgttaaagaatgtttggttgttgggaaactgatttattttactgttgttagctatatttgggagtatatattcaatgttttcttaatcttctgctgaaattgaatgtcttatggtctttaagattcctttgtttttttcatggtaatgtaggtcaccacaaataagctgtggcggcaagttggaga

SEQ ID NO: 41761 - DNA, 674 bp, Arabidopsis lyrata
  Intron number 1 from transcript 911486 (locus 911486) deri ved from phytozome v7.0 (chr-ID scaffold_1; pos 7040262 to 7040935)
tctcgtaagtttctcaaatttcctcctaaaatttgccgatctattgtgacaaattgtgaaatttattgtttggctgtttgatctgtttaaaattcaaactgagtgagcttttgttgtgtttagtttcatataatcgtgtgaattgttgttgtgatgctacttgctagtttccacgtgttcacgaggcatgaaaaggttttattttgtttgatttgcttttggtttcaacataaggaacctcaagctcttgtttctgtgaatattatcccacttttgatcgggaagtgctgtgttttgactctctctttctcatcattctattactttcattctcttctgtaatcaaccataaaagtgttattgacgtgatgttatactgtttgaaagatctcttgcattcttataggtcacattatttataaagctcaatcttttgtttctttgaatgtaacagattttgatcttcataaccatgagctttggggaaactgttttgtttttttactgtgtatttctcataattctatcattttcatcaaccttataaatataattgattttgatgattcactgtttgaaagactcttgcagtctttataaggccacatgatttaacaaagtattaaattttttgggaagggtacctgtggatccattagagtggcaaatatcac

SEQ ID NO: 41762 - DNA, 407 bp, Arabidopsis lyrata
  Intron number 1 from transcript 897524 (locus 897524) deri ved from phytozome v7.0 (chr-ID scaffold_5; pos 12890927 t o 12891333 reverse strand)
atcgccgacgccgtttctaagtctgaccacaaaaggtatcgcttttctagcttctccattgctacatttcctagctctttgggtttctgtttctactgtactacatttgagggatgtttttttgaaattgcggtttctcacttctctgctctcgatttgctgagcaaaatgccgtctttttagatcactagttgagcatctagtgatcattgataatgatttgatctttagcttagttactggaacaaaattgaagagggtcgtgtaaagtgaaaatatgttgtaaatcagatggtttgtcaaggatgcaatttgtttcaatggacggagattttgtttgatttatggatggaattgaaatattcttagtactgaggaagttaatgtggttggttttatgaacaggg

SEQ ID NO: 41763 - DNA, 355 bp, Arabidopsis lyrata
  Intron number 1 from transcript 491586 (locus 491586) deri ved from phytozome v7.0 (chr-ID scaffold_7; pos 4317911 to 4318265)
tttagttcatctttggaagattctcttccgattaagtacgtttctttattaattatcttctaaataatcaaattattctttatttacacctgaatatattcgatttaaacctcaacaaaaaaaaaaaaaaaaaaaaaactattaaacctttttttattacatgaataaagtaaatcactagattctctatgttcttgtgtttgattttattgtttgatgaacctgtaagatgttgaaattgtttctcagtttaaatgttattacatgttgagtgttggtttagtcattgtggttaggttttgtttttttttttgttacaggagaggattatcaaaccattacatagggaaatcga

SEQ ID NO: 41764 - DNA, 564 bp, Arabidopsis lyrata
  Intron number 1 from transcript 899823 (locus 899823) deri ved from phytozome v7.0 (chr-ID scaffold_4; pos 3010352 to 3010915 reverse strand)
ggataaaagtggaagaatatattggtctcgcagaggttatttatctacttggtttaagtttaaaactataaaccaaattagctcttagacaatttttataattcttgccaatcaacaagcaatagtaattagtaaatttaatattttagtttcaaattatgatcctcgatcagatataacaaacaactcgcaagtagaacgggttgatgacacaataatactagacgttatatgatattaaaatttaataataagattagtattcttttggtaaaggcacgataagattagttagaccatcattaacggcagttgcttaatgttttcttaaggaaatcttagctattaaatgattataataaatctcaaacaagcttttgagctaagatcgtttcttaggtaagacacaaggaaatagttaagagccatacacgtgtctgtgtttcagagaaaataaattttctctcttctctctctcttctctctctttctctcttctctatctcaatctttcgcgatttcaaagaaggaaaagaaactgaagtcgatttcaagcaaatcgga

SEQ ID NO: 41765 - DNA, 521 bp, Arabidopsis lyrata
  Intron number 1 from transcript 477973 (locus 477973) deri ved from phytozome v7.0 (chr-ID scaffold_3; pos 2774617 to 2775137 reverse strand)
tctactctccacctaacattgctcagtgaccacaggttcgtcttcctatttctctaacttttcattggaggatcccgagtctcagatccgtgtttctttcgattccgatccggttaatctcaaacaaaacttgtcgattcggtctgggttttagggcctagaaagggatagtgatgagtcgatagtgatatgatttcgtttctacaaaagactgagatcttttaagtaatatagaattctgtaatgcagtggttgagatttacagtagtgggtccctggtttcgatcccaaatcgttctcttttaatccggaatcactggaataaataatagcttcttctttgatttggttctcgatcatggtttgattcaactttatagttttgttagcatgaaaagggaaaaactttttgtttcaggttttgctttttcatgttggattcgaatgtaataatatattttattcacgacttcaaaatttcacctttttctgattctcagttttcttttcgagccaataac

SEQ ID NO: 41766 - DNA, 437 bp, Arabidopsis lyrata
  Intron number 2 from transcript 353917 (locus 353917) deri ved from phytozome v7.0 (chr-ID scaffold_7; pos 5555498 to 5555934 reverse strand)
gctttcacccaaacgtatgtatatgccacattcaaagttgtgtacatatatgcatgtgtagttttatatataccgtatctagtactatcatttatatgctttcacaaactaatgatatatacacatcacatgtttgttcttaaatgcacatctttttagatttagaagaaatttaaatcagattcttaaattagctttagaataagtttgaaatatctcatcttaattattcgcaagatcttcagttatattcgtattgattatcatgttatctacctacgaaagataaaggaatttttaacaaattttataccgttcaattactagtttccatggaataataagatctatataattaaactcggtggaaatagttaataatactaatcagttttctcaataattattgtttcattttttattttgtgatctcacag

SEQ ID NO: 41767 - DNA, 326 bp, Arabidopsis lyrata
  Intron number 2 from transcript 944713 (locus 944713) deri ved from phytozome v7.0 (chr-ID scaffold_7; pos 3818209 to 3818534 reverse strand)
agatccctgcaggtaacgaatcaaacccattttactcaaatctttaaattctcagtattcttatttcctaattatggaaggtacgtgatttgtgattttcggattagtattgtttagaagattccgtatgaatttagacatgttttgaaactttcacgtatctttatcaattacatcactaattaagaaaccacgtcaacggaattatctagatattctaaataaaaaaatatatcttgaacgttttctcccctaaagcaagttgtcattaactataatatagtttgaactaaccatgacgtttatttatcaaacattaggtgagc

SEQ ID NO: 41768 - DNA, 325 bp, Arabidopsis lyrata
  Intron number 3 from transcript 488195 (locus 488195) deri ved from phytozome v7.0 (chr-ID scaffold_6; pos 5543630 to 5543954)
gcttaccttcgtttggattatcgtcctctccacttgtaataccttctttgcttctcaaaacagtttctattgtgtcaattttctttaagattcggctactgttgtttttttactattcggcattttcaactagtttgaagagattccggaaaacgattggctaaattgggtttgctgctaattgtcttggataaaaattggctagtttttaggaagctttcttgtgttgaaagcaatgattcgttttgcaattcctcatgcgttcttattttgatatcatgtgtttgcagctctgccaatttcctcactctatcccttcctctac

SEQ ID NO: 41769 - DNA, 794 bp, Arabidopsis lyrata
  Intron number 1 from transcript 489994 (locus 489994) deri ved from phytozome v7.0 (chr-ID scaffold_6; pos 21525422 t o 21526215)
ctgtcaacggcaacaacagcctgtgtaacagaaaggttagttagttaaaagctcgttttcaatctttattacaactgtcacaggtgttgaaagcatttggttttgtcttttcgtaaattaaaattttttaaaaatttgaagagatattgaaacttgtcggggaaagtgtgcgagtcacgtgaggtgtgggatttagattttgatggttacgattcttctacgtagcttctaatgcgtattatacggcacatgatcccgcgaaagattttttttttgttccatggtacttgacgacgtaccaagttattttactcacgatttcaattatcgtacacattttaaatagaattttaaatatattttagttagattagatacgcatatcttcacacatttatacgtagtagtacttttaacattataattaagagttaattttatattatcacccatgttcatggaatttttataaagtaatgaaatccttgatgattttattcttggatttgtataagaaatattttcaaataacaaagtaattaacactacataatctcaatcaaaacaaaagtgaagatacgatcattaattagataggggcagagacagatagatagataaatgatgttgtcatggagttggctgacttttgtcaacttattaatgtcactattatttctcatatcattattttttgtttttgttgtgaccccttttagtttagttattctttgtggtgtattgtgtgattacataagaaacagatttgatattattatttgcaatttttagga

SEQ ID NO: 41770 - DNA, 345 bp, Arabidopsis lyrata
  Intron number 2 from transcript 484870 (locus 484870) deri ved from phytozome v7.0 (chr-ID scaffold_5; pos 11207364 t o 11207708)
ttgtgctgagaatatcaaagatattatcggagctggtaagtttttgtgttttgaatgattagattgtgttactgtgaatgtctaagtagcaattatgatttgggaagattctgcatttgctttgttttagcaatgattagtggatctagaggtaaagatttgttagtgcttatcaaagtattgtgatgtttaatagtaagagtttctgatcaagagaatataattttgttcatgtatatatgagtctttgttttgtcatatatgatttatggggtttgttgtgttctgttgtgttgtgagatatgaattcaatgggtgttgtgttttgttttgtagttggtgctg

SEQ ID NO: 41771 - DNA, 522 bp, Arabidopsis lyrata
  Intron number 1 from transcript 473173 (locus 473173) deri ved from phytozome v7.0 (chr-ID scaffold_1; pos 13096713 t o 13097234 reverse strand)
gttggggacaaacagtctctcgactctaaaatcaggttctttcttcttcttcttcctcctcatgtgttgtgtgtttctaattagttgagctactgattgatgcttttctggtttttactggtactgaatcaatcaaagttggaaagttttaattttggagttttctgttaattgctcaccccaaatggtgttgtatgaatttatgggtttgatgttgattagtgtaaattagcttaggtggagaatttaggcttttaccgtcttcttcaaagctaattgtatattcgtgagctaattagaaaagaatttcagaatctttgttgtatatattctcaaggctatgactaaattttgatttatagatatatgattaggtttcagatttgaggaaaatgcaagaaataatctgcttcaagctatatgcctaatataaataactaacctaaggctgatcatagcatattaataaggctgaaaaatctcattttgctcagaacatttttaggtggcaaaacaaaatca

SEQ ID NO: 41772 - DNA, 469 bp, Arabidopsis lyrata
  Intron number 2 from transcript 487713 (locus 487713) deri ved from phytozome v7.0 (chr-ID scaffold_6; pos 3625532 to 3626000 reverse strand)
tgcttgcggtggagctcacactctgtttctcaccggtgatttcttcatcccccgacttgctttatgatttttatttgatgattattaataaactttgaaatcttaagaagttgcaatgtgatttggtgtgtggtaataaaagtagagggagaagaattgtgttgactattgagctgagaaatccggagaattggcatctcaatgacttgctgagatttgagtcattttggtatacaccatttgtagctatgatcttgatcgttctagctgcaaatatcagaagtattagagtggtcttcgttggatagcattttcttggctttgtttaattgggcatgttgttgttgagttcggtttttgtaaagttttcatctttgaatcaatgattggttttgaagaatttcagcagtatctgattgtcagcttacacatgtgacagaaacgaggagagtctttgcaacgggtctta

SEQ ID NO: 41773 - DNA, 436 bp, Arabidopsis lyrata
  Intron number 4 from transcript 470601 (locus 470601) deri ved from phytozome v7.0 (chr-ID scaffold_1; pos 2120782 to 2121217)
attccgccattatcgcctcccatcgctctcaggtggcttccacttcttcttacttgtcacttgttttgtgtttcttgcttttgcagatggcgaatattggaagctgtttttttttttgttttttgtttgtttgattaggttaatatgtctctttgttgattacttcttttggttgttaaagtttggaacttgttcccgttttgagcttactttcgtctagtctttagtaggttagttttcccattctgttccggctttgatgggatatgctgctgagctttaacaagtttttttggttagacttttgctttattcatgcaatgtctagtctcatagttctctacctgtttattggttttatttcatatctgctcttattttactttgaccatattgacacagtgttgttgtaatgatgtatgcttccagataaatt

SEQ ID NO: 41774 - DNA, 410 bp, Arabidopsis lyrata
  Intron number 1 from transcript 924996 (locus 924996) deri ved from phytozome v7.0 (chr-ID scaffold_2; pos 3045018 to 3045427)
acactgaggtacaggctcaaatgatttatcatccattacaaaattcaatctggtggttcttgactaatcaagaattttaatctcgctttcgtgagaattgtctttaaaaataaccataatgtgaattacagttgagaaggtaacacgagacagaacaagaaacagagcacataaaagttttctctctgttctgtaaagtcaaaaactttttcttttttcctctttttatattccccaaaaaaacaaacaaacgagtatagagagaaataacaacaaaattacccgatttaagaggggaccatactctctgttcttttcctccataattatgtttactcttaaactaaacaatgacaagtttaacaaattttgcaggcgtttgaagcagcgtgggcatctgcctgcaaagt

SEQ ID NO: 41775 - DNA, 771 bp, Arabidopsis lyrata
  Intron number 1 from transcript 900027 (locus 900027) deri ved from phytozome v7.0 (chr-ID scaffold_4; pos 4848037 to 4848807)
ccgctgcaaaccgtagacctaaaaatctgcgcctcgtcagcgacggcgtccacaacaaacgcctcaacaccgacagcctctttctccgcagcaggatcctcctctgtctccacagcaggatcctcctccgtctccacatcagaactctgaggctcagagtcacgcgtttggttgttcctctcaaggtaacaacttccaaaacgaattgccggatctccaggaggatacgcttgaggctctgactgctctgcttatggtgccggaccgtcatctgtttacaaccgttctctctccaacaccgttgccagacccgacgtggtatgactcttggtcccttctatagtggttttttctgattgctttgtgtgttttaggatagaagaagtctgattgttttcaaaatgttttgtgtgtttgactgtttgcttgttcttattgttttgtgtggcttaggatagaagtctgattgtgtgtctgtcttaggatagattgtttttaagaagtctgattctttttaagaagaagtctgattctttgtttgattgttttaaaaagaagtctgattggttgaatgttaaaaagaagtctgattgtgtgatgtcgtatcagtcttcatgctgtgtttgagatgttatcacatatgttgcaggtttgattgggacgagaaatcaagactggtaaggaggattaccaaagtttttacaaacaattatgtgtataattgcttaaatgtagttttgtttaatcacttaggacttgttcaagaggcac

SEQ ID NO: 41776 - DNA, 296 bp, Arabidopsis lyrata
  Intron number 5 from transcript 479647 (locus 479647) deri ved from phytozome v7.0 (chr-ID scaffold_3; pos 9424793 to 9425088 reverse strand)
aggatcttcctgaggaggaacaagccgctaatctggtgactttttcctctgaatttaagagcgtttgtatgtttcatttggtttggtagttggtgataagttgtatggtgcttggacccgaatcagggcaccttaatgagagtccaagggaaaaagaaaagcatagttttcttctagcaattgtgaaaactggtggcctgttttaagcttttagaaattttggtttcatatgtattaacgaatattacaaattggtttcagggttacagtgctggcctagtcaatcttggaaacac

SEQ ID NO: 41777 - DNA, 400 bp, Arabidopsis lyrata
  Intron number 2 from transcript 311694 (locus 311694) deri ved from phytozome v7.0 (chr-ID scaffold_1; pos 2216168 to 2216567 reverse strand)
tacactctcttggggaagggtaaggaaattttgcttcctgatgcactgttttttttttttttttataataatcttgttatcttcattactttgagatcttttattgatgttgtctaacgatacaaagacttggtgtgtttctagcttgactgtgtattacagtctgacattaatgtagctataattttctttgttcttttaacttttctttctttggcattgactacatgatgttaacactctcggcttgtcttgagacttgatattgaatctccttgcaggaacatcacctgttaattcgttttgatgattgaattttacttaatgatgctaacatcttcattcatatctctctattattataggactgtaggacaagtggcaatctctggacaacatc

SEQ ID NO: 41778 - DNA, 889 bp, Arabidopsis lyrata
  Intron number 3 from transcript 908011 (locus 908011) deri ved from phytozome v7.0 (chr-ID scaffold_2; pos 9986767 to 9987655)
gacaaggtaagtatatttctatagattacagtaaaacttctataaattaataatgtttttttttttttggtaagtgaacgggaaacaaatgtctcccgttatttattaaaacttaaaaaaaactaaaccacatgacccttcttgggcgaactatcccaccattatcatctctccataaggagtctataaattaataatgttgggactagcaaattttattaatttagagaggtattaatttatcgataaattaataattattaatctatagaaagattttactaattttataattttttaataacatttctatctaaaaataatttttttctttataagtaatatcttttaaaaactaattacaagtagagaagcaattattaagtttaaaaaaacaacacaaacttttttcgaataatagagtcatattttattaaattttttacatagaatattttaaatatatatcatagtaattcaaatatgacatatataaatttatatcatatatatattgataagtttatacaattattaatttatgatatcgatgtgaccatatgtttatatgagattttcaaaaaaaatattatcttattaatttatcgatttatgtcatattttacactggtcccaactcgggaccggaagaatttattaatttagagaggttattaatttatagagtattaatttatagaggttttactgtatatttagtctatgctctgttcctctttgcagcgtgatttaaatcataaattattggttttttcagcatatgtggccaatcatgcattttcttaggagaaggtccatgcaaaccccatctccttatctgagtgataggatttaacatttattgatccgtggtttgtgaaaaagtggt

SEQ ID NO: 41779 - DNA, 570 bp, Arabidopsis lyrata
  Intron number 3 from transcript 325952 (locus 325952) deri ved from phytozome v7.0 (chr-ID scaffold_6; pos 6048800 to 6049369)
cctctttctagatgtaagttcatcttcatatctatcttgaaatggacttgaatcaataatttatttttatgggacattcaagcaattcccactcctatatatatatgacccaccaaaaatgttgaatcatgtatgaacaattatgctttgcttcaagatggggattcatttttggttcgctttttttttctctagttcagttaaaaagtgagttcttcatttcagattccaaagtttctttctttgacaagcaaagccttttatagattaaaacttttgcactttagtccacaacacgactcattagcttttatccatattctgttttgttctctgtcattcacgtttattctttttgttgtttcttgttcgtcaagttaccaaacttctcttagattaaagcagcaacttttgcttttaggtagattctaagattcagataagacagattcagattctgggttttgttcctcgcattcttacttacagttcttcaaaactgatctcacaagtcacaataaaagtaaggatttgttaattaatttgggttttgaatgtattgatttgaag

SEQ ID NO: 41780 - DNA, 730 bp, Arabidopsis lyrata
  Intron number 1 from transcript 476668 (locus 476668) deri ved from phytozome v7.0 (chr-ID scaffold_2; pos 16617276 t o 16618005 reverse strand)
tctaactcaagaggcgtcaacgactttgacacgaggtatataactaaatatctatatactgctcacgattttgatagtcattctagtgatttggagaaattctctcaaagagttcttcttaattatatatatttctttgcttttaacgtgcttttatgactagttcgcgcaaaatagcatatattaattatgaactttaaattggattatggattttattgtttctttatgtctatttttcttttgcgattgcatatcaataatgtgttagaaattttctacaaatatagtttacttacatactatgttttttttgcttaagtataaatgtaaatgtaaattattttatatgaaataatcaaattctatatataaaagcatgaaacatacaccgattaatacactaaaggggaaaattcacatgaaatctaatcctttcatgtacttcatcacatgcacattgtctttaacagttttgaggcacgaaacattataccatgataagataaattggttaattctacttctgtccatggtcggtggttgacattagtgttatttatattacaagttgtttatggcaaaactcgagtttaggaaacctttaattaacgatatcttcaagttgttaattaattaaacatttatgtggttggaatctaatcaacatgcttgaattattgattaaacatgccttcatttatgctgtattaatcatttgtacaggaaa

SEQ ID NO: 41781 - DNA, 505 bp, Arabidopsis lyrata
  Intron number 2 from transcript 471080 (locus 471080) deri ved from phytozome v7.0 (chr-ID scaffold_1; pos 3724266 to 3724770 reverse strand)
gggatcttcttttatcatcacctggccaacaccacgtaactcttcttcttttgttctcttagcttgtgttttttcctctgcataagcttttttaatttttattactgtgtctgattatgggacccgcatgaacctcagataatctggggttttttttttttttgttcttggaagaatttgggtttatgattaaaaaaaaaacttaaaaagatataacaaaataaaaataactaaaaagtatccgaatcttaagcttgagacgaacaagtttactcaaaagtttgttttgtttcctgcaaagttgattttgtcaatatcatcttctgttataacttgtaaaatctgattttttttttgttcttttgacacatgtggcccttgttcaatgatgattcaaatttattatattgttaagtataatcttagtgattttaactaaaaatgaaagctactcctaacattaattcaaaatgtaatgttgcaggtactagtaacattagagaac

SEQ ID NO: 41782 - DNA, 527 bp, Arabidopsis lyrata
  Intron number 1 from transcript 899595 (locus 899595) deri ved from phytozome v7.0 (chr-ID scaffold_4; pos 1368761 to 1369287)
cgacgcaccaaccaagtcctccttcttctccttcttttaatttagtattattttataaaaatcgcaattatctgcccttgaaaccattttggcttcaattggatttgaggatttcaagaaatggtattgtagcttttacacattttaacactatttggaattttttttatatgataaagtttaggatttcatgtctctttgattttacaaaaaaacagagattttatatcgacctgttacaagaaccatttcaggttttcaagaaacgatatttataaaaacattttaagcatttaaaaaagatttttagttttcaaaaaaatataaatatctttaaaaaaatattattaatatattttcaaagaaaaactgatatcagaacttaccttgtatagcaatctaacttaagattgatttatagctttctcagattatggagatcattttattttccctcccaatttatttgaatatttctccatatatatgtaggaaaaattaaggattgcagttcttgtgtcaaaagc

SEQ ID NO: 41783 - DNA, 705 bp, Arabidopsis lyrata
  Intron number 1 from transcript 922840 (locus 922840) deri ved from phytozome v7.0 (chr-ID scaffold_1; pos 21897169 t o 21897873 reverse strand)
cgtcgtcgtcgactaatcgcttcgctccactcacggtgagttctctgtttcgatttgatgctataacatcttgtgattttgagacaaattcaatttttgttcatgttttagtttcttaagattaatttcatggccagtagcaaaaattgtgtgattattcagtgtttatatctaaagatagaatcagttatttacataatgtaacactgagattgattctcactgaaacaagaatatacaacattagagtgtgattcttgaaaattagtgttaagaagaagagtgcttgaagaagattcaaacatattctatgtaagctacagaagaatcattattcgtaattgcgaaacgagcattgagaatttgagattgatttccactggaacaaggagtagattgttctctacttctccctgtagacacatatcagctgatactactaacataaaaatttaacagagtttaggttgtgaatgataaactcggtcttttgatgaaagtcttgacatatctgtttagtggattgttctgatgttatgttagtttacttttggtacaagtatagaaaactcgtttatatgtttgtctgaagcgttttcatattggctcacttagtttcaaacgtatttagagctcgagaccaactttgtgatgtaatgatttgatgcaggttagagcaaagaagcaaactttcaactcttttga

SEQ ID NO: 41784 - DNA, 669 bp, Arabidopsis lyrata
  Intron number 6 from transcript 491347 (locus 491347) deri ved from phytozome v7.0 (chr-ID scaffold_7; pos 3269082 to 3269750)
tcaactctcggccgacttaagaaactccgtttcttgtatgcacccatattcaactctcttcttttaatacgtttttaataagcagcctaattattgccttcagtttcctttatcgtgtttgtcttccttaaaaagctattcgtacaacgtgttacatttgtaggagtcagaaagtagtgtggccaaatagatgcaacgttattttactaaatgaaaaggttttctcttggagactaggatgttgtattatatgttctattttaattatgagctttcataaaaggaatcagaactttatccttgtgttctcttattttcactggagcaacacaatgttctgaattcacagtcttctgccttaggctttaagcgctaaaccctattgttgctgattaatttgtaagtgctctgtaaatccagagagtgaacgcatctaatgtagtaagtcgctaattaggataatatactttatttttcaatcagcttcatatctgttgaatgagattttagaacaacccctagtcttacaaagtctttaaaagtttgtatttttgatttactttcgtcactataaactcattactggtcatgttttcacttattcgtgacatggtctttttctattggtggttaggcgtcttaataacaatagcttatctggagaaattc

SEQ ID NO: 41785 - DNA, 244 bp, Arabidopsis lyrata
  Intron number 1 from transcript 951560 (locus 951560) deri ved from phytozome v7.0 (chr-ID scaffold_8; pos 22613970 t o 22614213 reverse strand)
ggcttcttgttgccttcgctacttctggcaggttggtttctttctctatcttctttactttcactcatttactccttaacattgtacctactccacgttttcttatatagttgttcagtagatgttaaggtttatgatgtacgaagaacaagctgctttaactgattaaggagttggttttgttctagagatatgtttatgccatcaagtaagtaattttgaatgtggtagggatcttcgaaag

SEQ ID NO: 41786 - DNA, 617 bp, Arabidopsis lyrata
  Intron number 2 from transcript 479055 (locus 479055) deri ved from phytozome v7.0 (chr-ID scaffold_3; pos 6721641 to 6722257)
ctggtctcaccattgccagtctcgccatccctcaggttacattttgataaagatcactctctttttttttctctgggtttttttgatcaaagcgaaagttttatggaacatttcgaattgttttgtccgaagttcgttttcttttattatttacatttgctaatgttttttcaaatttatatttttttttaatacagagagtttataatttgctctatcatgagacaatttttagcgtgatatgtggatacttttttttttagttttaatctagagtagaagaatggtaatacaatttgtttttttaatgttgaaagaattataaaaggcgttattgaagaggtttcgtcgtttaattgttgagtagtgtggtgtggggatgactagttggacttggagaagttaaagcaaaaaataaatacactttttgaatttgtttgggattatcaatggcattcaatgttttcaataaatgatgaaaaatatttttaattctcgataatttcatagtgggttcacttggaatgatccacagaaaaatggttcttgtaaatgtttatatcttacaaatttgtttttgttaatggtgaaacttattaatttgcagggaatcagct

SEQ ID NO: 41787 - DNA, 344 bp, Arabidopsis lyrata
  Intron number 1 from transcript 484116 (locus 484116) deri ved from phytozome v7.0 (chr-ID scaffold_5; pos 567615 to 567958)
tcagaagaggaaaagaagacctgcaggtacaccaggtaataataaatccccactacagaaaaattaattttcaaaatctttttttcttgtttttattttctaatgaaaattttcagctcatgggtattattgggtttctcttaaaccccattagaaatacaagttttttataggtttgattttaaagtttaaggttttttttattcttctttttaccaatttcaaagtttataggtattaatgggtttcccttgtttgctcttaaaccccatttaaattctcaacttttaataattaagacatgtgttttgatgggttttgccttatctgctcttcagatccag

SEQ ID NO: 41788 - DNA, 670 bp, Arabidopsis lyrata
  Intron number 2 from transcript 484116 (locus 484116) deri ved from phytozome v7.0 (chr-ID scaffold_5; pos 568321 to 568990)
ggacattcttgtgactgtggtcgtgtcttctccaggtataatttcttgttcccctctatcatttgattttttattttttaattatttttggacccattttatcagttaattattggtactatatattaattcttgaaagatatgcacacttttggacgtatttgttaagtatttctaaaatatacaagtaatttggctctgtttgttttgtatatttaggagatcatatagaaagtcaaatatagaaaattattctagcgacccaaaacaaaggttgatagttatagtactatttgatttgactatccttcatgatttttactaattctgtgcattgatgtgtatgcatcagagttttttaaatatttctcttcactatttaaacggtttttgtgacataaaaagaaagttaaatctttcagattaatgacattgaccccaatctataaagaaatgttatatgtttttcggctgttattggacctaaactcatattaataatatatattttgagtgcaaagttaacgacgtttaaacagaaaaaaaaaaactaatataaaatcattaactttgtcacttcataaccctacgtcatatgtaattatataattgataggtttcttttcttcgtttagggtggagagttttattgaacatcaagataactgtt

SEQ ID NO: 41789 - DNA, 608 bp, Arabidopsis lyrata
  Intron number 2 from transcript 473046 (locus 473046) deri ved from phytozome v7.0 (chr-ID scaffold_1; pos 12515719 t o 12516326 reverse strand)
ccaacccatccaaattctccctccgtctacgactggtaactactatttttatgttattttatttcatatagtacatgattataacatagtcttagactcttagtcgatgtcgtagtatagagagaaacaagttatgtgatcgacttaacctttaagatttatgacttatgaaacaaagaaccggattaatctaggaacggttaggttggtttagtccggttattgattttttaacataattatctgaatattttggtatgtgtcagcgttgataacgaagctcaaaggaaggaacatgtggcactgtgtttagtgggcgcttggattaaatgactatttttattctggttttaccaaatcaaccttcctttttgtgcatatatggtataatatcattaactctttaactcataaccaaagttttttttttttttttttttggtttaacataaccaaagtttttagagtgctaatcacatcctttgattttctaaagtattgaagattgctgatcggagggttcagatcagaagttgatagttcactaattgatcgcacgtgtggtgttcgcaggttgtacagtagtgagtcaaggagtcagcaccatt

SEQ ID NO: 41790 - DNA, 280 bp, Arabidopsis lyrata
  Intron number 1 from transcript 478437 (locus 478437) deri ved from phytozome v7.0 (chr-ID scaffold_3; pos 4393792 to 4394071 reverse strand)
cagagattatattacaaacctgtaacaaaaataaaaacaaataaaactgagaatcgtggacacatggttacatgtgagatacttgtctctaaagatcccattcctcttaaccagaatcttttcctctttctctaatcatatcaaaagctcccttaaccatctctatagctgcttatatatatatataagcaaatctgttctcttcactagattacaaaaccagtaaccaaaaaaataaaaaaaaactttgtatttttcttttacttctgtgatctctcta

SEQ ID NO: 41791 - DNA, 852 bp, Arabidopsis lyrata
  Intron number 1 from transcript 318974 (locus 318974) deri ved from phytozome v7.0 (chr-ID scaffold_3; pos 10044218 t o 10045069)
gataacagaattagaggtataacatgcggcctttcattccttattcttgcgtttacatacctgcacagaacaatctggaacagttcatgaatcttgcattggttaatccgcaccttaggattctcttctctcttttccttttttctcccctccattttagagatgtgcttgtaaagtactaaagtaggttatcttagtcaattggatttagacccggagccttagagatgatttccggatacaataatcttaatgatgtggcatatctatgttatccctgactttttgccacaatgatcatctccttgatcttttagaagtaaggtcaaggtccaaatccctctctttgttctgctaacactagatagatgcccaaacaggtatttttaagtaagagtctggaaactaacatgattcaattatcatctgacataccttctcagtaaaagccttcactttacttacaccccttcccatttctctcccatgtttctctgtgattttgtgaatcaaaagttgctattacttagcgtagaataattacaatatcagatctaggcaacaatggtgtaagaagtatctaagcttctttaacagaactttgttgggccaccatcttctccagtcttttctctagggatctcagcttctattttcagaacttgtggtgtgtcatagtaggttccaaaatgttcaatgtggttaggctaatgatgggtgtgcaagtacatgtatctagttattagcctatatcatgtaacaacactcaatgacacattttgtctgccttcattttgatgtctatatataattacagaactaggactcactggtgggaaatcaaagtcactg

SEQ ID NO: 41792 - DNA, 741 bp, Arabidopsis lyrata
  Intron number 1 from transcript 938101 (locus 938101) deri ved from phytozome v7.0 (chr-ID scaffold_5; pos 16003576 t o 16004316)
tcgttggggatctgcagacttccgcagaccttcttgtaagacctacccctaccctcgctaatttagggctttgaattcaccgcttctgtttttggtagagtctttttctgtggatttgttagatatatacttttccttttctgttttatgactctttgagtttttttttttttttttgggttgatttagaggtaaatccttgtttattagattgagttcttactgtgtcatgatagtttagggtattttgggatcattaccacagctctgaagaattttttactcttgaaaggaacaattttttaatactcaggtggttttagtttcatagcgagaggactttgttacctcaattgtgtttgtatcttgtgttcatgaatcttaaaacgggtaaaaggtcctaacatcgtcaagtgttattgttagttttagttttacatgttatagatttagatgagataggtcttacttttacaggtttttcatactagttttgaagccctgtgtggggctaactgcattttttgtctcctataattgatttcttgttatgatgatcctgagatttgactgccttttgcagaatcttgtactacttgttttgccagcagtaaaagtcaaactttgtggagagattccgtttttagtttgacaagttatatatatattttgatgtacataggtcttgctttagtttgtgattctcatcttccttttttcttcaaactttgtctgaaggtc

SEQ ID NO: 41793 - DNA, 592 bp, Arabidopsis lyrata
  Intron number 2 from transcript 928746 (locus 928746) deri ved from phytozome v7.0 (chr-ID scaffold_3; pos 4205083 to 4205674 reverse strand)
ctgttaaagtcttcaaggtaattacttactttccgattttctacatctacatatatgtgaatcacttgcatatattcgtatcattatcttacacttcttagattgaaattagaatgtttcattttttacaactaagaatcttatttactcattatataccttttttttttcttatataatagtagaaaataatagtatgaattaacttttcttgtcatttattgacgcagccatgtgcacacgacttgcgatttgtttgaacttggctagttggcattgtcttcttctttgagaataaaaatctcatattagtaaagaatactattgtattatttcatttttaataacaaacacacatttctctgtcaataaagatctgttactgaagaatccaagtggttcaagtcgctttatggatttttatttttttgctaattgctataatagaacagagccatataaaccaaattctgtttacttttaattttggtttatgacttggtttggttcaactcacttttggcttctaggactttgcataatatgtatatattttctgactttactcttttttttttttttgggtgtagac

SEQ ID NO: 41794 - DNA, 331 bp, Arabidopsis lyrata
  Intron number 7 from transcript 913449 (locus 913449) deri ved from phytozome v7.0 (chr-ID scaffold_1; pos 17596900 t o 17597230 reverse strand)
ccgataaagactacgttttggccgtactttacctggtatattattattgggttcttacttataatattacgcattttattcctatttatactctatatatattgacaaattataatccataaatattgacaaatataatattggaatctcggacacagttgaagtctctatacttgagatatcttttgtccagatatctacaggttggtatatgttgccaattttgatattcgatatgtatgtttcgaagcttaaacaggaaaataaaaagaaaaaaaaaaacttatatcttcgttgatttgtataggaggcaaaatcattggaccctctg

SEQ ID NO: 41795 - DNA, 359 bp, Arabidopsis lyrata
  Intron number 1 from transcript 942977 (locus 942977) deri ved from phytozome v7.0 (chr-ID scaffold_6; pos 21036774 t o 21037132)
aacaggtttgatgctttatttcgattctttttggatactttgtctattcattcacattgtttccttgtggtcattaaactcttcttgaatctgagcatgtccttaaacctttcctcaataaactactctatgtctctctgttgcagttgttaaaaataagttcggcggatctcattgcttacgtatttttcatctcgtcttattgatgcgaaaaaactgctaaagctgaataaagctttcaagatcagattaggaagagggttatatggagggtgcctggtaattgtgttttatttgttgcatcaaaatcctctctgtttcaaaaatcaatgattgagaacttgttctaagcataggga

SEQ ID NO: 41796 - DNA, 308 bp, Arabidopsis lyrata
  Intron number 1 from transcript 317971 (locus 317971) deri ved from phytozome v7.0 (chr-ID scaffold_3; pos 4799474 to 4799781 reverse strand)
actccgccgccgcttgatgtaatctccgattaaccttttattgttagtttgtgtcaatttgatgtcgtgttcgtgggtttctacgcgtattcgaccttaacctgcttcggcttcgttgttctcttcgtttcgctgatccattagggttttgttttcttagatttttttaatttgcttctgtatttttgtgtcgtttttgatgattgcggtttctgttttgatcacggggttgggagattagggtttctaaatagtcacaagtctgatttttcttcttccggttttgacagcagcaggaagacgaggag

SEQ ID NO: 41797 - DNA, 810 bp, Arabidopsis lyrata
  Intron number 2 from transcript 944436 (locus 944436) deri ved from phytozome v7.0 (chr-ID scaffold_7; pos 2694754 to 2695563)
gcgaatagagtgagcctcaaattcgacaggatcaagtatgtttcttcttacttgttctatcatcttcatattactctttgcgtgtataattgtgtatttaggacactaattagttgtaaatctcatgattgtttgataagactgaaacactaaacagtttatcgacattatccatatgattcttcctcatgggacccaaaaaacctttcattttgacttttgagctctttgaacaaagtttaacttgtttagatgacacggttattataaattattagaccgggcatcgcaatggaatgcgttttcgtgtttgtctttttatcttcttagttcattctttttagtaatctgcaaggtcataagcttgttcttgcgacaatgatgctgcttaattgcttagattgttttctcttatctgacaaattgagaaattctttccgttgattctgtgtccgaaactctatttgcataagggtcccatccttaattcctctgctttctcagtcatgtttggctgtttctacacctaatgcatcactaggactaggagtgtttctgtttttctttaatatacaactctcttgccattgaaaacaataagcagccctttcatctgttgcaaattttctgtgaggcttggttttgcttgtatgattgatttgattacactactcttaacagtctaaatccactcacttcctagtagcttactaaactttaaatgcacaactgttgaaagaaatcgattttcacacatgttacttgaataatgcaggtactggttatctgttggagctcaaccaacagact

SEQ ID NO: 41798 - DNA, 524 bp, Arabidopsis lyrata
  Intron number 1 from transcript 947850 (locus 947850) deri ved from phytozome v7.0 (chr-ID scaffold_7; pos 23059237 t o 23059760 reverse strand)
ctcgcggtggaggagagagcgagagtgataaaaaggttagtttttttttttggatttgtgaattgtttttgaagattacccatgatttgttaaatggaaatgattgatgggttgatgttagatttgtcaaaattttagtatttatgaaaaagttgtgatttttggtttgtttatgttgaactaggttttcacaacttttggggattctaaaaatgtaaatctggattatcaaatgagttttttttttttttttttttttattaagtgtgatttgagatctcaatcagtttcatttggtttttatttgctggtgaagctttttgtgtcttcatattgaatttactgaagaacttttagggtttattctgattcaatatagtttctttgtatggatacattgtttgatgtttctttgctgcttctagattctgtttgttgtttgtttgattaggaaacagaacaatgatcttagtctggttcttatgagtatcactttttatgttgttttcaggaagataaagata

SEQ ID NO: 41799 - DNA, 806 bp, Arabidopsis lyrata
  Intron number 1 from transcript 894287 (locus 894287) deri ved from phytozome v7.0 (chr-ID scaffold_6; pos 10325264 t o 10326069 reverse strand)
gtcccgaggtataactttctatattattggtattttttgcttgttccgttattgtttttctataatctgtatagctcattttctcatattcattttgaatttgcggtcaaatgtaataatccattgtttttctatagaacaattatggatatgtttgaactctgattggttatttaatgtatcccttatcttgcatgatatgacaccttttattaaatattgcactactaaagaagtattttaagatctattttatgtttatgtggttttacattgtatatttatttctgtgactgtgttaagagtggagtgtaagctatgattgcatatcaacacaatatctcaaagctggtgttggaagctgaaaagaagtcctaataaagagataaatgcataaaaaaattcaaactgcatttggaagacaatgaccaagaagtttgagttaattgtctacatcaggagaagatcacataagtgtctactcagggaaatcacttgcaggttagtcaagtggataatttcaagtatcagggagtcataaagaagaagaaaagactctagttagggtctggatagtattaatgacgatggtactaagttctggtggagtttcgcatgcttgaaaagcattgcaagatgaggtttgtgccactggtttatatccttttgatgcatgtctatattgttttacaatattttaagtgactctgctgaacaatgtagtctttacagcttgcgctattgttgtctctctattaatagtatacatatgccatgtagctaagtaatagtaggtttttgatacg

SEQ ID NO: 41800 - DNA, 504 bp, Arabidopsis lyrata
  Intron number 1 from transcript 899645 (locus 899645) deri ved from phytozome v7.0 (chr-ID scaffold_4; pos 1778292 to 1778795)
gaatatcttcttctccttctctttcatttttctaggtataattatctagattttggattctcgcgctagaagtttccctttttagaccagtttcttgtttcttgctttgtatcttcagagattttgtcgaaagttagtatcattcaacttaatttgcgtttttgaaacgccattatagaaaacatagccatggacaggaaatgataattcagttcaatgtttggttggtttcagacgaatgtatgcttgattctcctgtactctactctactgtatttagattttcagagagaattccacaaacattgatgttttgaaactcacattgagaaaatactcaatttgattgttttcaatgaaaattttggtgtgtgtttttaaactcacatatagaaactgctcagtcagatctgtttcaatgccaatcttcttaatgtgaactttatcattagagaaagaattgtttctcacttgaattgattttcaggtacgtagcagttggag

SEQ ID NO: 41801 - DNA, 460 bp, Arabidopsis lyrata
  Intron number 2 from transcript 490770 (locus 490770) deri ved from phytozome v7.0 (chr-ID scaffold_7; pos 793753 to 794212)
ctgaggtaattcttcatggatttgtttaattggtcagctttgtttaagctattttgcaattatatgagaatgaagaatctcgctttaatcggtttgttttgttttgtggttcgatgagacaccgacgagaaacgattcgcgaatctttgattctgctgtttcttatgtaatcaggatcaactttagtggcttcttaaacagatttttttttttttttttgtctttgttgggattctaattacgcgtgtgaatcattttgattatttttcttcttgatccaaaagtgtgagaatctaacttgcattaatttcaatggttacaacttcaactttttatatttttttcttcgcgttagatttgttattacatttgttacatttttggttgttctaattttcataaccttggagttttttggtattatttcaggtgttttgtacacttgttgtcaagaagaaac

SEQ ID NO: 41802 - DNA, 465 bp, Arabidopsis lyrata
  Intron number 7 from transcript 475990 (locus 475990) deri ved from phytozome v7.0 (chr-ID scaffold_2; pos 13261945 t o 13262409 reverse strand)
acaagactcaggttttgttcctttgtcttcttcaataatcttctcttctgtcataaccaaaaaataagataaaaagattctgtcatttttttctttcatttctgttttgtttcttctacacttggagttttgttttgtcccttttgtgtttttttttttataaatttctcattgatatgtcaccttggaattcgatcaatattgtttgctcagattatgtctgtttcaataagagcttgtctgttttttttggtttaatgggacacaccatgaatgattggtttattgaatttacaagtttcatgtaaagtttcttcctttttatagttatgatatgaaaaatttcactggcccatggcttaaaaaaattgtagttgcttgtaaagtttcttgctttttattgatataatatggcccatgactttatttttgatgtatattgattgctttgtgttatatagttaa

SEQ ID NO: 41803 - DNA, 723 bp, Arabidopsis lyrata
  Intron number 1 from transcript 924719 (locus 924719) deri ved from phytozome v7.0 (chr-ID scaffold_2; pos 1501800 to 1502522)
ggaatccatactctttggcttttaagataaaattttttttgtcgtttatgagtaaaataagatttttgaagcatatgtgacaaatccagaatacgttaaacatttgagccggataattggtaagttttcccaccaaaaaacctcagcttcaatcaaataagttattagatatgattgagttattaatagactcaaccaattttcttttcacaagtttctttatacatatattattatattatattatatcacatgttctatatatacacactatatacatacacgcacatgcacattactttcacctaggccattcctctttcaaaaaaatcgacgacccaaaaaggaaagcacaaaacaaaaagggatgaaaatcttatctcaaacccaaatcctttttctctctatagctattcttctcttcatcacatcgtcatcatcatcattatcaccatcatcatcatcaccttcattatcaccatcaccatcatcgccaccaccatcatcattatcaccatcatcaccgccaccaccatcgtcatcaccactatcatcattatcaccttcatcaccagcaccatcatcattatcaccatcatcaccaccaccaccatcgtcatccccactatcatcattatcaccttcatcaccaccaccatcatcattatcaccatcatcatcaacatattcaaatcaaaccagcttagattacatcaaaacatc

SEQ ID NO: 41804 - DNA, 644 bp, Arabidopsis lyrata
  Intron number 1 from transcript 924583 (locus 924583) deri ved from phytozome v7.0 (chr-ID scaffold_2; pos 716271 to 716914)
agaacaacaaacttcttaagcggcggctgcgagtaaaggaaaagattatcatgtgtgttgtgattcttaactcatcgtttagattcaacatataactgaaaaaccagatgaacttggatcgaaaaattacaactcttttgattggtgttattcaaccttaagactagcgttagtttgacatccaagatttcaaacctaagaactaattaaaaaactaatctcctcgtattttctctccgatgtaagagtaaacagaactctttcaaagaaaataaagcttttgaatttttacctgcttgaacggctaaccctagcgaactcctctcccttagggagccggacgaaacattggctttggcccctcaattttaaagagctaatatgcatagatcattaattaggccccaaaactgtaaatcaacaaaaaattatatggatcatcggctcccaaaatcgttggtccaacgaaactcagggccagccctatcctcttctatagtatttatattcgttagataagaggatcatctagcttaggcttgtttgatctggaaacttccgaatcttcattctgaattctatgatatcttcaatattttctaccttaatttgaatatatgtatacatatgtgcatttttcaggt

SEQ ID NO: 41805 - DNA, 526 bp, Arabidopsis lyrata
  Intron number 2 from transcript 910727 (locus 910727) deri ved from phytozome v7.0 (chr-ID scaffold_1; pos 3878199 to 3878724)
tctctggggcagaacggtaacattaccctccaattagatacaacatgtgtcccttcttattcattgtcaacactcaaatttacaagaaaaatgtaagaaaacaaaatgagggaaaagaggaagtaaaaaaaaaaaaaaaagaagaagctaaaattgtactatattgttagataaatattgtgtgacggaagctcttattgtggtggttgcacaatgcacctcaagcctgtgctccttcatggttaacttaaacccttcaaccttcaatggggtaaacaaatcttgtaaaaaaagtgtattatgttattagttttttttttttttttttgataaagttcagtaaaaatattacttgcatttctttcttttttccatctaaggttattttattagagtatgtgtttgcaatttattattgtattgtatatatgtatgtataaatatttatgtatatgttaaaaaatataagaaattatattattttgaaattcaaatgcaaattgtttttccttggggtgcagagagg

SEQ ID NO: 41806 - DNA, 880 bp, Arabidopsis lyrata
  Intron number 2 from transcript 493762 (locus 493762) deri ved from phytozome v7.0 (chr-ID scaffold_7; pos 20845907 t o 20846786 reverse strand)
ttgcggagataaacagccattacaaagcacgagaggtaaatgtccgatcaagaaaatgatcaaaatacatttgaaatttcaatactaagcacttaagcatcactaaactataaatcttaaattataaactctaactcctaaaactttaaccttagtgttatatttttatgatttaagaaattcaacattcattctaatttagaatgttcactttaaaaatatgtgtaatttaaagtctagtactttgagctgtagtaaataatagtatatagtttgtgtaagttggtttgaagatggattacttaagaacagcctcttaattactgagcatgctatgatgttgatgttgatgttgaagttgaatgagtatataaacgaacacttgatcaaccactgcttttaatttatgtttacaagtataaacatttgtaaattgtttgttttttttccttttcgtttcaatagagatttaacattttattattctttaggggcattactttttttttttaattaaaaacatgcattttatcggatttgaatataaatggtcaatgaaactattacgtataccaataaactacatggaagtaatattcattaagacattgatacatttactcaactcaattgcctttataaatttggaatcacacgtatgatgaattatcactagtatatatgatcaaacatcaaatccacatttaatgtatttgagtttcgttgtttcaaacagtacttttataattttttctatgagtatttttgtgaaatgcacacgcaactaaagtagatctctgttaaacagaaaaaaaaaagtagatctctatgtttgtatttgatattttgtgaaatgttgtttcaaataatatgcagaagc

SEQ ID NO: 41807 - DNA, 408 bp, Arabidopsis lyrata
  Intron number 1 from transcript 949340 (locus 949340) deri ved from phytozome v7.0 (chr-ID scaffold_8; pos 12311502 t o 12311909 reverse strand)
attcactcaaggaggacgaaatcgaaacgcttctggtggatccaaaaacctgaaaatcatgaagaattttgaaaccctttgtgattcttttgtttatatttcgggggagattgttactctttatatcagattatttcttctttaatatctctcgttgatcactggtacaatcgtttgttttctgtcaatgtttttgattcagttcataggtttaagcttctatcatgggctgagattctgcgttttttttttacttcagatggatcatagaattactgcttgctcgccaatggagcgatatttgataaggttctctatgttttacttaatgtactttctgaatttggctcatctttgtttttcgagtaacggtaacatgtgtcttaggagcaacacgaagaagtgttc

SEQ ID NO: 41808 - DNA, 724 bp, Arabidopsis lyrata
  Intron number 5 from transcript 343086 (locus 343086) deri ved from phytozome v7.0 (chr-ID scaffold_3; pos 19400649 t o 19401372 reverse strand)
actgactcgcaagctgcatattcaggtgagcaaatatatgatggagctggacactttgattgttgtgtttcttttattgatcttatttcttaatctacttgtatgtttgtgttgttggagtaacataagtttgttctcttttgattcttaatactcataatgtttgtgatgtttctatttagactctatgcgtttgcttaagattttactttgtttttttggaggattgagttttgagatactgagcatgtcaatctgatagtaaaaggcaatgtttattctctctcgttttcaacatgaaacgtagcctgctttcttcccgtttccacagctctgtaaagttgtaaattaggacatgtcgaaattagttcgggtatttctcgggttttaaattcaatacccgaatatacccaaacccgaataaaaccgaaccgaacccgacccgaaattatatatatacccatttggttcctcttaagcaagacccgaaaatacccaaacccgaattaccctacccgaacctgacccgaagacccaaacgcccatgcctatttgtaaccttctctaaggttttaaccaactccggtttactaagcttctgatttcgtctaggttgtcttcaatcctagatccaatctgaacacatgctaaactagaaattcaacatcaataaagaggttttggattttaatgtttattcatttctcagattcaaaaagctcca

SEQ ID NO: 41809 - DNA, 721 bp, Arabidopsis lyrata
  Intron number 2 from transcript 326001 (locus 326001) deri ved from phytozome v7.0 (chr-ID scaffold_6; pos 6300859 to 6301579 reverse strand)
ctcctccattggtaatctcctctgtttctcttcttcatcttaccaacttcggatctccacttttctgttgcctaattataggattctctgttgtggattgtctttttttttcaaggcaagatagaaagttttcatctttagtgttccttgtcacaaacatcttgttagttttgttgaatgcatttgtgatgcttaggattgtacttggattggcttcagtcaacaaagtttgtttgattttggattcttcttgtttaggtccccactaatgattttgtaagatcttggttttcatagagctgtactaccttaattttcacaatctatttctcacttttccctatttatgcattttgttggattgtggagctgaatgacaaattttgtagaattcctattttttgtttgtgtggagtttgaagtaccgacttctctgcattaccagattttaaccaaattgaatgtctcttagggtatattcccctttacatttatctacatactgtttgaggatatctaggttctatacttttatatggtttagtatgttcatttgttgaggttttccatccaagatcggtgttaatttcaattgaatgattagcttctttgtatctccccagtgctcttatgaccctctcattaaagtttcttccccttttcttctttactttcagattgtttagggaggcggataggtccacgtcttcttggtagggta

SEQ ID NO: 41810 - DNA, 905 bp, Arabidopsis lyrata
  Intron number 1 from transcript 921765 (locus 921765) deri ved from phytozome v7.0 (chr-ID scaffold_1; pos 11954975 t o 11955879 reverse strand)
tcgctggtgaacaacacgctctcaagttcagccaggtttttttgccttatctctttccctttgtttagatcacttcgatttttactgttttccctgaaattctgggtgttgatcatctgcgatagggtcttagggtttttatttgtgcgattaggtcactagaaccttgaatggtctggaattgtctcgaaattttaagccttccttgatgcatttagtgatagatccgtaactaggttgataatgtgtgatagggtcttagggtttttattcgtgcttctctgtagattgatatgcctattgtcactaaaatgcttgaacgatctcgaaattttagaccctccttgatgcttatagtgatggatccatgattaggttggagtttccccccaatggttgcgtacatgtaatctcgtgtcatttagattttttcttgtggagcttctatctccttgcacttcgtgaatgtagcattggaaaactgctatttgccatgattctgctaggttttgtcaactatgcttatatgtgatcttgttgtctcaactctatatagtttgtgatgcttgtagggtgtgtatcatctgccgtaagacattattttctctttttagtgttgaacgctctttactagatttgttcgataatatgttcgataatatgtttttggcattgcctcttagttcttcatatcaaggtactagttgtattcttgttatcatgtttgtgtgaacatcaaacttgtggaatgtatgcatcgagcaaagtgggatgaattcatgtcaacttgacctacttgtaataagctacatatgcatctctcgtgttgtgaatcacgcactggatccaagcgtttgctgtttgaattttgcctgattcctgaaatacttgtattttgtgtccag

SEQ ID NO: 41811 - DNA, 314 bp, Arabidopsis lyrata
  Intron number 2 from transcript 920894 (locus 920894) deri ved from phytozome v7.0 (chr-ID scaffold_1; pos 8257795 to 8258108 reverse strand)
gagacagagcacttcaaatcgctcttcctccatctgtaattcttttttgtattttttttcttctaaaaaattatttattcagtcatttaatttataagtgtctttttttctgataaaatttcgtttgaatttgtttatgacagcgtttcttggtggcccagatttccgagatggtttgtattactttttttttattcgatgtgccattcccaccaacttaattttcgtatcttgatttaacttcactaatttttgtaaataacatacctaaaatgcttgtcttctcttatttgtggtcacagatcttcgtagct

SEQ ID NO: 41812 - DNA, 989 bp, Arabidopsis lyrata
  Intron number 1 from transcript 493831 (locus 493831) deri ved from phytozome v7.0 (chr-ID scaffold_7; pos 21435895 t o 21436883 reverse strand)
ctcatcccaggtacttttacccaccatatgcttgtatagttgtattacttagtgtgtatatacgtgaatctatgacatcatattaaaattgatttccaaatatggatcgaccaaaaactttcatggctacaaaacatttgttagcttaacaaccagcacgtacgatctagtcttgtgtttcacactaaagaatatatacatagtctataaaaaatgtatcttttagttgcaaaattgccataattttttggtttagataggaatagttgtaacgaaatcaacctctctttctaattaagcctaagatctgtcgtattattggaaaatttatgatgtgataattttcgaaaacaaagcatgaactatgattttaaaaaatgataatcctatattatctttttttttatatatatatgtataatttgattatcctagatatagttaatatgcaattatataattttacaaaaatgtataaacctgatatagggattctcttaatgtgctaccaaatccgagtatgaattgtttggaaagggatgattgactctatgtgaatccatcaatattcttgtcaagaaaatgatcttaattagttcaagaaaaactatgtatcagtataaaaaatatagtttcttatgggcttacgtctcatatatatgaaggcttcatcgaaatgaaaaaagtgatttgtggaggaaccaaagtctagatcatgtaaatccgaaacctcttcattttataagttatttactcttttagcataaaataatatatagtttcataaaaaaaaaaataataaataaataaaaatatagtttcatgacatttcgtaagagttattcatgaagatgaaaatcagtcttatacatagacacccaaaacttccgacttatttttcatatgaattaagattttaaaaaagaagaaaaaagaatagatcaaactattaattaatcttgtttcacaaaatgcaggagctattacag

SEQ ID NO: 41813 - DNA, 547 bp, Arabidopsis lyrata
  Intron number 1 from transcript 934855 (locus 934855) deri ved from phytozome v7.0 (chr-ID scaffold_4; pos 19779430 t o 19779976)
ccggatagttcgttgttctgtcgagggtacttatttctaactcccaatttttgattccttacgatgaagtttttggtgagttaatatctgggtacgtataaagtttcgaattttccacaaaatttctctttttttagcaaataggaagcgaattgggtcttttttgtagcacttgaattgattgttttggttaatctgttatgctgttgatagatggtttcaatggtaatctgaagtaactttcagattctcttactacagtaatctctctggtagaaacttttaggatttgcgagtttgttctgcataaggtgtgatacagtgatgttccttgtttcaactatatgatcttctcatgctacttcgaagtaaagtttattgcttgattcaagaattggaatgtttctctgggattgtcattggttttccctatattaagtctgatcatggaatgtgcaaaaactaatgagtcttaatttttatgcttaatgggattcaaattctttgtttaggaaccactgtaaccgagcgaaaagtctcggcaatc

SEQ ID NO: 41814 - DNA, 842 bp, Arabidopsis lyrata
  Intron number 1 from transcript 334438 (locus 334438) deri ved from phytozome v7.0 (chr-ID scaffold_1; pos 4593589 to 4594430)
ttcattctggctcctatcgcctatattttggaaaggtttgatttttagatgaagtagttgagttctttatatttttaaataaagacttgacaacaattttctcatattaaattttgaaaaaaaaaaaggcgaaaattttcaagattttgatgatatcacttatcaacatttattataaaaataacgtacgtcttgaggccaatacaatcgaagattgtgagaattctctactttaacatcataacatgtaaaataaataaacactagtatttgttactaaaatatgaagtttactgacattttttcccataaaatttacgtctaactgttaacatgaaaatctattactaataaaaaaaactaattgaggcctctcaagatgtccacatcagctttttaaactattatcttataagttgccacgtcaccattctcatctcttaaaaatcatgtcatgtcatctaaaagatttgattttaggttttcacgtttctttgtggatgcagcgattaactttcccttacctcttcgacatcttcgtagaggtaggattaattaactttgttatgtatacaatgttatagctagacgtctaatttttataaactttgataatgatgcggaaactattaaaacgtggctcagctcgtttaatcaaatcatttgagtttaaaataatattatgttttttttttcccttttaagtcgatttaaacttctattttctccttctttcttttttcctttttgataataaaattaaattattctatctaaattttgatataaaactatattacttttcaggactgaaaaaataaaaagtctaaagacccaagcag

SEQ ID NO: 41815 - DNA, 766 bp, Arabidopsis lyrata
  Intron number 3 from transcript 489679 (locus 489679) deri ved from phytozome v7.0 (chr-ID scaffold_6; pos 14514257 t o 14515022)
cggctgcagctgcatcgagccggggcaagattgaggttagaaaagctacctttttggtttgaatttctgtgtttggctttgtattgttagaatataagatcttatcagctgttttggaactaggaagatagactgtgtaggagtaggatctctgtctcgagttaaaatgtggtttgattgaacctttgcgatccacaaataaagctcgtttcttttttgagtttgtttttggctcggaattgttagaatcttaggtctaatcagttgtttggaactaagaaaatggattgtggatgactggaagctctgtttttagttgaaatgcagtttgattgaactaagaaaatgctttttgttttggatcggtatcatatcgttagaatctaagatcttcaaatctatgtctcaagataaaacgtagtttgactgaatctttgagatacgaaaataaagcttgctttttgttcgaatctgttatttagcttggtattgtattgttagaacttagaatcttagatcttatcagctgtttggaagtaagaagatggattgtggatgactaaaatctctagtctcaagttaatatgtggtttgattgattcgctgcaatccatgaataaagcttgctttttgtttgagtttgtgttttggctcggaattgttagaatctatgatattataacctgtttggaactaggaataatgcagacgtacttctcaattatttccagataactgaggtcaaagactttgcgggtcaagaaat

SEQ ID NO: 41816 - DNA, 905 bp, Arabidopsis lyrata
  Intron number 3 from transcript 952380 (locus 952380) deri ved from phytozome v7.0 (chr-ID scaffold_65; pos 40467 to 41371)
ctggtcttggagcactatcacaggacgtaagaccatctccaaccatggggtattaatttagggctcttatgaattatttaatactattgattttgaaaaatgacaggacacagttcttatggggctctttagcttcttaatacagactttggttcttcaataaatagcttattttgatttatttttgatccataaaatttgtagagccccacataagaagccccattgtggatgctcttatgggttatcctatattttactctctttattttatatttttctagaggggtggggaggggctgtcaaaagttattattttacaccaaaaataaaaaattaatcacttcaaatgtcatattttcatatatgaaaaaaaaatcagtttgtgaaaagctagaaatcaagatttatattgattatattatgtatacataatttacaaaaacatgttttgggttcgtttatatttattcgagtttaataattgcaacaatatcaagatattttgctcatctaactacaaattggcaatactaataacatttttttttttgtcaaaaatgttaattttgatttggtcttttctgtttctcatatatgttcgttatagtgatgaattataccacatgttcatgtttttaagttttcaaaacgtgattccactaacttttatcattcaaaatatgtcaatattcatcaaccttttctttttcacaaagtgattccgctatatataattaaatgtgttaaaaatataacaaaggtggttagtctactaaaagtaactttccatcatttataattattttacatctttttaatctagtttcgttcattctgctaacaattattttgttttccactattcagctaacaaacaagtcagtccctatcttttcagctcc

SEQ ID NO: 41817 - DNA, 464 bp, Arabidopsis lyrata
  Intron number 2 from transcript 479131 (locus 479131) deri ved from phytozome v7.0 (chr-ID scaffold_3; pos 7065703 to 7066166)
tgtctcgcagcaaaagaattcggctctgccataaggtaagggttttttcgaattttttaaaaattttctctttgattctgttgaaaattttgttcgcttcctcgtttggtttggtttttctagtggatagcattatggcaagtttctgagacgttgaaactgatagatgagatcaattcatgtatgctttagctctcaaacttgacgtttttatgaggtgtaaatcgatcagtcaacattttttctgtcttattacctatgatctggcgttagattcttttcatcagctacgattgtttgagcttgcgtgatttctagcctattaccctcatctttatagtaagatgttgaatttgcatgaattttttgtgttttagtgagcatcaaagtaggatgtattgttaatgacttggaggtttctttgtatagattcaagtttcatttggaggcgtagaacctgcaag

SEQ ID NO: 41818 - DNA, 606 bp, Arabidopsis lyrata
  Intron number 3 from transcript 922987 (locus 922987) deri ved from phytozome v7.0 (chr-ID scaffold_1; pos 23364283 t o 23364888 reverse strand)
gaagaggttttaaaaacccataaagcaatcgagtgagtgaaattatattaaaaacaaatgattattttttttgtaaatcttagacttgcatgttgattaggaatgttttgatgatcattgttgattctgaaaatcacacaatgaatttgtttaaaggaagagaacaaattcaattaactctcttgctatttgtgaccaaagactcaaaaagaatgatgaattttattgcttagagacaacgctagggtttagctcaagaacaattagggttttttgtgcaaagttgctgatcccttgaatagaggacaaacccccccctatttatacaaaactaagacggtttaaagatatgttaatcttctaaatcttcggagtcttatcttcgagttttcctttttcttgaatgagaactcggtttaggcgatctcccgtcttcggaccgagctcgccaggtgacctcctttctctgaattcgccaggtaactgaattctcagatttattagtaattcgtccggtttatgccggtattgtcggaggtgctaattcctgcaccaacaatcatagtcttgtgttgtgacaacagatcattggataagtcagtttct

SEQ ID NO: 41819 - DNA, 690 bp, Arabidopsis lyrata
  Intron number 2 from transcript 481907 (locus 481907) deri ved from phytozome v7.0 (chr-ID scaffold_4; pos 13890692 t o 13891381 reverse strand)
cttttctgggccatcttcgttctcggccacgactggtaattttttaatcttacgtttaacattttaattttgattttaattttattaatcattgtttatcaaatttttacaaaaaaagaagaagttggtttgtgttactttttgctttttaattgcctcgaattcttaaattactttgaatgcacgttcgatgagtattgtcgctaacttcaatatttgttcttttgaggttactttaaaaaatttaatataaaataaacaaaaacaaaaacaaaacaggaaaagaggatccaagatttctgtttttagatatttttcttcaataacgttcccaccatgatgattagtttagtcgtaagactcgtaacaaaatatcttttatattattattaataattccgcatttcatggatctaccttccatgtttccaaattatttctcctctagatctccggaactttttattagaaattaaatatttaatattacaatgtttttattaactccttttatgtgtgtaccaatgtactttcgagatttatacacgtcatatatagatgttcttaccttcttgagttgtttttaaattgaaacaaacatgggaactcaatattttgtagtaaatgtgatatactactatgaataataattgatgtgaaattgaatgtgtaaataatgatacagtggac

SEQ ID NO: 41820 - DNA, 626 bp, Arabidopsis lyrata
  Intron number 1 from transcript 470606 (locus 470606) deri ved from phytozome v7.0 (chr-ID scaffold_1; pos 2134329 to 2134954)
tcattctctctgttcaccttcttcaatcctcaggtttcttcgtctttatgttatcatctatctcttacgcttgttcaattttgcattctctccgttcatttctcagttgatttgtctcgtcgagttctttggctaatgcaatcggataaacagtcgttttagttgttgattagcaagaatctcttcatcgttctgaacaggaaccgttgatttgattgaggatgatcattttcaccttcagtttctagggtttggtttagaattttctttgtttcgctaggaggtttagtggctttctctttggggtttatctctatgaatgcatgtctattaggagtcggcgtacctagaaagggcgtgtctatgagagaatgttagatgtgttccttctgggattcttttgatttgcgaaatttgtttttcctacaattcttctagtgtttgagtgtttcttctattctacatgtctgattcctgtagattacgttgtttgtggtatttgagatattctctccttttatctgatagaaattgcaactttgttttgttagttttgaaattatttttcatttagtgtgctggttatggtgtggaaatttgatctgtgaatcttggatttgtagttt

SEQ ID NO: 41821 - DNA, 930 bp, Arabidopsis lyrata
  Intron number 1 from transcript 911904 (locus 911904) deri ved from phytozome v7.0 (chr-ID scaffold_1; pos 8844879 to 8845808)
gctgccacctcatcatctcctttgtgttttctcaagtaacgtcttcatttcaattttactcagattaaaagtattttctaagtggttccacatacaaatgacatctccttactcaatcagcactagctagagccactagattcggactaccaaagcaaattaagaccaaagaatagttggatttgagttttaaacttgtgtgctaccagaaaccacttcttttattttcttagtatagtaaaaattaattctaaatggttcccacatagacattagtcctccttactccttactcaataagcaaaaagtggaacaatttgagaaatgttgaaacaatgtgtcttccattgtacttagtatggcacattgagctactagaagccacttttgtggttttacatacatgaatctgtaaaagtgaattggatcacatagacacggcttctggtggttactaaatgaaggagagagtatgatggtgacagaaaaacagcaaaagctatacctaaaatggataaagaatttcttaagcgcgtggggcagttgggagaagaagaagaagaagcaaaggaaaaagtagagcagagagactcatctctcggctataaaaacagagagagggtcacaacacaaatcactactacagaacaacacagagcaagagatcaaatagcaaaaaacttataatattctttcaaaagcaaaaatggggatcgtagcattcaactggacagagggaaacaacaaccaactcacgctgctgatgaacagagacaattgggaaaacaggcaagtttaatattcattctacatttttggttttaattttgtgcatcagacattgttgttgaataccttttttgattctttttttctttctgtgagtgattaatagggtcataagtggggcatcttggagtcgaaacggcc

SEQ ID NO: 41822 - DNA, 256 bp, Arabidopsis lyrata
  Intron number 1 from transcript 476233 (locus 476233) deri ved from phytozome v7.0 (chr-ID scaffold_2; pos 14753225 t o 14753480 reverse strand)
cttcagctactagtttccaagctcgcgagtcctctgtaagcattctctacgattgaaaatggaattgaatttgagaagcttttcgatttcactaaacgaaatgattattctttagattcattattttggaggaagaatttgtttttagtcttttagattggaagctcttgttgttgacatttgtgtagttcacaagcattgtttaacaaacaaatgagaaattatctaaactttgatgtgtaatcttgattgaagg

SEQ ID NO: 41823 - DNA, 872 bp, Arabidopsis lyrata
  Intron number 3 from transcript 494804 (locus 494804) deri ved from phytozome v7.0 (chr-ID scaffold_8; pos 6875958 to 6876829 reverse strand)
tcacagtgacgtcactttctggaaactccaagtagtgtactctttcttcttctcttcttcgttttaggctttttacacaaaactggttttaatattttacgtaacatccgtctgaaaccgatatgttttcttgtcgtgatatatttatcgaagacacaaaacattgacttatgattaattctttattttctacgtgagtttctgaattcaatatactccaaatgttcttggttaaagaaacgaaacagacactaatgttcaatattgccaggcatttttttgtttttttgctaattactgacatagacataaaactaagatagatattttattattttatgtaatcggatctacttatttttaatttgtagttgttgatactgaacagtcagatttataagttatagcatttagactttgcaaaactggtttaatattcaacgattttagataaggtccaacattatttcttaacgtgacacaaagtttgacccaattggttcacggattgaccaaaagatacttaacaaatctgaacttatgtctaatttttgatttgcaacgttagttcttttcttttggtactcagtactcacaaagtcacactattttaaaaaacgaaaaaatattcttggtaaaagaaacaaaacagactccaatgtccaatattgccaggcatttgttttgtctttttgccaattactgacattacttatataaaccaagatagatattttcatatttattatatgaaatctgattttatattttataattttttttgtggtcgttgatactgaacagtcagatttacaaaattttgtcatgtttccgcaggttcctccagcctgctttccgaggattcttggcca

SEQ ID NO: 41824 - DNA, 1023 bp, Arabidopsis lyrata
  Intron number 1 from transcript 906844 (locus 906844) deri ved from phytozome v7.0 (chr-ID scaffold_3; pos 23814375 t o 23815397 reverse strand)
tctaaactcgattcgtggtaaaatttctttctcgaaacttcttcttttgtaatcgatcgttcgaggtcgattaggttagtgttgtgaattccttctgagagttttgttatctttctagttgaattgttcgattttagcaaggattttcaatttccttttaaggatttgatgattcgcagataattgataggctgtgtttgcgaagaggcctctcaatttcagaaagctttaaggtaattttgattagacttccattattgtcttcgttgttctctctctctatcagtttttaagaagttatggcagtaatcaatatttgattactgatttgcgatgaataaaagaatgcaatttgttctgaaagttatggtagcagtcaaatgtatgattagagtttggaaattagaatgattttttaataaattttagatttggttctttgaagaaattggtcttggataatatatggatgaagctcaatcatatttgtatatacaggtttgaacatgttagaaacaagttctcaaactctgcgtcttcttgaactggactttacacaagacaagtcacttgacatttgtgattaaaagggtatttcttctatacgctcagattctttgaccaacgttcaatccctagaagctgttaacactgtaagtctagaagcttaaaggaggaatgagatattatacaatgtatgctccatttagttggaaggagactctggttttataggaaggtgatcgcatagaaaatggtaggaaatgctccatttgttactttctactcttttttttttgttgctctagtgttgttagtattgatctggtatttcatttttaaccttgcggagctgcaagcctgcaagtcaatcacaacaatcattgatctaggtacggatcatgtgtccatgtcttccatattttttgcatccttttatactgtcttaatggcttccatatttttatatccttgtatgctggcttaatgttctgattttcttcttttgcagcctgcctggct

SEQ ID NO: 41825 - DNA, 1029 bp, Arabidopsis lyrata
  Intron number 1 from transcript 950137 (locus 950137) deri ved from phytozome v7.0 (chr-ID scaffold_8; pos 16811722 t o 16812750)
ttcttgaaggttagtatctctgtatctctgctttctgtcttctctttaatcagtttttagatgttcgattgccgggaagaagaacaattgtctgattttgtgaaattcttttgattcagctgtgtagaactctggattgacttttatgtagtggttcttgagaaaagactgttgttctgatggatttcttcagagtgattactgttcatttcaatagcagttgtttcttgggcttctcacacatcaaattggtgtgaatttatcatttagtgcaatgtttaattgtaaatattttttagttctacagagtagtttattagccgaagctagttggtactgttagttcttctttcttgagcaaatggtgcatatctatgtgagtgactgagtgtgtgtgtgcctgcagtttttgcagattcttatttggcttttgtaataacagaaatcaaatttagagcggattatggtttgtatcatctcttgtctcgttgcaacttaaaagtttgttatgttcatcatccttgtgtttttagctgcgcttttgtatttgtccgatagtgttaaatcgtttttgcagattatgttatgcttctatgtgaaatcttgtcaagttttctgattcatatttggttcttttaattacatgaatcaaatttagaagcccttatggcttggatcatctcttgtctctccggaacttagtaattagtttgttcatccttgttttcggctagttttatgtattagccgattgtgttaaatgatttttcaactgtgcttcatatttcaaatagtcttgttgataactcaaaacctggattgcttagaagccacttggttttatgtgtttacattgaacatgaatgcatattaccattctgctaatgaaatgaactcaaattggcacttttaaactgtgttatgtgatccagtcatttcatgtcattgaaggatcaatcacaatttgcgagttgttattgttcaatctttacaggagctgaggttgcggttctgtgcataacgaaatct

SEQ ID NO: 41826 - DNA, 334 bp, Arabidopsis lyrata
  Intron number 1 from transcript 916864 (locus 916864) deri ved from phytozome v7.0 (chr-ID scaffold_8; pos 15071690 t o 15072023 reverse strand)
attgtatgtgtttttcaacaagatattttatgaatatcgtttagattaattcatctttgatttagcaaatgcatccatccaaaagaaaagtgaaaacggtttagaaatgtgttaagagtttttttttttataatctgtttgtgttgaaatagttcagttttgtctagcatttaccatgtatagtagttctagaaagatgtaattttatagtatccttcttctttgtttggttttttgtgctttagtaatataatgctgttttttcagctgtttgatgtaaaatttattatttttctcaggccttaaaccttctgaattatttgggaaacataca

SEQ ID NO: 41827 - DNA, 767 bp, Arabidopsis lyrata
  Intron number 1 from transcript 475583 (locus 475583) deri ved from phytozome v7.0 (chr-ID scaffold_2; pos 8823857 to 8824623)
tttcggtgtattgatcttttttggaaagggagtgtgtgtgagttgttcgtttcaagaataggctggattcacccagtggcactataactaggaaagagtgcataatcccgcgaattacttctgaataaaaaaatcatattttagaaccatagcatttcgttattctttggtaagtccgctttactttgattctctatcaaccaaaaatggggacaattaattaacatggttaaagctaaaccgtttgaagttcagatgcaacatggtactctttctactaaatgtagtctaataaaaaataaaaaaatgaataaaattaaaaaaaagaattgttagacttttttcgatataaaacactcatgtcgataaaaatttttgagtctttttttataatgcagaattgataacctacgtataaagtaataagaattctttggatttcaagaaaaaaagaaacaactttgctgacaattagtaatttttcattggtcagaagaatcctccgaatatttttatcttggattggtgatctttttcgctttttcgatagaaatatatattgaaattgaatatgaattgaataaaaaaactcgggagagggtaggctcattgcatgaaaaagatgggaatggaagtctcataaataattgataaatgattggaataagtgagcatgagagccaaatgaatcgaaagattcatgtttggttcgggaagggatcatagacttttttttaatgaatggaaagataatctactttcattaa

SEQ ID NO: 41828 - DNA, 773 bp, Arabidopsis lyrata
  Intron number 1 from transcript 918729 (locus 918729) deri ved from phytozome v7.0 (chr-ID scaffold_1; pos 24542 to 2 5314)
accgcctcctattcaatataaataccttgctcgtattcaatttcagatcataactaacctttgtttttttgttcttttttttcaaacttttttttgcttctacctaattttaatttttctttttattgtagggtggatgtatggaggggacgatgtgaactggtgtatggaaaatttggacctaattcaatgaataaacaggtgatcttatagtttatatgtacaaagttgatttttttttttttgtatttatggtttcactattttcaccactaatcaatttttataatcaaaaagtttggtttcaacttttgagaaggtaatcatcgatggtttggtatgtttctttttgttgtaaaaagatgaggtacctcccgattttgttgaggtacatgttcttattattttcaaatatgtcttttctcagaagaaacactcaacttttgataacacagttgtcacaaagtcagaaagatgacttatttcagggatgaatcttcagaggaggctaatttttgtcgttaatacaatttaagtattcctctctttagattagggataacaaacttggctgttaaattcaggaattactcttcgttgccaatctctctccccaaactaatatattacatatatggaagtagtaacttaaagtttttggtatcgaggtcattctaaggcactgagattcggactttggtatgtataggattcgttttccatgcactaagatttaattattgtttaatttattggtttttaggtttctttcc

SEQ ID NO: 41829 - DNA, 693 bp, Arabidopsis lyrata
  Intron number 1 from transcript 471010 (locus 471010) deri ved from phytozome v7.0 (chr-ID scaffold_1; pos 3520592 to 3521284 reverse strand)
ctccgcggcagttatcttcgaagagcgcttcggtatctattctctctacatctctatctctatactctaggttccaatggatgcgtttgtttgtgttttgaattgtgatgtttacgtcaatttgagttttaatgggatttttgctacgagtttaagatccattttcgatcatgctacctatgtatcctcgttttcatcagatagatcattttcaaatgtttgatcaggatggttgttgatctatggatttgttgattttgttttgtatggggtttatgaattcgaaattctaattggagatcctggaaatggccgccatcttttcgtgaaaatggttttagcgatgatgaattctgagatgataattaagttatgattccttgcgggttcgacactagtatactagtttcactctaaatcattgtcagttttcttctttgatataacagtaaatttgcggtcttatgtgggagaaattttgttcaatgaagcgttcatgagtttgttaagtccacttttctgacttgcaacaccaaggaatttttactctaaccaatatctggtttgaagaattcgtttatcttgtgtttgattgattacgtattgtagttctggacttgatatatgaacctgtgattcttcttgtctggtgtctgtcttgatttgttatcttcgttatttccatttctaaag

SEQ ID NO: 41830 - DNA, 953 bp, Arabidopsis lyrata
  Intron number 2 from transcript 934404 (locus 934404) deri ved from phytozome v7.0 (chr-ID scaffold_4; pos 17972132 t o 17973084)
atcctggcaactgtactgatactgttagactagacttaaacagtctctcttttaatgatataattttgtaatagactcaaaacatgtagatagtgaatataattttgtaataagctttgggttcaagtgattagttttccttctgtaaccgcatgcaagatgtcgagaaaacctttgttctatcataacatagcgaggattttttattaatgtgtggaggtgtttttatcacatgaacaccaactgagaaaagagcagagtatatataccaaaccactatgtttcgtttcaatgtgatccctttctatcagctttaaggagaggtgttgaaatatcatcatatgccttccagttattctggtgtgatgtcaatatgggcctatgctgagaagataccattctcggatgacgtgctggataagtttcagaaagccaaaatctatttccttcccaaaggtgaattctttttccttaacctatcttaattaacgctcttttttctctttacattacataatctatatctccagcccattacactcaaaaagaaaatatcaaggcccataaagaaaagtcttaagggtaagggacacgtgtacagtcattaagcttgtctacatctatcgccgttgatttttcttgtttaaaaaaaaaacgacatcatcatcatcaatcattcttctcttccttcttcaatctcttcttcttcttcttcttcttctcaaattagcttcctcctcaagcgtgagattcgttgcggatataattctccttgattctctgctttttccatgatccgattctaagggattctcgcggcttcgttttttgtatatcttgctcatttcgtctagatcaaagttttctgagatctctgcgatttctgattcgaaattcgagaattagggtttttttttttacggttatagggtttcgaagagcataagataaga

SEQ ID NO: 41831 - DNA, 656 bp, Arabidopsis lyrata
  Intron number 3 from transcript 493915 (locus 493915) deri ved from phytozome v7.0 (chr-ID scaffold_7; pos 22064436 t o 22065091 reverse strand)
gcgataaagaggtgctctttcttatttctctgtgttatttatgtatattgcttagctgaaagattagtgtggaatctagaaattagttttttttgtttggattctgagattgtctcttctttcagagttttggattctgtcaacttaattttagatttatatcttcatggttacaagtttaccttcaattcctagctaatgaagataaaagttcgttccttttccaagttttaacatgttcttgctttttgtatagattagtgtggaatctagaaatgagtttttttttggattctaagatggttcttggtggcccatatgatcagattgcctcaacttaattctaaagttatcttcatggttacaagtttaccttcaattcttagctaatgaaagtcaaaatgaaaataaaagttcgttccttttcgaatgaatgggtatggatatttcttgtcaatatgagggtgtgtttctggtagtgtgaaaatgtagacggtgttttttgttactgtgaaaggtcgatatcgaattatgtgacagaacatactgtttttttcggtgtgcttctacatttttatcaaacagtaggttgctttagctggtttagtatttgagcaattgcttgagacgttttcttataattttgtctatttcag

SEQ ID NO: 41832 - DNA, 541 bp, Arabidopsis lyrata
  Intron number 1 from transcript 933103 (locus 933103) deri ved from phytozome v7.0 (chr-ID scaffold_4; pos 11183184 t o 11183724)
ccgtcgccaacgtccatccgactcgggtccggcatgtactgtttatgactcttctccttctcgtgatttgtaaatgcttgattttgttttatttgctcgatttcatattagatctgctgttatttttgatgtttagggctgtatagtgttcgattacaaccagtttttaactcgatttctttcttggctctgtttattccatgttagcttcatttctctgtttctctaggttttttggtttgattttaggttagtatattacttcagatgatgtttataattgctttttcgaatttcaaagtgaaaaaggtttgatttgtctttaatttgttctaatctgattgttaaataaagattctaagaaacgagtgtgttagtatagtggctgctcatctaatttgcttaagtttgtgtttgtatattgattctaagaaactactgtgtttgttgtatctcagttattatttgtttaagtatgtgcttgttctttacttctaatttacctttcaataactagtgtttcctttccctaagttaacct

SEQ ID NO: 41833 - DNA, 494 bp, Arabidopsis lyrata
  Intron number 2 from transcript 495229 (locus 495229) deri ved from phytozome v7.0 (chr-ID scaffold_8; pos 14609791 t o 14610284 reverse strand)
ttcgaatttaacaacactcctagttctggtaatgtcttttatccaagatatctctgtgtgtaccatgttctctgtataagaatcaatagatggcttttaatagatctatttgacttgcaaaaaagttggaataaggacaaatgtttttgtcttataaagctagtgaatgttactgtccagtaaactggatttttaaagggaaattcccagaagaagaaggcaatttagggaaaccaattaggattctttggtgagagtgacataagcagtgtgattaagagtatacagtatatatatagatgtgtttcgcactggtcttgttacttaaggatttaacttgaactctttactgttttggttttagcaatttgttcatcctaatatagctcttttttcttgatcagatttcgttttttctatttattgaaaatcctcctgattcatttgatgtttaattaggaggtggaggacctgctgagtttgtcagtccaagt

SEQ ID NO: 41834 - DNA, 504 bp, Arabidopsis lyrata
  Intron number 1 from transcript 951606 (locus 951606) deri ved from phytozome v7.0 (chr-ID scaffold_8; pos 22784270 t o 22784773)
ggtctgcactcgtataccgactaacaacacttcaggtatctcataatttctcttttagccttcttttttggttatcttggaataatttgagttgattagtttcaattgctgaaacggaaaccctattcttgttgatcagcttttttgttctctcttttttcgtttccgagaaagaaaaaaaaaaaagttaatgattttcttcttcttttttattttattttttataatatggaaatactgtgtatgagtaaaactgactcttggattgacaggaagaaactgttctcgccgatcttgatatttgcatttatatcttgtaattaattatcaacttttttttttgttttttttgttaatgctgtagtatacttaattattaacttgactttagaccagaaacaaataaatcatacgtaagaaatgctccaaccttataattaaccatgattaactgttttttcccacctagtgttagaggttgggaactttccgccggaagttcgg

SEQ ID NO: 41835 - DNA, 719 bp, Arabidopsis lyrata
  Intron number 1 from transcript 489810 (locus 489810) deri ved from phytozome v7.0 (chr-ID scaffold_6; pos 19457458 t o 19458176 reverse strand)
gttcctagaactatctccgatcttcgattgcttaagtgagaataaaaacttcttctttttgaattgaaagtgtttagctttgagtagtggtctcttgaatctgaatcctaattcaaaaacccaatttgaaagcttggatcttttggaaaattggtttagagagcagtaaattagcttaaagacatgatttttaaagcagcattctcagttttatgtatatgattagcttgttcttttgttttatagattggaaattgaatttgagttagtgtagaaactgaaagtgtttagcttttagtagtgtctcttgaatttggattctaattcaaaaacccaaattgaaagtttgaatcttttgaagattccgtccgataaaatggtgtatagagcagcaaattagcttaactctcagttttttgtatgtgattagcttgtacttttgttctacagattgaaaattaagtttatgctaatgtagaaactgaaagagttaagcttttagtagtgtcacttgaatttggagcctaattttaaacccccaaattgaaagtttggatctttccatgattctgaaaatttggtttagagagcagcacatgcattagcttcaaagacttgatttgaaagttgctttttcaattgaatgtgacttgcttggactgactatatgatgaattgatacattggtatgaacatatgcagagagaatcttgggtctt

SEQ ID NO: 41836 - DNA, 776 bp, Arabidopsis lyrata
  Intron number 2 from transcript 896926 (locus 896926) deri ved from phytozome v7.0 (chr-ID scaffold_5; pos 5939835 to 5940610 reverse strand)
ggtattcagatttcacaatagaatcaaaaaatttaggagaatgcttttgttgttaattttgtttttggggctaagggtaaaagacccaattgttttgcctccaattgttttgctattgagaatcgagacttttttggtttgggggaaaaacccaattgttttgcctccaattacctgtctccgctataatactgagttatgttcccgcttaatgaaaaatatatcctagcgttaatataatgatgcgaaatagttgccatccgattttggtacttttagtagcagttcgtaaatttgtgctacaacgatctgctaccgaagctcatttttcttgtagtgtgatggaaatcatatggcaaatataagaaaaaatattgttgatatgttatgggcaaatcaaaatacttttcattaaatttaatttgtttttgcttatttgttgtcttcttttttttactcctatgtgttgtatttggatatttatgtttaatattttaaaattatttaatagatgaatatattttacttttatatgattttatttatacataccataatatattataaaattatatagaataaaatcaacaataaactaaaatactttgtattataataataatagtattaaaaataaaattttattttatatatttgtttttaataaagtttataacaatatgtagttcttaataattttcaattattttgtgtactatttattatttaataatttgatctgcacaggttgaaccgctttcaccactcgaattcat

SEQ ID NO: 41837 - DNA, 356 bp, Arabidopsis lyrata
  Intron number 2 from transcript 940515 (locus 940515) deri ved from phytozome v7.0 (chr-ID scaffold_6; pos 4167661 to 4168016)
tggcaaaaaaccgtaccctggtgcaatctcaacatgtacgttatcatttctaacctttgagcatatcgcttttcgggttgttgattccattggggatttggggtacaaaaaccaattctttcactgtttaatatttatgtatgacttgcttcagtgttggctacatttgatatagtcagagatgatttggcaatgaatatttgttcatatcattttactttgagaatttcccatttcttgatagttttctttcagatttcttcggtatcgttgtagttctgcataatgattgatctaacttttgttttattggagttacagtgaaaaatcttgcaacagcgggtgccaaaattgtg

SEQ ID NO: 41838 - DNA, 576 bp, Arabidopsis lyrata
  Intron number 2 from transcript 492318 (locus 492318) deri ved from phytozome v7.0 (chr-ID scaffold_7; pos 7269114 to 7269689)
acttaaagttgcctcctttaataaccaggtaggttctatttctgggtttcttgtttaagtttatgccctgaagatggtccctttgattgacttggttaatgcttcatagtcttgcggattctctgcaattgcaatgtactcaaagttgacatttttcttggaaagttgagttttttaactttataagaagctatcttctatggtcgttgagtgttattgctttacgatccttaaggtcgtccaaattagactctgagacatttcactatcaacgttataagagtatctcatgatccattggatgttcaagatcttgtcatttgtcaatacttggttatcatttgccatttctgtttgatgagttgatattaaacatccagttatgtgagttcagagtatatttactctgttgattcccactgactggatttttagatggctttacttagctttccctttctttcatgttatctctacttttggaacaaaacactctttttagaccattgttttgcagtgtctgaaatggttctattgtgcagggtaactatcaacaagaagaaaaaaagataaaca

SEQ ID NO: 41839 - DNA, 841 bp, Arabidopsis lyrata
  Intron number 1 from transcript 941961 (locus 941961) deri ved from phytozome v7.0 (chr-ID scaffold_6; pos 10476753 t o 10477593)
atctctggccccttccatcttacatctattgattggtaacattttatttactatgcttcttttattgtttttttttttttttcttgtaaccgtgcataaagcaaatgttgacaattaaaggcgtctgtaggaaataaattatggactgtctgtacgttttttttttttcggcaaatcaaatatattgatatcataaaagtttacaaggtacagaatagatacaaaacaaccattgtacgcaaatataggaaattgaaacaatttcgatgaaagagtggagagtaaattaaacctctacctaattttctctgaatttactatatataaactttcgaattccacccagtctattaaattcatcccaaataagcaaatttaattaatctcgtcaattgcaatttaaaatctttaaacggcgtttactgttccgtgattacactaacctgatttaataaattgacccgacaacactagacaacaagcgtgaaaattagaggctaaaaatacagaactatctaggctttccatgaattatagaacgttctttctttctttcttttttggctcaaacacaacttttcaacaaccaaattataaaacttaaagcgttacgaagtttttttttttttatgatagacgatggaaggttttaattaaaactctatgaattcatgtgccgtgaggaggagtttcttagtaaaagttgatctctgaagatccatattgatatcgcctacttatttaaaattaaaataaatatccaatatatatccgaattctaagaataatttgttttttttttataggaacaattcgtaccatcggacctcagtagcatcaa

SEQ ID NO: 41840 - DNA, 821 bp, Arabidopsis lyrata
  Intron number 1 from transcript 919156 (locus 919156) deri ved from phytozome v7.0 (chr-ID scaffold_1; pos 1581272 to 1582092 reverse strand)
aacactacacacgacaagatctcatctctccctaggtttttatctctacaatatctctctgtttttttttatgaaatgttaagatctctgtttctttcaatacagagaagaagattttttattatttgcattagttattcgatagatttttcattctcgagctacattttgctcagattccacaataattttttcaaaaaagaaattcttctttttcacattagtaagtaattcgttatagttttcattctctagctacatttttcctcggattccaaaaaataatttccaaatatataaaatcattaaatttactgttttaatactattcaaccgacaaaattatcaacgagagaaaatagtttttgttttttttcaccttttcgatatctactacaatattcccacccttcttcaaatgaatgatctgagccgttgatattttgttatgatctagatccaacgatctaaaccgtacattccgctttctttcttttttgctgcattcagtcaactttattacgtagatacacttgactctgtttcgtctactttacccattttgaccttcgacaatacgatacgttgaaaatgttatatagggttagttttgtcatttaaattctgtcgatgacagacacttctctttaacggtttctccggttagcgaattttatggagcagtgtagtagtagtgcattctccaataattaaattaaaaacattaattatagtttagtagcatatgtcaatcattaatttcctctagattctcaatttttagatttctaatgattatcctttagatccgacgaaaacga

SEQ ID NO: 41841 - DNA, 266 bp, Arabidopsis lyrata
  Intron number 4 from transcript 486148 (locus 486148) deri ved from phytozome v7.0 (chr-ID scaffold_5; pos 18216719 t o 18216984)
atttgctcaagaaagtcaaggtacttgttttcttcctaatttattcgattccatctttggaaaaatagttttagagaaaccaagaaagttttcatatttttaatcaagaaaataagggaatgtcaatagaagatctctttagaatattcgtgtttatttccttctcctttatgctatttgatgtgtacaatttattgataacatcttttgattaatctggcaattttgcaggaatcatcagcttttagagacataccagtagttat

SEQ ID NO: 41842 - DNA, 341 bp, Arabidopsis lyrata
  Intron number 1 from transcript 471274 (locus 471274) deri ved from phytozome v7.0 (chr-ID scaffold_1; pos 4566925 to 4567265)
tttgaagatcgtcatctttgtatcgaatctgcttggtattggggttttctcttctcttatcattctttaattcaaaaaacattcttttttattttctccagaaattggaattctggggttttatttaccttgatttgtgttgacattgtttgattagctcattgttataagtcaaattaaggtcaaatgtctcagaatatgatagaggaaaacatttggtgcataatgggtctatcatttactgtaattagagtaactgagttctttatcattccttgagtgattataaagcaagagacttttttgtatagtaatgtttttttatcttgtttcagctgtcc

SEQ ID NO: 41843 - DNA, 534 bp, Arabidopsis lyrata
  Intron number 3 from transcript 493578 (locus 493578) deri ved from phytozome v7.0 (chr-ID scaffold_7; pos 17904697 t o 17905230 reverse strand)
ggtttattcatcactgccttgtctctggccttgaggtaacaataccaagaagattttgcatttcggttttactttttgtttctcaagaaccattccgaaaagatataaagtaatcatttggtgacaatggaactatataatggttgtttgtctattgcattgtagattagttatgcatttagaaagtggaatcagtatcaatgtttttttcgttaaacctatctgaacctagtatatttgatgggatctaagattatattcaaatgcaaactatacagtgtacgaatacaaatttgagttttttcatctctgccttgtctctgaccttgaggtaactaaagaaaaggatcttgcttaccgcagaactgatatctaatgttcattttgtgtggcaaattgtgaatttgaaactatataatggttgtttggctattgcaatgtttttgcctttggacctatgtgtttatatttgatgcaagtttcttttcttttatttactgggacaatgctaatctatatgtgttgcctatcagc

SEQ ID NO: 41844 - DNA, 692 bp, Arabidopsis lyrata
  Intron number 3 from transcript 496355 (locus 496355) deri ved from phytozome v7.0 (chr-ID scaffold_8; pos 20212739 t o 20213430)
ctggtgatctgaacaatcaaattcgcagttcaaaggtagtattattagtatacatatgtatgcctagttttgatatagattgaacgtgaaccaattgatatgattctgtaactgtaatgtgtctaggcaagggtcattctgatgattctgtacatatgtattcctagttctactatagatgtgatgcgaataagcaatatgattctgaaattgtaacgtgtcttgtcaagctttactttggtgattgcttatttagtatgcctcattttactagctattgaatgtaaaaccaaaccatgtgatcctgaaagtgtatctgtctagtcaagttttagtttagtgatttcttatatatgtatgcctagttctggtatagagtgaatgcaaaactaataaatatgatgaggaaactgtaatgtgcctagtcaagtttcattctggtggttccttgttaatgtttgccaatttctgctatagattgaacgagaaacactcataaggattgtttagatgctgtcttctctacactttctgtttcaaatttaatcaaatacatcacaagctgtttgaaaaaccatttctaccttcatgtgggttttgaacttgcagttaaatatatattctgtctacctcgagtggatttgttccgcagaagttcatttgcagtatcatgattttgtaggtagaaaatt

SEQ ID NO: 41845 - DNA, 755 bp, Arabidopsis lyrata
  Intron number 2 from transcript 495834 (locus 495834) deri ved from phytozome v7.0 (chr-ID scaffold_8; pos 18055871 t o 18056625 reverse strand)
cctcgccctcctcctagaattaacaaccgctcgaggtaaacaatagctacttgaagctctaatctcgattttaatcatttgaacatttttgaaattccaagtaaattaagatcttagagttattaatattttcatcatttttaatttaatctcactttgcaatttttttttaaaaaatgcatatagtttcaagattttaatattttttggctcaataaatattattcataattaatagtttgttttttgttgaaaatattgtaaaacatttatcaaaaactttttgtgtattttgtctttctcaaaaacaagaggcttcatgcatgggctttagcagcctcatatccacattataggccataagtaaaccccttatatttttctataatttacatatcgagccccatacttacaaaatgaatccaaaattatctcttgattcaccactacattatttttaggcctagatttttttatttttctattgggctttatgtttacttttacatgttacggtgtagttttataaattaatgaagtcacaactactagcattttaaatcagaattatttgttaactataagcgcaaaccaaacgataatgaaaatttcatgtattattgtattttagaaaatgatggtttgtgaatttttctttggtctgaatggttttgtgatttttgtcacagtttttatatcctaacagatttttcttcacaggaccaacatctacgtgaatcctccggttgcaccac

SEQ ID NO: 41846 - DNA, 301 bp, Arabidopsis lyrata
  Intron number 2 from transcript 895021 (locus 895021) deri ved from phytozome v7.0 (chr-ID scaffold_6; pos 19117428 t o 19117728)
ccgtcgaccgccgtcgttctcgccgcagctcgctcgtacacccagttccatcgagaaacccatattcgttgtcttcgttgtctctctggttcttagttttttttttttaatgttcttctccgcagtttagatcttctccattcagtttttagttttctttgtggcaagatttcaactctctttctactctaaatttcatcttttatctatttttggggataaatcatagcttttgattgtttggatggtataagattatgaaattaacttcgttatttatctattattgcagatctggaag

SEQ ID NO: 41847 - DNA, 720 bp, Arabidopsis lyrata
  Intron number 1 from transcript 926773 (locus 926773) deri ved from phytozome v7.0 (chr-ID scaffold_2; pos 16067910 t o 16068629 reverse strand)
ctcaagctcgaccactccctctcttactcctggtggttagtttctctcctctcttttgttctccttttctctcagactcaattgtttggaatcgaaattcttcttattcgttaaatttcgaccgcatcgttattgcgtcctacaagattaagagatttggattcagacttcattcgttgaatttcaaattctgagcttggttttgtcggaaaactctaaactgcgaggttttgctcgtatgtcgcatattcttcttctgtgggaacgaattttatgttggcttccattggtcgaaactcttatcgattctcctttaaatcatgaaattcattaaataggaataaggaattgccgtttttggtatttttggggagaagacattaaaagtacatctttatgctatgagacagggaagcctgctagattgtttcacgtgttcatgtaccaagtactatgttttgtatgaagaaacataggcttttgttttttcgtgaggactgcaatgggagatgatgtcatcttcttgggaatttctttttagggtctcagattctttccgctttctttgtgtctaggttttggaggttttttttgtgtgtttttgcttagttatctatttctttggtgttggtaacattcaatcgtttaatacataacacatgtatatgttccgactgaatcgcgtatgcagggttgtgtgtttaccattgtgggcttttc

SEQ ID NO: 41848 - DNA, 929 bp, Arabidopsis lyrata
  Intron number 1 from transcript 931525 (locus 931525) deri ved from phytozome v7.0 (chr-ID scaffold_3; pos 21581336 t o 21582264 reverse strand)
ggtttattgttgcttcgtaccgaagtaactaacatgcttcttgtttggaacccatgttcgggtcaaaccggttggatccaacttatgtaccatcaaacgaccagcatctttgcccttggataccataaagaattgtgcgatagctacaaaatcttgagtattgaggaatatccaatattgggattttcaaagtttgagataggcctgggcaaaaaacccggacccgatacccgaaccgatacccggaccgaaaaaattgggttggggcgggttagggtattagaaaattacctcattgggtagagtattggattacccatgggtatcgggtcgggtcggggattacccgttacccatttagggtacccacaaagccgaagaaatacacatgtttatatatgtatatagataattagatatatagtcttatatagttatatacttatatatatgtctaggttttaggttttgtgacttttgacgtttgagtttatatatgtatatagataattagatatatagtcttatatagttatatacttatatatatgcaatacacatatatatgtttatatatgtatatagataattagaatctactcttaacacttaagagtgaaatagtcatctttgttattttggattggatttagtatttaaatgtcatgtttgatgttctattttctttatttgatcatttgagtatgtaaagtgattttaaacttcgggtattacccaaaccgacccgaacccgacaatacccgaaccggaccggaaccgaaaccatatgaatacccgaatggaccataaattcattacccattcaacccaaacccgaatgggttttacccgaacccaaacgggttacccatatgcccaggcctagtttgagatctatgagttgaactctaattcatggagggctcttg

SEQ ID NO: 41849 - DNA, 929 bp, Arabidopsis lyrata
  Intron number 2 from transcript 473785 (locus 473785) deri ved from phytozome v7.0 (chr-ID scaffold_1; pos 22318836 t o 22319764 reverse strand)
ggaaaagaaactcaagcttgcgatttgggatacaggtgagagatcaaaactcttgttgtgtgttgttgaatgaaatttatgtgaatgtcacatcttgtggttttaatttagatgtttaggggaatcattgaacaatcgatagtttgaaattgtctttaaaaaaaaaaatggaccacagtatggaatatataatgttttctttgtaatctatttgagtgttgtgtctcagtcattgttggctaatctcatatgtatgacttgtgaacaaatgataagagtcttctatttagaatggtttagatattagtctatcccctttagaatagttgagaggttagtcttgtatttattatagtttatatattaggcaacagtattacttacaattattttaagattagtcttgtatctagaatagtctagagaatagactcttgtacacttgttctattatcaccgatcagtttttgggtgtttctaatcacttagatggtggtctcaatcactgttggctaagttcttatgtgtgattggttaacaaataggagtcttgtatttacaatagtatagagattagtatcttgtgtttagagtatattagagatcagtctatcgctgttagaatagtttagagattggtcttgtatttagaatattttaaaggttagtcttgtacttaaaatagtttatagattaggcaacggtattactaataattattgtaaaattagccttgaatctagaatattttagagattagactcttgtatttagtatagtttgaaatgagtttctagttcgaatagtagtctctctgtatagaatagtctcttgtaaattttcagttgttctgttatcactgattagtgtttcggtggttttctgatcactcagctgggcaagagagatttaggactctaacaagttcg

SEQ ID NO: 41850 - DNA, 1010 bp, Arabidopsis lyrata
  Intron number 2 from transcript 472939 (locus 472939) deri ved from phytozome v7.0 (chr-ID scaffold_1; pos 11977805 t o 11978814 reverse strand)
ctttcttctctgttttgctactcgaggtttctattctcttactcatactttttctcctgagatttgggcttttgatttttagcttaattcttctggtaagttgaaatagatcgttgaatcaatgaaattacttcatggtgaataagtctttagcttttatttttcacaagtctgtgattttaattttactaggcgaattggatttgttgttgtagcatcgataactttgtttcggttagttagatgaatttaatggtggttgggggaccatttgctttcatgggaaaccctagctgaggggaccgtgattgggatcgaaacctaacttgctgtctccttttgttagttcaatctttattgctggagatagctcccttcgtcgctttgcttggtgccgttttctttgacatatactttattcaatgtgtgaatttgtagaacccaatagtaagtaagcttttaggtttaggatgttagctaagaactttctgcaagtacaaacggaggaatgggtagggaagggtttgtaattgtgatggcttttggtttatgacttgtttaagtcgtgttctttaacaagttgttgatttttctgggcaatctgatttgaggagtgtgggaccagttggaataaatgccacttagtttttctgtgatggagagcgcaagagggagctaagaaaagtaataccctttctcttgccctttttgttggtctgggtgaaacatagcaaagtttctcttgctgaggttaatgataaacgggtgggttaaaaaacaacgtccatgagcagtgtgtggtgcttgaaattctcataaggttttcctcctttcttatggttttgtagttaatggtgttgttctctattaggtatctgtttggctggccatactatttttaggcctgtctagtcttctcttatttgattttggctttcatttataattcttacttctgcaaacttatggttgtttcagtttctgttactctggcatttggtgataggtct

SEQ ID NO: 41851 - DNA, 773 bp, Arabidopsis lyrata
  Intron number 2 from transcript 476644 (locus 476644) deri ved from phytozome v7.0 (chr-ID scaffold_2; pos 16537193 t o 16537965 reverse strand)
aaaaagccgtcggactcggtggttggcattggctggtgagcaagatcaacttcggtttcttcttacctggttttgtcttatttgcatctttccccttttctgtatccagaatcatgagctcaataatgcaacaaatttctatgttaccgaatcgattaacgcaacaaaaaaaaaaataaagcaaaatccatatcgatgggattgattgttctaaaattatcataactttattttttatcataacgatctgcactttttgtatttatttttaacttttttttgtttctttttcacaatcagtttcatgagaatccttatctcttttacatctttgtgggttcaagctggcttttagatttgttttacttgtagtcactaattttgattacttaaattaattatatttagggtttttgttctttctttttcagatgggtcattttcatccactgccgaatttttttctcctttggtttgatgttaactttttatagatgttctccgttgcattaggctttctagttttatattatcaatttactttctttgatccttttttgatcatttctctagctatacaataaaaatcagtattttatacgatttcctcataacccaaagcatcatttttttttactaatatcgatatcaagttccaccacttgttgtctccaagccttcccatttctcaaaaagtcccatactttactttgcttatggagtacaatttttaatcttagtccttgtgctttttaattttcaggttttgacta

SEQ ID NO: 41852 - DNA, 667 bp, Arabidopsis lyrata
  Intron number 1 from transcript 331952 (locus 331952) deri ved from phytozome v7.0 (chr-ID scaffold_8; pos 17566105 t o 17566771)
cttaaatcacagagtttctgcaaacgctaaatcaggtttttacctcttcttcttcttcttattctttatttgttttttttttccttgaaattttctgttactgtttatggcaaaaatatttcgcctgaaattccgatatttcctaatgggttttatcctaaaaaacttgcgcaaacttggaaatatctgtcggttaacaccaaaatattcaatggacaattattttactttcttgatttattctgattatgctctgttttttgtttttcttagttttttgggtttcaaatttgttcaaatagaggttttatttggataagctatttcgtttctctatatcctataagtttaagtttggttggactcatttgttgagaattttgacttagtgattctttgttctatagagtctcctttttttggtttcggcttttgttttcttctaatttggtcaaagtcacattttttattatatattctatgttcttagattttagaccccctagagaatatttctaaaaaatcaatcaattccacaacatatttacacatctctctacaatcttcaattcaagttcaaagaatctaaaccaattattaaacattggtttctttgtctgaaacttttgcagagtcaccaaaagaacagagtccaacagtagaagat

SEQ ID NO: 41853 - DNA, 431 bp, Arabidopsis lyrata
  Intron number 1 from transcript 920142 (locus 920142) deri ved from phytozome v7.0 (chr-ID scaffold_1; pos 5307428 to 5307858)
tgttggatatcacttcgtcgataacgaagcttgcggttaagtatcatcataaatcgatttctttcttctaagattctctttgtttagcaattccactgtacataacttattgaattcccggatatctccatctatatatgggtttcttgatcagtgtggagatagatgagtctggcattgtattagagatttagctgtcttatgtttgtattggccaattagttcgagcactttagggtactctgttttgcttcttctaattgttttccattaatcgtttcatgattgtcttacctacagtagaaattatctactatgatttaaattgatccggatttgattcaaagtctgtctgtctgtcttggtagtcaaaaccaaatttttgtttatgtgcagacttcttaaagcgtggttatttcaggggtttaaat

SEQ ID NO: 41854 - DNA, 426 bp, Arabidopsis lyrata
  Intron number 2 from transcript 485369 (locus 485369) deri ved from phytozome v7.0 (chr-ID scaffold_5; pos 14959500 t o 14959925 reverse strand)
taatcaatctctactctctcgttgtttgtttttctcggccaatgcttgtcgaatttgagagatctagttccattgatttggcgttgagagaagagagagatgtgtgaaaatggatgcgaccgaatttgctgaccttttggattatagcaatgtgcactaatacggtcttagattccttatcccgcgaagcaatttttcgtattcagtgctctttcagatgattctagaagcgaatttaaccaaaagctttagctagattttgtttatgcgcacacaaacatggataatgtgggaatttggagtcgtttctgtgttcttgctagtgtttgattaaatgagaagctggacttaatactctcaatgtgaaatttcctttgtttttaggatgttttttcctcgtgaagtaaggctaatcgttgtctgagc

SEQ ID NO: 41855 - DNA, 570 bp, Arabidopsis lyrata
  Intron number 2 from transcript 491189 (locus 491189) deri ved from phytozome v7.0 (chr-ID scaffold_7; pos 2681396 to 2681965)
gcaggttgagagaacaagttgcgagacaacagcaggttaaatttcttgacttttgatttacccatttgcttagatcccgtttctttatctttttctagattttgttttgtcttctattgtgattttgttgattcgttggttttctggtgaatcaatcaataatgtggtgatgatgaaggagctagcttttttctgatcgatggtttttgacttaatgattaattggatctgagtgttattaattccttgattcgatgtgagattgggtaaaatcctttaggattggggaagtttcagtcaaatcaattgtgatgtcttttatgtcaatgggtcatgtagcattgtttggcttagatacttttatatgccaagatcaaaattgatttgagtgaatacgtttcgcttttttgagctgggatttgaaagattttgtagtcatagataaacatcttggtgctacatgtttcaagttaccatgagatcgggtgtttttgttctcgagtttgaggttaattagtagtttttgtggaatgtttaaggctgtgttcaagcaatttggaggaggaggat

SEQ ID NO: 41856 - DNA, 483 bp, Arabidopsis lyrata
  Intron number 2 from transcript 943829 (locus 943829) deri ved from phytozome v7.0 (chr-ID scaffold_7; pos 191791 to 192273 reverse strand)
tatttcatcatcttctgtccgccgccgtatacaaggtgagatattgacccttttgcccctctcttcgaattagtttagcctctgttcaaaatttgagagatgtttcttgtcattttatgagtaggaatctaatctgagccactgttgattattatggactttcatatgatcatcttcaatggttatagagcgtaacacaacagtttagtagattaaaactgaaatttgaatgactttttagcagtttttgatttagttggattgaattcgacatagattggaatgaggagatccatgattgaaaatgtagaccatatatgtaagcatttggtgtgagaaagtgttgattatgggttttgttttaatggttggaaaagattagatagaagagctccattattgaaaatgtacttaggtgtaatgagcttagtaagtgttgattatgggttttgttcagcgagaagcttttaggatcgaggaaag

SEQ ID NO: 41857 - DNA, 444 bp, Arabidopsis lyrata
  Intron number 1 from transcript 888351 (locus 888351) deri ved from phytozome v7.0 (chr-ID scaffold_7; pos 1523028 to 1523471 reverse strand)
aaatgagaacaaagacaaaggggatgatgacaagaaacgcaaagactcaaacgccgagaagccaatagataaaaatgttcagagaaagttttcataggggaaattatttagttgataggggaaattgttgaagaaaaagtggtcagacgtgcgtaaatacgtcattggaattggtttcagatactattactcatggcgtgccaagcaaactattgtgattgggacatcaataattcaatatatgcctctctgaatgttactgtggaattccttttttttatagattttttttgatcaagtcattattagatacatactcttaagaatattataaatttattgttatagatgttgtagttatcatttattatcatttatcattattcattaatattacttttcatgctaattagatcctctaccaaacacaaaactttaagacaa

SEQ ID NO: 41858 - DNA, 328 bp, Arabidopsis lyrata
  Intron number 1 from transcript 485139 (locus 485139) deri ved from phytozome v7.0 (chr-ID scaffold_5; pos 13450817 t o 13451144)
ccttgcttaggaaaaacttaacctatcaggtactttttgcgttttcttttcctccacgcaatccaattatatacatacaagttttcggattttcgattttgctactcgcgaaaacttgatggatcagtttctacaataacattagtggctaatctattgattatccgacgtaatcacagataatttgatataatttggtaatcagataaacttatctcaaagttcaattgattatcgaatttagttacagatattttgctaggatgattatgttgttgttctaattcgtcatttgtgtaaattatgtgttggtgtagaaacggaatct

SEQ ID NO: 41859 - DNA, 537 bp, Arabidopsis lyrata
  Intron number 2 from transcript 492760 (locus 492760) deri ved from phytozome v7.0 (chr-ID scaffold_7; pos 9423376 to 9423912)
acaaagacttctcttcttctagtcccagaattactgtaagttttttaaaatccaaactttgcttaatcatcaagaacaccacaatttctatttttatcaattatttgtttctattttcttctctgtttttttttttttttttgtcttttgagtatttaattttggtgagaatcatggaagaaacgcccatatcctttataactactcttaagtcgtcgattcaatttttctgcccattttttcgtctcatttaatattttcaagtaaagaaataaagtaaaaaaccctaattaaaagttgacttttaatgtgtcagttttttgaaaaatatatttttcgtgttataaaactatttatcatctcacggatttctctgttttcctttctgatatttggcatttggcatgaagcttcttctagatattttaatttctcttttggagtgtttctagtgaaactcaattattgagatatttattgtattatgatatgaacttagaaactgaaataaataatgaaaataaaagttgcagagaa

SEQ ID NO: 41860 - DNA, 875 bp, Arabidopsis lyrata
  Intron number 3 from transcript 494314 (locus 494314) deri ved from phytozome v7.0 (chr-ID scaffold_8; pos 795560 to 796434)
gtggtattcaggttagtcttcctttttgattgatgattggttatattggtgtgtggaagtctagggcttgatccaattcataagaattatatgaattgctacttgttagataacgaggtttggttaacttttatgaagaggtgtaatgtggtatctcatacttgttctgtagcatgattgttgattcttgtctttggtttggatcacattaagttggaatataaattggtttgtgagtttgtgaaaatttcagtcgtctttgtggcctacagcttcacattgatgaacatcatttcctgttctacaccagtgcgttgctttgttttcgctttaatatggctttgatatgtttgtgtttcataagtagtactttatatgattcagtagatgactttacgtttgtcatttctgtatggtttttctcagttctctgaatgatcttatagaactagatgcctttgtaactgttagctctctttttactctgtacattcatctttgcatgtgaaagtgatgtatagttcttaaagataatgccaagtcaggaatatatattttagcttgttgtatgattagtggcggcagaagaaagttcgtagaagcaagtagtttcattcttatgtcttgatggttgtgtattaatcagaactcatgaggctaaaataaatgctttaaagaatcttgattcgttatattggtagagaaagacgatagtaagcgagcagatttagattgccaagattattcaatggtctttgtgtgattatgtgtatctgttcattgagttctacttgatggcattgactcaacttagtctgaaccgagaattttactattgatcctcttatttggatcagggactacgttggtactca

SEQ ID NO: 41861 - DNA, 633 bp, Arabidopsis lyrata
  Intron number 2 from transcript 336019 (locus 336019) deri ved from phytozome v7.0 (chr-ID scaffold_1; pos 12808588 t o 12809220)
aggaagactcctctcgctgaatgtcctcaagctttcaaggagcttggaatcgtccctgacgtcaccttctaagcttaatatacatatatatatatatatatatatacccatatacatttctcaaagtctcaacaattttaatttttttgatgactctttttaatatataaaacatttatttatgtttttatgtttttatgtgtctgtctgagtttacttaaaccgtgtttttcttttcgttgttgttgttgttgttttatttttgggagttctttgctttacgaatgatttgattaccttccaatattaattttttacggaatattttgatttatcttccaaaaatcattacttgttgagtttgaggtcaaaagataacaataaagtttgtgaagaactaaaactgaaataagcaaaagacacaaaataaaataatatagaaaggaggcggatcagagattgggccttccgtctgggccactaggccttaatcacaaaacgcgtttccatgtttgcagcgtctggcgttggttttcaaactatgaatcctaacgctagatttttaagacgcccaatttgaaagcgttcgtgattccagattctaaagacaaatatacccttgaaaaaattgta

SEQ ID NO: 41862 - DNA, 610 bp, Arabidopsis lyrata
  Intron number 1 from transcript 930794 (locus 930794) deri ved from phytozome v7.0 (chr-ID scaffold_3; pos 13526790 t o 13527399)
gtagaggccgtggtggtgggagatccggagtgaatgcagagaagaaggggccgacgtgatgcggagattcgatcgaacctacatgcctctcttgcttatgaaactcgaattgaagatttgttctctttgtggtctcaacaagcctaagtgtattgaatgcggcaacgtcgctccagcctccaggtaagtccctttctctcttgcccttacttaaacccattagaaagacttctattgtttaagcctattttgagaaaatacagtaacactaaccttcactctgttgttttttagtattcttccttgaagtgtgtggaacaatgtttgactctcactatggattttttttttaattgaaaatggtaaagatagggattctgacgcaagtgagtccctttgattttctgatagtttttcatgaagtgcaaacatgaattgttacctagaggaaaccatagtgaattctttaatagcaaacattaatccggtttagtataagcagtgatctttgaaatctgcagactttcatgtggaagattcaaaaataacattgaatgtttgtttgagtaaacaaggagagggaggggaaaatactttttgcaggcacaca

SEQ ID NO: 41863 - DNA, 670 bp, Arabidopsis lyrata
  Intron number 2 from transcript 930794 (locus 930794) deri ved from phytozome v7.0 (chr-ID scaffold_3; pos 13527416 t o 13528085)
gatacagatccaaagccagaggtatagatgttacttcttttttcaatttgcttcagttggatttgtgatccgtgtaactgtctataggtaagctttttacttacctctctatttgacgttttcagcaactacagtaatttgcatatccaagaagctttttttttcttcataatttagggatatattgtgttagtgtgtaaacatttatctaaatttgcatatacacgaagtaattcatatatatttgcatatactagatttgacaatcaatctttgttttttcacaatctttgatttttgaagtgacttggatactgagaatttttgtaactatgctcttccttttcaggtcaggatccttcactcgctaaatcatccaaacatactcaagttctatgattggtaagacttactagctaatatccacgacatgttttcttgcaggccaattactctcactcttctttgaaaaaacgcagcttcttgtgttctctgtgaagtatgttcttcatggtaattcatggtctctagttaagttgtgttcgcttttttttttgtctcagatttagctgtagtaggcagtggtaagaaactttgctgctccaaatactttttctagcttatccattccctgcttttttagattttgtttattcattctatgaagaga

SEQ ID NO: 41864 - DNA, 572 bp, Arabidopsis lyrata
  Intron number 1 from transcript 496497 (locus 496497) deri ved from phytozome v7.0 (chr-ID scaffold_8; pos 20852034 t o 20852605 reverse strand)
gaagaagctgagttcgaagaaaaggtagcttcctttcttatttctgtattcggaatctgctgataggaaatttttaattttcgaatgtcactaaagcataaaaaggtcaatcttagctctttaatttcatgtaattcgagctgattttgagtgagatttattgattataagtggtttctacttaatgtgatgataaccggagagaataaatgattaatctttttcgatcctggttttaagcagctcattttcttctatacttcacattgatacgatgatttaggagcttttgaatatttcttctttggagcatatttttgggatcttattttcgagttttaagttagtaaaaactaaataggtttgaattttagtggattccgatgctaagttgtagtgctttttcatggtagagactccaaggatataggcatttgttcattggaggatcaaatgtaatgtagattagaagacttcaagagggctaattgtcagtttcagtgttgttcttatgagtgttttaagtaaattcttgtctttttggtatggtgcagtgcaacgagatcagaaag

SEQ ID NO: 41865 - DNA, 419 bp, Arabidopsis lyrata
  Intron number 2 from transcript 930279 (locus 930279) deri ved from phytozome v7.0 (chr-ID scaffold_3; pos 10246595 t o 10247013 reverse strand)
ctacctccgcggctcctcctcctactaaacctaaggtatgaattttttaagttttggtaactaagaatcattttttaattaatttgttcttaaatacattcccatgtttgattttattttagaaacaattcaatactcttttcatttcatataattaaatatcttacacatcataaaagaaaatttgcagcacttaacatatttgattttatctcttgactaataacgatagattttggtgcaaaaaaattgtttatagacttaaaacagaataattgtgcatattagatatgaaaaaaattatcttcttgaagtacattgaacaagctttaattgtgaatctttttgtcaataacttaataattttttgggtggtgaatataggtgagcacgaagtttagcgatttgctagcgttcag

SEQ ID NO: 41866 - DNA, 331 bp, Arabidopsis lyrata
  Intron number 3 from transcript 497273 (locus 497273) deri ved from phytozome v7.0 (chr-ID scaffold_120; pos 13357 to 13687)
ttatacaaaacaaggtagataatttctcctttttacttgcctctaacactcatttttttcttttctttctggaatatggtttatgtatctttcgagtacgtttatctatcttttctgccttaaagccatatccctcttattcagtacctactctatcgttctgaaaattgagaaacttgcgtaggatgttttggaaacatttgcttctgaggacgtcttaagactgccttatctttgattcagttcgtgaaccacttgttgaagtctattatttcacttttctgtttatataacaggatcgcatcattgctcgtctccaacaaccttattc

SEQ ID NO: 41867 - DNA, 543 bp, Arabidopsis lyrata
  Intron number 1 from transcript 929884 (locus 929884) deri ved from phytozome v7.0 (chr-ID scaffold_3; pos 8574077 to 8574619 reverse strand)
tcaccgtaagtaatttgtttttactttttctttttttaccccacagataagtttgggtgcactgtatctacactaggttgttcctatgggatttttgcccatttcaaattttttcacatccgaaagattttccctcttctctttaaatatctccctctcttctcctaaaaactttctaaactttctcattttaatccatctgaattctctccagcagattctaatttcttcctatactcctctcaacaatggcggcaccaaattttagatgcgtctctaacaaatcacgaccacatgtatttcttcgcactttgataacagttattttgtttctgtaaatgaatatatagtttttaaatgaatattggtaatcaatattcaaaagctgcggatatcacatatcatttatagtctctcctcttaaagaaaagcaacacttgttcgcgttcctactaactaattagctatttatgagaaatgacttattcattcttcttggtttttcaagcattttatcgttggctggtgtatcccatcagaata

SEQ ID NO: 41868 - DNA, 565 bp, Arabidopsis lyrata
  Intron number 1 from transcript 915144 (locus 915144) deri ved from phytozome v7.0 (chr-ID scaffold_9; pos 1141845 to 1142409 reverse strand)
cctttgcgtctctgctcgtcatctgtcccgtcgaggtttcctagatctccctcgaagaagaactctaatcaagagctgtcggttggagaaggagatccgccggcgattcagacgactatgagtgaaaataagttgatttctgatttcattttcttatgtgtagatctagggtttcgggaaatacgtttgagaaggtgaaattggattagggtttggattagggttaggtttttgttggattagggtttggtaattgttaatttcggtttgaaattgaaaaaatctttgcttgatttttgtaatttctggaaattgaatttcgttatgattaagaactgtttttagggtccttttgggataattacgcattgaaattgactagaactgttttgaattaggattaagaactgtaattggttacactgaatcaatccatttccttataaacatattctttatcccctctttgatgaaatttacatgttttagatgttatttccattagttcattttaaacactttgttgtcttgaataatgcagcaattcgagctgttctatccggtg

SEQ ID NO: 41869 - DNA, 494 bp, Arabidopsis lyrata
  Intron number 2 from transcript 311464 (locus 311464) deri ved from phytozome v7.0 (chr-ID scaffold_1; pos 1119556 to 1120049 reverse strand)
ttttattatttaaaaaaaaaaaaaaaactcaagaggtaaaggtaaataactgattttaatttcctaccaaaaaaagaaactgattttaatttatatatacaaatatgttactataccgtcaaactgaagaaatggttgtgttttatatctatattagtttgattatttaaattgttgtgttttaaaactgtattagtttgattatttaaatggttgtgttttatatctctaaactctatttgacctcactttatatgttaaggaatttggagatggaagcaaactatccagagattacagaggtgatccagatatagttgacaaagtcctgaagcaaaaatttggtaactttttgttttcttattagttgtttataatagttatatttatatttgtgtttgattaatgtttatcttttgacaatgtgtaattaatatctacaagtaaatatctgggttgataaaattaaaattgtgagtaccaattgcagagat

SEQ ID NO: 41870 - DNA, 344 bp, Arabidopsis lyrata
  Intron number 1 from transcript 489971 (locus 489971) deri ved from phytozome v7.0 (chr-ID scaffold_6; pos 21161872 t o 21162215 reverse strand)
cttcgcttctcttcttctcttatcacggctacaaggttagtcccaagtttcgactctgttctcgcaccagtgattggatctctactgttttttaatcgaatctcatcgaattgatctgggtagggctttgaataaggttatcgaatcttctgtgcggcgtatgtgttattttgattctatgtgatgaatttagggtttgggcaagtttttcaggtctatgtagcttccgtcgtatactgagatatctgatgggtttttctggattctggtgatctctgtaacaaaatcgattctttgtgttttttccaggctaattgagagtgtcccttgcgttaagagttttt

SEQ ID NO: 41871 - DNA, 534 bp, Arabidopsis lyrata
  Intron number 1 from transcript 345050 (locus 345050) deri ved from phytozome v7.0 (chr-ID scaffold_4; pos 15588657 t o 15589190 reverse strand)
tactgggtcgattcgatctcccgagaaaattcaaggtagttacttttttttttttcattgaagatccaaagaaacgttttttttttataaccgtaatgtgtttgattgtttgatgatcatgtaattcttgtttctgatcattcaagtcttaatgtgatttcgtttctttttatgagagttttgatcattcaagtcttaaaaagtccgaaaatttagaggtgaatacgaatttgtctttttttggagttagcttgttggattcgtcttgtcggatcattgtttctgaatgattctcaacatttatggaagttatagatcatgtttttttcatcgtgtgataattgttctctgatcaaaattggtaaaagtgttagattctgattgctctttgtcggatttaaagttctacattgtgttattgcctttggaaagttgattcctatgatttgagtttcgttttatcttgtgatttagatatataatcttcatgtctcgtgttctttgtgttatgattttttagatacctttaggagg

SEQ ID NO: 41872 - DNA, 434 bp, Arabidopsis lyrata
  Intron number 3 from transcript 488578 (locus 488578) deri ved from phytozome v7.0 (chr-ID scaffold_6; pos 7048628 to 7049061)
gcaaaacctgattctgtctactttgttgttagcaggtgagtgtttttgtttgcctctcttgttttagttttggtgttgatcttgctagaaatgtggcttctgccttttaaaataaaggattacattgaaatgatcaatcttgtagcagatatgttttgtttcctttgaatcctgggcacaaaaaatcagtgaaagctataggctttattaagtattccatggtctgatactatagttgataagtcttcttgatgtgccaatgtgtagatttaattctcttcttatgctgtcgcgttagattttcgcaatgctgagcttcacaagctgcataaatcagcacctgtgttttttttttttctgattttttttgaggttcttcattggtttctgatgcaatttatgatctttgatcatacacagaggtgcagaagttg

SEQ ID NO: 41873 - DNA, 560 bp, Arabidopsis lyrata
  Intron number 2 from transcript 496200 (locus 496200) deri ved from phytozome v7.0 (chr-ID scaffold_8; pos 19567904 t o 19568463 reverse strand)
gccaaactcgccgagtaccataacttggtccggtcctttctttctctctagaatctaaatttattgtttttgcgaggacccacttgaagaaactagtaaaggttccttttttttatgtgtgttttgacactaatctggcgttattcaccaaaatgttggattttttcaactgaagctattagattttccctgaatttcagtcaatcgtctcttatacctgactaattcagttggtattgttcaaaagaattggctttgagattgaaaatgaaggaactttggattaggctgagagttaatcttcaagtaaatgttttgtacctggaacctttaaacattgtggaccaaactactctttgattagatgatcttatgcatgatttttcctagctttaatggaaccgatgatgagtctagctagaatcttgaaaaggagagctttcatttacgtttatttttggtggtgaggacgaagaatagtatagaagtctcttctctgctctaattttctttcatttgttgctcttttgaagtttccggctctacgtgagtttgttaag

SEQ ID NO: 41874 - DNA, 695 bp, Arabidopsis lyrata
  Intron number 1 from transcript 478095 (locus 478095) deri ved from phytozome v7.0 (chr-ID scaffold_3; pos 3217770 to 3218464)
aaagtttctggattcaacttccgaagaagatctttcttacgtgagttgtttgttttctgatttcaaaaccccaagtgttcttattttcttgccctctgttatataattggtgttatcgattaagaagagttgattttgattttgtttatatgttttgtgttgaaattggatcattgattgagtcttttcgtgtttactttcaatctgggtttttaaaacttgttcgaatgatgatgatgatgatgattgggattaatcaaaaagcttgattatttattggaaattgagaaattttcgatccattccatttgaactgtattaagtcaaacaaagtctctagatttactgatctggggtttaagctttgaagcttgagttgttgtttttatttcgagtttgattaatttccatttgtgggttttggtctctgactgttgtttataattaaagctttgtattgatttgttttagaaataaatctcattcatgaagaaggtttcgtttccttttttatccttctcctttggttattaatcctatacctgtttatagaaatcactacctatattcagaaagattccatctatttttttcctcaaggcttgctttttctgaatcaagtctttctctcttttttttttttttttaatctaacttgagttatttattaacttttttggacagcagaaagttga

SEQ ID NO: 41875 - DNA, 800 bp, Arabidopsis lyrata
  Intron number 1 from transcript 920122 (locus 920122) deri ved from phytozome v7.0 (chr-ID scaffold_1; pos 5230581 to 5231380)
ttcaacacgctaattctttgtaagtccttttttctgggtttctcataaagtttaagactttagtttgaaattgtttgatttgttgagctataagagtatagttggtgacaaaattgaaaacccagctgagaattttaggtcttctcaacaaatttgggttattttaggaaactccgatggactttttagtttagttttagaaagctttcacaaaatggaaaaatctggaaagttgttgttggttttgatattgcaaatttagaagcttttttttggctcaaggtttcaagtttgttattgcacatgttctgttcgatgaattgtgtatgagaactttgagctgtatatcttttcagggaagaagcaattccaatggggaagaacaatgtgcggcttcagatgaagttggctttggttaataagctaacttttgaaacacagaaatttattctcttttccgaattcgtatgacaaacaaggatcacaataaaacttgaaaacgttagcctaacctatatagactttcttttacaatcttatctttgggattgaatttgtaaggagataatatataagatttgatgttgattgattgcagggttatctaagaaacaaaggggacattgagaaactcttctccaagcagatgtgtgttatagattcttaccttttaagtttgcaaataatatcaggtgaattgtagagttcatagcttctgtggatctctgacccttggcttgatttcgttttcttgtgaggtaacagatttgatactgcgattcattttgcgggtcttaaag

SEQ ID NO: 41876 - DNA, 834 bp, Arabidopsis lyrata
  Intron number 1 from transcript 488394 (locus 488394) deri ved from phytozome v7.0 (chr-ID scaffold_6; pos 6311000 to 6311833 reverse strand)
ttagaaccagagcctacatagctctcactctaaaggtatcatcaaattcaagcttctctctctctttaataatccgtgtttcctcgatccaattttgtgtttattcgcgatccgatctcggctttatctcctgtttcgatttggatctactttggtaggtttaatttttacatagatttgcttttgaatgtttttgtcttgttaaaattctgtgagattcaagattttttgtgcattcaggttcgatctgtgtcggtgatccgcagaaaattcacgtaatttcatttctcattttacgttattcccaattcctgaaccgggttcttttgcatgtaccagatctgagattttgatttgaatttctcgctctatgtgtgtatttttcgttgaatttcggatttaaacggctcattcttaagcatgatcatgagtatttgatctctgaattggttgcttcacctaaaatttggttcaggtttacgtaaacgtattctctgtgtgtattttaattctcacgaaaccggatctgagtttttgaaaattgcatctgtccaagtttagtttttgcttattgtggattctccttttgaatgctttgaattttttttttttttttttttttttttttttttttttttttttgcttatcaatttcttctttacaatgcttgaattgttggatctgatttgtttagtcaaaattgctagatacaataattcgttatcttaagttctgattcaacagtttaaggacttttgtgcactcacttatggtatcgattacagagagatttgaagtttgacgtttaacttttttttcagtttacaagcata

SEQ ID NO: 41877 - DNA, 732 bp, Arabidopsis lyrata
  Intron number 1 from transcript 942923 (locus 942923) deri ved from phytozome v7.0 (chr-ID scaffold_6; pos 20641250 t o 20641981 reverse strand)
ccgctgaacacggcgaacgcctctccttccaccaggtttggtgaaattttgctttctaggtctacgaaacgtgtgatttaaggatttgtgttttgtcttgttgatgatttcaacgaaattgggattatgatttgacttgttaatcattgatttgactgcgagggctcttcttgtgaattttgtttttttggggattaaattcaggaataaaatatcaattttccaaaatgattgttaatttgattccaaaattttggtttttttttttgtgtttggtattattattgctttgattggtaactacggtacggcgtataccgtttttaccaatcataaaaacgataccaaaaacattatttttcaattttttatactactttttatctttattttgtaccgtttttaactattcaagtatcacttattgcttcatatcctccaaacaagattaattttttttttatctctctagttttatatcccaaaataataatttatgtattaaatattagtttaagcctcatgaagaccatgtgaaagagtaaattaattaatattgtcccaatttctatttttatatttcatagtaagtttaatcttgttctgaatttagatggttttgtgtttagttactgtcaaaagaatctgttagttactgttaaaagttaaaacttgattgctttgtcttaatttgcaggtggatcttcgagacaagccagctcttgagaagat

SEQ ID NO: 41878 - DNA, 741 bp, Arabidopsis lyrata
  Intron number 2 from transcript 485520 (locus 485520) deri ved from phytozome v7.0 (chr-ID scaffold_5; pos 15705713 t o 15706453 reverse strand)
aagccgtcgcttccatcgtcggacgacctcagaacgtaagaaacctctcttaaactttaatctctctttccttcagaaatctccttttaagttttaaaatcaaacaaaaaaagaattccttgacttgctgatgcatttctttaaattttcagatgcacttttttatttaatggaattcaatagtgatcaaatactttatccattctgaagttatatattgtgatgtctttttaataataaagtatcttttccacatacactcaattattttggaatttaaatacatttttgtgaaacaaaacaatatttcaaaagaacacttgttgctgtaaaatggaaagagtttattttaatccttttttcttctattagaaaatataagataattgagacatcctataaaattcttgggtctcgcttaaataaaacgaaagttactatattatttagtttacttggttgctattaaagtattaataataataagctttgtttactagatttcacgtaaattgttcgaaaaagacaaaaagttaaggaaaaaaaaagtcaacatcacaattatttatttgtttatatgtacaaaacagggaatatcgatattaatagtctgtggccaagagtttttcctctaaatattcatattatgtgtgttgtgaagatgtaggagataacaaatcttccaacttgtatgtttactaaatatactcaataaaatttgcatgtccattgcagttagtg

SEQ ID NO: 41879 - DNA, 982 bp, Arabidopsis lyrata
  Intron number 3 from transcript 478479 (locus 478479) deri ved from phytozome v7.0 (chr-ID scaffold_3; pos 4578561 to 4579542)
gcgttccgttcaccgaagaacgcggttttcaccaggtacgttatacacgtgtcccttatatgattggttgatatgtatacacgtgtcgaaccgttttgatctcgaattttggagcccgacaaattcaaaagcttttagatgattaatatctcggtgatttaagtggattcttgccacgtggattttcataacaaaaggggtgaaaacattaattatcactaagccacttgcttagtgttagtctgctagaaaaagcatttagaataaggtcacaaaattgttgaccaaaaaggaaaaatattagtcattcaattatagacattagtacttttttcctctaaaattttaattatatacgttaattaattaatcaaattgaagtaacagtttttaagttaagtactcttagttcaatcaatgttgagaaaaatgctgtctttcccaaatgttatagtttattttagtgagtggttcttgacttcttgttgtggtccatgaatgtgcagaaatgtttttctaaattcgtgggtttaatttattggtggagcacatgattctgtcatgttcagaattcagatacaaagcttttaatcatgtcttctgatcagctttctgcaatttgcttgttttaatcatatattgttaaatcatatctctggttctaggatattttatgtttattcttttatcactacgatcacgtgtagtgtctaaagggaaatttcaaattattatttgtctacgaatatctattgtttctttagtgttttgaattagtgcattaggacatgtaggatcagttgataccggataattaactgtttagtactatttagagtccgcaatctaaatagtgtaattatgtttgtctgtggatagtacaattgtgtttggactcacaccattctttgttgtgtgttgtgatgaatgaatcatatatattgcagcttgacataagaggagatccatacggatttctagc

SEQ ID NO: 41880 - DNA, 994 bp, Arabidopsis lyrata
  Intron number 2 from transcript 490707 (locus 490707) deri ved from phytozome v7.0 (chr-ID scaffold_7; pos 486680 to 487673)
tgctgattcctcttgttggagcttgctttctcagggtttgtttttccctctcttccttgctgttttcttgtacattatccttaaatttgttgtcttccggtggattgattctgttttctgctttatctattgtgcatttggaaagttttgagggtaagattgaacctgaagatttattctttagtaagctagaatctctcttttgaaatgggatcaaaactcttaaaaggatagcaagaggttagattaagttagatgatattcttcaatacaagcatgattgtggcaagaggtttttcattagtctacactctttagattcaaagtggttttttttagctcaagcaatactgcttcagatgtgaaagacatgttttttatagtgaacaaaagttggaaggattgtgtcttcactcggtatagtttcgattgggacaaagcctgataaagatcaaaactttgacagatttttaaagaaaggaattgttacttctctgtcttgttgagatgtctagttggtcttagattatttagctgcttattatgtttttctaaagctttgcttctctgacttgtggtttttctacttaatgcgataggacttgccacgcctttgtgaccccggtctgctggatctatataaggcgaaaataatcaaaatattaggacttgctttcacacaatgaatgaacaagaatagtgttattttctagttcgaactctttcgtcaatgtattgttgtggttcacaaggatttgttgtttcaaacttcttgcaatctatctatcgctatttggatccacacattttggggccttttgctgcactctaaactcagcatttcttttctttgttcatgatatcaaattgtgttcatgcaattacaactaggaatctctgcatttttcgatttctgaatcttgttagctgatcctcttcccatttctctcgtctcttagaactgggagttcctcggtgacacgatcattagcat

SEQ ID NO: 41881 - DNA, 591 bp, Arabidopsis lyrata
  Intron number 2 from transcript 941902 (locus 941902) deri ved from phytozome v7.0 (chr-ID scaffold_6; pos 10184300 t o 10184890 reverse strand)
gcagaaagccatagaagctgcagctgatatcttcggtaattattatttcttcttcttttctttaactacttttgattgcaactcaattcttgtttctgggtagttttgggtactaatcttaaacgattatagactttgttaggatttgttataaaaaaaacgattaaaccagtttcctgctgggttttgtcactcactaaattgccattttttagctagaattatatggaacaatcgttatgaaatctggctcgattgtatgtataattgcgtcagaatctcgagagcttggattatttgacctttttgacacatagtcaacgagatgatattcttacattttgaaagcccatattttttatgggccaaataaatcatagagtagtttgggcctagttaagactgattcggtaaagtcgaaaacgtttattatggagtgtaaatgtgatctgccttgtagattttgggaatatagcaactatacgatttccattagacttaaaacgatgatgatgtatgaccaaagatgatacaatgtagtttatgctaagaggattgtgttgagcaggagttgattctatagcagcggat

SEQ ID NO: 41882 - DNA, 326 bp, Arabidopsis lyrata
  Intron number 4 from transcript 486794 (locus 486794) deri ved from phytozome v7.0 (chr-ID scaffold_5; pos 20948381 t o 20948706 reverse strand)
cggtaatttgcttttacatacaaattaatccaacacaatgactatgggattttgggcttagatactcttctctgtcactagaagaatgcttttgaagatcatagtgctctgttttggttgccatgtgatataatgcagatttcgtttggttctaagcttttgaattagttgattgagctgctcttcagtttcacttggtggtgatcctataacctagttctagattcttggattagtggttgcttctcagttttagattttggtatatgcatcaataatccattgtgtttgttttccttacaggtcttgtaagtggtgtgtttact

SEQ ID NO: 41883 - DNA, 848 bp, Arabidopsis lyrata
  Intron number 1 from transcript 901259 (locus 901259) deri ved from phytozome v7.0 (chr-ID scaffold_4; pos 16265245 t o 16266092 reverse strand)
ttgtagctactcaaaaccagggaatccgtattcttaccaaattaaggtaataatatgaagtgattaaaataaaattgacttttaactttcaattagcataaatgacccatacgttacatgttcaaacatccacatacgtggtgtttagtcccaattttgctcctctcatacgtggtgtttagtcccaattttcttcccctcatacgcctcaatctcatcatggctcttataggcattattaagtttgtgtttatcggagtgtttctttttctcatttaattttataattgcaaaaatcaattacgtggtgtttaatccaaattttgctcctttcgtcatggctcacacagacgttataaatcttgtgcttattatacagtttctttgtatcatttaattttatagttattacaaaatcaattgaaagtgtttagttaatatttcttattaaaaaataatatcaagtggtccaataattaagcagtggcggaggtagcatagaaacatgggggtcaactgaccccggtgaattttcaaaatcaaactaatactatggtatatttaaacaaatacatagatatttgattaaattcttataaattgaccccattgccgaatatgaaaactactcttttgaccccttaaaccataacttttttaatattaaccattaattgttatatataagtttctttgtttttaattttatgaacaatgttttcatgtaattcaatagcatattacttttttctttaattattataaatctaattacatgtatttcactatatcgtttacttttattatttttgcttttatctattttaagttttctcccatttatagtt

SEQ ID NO: 41884 - DNA, 332 bp, Arabidopsis lyrata
  Intron number 2 from transcript 944105 (locus 944105) deri ved from phytozome v7.0 (chr-ID scaffold_7; pos 1275619 to 1275950)
tgaaccttgtgccattcaagcttttattctcaaaggttagttcacttccaagcttgagtctaattcgcgggatggctttcttaggggtttagttaatgctagtgcctgctagttatgatgatataatggttgcttaagaatatcgataatcttaagttttgaatagtgctggtttttgttgatataccttatcaacaaacggggatggaatttcgatggttaccgaatcatggtgactggtgaagacgttttttctttgattggtatactgcctgtgaactcagcttttccatttaggacgcgctcttttggctttggggagaaaacaggaa

SEQ ID NO: 41885 - DNA, 500 bp, Arabidopsis lyrata
  Intron number 1 from transcript 889572 (locus 889572) deri ved from phytozome v7.0 (chr-ID scaffold_7; pos 6955627 to 6956126 reverse strand)
aagaaagtcagtttcagatatttgttagctctcgagtaagtccatttttctttatttttttatcaattatatagatctaaactgtaatgtaactattagtctcatctctttatacagtttcatattattgtgttaaaaaaaaaaaccttgaaactaaaacatcaatgtatttaaaactcactgaaatgcgtctgatacagattgtatttaatgatttgagtttttatgcgctctgaaaagagggtaatgattatacagtttttggaagattcttgtattaatattttagtgaaaatttctgttttggttaagtctatatgaaaatgacatttttttacagtggggactgctactccttttgtttttttttttggtttaacaactcttcaaatatccatcctctcacaaaaagttatatataagttttcattttacaatatgtttgtgtattgtttatgattatacaatatgtatatatgacagggctgagttatacataa

SEQ ID NO: 41886 - DNA, 432 bp, Arabidopsis lyrata
  Intron number 4 from transcript 476560 (locus 476560) deri ved from phytozome v7.0 (chr-ID scaffold_2; pos 16213963 t o 16214394)
gacaggtatcacacaaatgttccaacttgttttgatactaagatgttgtgtgccttatttctttgtcgttccttttctgaccaatattgtttgtttttggatgtttgacctttttcaaatcgttgtgccttgacgattcatctttctagaacacttaaatttttgtcctttcaaacgttggcaacataggtaggctagatgtttatcatctagcttgaaatactgttaatccgttaagcagcgacttgctcttaatgaagggattaaaggtggggcaatatatctttctgtttgtggattgtatatcttgttacaaaatgaaagctgtgtgttcagactgtgtctagatgattcagaaaacgctgaagaacctactttgcttggcattttcaattggtgtttattgggtttttttttttgtataggaccttc

SEQ ID NO: 41887 - DNA, 718 bp, Arabidopsis lyrata
  Intron number 2 from transcript 489530 (locus 489530) deri ved from phytozome v7.0 (chr-ID scaffold_6; pos 12460749 t o 12461466)
ttcttaacaaagttaatcctggatcagtgtcaaaggtaaaatttctgggatttgttcttggtgtgtagtagatgtagttttacataagaagttaagtatctgttgatgtcaacttatgtgactcattaaatacagtaaaatttctataaattaataatgccgggatcgataaattctattaatttatcgataaattaataaagatattttagtaattttataatttcttacaaaatttatatctgaaaaaccaaacttttctttgtaattaatatctttctaaaaccaattacaagtagaaaaacaattattaagtttaaaaacgacacaaacttttatattagaaatgaactctaccagaattgatacaaatttaagaaaaataaacaatactagaatcatatttcagtaaatattcttatataatatatatatatatatatatatatatatgataagtttatacaattatcaatttatgatattgattggaccatattcttacataggatttttaaaaaaaaatttgtttattttaatattttctccatttgtattattttttacactagtcccaactcgggatcagaagaattgattcatttatagacgttattaatttaaggagtattaatttatagaagttttactgtatttgattacatatattgatcaatgtggagaattaacatctctttacaggttgttgaagcaccgg

SEQ ID NO: 41888 - DNA, 429 bp, Arabidopsis lyrata
  Intron number 2 from transcript 473768 (locus 473768) deri ved from phytozome v7.0 (chr-ID scaffold_1; pos 21950691 t o 21951119 reverse strand)
caaatcaattctctctttttccaattcttgaactcttctctccaattcactcaggtaaaggaacaatctttcgatcatttagtccattgttgatgaaaccctcgatgttggtagattcaattgttgcattctactaggacattgtgtttctttcttgattttgattcaattctgtgtaattgcttttgaattgtgttgttgtttgagttttacaagtaaagcttgatcctttcgtgatgggtaatctcattctcgctctaaacgtgagacctgatgttctcttgcattttctcgttttgtatgaaacggtttagataagaagaaacaaaaaacccgatttttcgatttctttataatattaatttgattcttctttttggattttggtatataaagtgcagctaactttctgcacctaaaggattgact

SEQ ID NO: 41889 - DNA, 811 bp, Arabidopsis lyrata
  Intron number 5 from transcript 952332 (locus 952332) deri ved from phytozome v7.0 (chr-ID scaffold_604; pos 1343 to 2153)
agctcttgaacgagagaaaaaggctgcgtgaagaggtaaatacgagcacactcatcataggatacacataagacacacataaattttagttaaatatagctcttcgtttaggtatgtagaagcttagatatatatttcattccatttctaagacttcttcttataagaagaatcatggtttattgaagagccgatcaattgtagaactattgaggctttgtttgtttgtgtttgcatgcatctacgtttacatttaccatgttttgctcaccaaaaaaaaaaaaacatttaccatgtttttgccttttttggccaaattagtctcataaccataattaaacattttaaaaaaaaaaatatttgtttattgtaaacgcaaatggaatcacgtttgtgtttggcgttttcgttttcattttgcaaatttgaaaattgaaaatgttttctatttcaaaaatgtgaaaaccccaatttatttttccatgtaaacgcaaacatggaaattttgtttcgttaagagcttgtgtttccttaattttccatgctgtcctttaattttagtacttgcatcagttgctctaaagatatgttagggaatattattcctctatgagtcgctttttaatatctaactctcctcgagttacattggtttggttgaattaacaaagtaaatttcttatatatcaaaatgaaaatataggtaataataggtctatggatatatatgtctctgagctatatccctctctctttatatacatattacgaaaaataacttattaatttatattttcagcaaattagagaa

SEQ ID NO: 41890 - DNA, 1020 bp, Arabidopsis lyrata
  Intron number 1 from transcript 323319 (locus 323319) deri ved from phytozome v7.0 (chr-ID scaffold_5; pos 12952536 t o 12953555)
tatctgtggttttgggggttttattgttctattcagatatggtttgaatcagcgagcttattgaattttcaccatttgttcctttgaatctgaaatctgaactgagattttcttcagtgtgtgtttttgtttttgcctgagatagatgatgtttctgtagtttgattctgtgttcaccatttgttcctttgaatctgaaatctgaactgagatcttcttcagtgtgtgtttttgttatcgcctgagatagatgatgtttctgtagtttgattctgtgttcaccatttgttcctttgaatctgaaatctgaactgagatcttcttcagtgtgtgtttttgttatcgcctgagatagatgatgtttctgtagtttgattctgtgttcaccatttgttcctttgaatctgaaatctgaactgagatcttcttcattgtgtgtttttgttttcgcctgagatagatgatgtttctgtagtttgattctgtgttcaccatttgttcctttgaatctgaaatctgaacagagatcttcttcattgtgtgtttttgtttcgcctgagatagatgatgtttctgtagtttgattctgtgtgtttttgtttttgcctgagatagatgatgtttctgtagtttgattctgtggtttcagattatgatgatttcatttagagatgatgatggctattaattaatgatgatattgtgctattgtttgacgcttttaacatggatgattaaagcgatgtgcttattgaatagtgattcaccatttgttccaatgtcttattattttctagttctggcgttgctcagcaatgtcttcccgtgaagttgaagacttttacagcctcactcccacttctgcctctagaaaaggtaacattgcatctttagttcttttgactaggcttagagtaacatgtataattatatcatattttgttcagctgcaccacgagtgcaatcatcctcgggaaactatgtcgttagcctccgtaagcccacagcagtgacccactc

SEQ ID NO: 41891 - DNA, 791 bp, Arabidopsis lyrata
  Intron number 2 from transcript 905822 (locus 905822) deri ved from phytozome v7.0 (chr-ID scaffold_3; pos 13577648 t o 13578438)
atcggatccttatcttcaattatctctttttcaaggtatgcatgtctatctcattgtgtgaatcgatgtatttaactaatttcaaattagggttcttcggttttgagaaattagggtttcgtgatttggggacaaggggttattcgttgttaagtgtttagtttggctaattagaagcatgattgagtgtgtgtctgtattgcttaagtaatttctgattagggttctttggatttctaaaattatggtttctggatttggggaaaaggggttattcgtttttaagtgtttaatttgggtaattagaagcatgattgagtgtgtgtctgtattgtttaactaatttctaattagggttcttcggatttgttaaattagggtttctggatttggggaaaaagtgttattcgttgttaagcatgattgtaaacaaactaggcttggttaatactttgtaatactctgtttttgtaaacatgattgtaaataagcatgattgtaatactttattaagcatgattgtaaacatgattgtaaacaaactaggcttggttaacactatgttgaatcgtaatactctgtttttgatcagtgtggatgatttttgggattacggatctgttggattttaattttattaatgatgttgattagttttattgcaattcgcatgattgttaggattattcgagatttttattttaaaatgttaatctgttttgtttcttaatcttgaatttgatttattgttttctgtttattgtgagatatggtgttaattggacataaag

SEQ ID NO: 41892 - DNA, 474 bp, Arabidopsis lyrata
  Intron number 2 from transcript 932069 (locus 932069) deri ved from phytozome v7.0 (chr-ID scaffold_4; pos 287832 to 288305)
tttccacagttctcagcctttattcgtctctggaggtatgctttcttttgaacgctagttttttaggtacaaaagtcctgtttattaaattttcttcatctataaattctgatctgcttaagtattaacccttagcgagttagcgtcctcggtttctagatctagcttggtgtcttttcagaggatagttttgatgatttgtcccaactctgttgacttaagctcttatactcccagctggagttttgatttgtgtttaacatacttatataacatattggataattggacctagtccattgaagtcagatcttatgttacatgtgcatagtattgtctttgggcataagcaagtactcagaaactgtaaatgaaaatggcttggattgttcttcattatagttctcctactgctcttccagaacattactcatttgtagttaatggcattgattacattggatgttgcagggg

SEQ ID NO: 41893 - DNA, 453 bp, Arabidopsis lyrata
  Intron number 2 from transcript 488935 (locus 488935) deri ved from phytozome v7.0 (chr-ID scaffold_6; pos 8584587 to 8585039 reverse strand)
ggaggatctggaatctcgctcgtcaaaagaagcaggtccttttttttattttctactttttgatgcgattttaacacactgttcttttcaattgtctatttattccgttttttgctcttaactttaaaaagttggtttcagagaattcatcaagacgagttgttgactctcaagtcaaaatttattattattttggtcttctctagtttgaaccttttcaaagtttacatcttttaatctcattttttttaaaggggggggaaaatgttacttttagtagtagctttcttgttctgcctttgagagctgacttcaacgcataatctgcaaccttggatcgttgaattatgaatttgatgaactttgtgctagactctctactgttgaaacattagtttcttaaagtatggataattcatgttttttgtttacccattcttatgtttgtgtagc

SEQ ID NO: 41894 - DNA, 776 bp, Arabidopsis lyrata
  Intron number 1 from transcript 922081 (locus 922081) deri ved from phytozome v7.0 (chr-ID scaffold_1; pos 13444041 t o 13444816)
accgcctcctattcaatataaataccttgctcgtattcaatttcagatcataactaacctttgtttttttgttcttttttttcaaacttttttttgcttctacctaattttaatttttctttttattgtagggtggatgtatggaggggacgatgtgaactggtgtatggaaaatttggacctaattcaatgaataaacaggtgatcttatagtttatatgtacaaatttgattttttttttttttttgtatttatggtttcactattttcaccactaatcaatttttataatcaaaaagtttggtttcaacttttgagaaggtaatcatcgatggtttggtatgtttctttttgttgtaaaaagatgaggtacctcccgattttgttgaggtacatgttcttattattttcaaatatgtcttttctcagaagaaacactcaacttttgataacacagttgtcacaaagtcagaaagatgacttatttcagggatgaatcttcagaggaggctaatttttgtcgttaatacaatttaagtattcctctctttagattagggataacaaacttggctgttaaattcaggaattactcttcgttgccaatctctctccccaaactaatatattacatatatggaagtagtaacttaaagtttttggtatcgaggtcattctaaggcactgagattcggactttggtatgtataggattcgttttccatgcactaagatttaattattgtttaatttattggtttttaggtttctttcc

SEQ ID NO: 41895 - DNA, 811 bp, Arabidopsis lyrata
  Intron number 1 from transcript 484787 (locus 484787) deri ved from phytozome v7.0 (chr-ID scaffold_5; pos 9928103 to 9928913)
tgtctaagagcgcttcatttctgtttcctcttctggtatgtaattagtgttaagaattatcattaattgattttgcattcatcttgttaacaattcgatgtgaattggcatgagagaatatgttaagatagctggaaaactagagcaaaatattataagaaacttaggatgatttgatgttttttagattcatttgtggttgatgttacaaaattcttttttttttagcttatttttcacaggcctttgtgttattgtgttccagggtacatgtttattgagatcaaaccaaattaacgcaaaagtttgtctctctatatgttgacatcgataattatgggaaatgttttggattgcatcaaatctaaagacaaatatgttttggccttgttgacttgttgtttcctaaatgtgtgttctagttcataaagtttattgcaaaaaatagaaacaggttttaaacaactttacataataaatgttgattatatatgggagatgttttggaatttttttttttaatgaaataaatgttttggatattttcatcacatttgaagacaaatagggttttggctctgttaattcagaaggtgggtcctagttcataaatatattgcaaaagtagaagttgttttgtccaactatactaaagatgagcggcaagaacctaaagttgatttagtttagagaaattgacttggtctacagcaaaagttgttagcatgtttcttgcgttgatttcattcaagtgtttgtatgattttataatgcagcttgcctgggaagatatattatatccttaaaaagg

SEQ ID NO: 41896 - DNA, 556 bp, Arabidopsis lyrata
  Intron number 3 from transcript 329544 (locus 329544) deri ved from phytozome v7.0 (chr-ID scaffold_7; pos 9734693 to 9735248 reverse strand)
tgtgcagaagtacctcgaggagcttgtcaaaattggtaaagattcaattacgctatgtcatgtgtctatattaatatataccgacaacaatatatgcttgtcctatatatttatctttttttttgtcttatatatcaaatatttgctggcataaactttggattcttatcatgtcttataatattctcatgcgcatgttatatctcaagtttaaacaaactattaaacatattacatcattctcatattgtatcaaatcactagtcgcaagtttaatacgccatattcactattgttgatggtccacaatagtggtttacatgtactctatggtttatttatatatatgctcttgcctaagaaaattagctgattggaaaacttaagattattgttgatcaaacttcattatcttttttagaagacgtttagagatttattggatcactgtttcttttgcatgcttgaattcgatgaacgttttacttatctgtgtgtcaaattatgaaatgtttattcagaattccccggatcaaaagcggtgagtgaagctacg

SEQ ID NO: 41897 - DNA, 533 bp, Arabidopsis lyrata
  Intron number 2 from transcript 935697 (locus 935697) deri ved from phytozome v7.0 (chr-ID scaffold_4; pos 22904437 t o 22904969)
atccctctgcctcctcggcaacatgtagactcttgtcaaactgaattggtaagtggagtggcaatgtcctcttctcctgaagaagaagactttgttgcggctgtaaagttcatgggacctctggtgggtatatatatgcccggtcaagccgatgagggcacctccgctatctacctactcttgaattcggttacttggaacaaggtaagttgatgtattccaagagagatcaaaggttctacatgccatgttctggaggccatcacttgtggtcttggagtggtataaaatccaccgaccctcagtaccatcacttgcgctttcacaaccttcctcagttttcaatttcagagttgcagcttttgaattcttgttacaggacacaacaacttgtcgagtctccctcgggacaacgtttcctagtcaaatggtaggaggttctttcttctagttgtttgtttgcttttaacggtttcatgttataattaagaacaagttgtgtttctttcttttttgcctttggcttggcaggt

SEQ ID NO: 41898 - DNA, 485 bp, Arabidopsis lyrata
  Intron number 1 from transcript 936040 (locus 936040) deri ved from phytozome v7.0 (chr-ID scaffold_5; pos 1152262 to 1152746)
tgggtttcttgggtcactggtaaagattctaacttcaagattttgttgattaatttatcacaattcttgaatttttaatagttaagttctctaggctttgaatttgtctcttgacttgaactagaattgtgagatttgttcattttcttctttaggtgacgctatagaaagaaaagatgatatttttgagacgcccttattgttaatttgcaattttgcattgagtttatggaaccatggttcagttttataaagatagtattttttgcagatattggttgtaatgttgactgacttataatgtgttataggtcttgaaccagcaactaagtactattataggtgtggtgacagctctgttcctgcaatgagtgaggaactttcttgagactttgccactgccaagcaaagatgcatatcctcgtcgaattgcctttgttggggatataggtcttactagtaacacaacaaccaccgttgaccat

SEQ ID NO: 41899 - DNA, 494 bp, Arabidopsis lyrata
  Intron number 2 from transcript 324038 (locus 324038) deri ved from phytozome v7.0 (chr-ID scaffold_5; pos 17311843 t o 17312336 reverse strand)
gcaggtgggttggtgatgttttgaataagatgcatgcgttttctagtccatttttgagccattgtttttctgtttactgtcaattagcatggtttgttagacccattagcttccgctcaataaatttatttatagttaccttgcaatctggtatgctcttcgcagtccaatcaatgtaatgatcaaatcctttgttgatacctctgcagcagcttacttttatatgacttgtctttatgtttttttaacatggttctgtcttgtcatcaatagttgaaacattgtacagatttgaatcatgtcattttgtcttgtttagttatctgattattctccatccatatgcgagaagtttgtttatacagtgattgtgagattaaccaaatttaatttcctaccagatgctgtctcccggtgtgatgcttgtcaaatacactaaccatttttactatatcaacttctgagcaggtcactgtttgcctcaaaagttatcc

SEQ ID NO: 41900 - DNA, 772 bp, Arabidopsis lyrata
  Intron number 3 from transcript 331481 (locus 331481) deri ved from phytozome v7.0 (chr-ID scaffold_8; pos 14222299 t o 14223070)
caggtgagatcagttttctatgcattggaacaataattctgcaactctcttttcttatggtttgaagaaccctacggtagttaaaacttgtcattgctatttacttggaaacttaatctagcttcaggggaatatagattggtcaatatgctttggaagtaatcttttggttagaggaatcctggtctagttatacattaatgaaatgtgaaatgttagttttatcagttctaatcatttcttttaaactttatatggcttactattcacctggaatctttatttagcttcaggggaatatagatgggtcaatatgttttgtaagtaatctttttgttagaggaattctggtcttgttagttttacattaatgaaatgtgcaatgttagttttataagttctagtcatttcattaaaacttttcattgcttactactattcactttgaatctttatctagcttcagggtaatacagattggtcaatgctttggaagtaatcttttggtttatgttaggatttttatcagcggtgaagaagagtatctgttcttaggcctttatgtggtagttagcctaaaaaagcacagaaatggcaacctaaagcatggtgtgtgcttatgttgagtaggattattttggttgatgtttgtatggtaaactgtttgcagaagcttcaattcatagtagagttgactaaatcaaaatttagtgttttagtttccagagtagctttgtctgaaattttgcttctttgttatgagtaacagaaa

SEQ ID NO: 41901 - DNA, 597 bp, Arabidopsis lyrata
  Intron number 2 from transcript 926743 (locus 926743) deri ved from phytozome v7.0 (chr-ID scaffold_2; pos 15949190 t o 15949786 reverse strand)
cctccctctacttctcagtacggcgtaagttttttcttggtctccttcatattcacaattactatttcataacatgcaaattaaatttgcaaacttagatttgtacttttgattaaattttaatataaagcgaagtgataatatagcaaaaataaatagtagcggaatgaaacactagaaccaaattttgtgacgtatttctttttaatctctactaaccggtggttgaaagcatgatgtaattctcttctgtgtttattttattttgtcgatttttgattgattttaagtgtacattgattttttttgtcaaagtttttttgtcaatacttatttcactgaaaattttagaaaaaaacttaaaaaattgttggagctttagtattattggggcggaggcggacatacctcatgagagccaccataattgtatttctgttgtttttgcatgattagtaatacatctacggaattatgttatgaattacattagtatgatgagtaaatgcacaacggcttgatacatatattttatataatataatattgtgtatcatgacagattttggatccacatccaagtgtagtggcgacaaa

SEQ ID NO: 41902 - DNA, 457 bp, Arabidopsis lyrata
  Intron number 2 from transcript 475243 (locus 475243) deri ved from phytozome v7.0 (chr-ID scaffold_2; pos 2859728 to 2860184)
tccagttttcaaggagattcttaagctccatctcggtgagtcttcttcaacgcgatttttggattaattttcttttgaatttgcttgtctgtttcttcaaatctatcgtattgttgctcgtagagtcattttctgggatttgaactcgagatttctcagtttcctgctgagaattcattgatttgttcactttgtctaattacttgttaattaattggatttgaggctaatatataagctatttcattagtcttgttataattcgcttagttggtgttggatgacttgcattatgctcataattttggtatttagtggtcaatgtttggatttttcatgtttgaatccactgattagctgtattgttttttggtatcaattagctgtattgtttgcccttaattttggtttaatcttgattttgagcttcttctttttttttaatccagtgacaggg

SEQ ID NO: 41903 - DNA, 520 bp, Arabidopsis lyrata
  Intron number 1 from transcript 912906 (locus 912906) deri ved from phytozome v7.0 (chr-ID scaffold_1; pos 13854269 t o 13854788)
aaatatttggaccttttttatatataaattttcttttaaaaaaaaatgttccggaccgtcgcacctccgcccacccctttaaagccggggctgaagagcacccacccaccaaaagttggaagtgcatcaattggatggtacaaaacggacgtcgcttatttgtttttgagcttttgaatgctttctctatgtgcgcattaaccggcgcaatttctcaatgttaattcccattgaaccaaaaaaaaaaaattaatttcaatgaaataatacacacccaaattccagaagataaacgacatctacgtacacgggtcagtgagattatacattcttaacatctacgtaaacgtctaacatcaatctaattttgtgtcgttaaggttgatatattttgacggatctaaacaagagaaggtggtaaatctcttaagtggtgaagattattttataagtttaggtcaaaattcaagagccgagtcagcaaatttctactataattaggtcgtttttgttattgcag

SEQ ID NO: 41904 - DNA, 638 bp, Arabidopsis lyrata
  Intron number 1 from transcript 943858 (locus 943858) deri ved from phytozome v7.0 (chr-ID scaffold_7; pos 294317 to 294954)
cttccttggcgctgccgcagcgcttgtcttctcctgtatatcccatactctcttataatctccatcttcttttttgtttttttgttcttaattgttcactgatcttgtgtgtgtttggcctttggatcggccctgagaagttcaccgatctgtgtgttcctcttgatttttcttataaatttgagaccttaaatttctctctagatttgtttcgaaaattctagtttatcatctttaatcagtggatcagattcttaaggaactgctctacactggttttgagacgagtcctttttcttttctccgttggttatgtactccaggatgatctttctagcaattgagactttttagcctagatctctattgttaaatttgttggtgatctcttctttgtccaacatatcgaaattacctagggatatttgctggatttatcacgctttgtgattgccgtgactggtactaattgaacaagtaattatttaccatcaaattgctgagttgctttcatcctcgtcaattatattttatctacagatccaaggcatgttgatttacttgtgtaaagcacagttagattgtgaacttaacaagtgtgtttttagcctgacatggactttaccctttaacaaggt

SEQ ID NO: 41905 - DNA, 717 bp, Arabidopsis lyrata
  Intron number 1 from transcript 948499 (locus 948499) deri ved from phytozome v7.0 (chr-ID scaffold_8; pos 2301343 to 2302059 reverse strand)
aggaattcaggtatgtcaatacaacaactttactgaaattccttttaacccctaatttgacttttgcttaaaagggaaacaattgttgtccaacataaaaacgtatagatttggctcataactctttcgattattgctataaaaataatactcttcgattaaaaaatatttatagaaatcttattgttgtataaatgtcacgatgggacgttcgaacaaaacataaaatataagagatgagaggccactagcccttcgcctatattatttcataatgaatttagaactctgtattttattaaagattttgagaaattcgcttagggtttgatatggatcggtaaacactatttgcggcaatttggggttgtacatgcttgaaaccaataataacaccggttttatgacaccaaaaacttatatttaaaagccaacaaaaaaactatgcattgcacagcttgtgtcaacaataaaccacaaagtggcctagcaaagttatcgctttgatggtttattgtaaaagttcaaaactttagaggtttaaagtgaaaatggtggccactttgaaggtttttataagattttcccaaaaaccatgctaaagaaaatttgaagtactgtatatgtaaattctgaaatacatagactaataaccttaacataacttcttctttaatttcagcgaagaatccgaagttgtggaggagatctcggaag

SEQ ID NO: 41906 - DNA, 575 bp, Arabidopsis lyrata
  Intron number 1 from transcript 477856 (locus 477856) deri ved from phytozome v7.0 (chr-ID scaffold_3; pos 2137418 to 2137992 reverse strand)
ttctttttccttagcagcattgcgtaatctatctggtgtgtattacgtcacttcctcctgatctctctctgtgtacgctcttgtttggtgcaattcaacaatgtttttgtagatttgaaagcttttttaattacccttttgtttcacggttcttcttaatcttacttttgtagattagaaagcttatacttcaaatactagcaaatcttgttttcacagaaattaggcaaagggttttccaatttctgtttaagatatgaaggttttattgcttatttttcccggaaagtaaaaaagagaaaatctccgaatcttgcaagttataatttttataactctagaggaatgttagaacttgtgttaatggaattccaagtcagatatgaatattctcttaccatcttttgtccttataactgttttaaattccaaagtttatattttatcccctgtttttttcccgggaaaacgattctcaaaaaacaaatttcctactttgatattattttatctccctcttgctctttgatttaatgcaactacatgaatttatcatttacagagttcaagatcat

SEQ ID NO: 41907 - DNA, 916 bp, Arabidopsis lyrata
  Intron number 2 from transcript 475731 (locus 475731) deri ved from phytozome v7.0 (chr-ID scaffold_2; pos 10909791 t o 10910706 reverse strand)
ctcggccatcttcctccttctcgataaacaaggcaagctcataatctgggatgttctatgtgtttctgtgccaccaaataccgaagcgtttcggaatcatgctagaacttaaaagattgatgctctcgtacacatttttttagcactcaaaaacttcgtctggattctggaaggatactgtatcattcctgaaacacagattacaaggatcttctaacatcttgtagtttatggagacgatttctcttagacctgcagtgtcggtgtacttagtcgtttatatggtttaatttctggggacttcaacaggcatgtatagatgcggagaagtttttgttgatagtgtcactaaagagctccagtaagctaagtagtccacatagggttatctggtgttgttcttttaagcaacacggggaaaggcctgcctagtatgtgcagtcttgcggtgtttaggggggaagttcagaaatttcacttaatagtaaatatgatccttgatcgtttatctctttacgtgggggtatatgcacaatgcatgaagttcatgattggcctcttgctacatctggaatttcttcggagtttgatggcagtctcagtttttttatttccttgctacaaggaatttgtttttggcatcagagactgactgatagcgccagtgtgattcatatgaagttggtcaaaattgcatgtttccgcccatttcatttggtttctccttcgatggttctttactactacgtcctggagctctttaccttgactggtttagtactttcaggcaaattggtggtttctcatcttaaaagaaatttgttgattaatgcgtggcttcaagattctacagatccttttcgctgacttgatctgttctactggactagcttgcccgcaggaagaggagcttgcc

SEQ ID NO: 41908 - DNA, 392 bp, Arabidopsis lyrata
  Intron number 1 from transcript 475731 (locus 475731) deri ved from phytozome v7.0 (chr-ID scaffold_2; pos 10910894 t o 10911285 reverse strand)
ctccgatctgccttgtttccctaatctggtaaagtttcgattcctgattcatcttctttagatgatttcgcgtataatttttccgattgttttcgattatttttcactttctcgattacgaatctagatctagagctttgagccatgtttctgagatgcgattacgagtcttcgtcaatttctttgcagtgattttttgttttctcggtatcgtttatgacaatcgtgttctaggttttaggaatccgttgattcatatgttccactaatcagtgattcatcgtttaatccggtgaggttcttgatttgtgtatttgaggctaattgttattgtctttaccctaatttgttcaggtatcaaaataggccagtttgattttattggattgaag

SEQ ID NO: 41909 - DNA, 623 bp, Arabidopsis lyrata
  Intron number 3 from transcript 486544 (locus 486544) deri ved from phytozome v7.0 (chr-ID scaffold_5; pos 20020891 t o 20021513)
acttctcttcaggtcagtccataaatttaaatcttcatttcatttattagctattacgtaaagtttgttaattatcttcatgaattatgcctaatgccataataatataactgaaaattgtagtaatgaattgtctagaaatgtgtgagagagaattcggcataatttaaatttccgccgcttataattgagaaaatcacaagtctagtcgtttcttggtagcacgagaaagctgaagaaattataaaattttcgtcgcttttttcccactggaaagacaccattaagtattgaataaaataaaattaatcttttgatatattcgttggaaaattcgagtatcatgattataatatcattggtcagaaaagaatgtttgtttgcaataaatgattcttttctttataggcatagccacccatgtccccattttcaactttattttatatattctttatagcttgatcaatatcacttagtccaaaagtcattgcatcttagaaaatctaattcttagcttgatactatggccttatcttatgtactttaatttgtcacatacaataagatctaactttcgtttttaagatccaacgaacggagatcacgtggggaaatcaatc

SEQ ID NO: 41910 - DNA, 937 bp, Arabidopsis lyrata
  Intron number 1 from transcript 474711 (locus 474711) deri ved from phytozome v7.0 (chr-ID scaffold_1; pos 30084224 t o 30085160)
taatcgggttcgtgggcaaaccgagagttgcattggtaatcttaataacctcgcagatgctttgtttgtgtcttattccttgcatttatcaccttattgttttgttttgcctgttgttggttgaacatgttgagagaaactgtactcctaagaattatgtcatcaaatttagatagataggtctaagaaataggactaaatccgttgcagttttgtgtgtctctctctcgttttgggttttgtggtcttttctttctcaaatgggttatcacagacaatcatgtcagctttagtatcattgaatggtgtttcagcaatggttgtttggattgaataactcaatgtgtgtaatcccctctagccttttctgtttcgtgttgctagccttctttttcacggcttggatttttgttttcttggtcgaaaactcttatcttgtctccagatcagttcttcatttatcacttctctcgtcagttccagtacatgtcattttgataggggcctcttattttcttttccacaggtcccatatctgctgtaccaagacgaaaccatgtgaatatctttgtacagtgagctggagagatttgtcgaagtccattgttcaccaattttctcttttctaagacacaatacaagtccctttttttccttctatgagctaatacctcatacattcattctgtatatagattctttggttcagattctgaaggacataggagtttcttttggttcaaacttcaagtgtatagggccattattctctgtataaagttgtacatgttcataccttgtctataaaaatagtgcattcacagccaaaacattcggagttcatctctgtttctactcaagctcatttttattgtgtgtattgctgctacttaccttatcacactatttatttctgcaggagaaaatttgagcactg

SEQ ID NO: 41911 - DNA, 703 bp, Arabidopsis lyrata
  Intron number 1 from transcript 474805 (locus 474805) deri ved from phytozome v7.0 (chr-ID scaffold_1; pos 32309982 t o 32310684)
acaggtactttgattttgtttccgcaaaagtttcttctttcgcgtttgtcttccgcataattttcgcgtttgtcttttttttttggataattcatacaaattcaatcaagggttttggatttttacttgagggtagttgtaaatgtatcgccttttcaggaatctgttagtagaagttctaaactgatgtttgagatctcgatttggttctaatacactttctttgatctgattagtagaaaaataaagtttaattcatcattagatttgtatgaagatggaagatttggtcactaagatgagattaatgactagaattttagactatcattgacattttcaacacttcatagtttaatgtttttgctttcgatatttagtttaacttgaattgatgagaacttattagtgtttagatcttcaaattacttaatgccctatgtgaaagatcccgaattcgcgaatttagctctttttatcattcgctatgatgttatgcttgtaaacagctgtgtcctcataccaggctcatggcgatatcgtagacgtagttgaaatgtttattttgctgtggtttttgaactttccatgtttctgacactttttgtttacattattgtggttttgatttgtctttaacatgctttcgcgtttaactttgttacttgtgtgttgtttgttgcatttggtaaacagctgaaaa

SEQ ID NO: 41912 - DNA, 448 bp, Arabidopsis lyrata
  Intron number 2 from transcript 471419 (locus 471419) deri ved from phytozome v7.0 (chr-ID scaffold_1; pos 5211779 to 5212226 reverse strand)
ctcttctctgatcggcttcgtctcggtgaaaggaggttcgttatctgccctaatttttgagcttgatcctctttatatactttgattcaaggattaagtattggtttttgctgtttcgatctagcattcttctttgtttttccgggaaaaagttatgggtttcgcgcgaaaatctctggttgcttctgagtcattgaagttgcgtcttttttgttcctactcttctctgcgttgctttctagattgtacttgtgaagttatgtactcatctgtgtaatcggtggagtaaatttttggttttactcttttgtgtgttttggaaattggcttttcgctacattttgtgtactatccttttgattggctctgtagcattttgtttctgcatttggttttgatgactgattcgtttgttctgattttgcaggagaagatccgttattttctt

SEQ ID NO: 41913 - DNA, 735 bp, Arabidopsis lyrata
  Intron number 2 from transcript 484185 (locus 484185) deri ved from phytozome v7.0 (chr-ID scaffold_5; pos 1009123 to 1009857)
ttttgaagaacgtaagagtaacgattcggtacattgttaatttcagatttgacctttttaattctggttcatacacattttaggaaaaaccctcacaaaaaaaagtttccgcttttgatttcttctactcagatctgagtactcactgttactccatcttctttcactctttgattttgcttacaaagtgtctctcttttcgattttgtaagtctaatttattccaaaaaacggtttttgagtttttctggtatttgttcatatgaaatttaggtttttttttggtgttttcccgctaaatctacatgggttttggtttgtagtcgtcaaaatctctgcttttgttcactttagtcaatgggtctatttatgtgttcctttggctttcgttacttttgattttcgtctctctctttttgatttatgctttaatcactgtgtagttgatgtctgtgttcgtcttgtttcgaactgttagggttaatatttatttctctctctcacgcactctctgctttatgtcttgtgtgtgtttctagggtttctgttttaagatttttgattctatgtttgtcgtatgtttcagcttcaagtaaaattgatggctccatggcttttgctactgtaaattcatagaatttgtttattttgacctggcgtgtgcttatataaatgtgtttttttttttctgtatatgcaggtttctatttttgtagcaagtttctaattgtagcc

SEQ ID NO: 41914 - DNA, 694 bp, Arabidopsis lyrata
  Intron number 1 from transcript 913383 (locus 913383) deri ved from phytozome v7.0 (chr-ID scaffold_1; pos 17094639 t o 17095332 reverse strand)
gagtggcggacggaggttataaggaggtggggcacgtgccccacactaacttattattttgtgtttgtattagggatttgaaacaaaaagttagcatatttagttgagttttatataagcatcccatcactcacaagttcaaacccctcttatgctgcaattttttttctttcatttcctattagttctccaaatactcttctaatattgtttttggttagccctctttatttaaatgtcagttttaaattttgtttttattattctgtctttagttaatctaaaaaatattttcatatgcatataagatttcaaataatatatacaaaatattaaatagattcaatagaaattatttttaatatatattgtgccccatacaaaatatttgtgtagatccgcccctcatggaccactggcggcaagcttcctctcttaggctcaggtctccatgctctttagtgtttgggtgtgcgttttactatgatggctcattgaagagagagatacaactaatacacacataatgaaacccttctcgttttctattttgcttcatttgggcctctaatgggggtatcttatatcaaagcaacccaacccaataacgtggagcggagtgttacacagtcacttccatctttagcgtatttttaatatggtttcatgtgaccattggggttaggaggcgcat

SEQ ID NO: 41915 - DNA, 574 bp, Arabidopsis lyrata
  Intron number 1 from transcript 477623 (locus 477623) deri ved from phytozome v7.0 (chr-ID scaffold_3; pos 1215940 to 1216513)
caggttacaactacatttcgattctcgaatagtttagtgatttttgatgaattatctttgaaggttgaatgattacaacattagaggaacattagtgatcgtgaaagttgattgatttggggtgaattctctttggaagttggagttgagctcaagattacatgattagaggaacgctagcattaggttcttggaacttgaaaatcaagctcaagagtacatgatttgacaaatattagcattagttattagccatttacttcgactgcatacgagtttggagatttagcttgatgcattgggatgagattctagcatggtataagagtgatctccatcagtgaatgatttcagcttttgatatgttcttgtttcaatcgtttagctcggtagcacaatgctgaatgtggagattagagataatggcaaatttttcttctttcttgaatatgttttttgtgatctgccttaacgaccatttgtgcattacttgatagccttcagacttggtttatgcaaaagtcaaaaactgtttttgttgtctcttcttatataggtgagctattgacaacag

SEQ ID NO: 41916 - DNA, 455 bp, Arabidopsis lyrata
  Intron number 2 from transcript 483735 (locus 483735) deri ved from phytozome v7.0 (chr-ID scaffold_4; pos 22348503 t o 22348957 reverse strand)
ggagtccaccttcattacccaatatctgttataaggtacaacgcgctaattcgcataattgactctccttggttctggttcaaaagagctttctcggtggttacgtgtttgcctttgcttgtttgatttattgtgtattggacaattcgaatacctctcttgttttgcgtttcctgatttaccatttcgttctattggatgttaaaggctcaaaatttgttcttgtttgttcgtcagataccgttaaagagatgatttttttcccaaaaagagtttttgctcaaccagttccttgaattgagagtgtatagtgcttagcttattggtttcttgaagaccagcttcttcattacatgttaagattcagggtaggctttctgagcgagtttcattatcttttgctgaagtggttaatctccattttaattatgtctcttctttttctactttggtgg

SEQ ID NO: 41917 - DNA, 467 bp, Arabidopsis lyrata
  Intron number 2 from transcript 494432 (locus 494432) deri ved from phytozome v7.0 (chr-ID scaffold_8; pos 1652526 to 1652992 reverse strand)
gcagagacggtggagattaaaccaggtgactattctctctctctctctctctcattttctttctttttcgctttcgatctatgaatatactgcaatttgttatgatatcatgatcttgtagaccaaccaatatatatttctatgtatctcaaatttgatctaagaactggttggattgtgtcttctttgccttttttttcttttttttttcttggtcactcaaaagtcaaaactaatcatcaagttgtctagagagatgattgtagaacaagattttttttttttgaagaacaagaaattaatttgacttgactttttttttttttttactttgaaaagaattttatatttatagtgaatgaataacgaaaaatgggaatttctcaggctgatgctatgtaaaaccaatttggttgacttttgactgaatttgtgtttttgtttttttttgtctgaagaaaacaagg

SEQ ID NO: 41918 - DNA, 745 bp, Arabidopsis lyrata
  Intron number 2 from transcript 927851 (locus 927851) deri ved from phytozome v7.0 (chr-ID scaffold_3; pos 1036104 to 1036848 reverse strand)
aggacaagcggttagtaggtttacattggttttgacattgtaattgatttcgatgcggtttacattttattgaaattagaattgattttcggttcggtttacactggttaagagaagaaaacaaaataatattcacgcgatggaaattttggagacaagtgcgttgattcaaataggcatgatttctaaaggtgtaccccttcaggaattgctctcactcgcgcaacgcgcacttggtgcgagtggtttcgaaatacagccttctgattggctgaaaaactctaaaaaaagtgaaatagtatacatgttgctagctcctctcttatgttattatttattttttcatcttcttctctcagtctgatgaaagtagttgtttttttagatacaattgattctagtcgatacaatttgacttctctcaatctcatttaagatacaattgatgatttgattctattggaggtcttgggttgcttttgaaatccattcatgtcaccaaaaaaaatacaaatggttgatgaggatccatcgacaaaaccacttggaagattttgtctactgccattatcccattcatgtgaaaccatgattatatgattgcaaactttcagtttttaaaccatgattatatatctactgccattatcccattcatgtttctgttttcttttgcagatgagcttctcgtatgacttgttgtttgtgaaactttattgtgatcatagagtagaattacagccat

SEQ ID NO: 41919 - DNA, 694 bp, Arabidopsis lyrata
  Intron number 1 from transcript 933703 (locus 933703) deri ved from phytozome v7.0 (chr-ID scaffold_4; pos 14910968 t o 14911661)
ggcaggtatgcttgttattccatctgaatcttcttatatgtatttttagaattatactcccccaaaatcatttaaagtagtacatgagcatattatttggaaatgcaggttcatcaacaagtcattaaatcatcactgacatatcttcgactgcgaaaaagtttataagaagtgtgtcgtactttgcattactagttagtaatatgaagaaaaagctagcttctgttgatgaaagctgtattctgatgtcagttctatttttttattgcagaattagtttttagctcattttcctgagtttttgtttttatttccactagtgatcgagatacagatataaagacacgagcctctgctatgtagtgccatattgctttctgaaaagcagttggtcctggatttgtttcgatagggtatgtcctggttcaataacttttctttaacttttattttaacatgattacaatgatgattcatggctattgtttgtagctttacaacatcacagaaagagcacaagaatctcaaggttattagtaaaggcttgatatggatggtttcggcagttgatgactttggtgtcccacttttgaaaacttaaggttcacctgtttattaaaaacctgcagtatctaagttattttcattatgacaaaagagctttttatgtcgattttgatagattttagtaagg

SEQ ID NO: 41920 - DNA, 521 bp, Arabidopsis lyrata
  Intron number 2 from transcript 476789 (locus 476789) deri ved from phytozome v7.0 (chr-ID scaffold_2; pos 17114469 t o 17114989 reverse strand)
gcaggcaagtaactcccaactttccttttttatttgaacttaaaattgcgttaaaatcattaaaagattctaattggagcaaaaatggacatctttttttgtctcagtttcttcaaaattaggaatgtcatgtgtacttaaatactatatacgtaaacaaaaaaacagtaattgttactttaaaagtacgtaagcacaaatttcggtaaaaacaaaattattcattttcttgtcacacttttagcttgctagtcgttttcttgctccatatagtgaaagtatatgaacgggtctttaatgatttagtaacccttactaaacttttacttaactccaaattttgtttgtgatttattttcaaaataatggtatatttggaagttttgttctgtttggttttgggtgataatttagagcatttcttacttataatcgaataatgttgtatcaccgccggtctcgctagaatccgaccgtgtttattagttggaaattatacttgttcgtacctaataaaagaa

SEQ ID NO: 41921 - DNA, 862 bp, Arabidopsis lyrata
  Intron number 1 from transcript 485242 (locus 485242) deri ved from phytozome v7.0 (chr-ID scaffold_5; pos 14053770 t o 14054631)
gtaacggtgtcgtcgtcgccaaacgatttgcctctcttcctgaaggttcttgatttctctcagtgcccttttgcgtgcttcagcttcttgtttacgatctaattcatttctgtgtttcgtttgattctttgttcgattgtgaattgagaaaatggcgattcgagatctatctatacgtttcgtagttcgactgatttggggaatgtcaagagatcagatcgatttgttgacagggtcttaggggtttacggtcttagtcctctaggttttcgaaattcgattcctttacatcagatttcgcttaattctttgtcctactgcgttttacgatctttagtcctctggtttgtcaaattctctgtcttttcatcttcttctgagttttaatggttgatcttcaatttcttggccacaatcttttgaatttgagactcttgacttgtcctctgtagattggttttatgtttgatttcaattccttgctgaactagattaactttctgatacggaagttttccttttaatggttggtgtttcctttttctgataaatatggatgaagatcgattgtgataatcatgtaagaatataagagagcttttgttgttatataggttttacctgagggaagaaaagtctttctctttgggacttaaactccaacattatcatagttgatttctgtttatgagattcattctgtttggttcgtttctcttatagcagtaatgaaatctcattgattgaaagctacgatcttgtgatggtatcatggaagttgtgcttgagaaatacttggattcttgtgaagaataagaacagttgattaaccttcttaatgcttgtttagggcacagaaaga

SEQ ID NO: 41922 - DNA, 966 bp, Arabidopsis lyrata
  Intron number 1 from transcript 896182 (locus 896182) deri ved from phytozome v7.0 (chr-ID scaffold_5; pos 845017 to 845982 reverse strand)
aatttgatttcgttgattcataccttttctggaaggtttcgtagagaagcaatttcgagttgtcgtcattcttctctgtttggcatgagtcgtaggatatcttttctagagtaataaagaagatgaagagcttcttgatctgccctttacactggtttatcaccctgacgatccgaactttatgtaagactaatttgtttgaaaaaaactcgtgaatgtgtttaattagtgataaagttttaagttttttgaattcaaaatttgtaaatatttcaaaattgtagtgacattaaacattttcagaacctaaaattaagttttttttaatatataattttaatgataattcttctaagtaaaactctatcaatatgttataactattctatatatttttataaaaagttgaaattgacaaaaaaaataagcaaaacatatacaaaaactatagtttttttttcaaccaaaatttgaattaaaaatcgactctattgtttttttttttttttttttttaatttccattaattaaaagaaacaaattacaagacccaaaggcccaaaaaaggcacgcaggcccaacatacatggcaaaagccgaaccaggcacgcaggcccaacatacaaggcaaaagccgaaggggctcgcaggcccaagataacaaacaatcgactctattgtttgttatctaacttagagagatagagttttacataaggaatatctaaactataaattacatgtcgaaattaaaataataagtgatgataactataattaccaactacaaaaaaatagcaatagttataacaacgatgcccacctacaccatgtccttgaacaacgtttatgttcaaggagattctctacctaatttccgtggagaaattttttagttgttcgtttttcacatcgttccaatatgatttgattgttatctcttcaagcctagcgaggagtatttgg

SEQ ID NO: 41923 - DNA, 689 bp, Arabidopsis lyrata
  Intron number 2 from transcript 481266 (locus 481266) deri ved from phytozome v7.0 (chr-ID scaffold_4; pos 2369674 to 2370362)
agaacaacaagaggaaattgcgtttatcgaaagttggttttctataacaagtatctatttcttcaatcttgtttctgtttgcaaactacattcttgttctcattaggtttattgtttgattctgcttatcgtgatgggtatatagttttgtgtgtgtgtgaaatgcattcatctctttgaagctttagtgattaactgtgaggtgactctcgttgatgttttagcacgaggtgtgataactgatatggttggaaaagaacaagctcttagcagtaacgatgatagagcagacgcaaaaactcatatttttcaagctagatatataatctgagacttggctgctaatgttcttggtagtaatgcacagttttatttgtcagacacacacatttcgatcttcaaatctcatctttctttgtgcatttgactccttgcacctagacattaccatgacactgagattcactgcatcggcttccattagaaatgtgatttagggagacatctattatcaataactagtagaaacaagaaaaaaaaacttatggcatcaatctgatgatcacaagttcaagttattacttgtttttggctgtgttcattagcaacttcactgctctgttctttctgacatgtctagctttgtattctgtcttctgtaatgcagaccgaagtgaaccggagcgact

SEQ ID NO: 41924 - DNA, 720 bp, Arabidopsis lyrata
  Intron number 4 from transcript 941972 (locus 941972) deri ved from phytozome v7.0 (chr-ID scaffold_6; pos 10532801 t o 10533520)
gatacagattcaaagccagaggtatagatgttacttcttttttcaatttgcttcagttggatttgtgatccgtttaactgtctataggtaagctttttacttacctctctatttgacgttttcagcaactaatttgcatatccaagaagctttttttttcttcataatttagggatatattgtgttagtgtgtaaacatttatctaaatttgcatatacacgaagtaattcatatatatttgcatatactagatttgacaatcaatctttgttttttcacaatctctgatttttgaagtgacttggatactgagaatttttgtaactatgctcttccttttcaggtcaggatccttcactcgctaaatcatccaaacatactcaagttctatgattggtaagacttactagctaatatccacgacatgttttcttgcaggccaattactctcactcttctttgaaaaaacgcagcttcttgtgttctctgtgaagtatgttcttcatggtaattcatggtctctagttaagttgtgttcgcttttttttttgtctcagatttagctgtagtaggcagtggtaagaaacttttctgctccaaataccttttctagcttatccattccctgcttttttagattttgtttattcattctatgaagagaatgcttgacgtgatgcggagcaacaagcatctcaaactcggattgcaaacttgga

SEQ ID NO: 41925 - DNA, 602 bp, Arabidopsis lyrata
  Intron number 1 from transcript 351649 (locus 351649) deri ved from phytozome v7.0 (chr-ID scaffold_6; pos 12026328 t o 12026929)
tcctggaaaatgtctttgtgatgagacggactcagatgctataggctcttagctcattttctttcattggttgcctgtctcattaagatctgctacatttggagtatgtggctcgctaatttgccataaaaaatggtatctcttccagttcgagtatatcgacttctcggggatggtttggagcgtttaagataatctagaactctatcaattctttcagcagagagaagagctatacaaagggtttttattcggttcctctccaaaggacaaataagataattggtattcgttcccttagagcatctccaaagggaggttctctctaatttttttgatgagttctcatctttaatttgatcaaaaataattcaaaattgattaaacaagagagaaacgattctcttaagagagttttgagattttgtgagaggcggacacgtgtcagtggttgattggaggaagcattttaacaaaagaaaaaaaaaaaactctcaaaggaagtgatgaacaaacgatttcgtgagtttttggatgagtcgacgccgatctcgtggtcgtggacagacgttcaaccaccaccgccgttgtttctgtaccgg

SEQ ID NO: 41926 - DNA, 351 bp, Arabidopsis lyrata
  Intron number 1 from transcript 890243 (locus 890243) deri ved from phytozome v7.0 (chr-ID scaffold_7; pos 10263945 t o 10264295)
tcttctcactgcttgctccaaacaggtaattatgcttcattgtcataatcattttccattgtttggttttatcgttgtttgggttttgttctgtctgatttaggacaattgttcagtaattgaagttttagggttctcgataattgtatccttagttacaacactgaagacatttgtcgattagaactgaattgagttctgattttctcttttttttttttttttaattttaatttgattttgtaatatcacagagcttttatgtttcgtctgtgtgtagtataactaatgaccctttatgtgaaccattatctaggattttcttgacattttctcgaaattcagtggagc

SEQ ID NO: 41927 - DNA, 454 bp, Arabidopsis lyrata
  Intron number 1 from transcript 482558 (locus 482558) deri ved from phytozome v7.0 (chr-ID scaffold_4; pos 16998727 t o 16999180 reverse strand)
tacgctttgttgtctttcttaatccgactgataaggtactttttgtggaattttgcttttcttcattcactttgtcttaatttcttcttctcttgtttcagatttagattttgactcgtgggtttgctttagtttgtctataggaacaaagttttggttctatctgttttcaaaatcagagctttccaattttgaagtttcaggttaaacatggtctgtttttatgaatatggtgatagttggtgatcgtaataatagcgttttgttgcaaataataatacaagtgaattttatgattttaccgcttaaaacaagctttagattcggtgtgatgtgtatgctttaaccaattatcaagtgcaggcaaagagttttgagtgttagaaagattattgatttcaatgattgttgacattagcattgttatgttacaatgtttagtccttaggatcag

SEQ ID NO: 41928 - DNA, 682 bp, Arabidopsis lyrata
  Intron number 1 from transcript 488480 (locus 488480) deri ved from phytozome v7.0 (chr-ID scaffold_6; pos 6657291 to 6657972)
actgctcagtctatagctccgacggcttgtgataggtgcgttttcagttagaagtgaaaaagctttgctaatttcgtcaatgtgggtttagaccaaaaaaaaaaaaagagtcttctttcatttttgtttttctctgattcgaaatgggttcttcttctctctctctgcctcgcttccaatttctgcaattaattagcttatgattagctcaaaagtgttttgtttattcagtttccgttggcatggtatcaacattaatgtgatactaataattcaagctttccgttacaggtttattgtagatcttcctttttcctagtattcgaatcgaaactgtgtggtcaacatcaaagaagattctgtttcctctttttctccacgaatactgaaattgttccacttaattttttaagctcaatactgttcttcttcgtttgatataccatttctggttctacttcaataatcctcttgagtaaaatggcctaatcatatgaaatacttgtatgaggatttggtaaacatcttgaggttttgttttatctggtcaacaagttctttctttggggttttcagttatacaactctgatcaagtgttctgacttatgcgtcactcttactgaatatctcaccaatcaatttgcagagtaaggaggcataccatctcggtgtttgtgggtg

SEQ ID NO: 41929 - DNA, 520 bp, Arabidopsis lyrata
  Intron number 1 from transcript 951076 (locus 951076) deri ved from phytozome v7.0 (chr-ID scaffold_8; pos 20717799 t o 20718318 reverse strand)
ttatcaagtggttagttcttaatgactcgtctctgtctgtgtttgatcttaaccagaggcagaatctcttttttttttacttaggtgtatatatctgattttatggctaaagtttgattttttctgcaggtacgttgggattgtcttgttggcacttgcacttaatttgtatcctgagaattagttgatggattctgagaattatatagttctactatgcctttttattgttttgtttctttacctttaaattcgaaattcctcgaatgattccaccactttcttatattgtctattaaaacttctagatagatactgattcttctttttttgggtatgttgaatcactcaagaggacaaagaaagtactaaagaatagattttttctttcattgatttgagttgcaaactaagacctagggttttagagtatgtaaagaatctcatgaaattgtgtttccttgatggtttattttgctatgtagtctcattctagctatcaattggaacaaatatcttc

SEQ ID NO: 41930 - DNA, 427 bp, Arabidopsis lyrata
  Intron number 1 from transcript 945969 (locus 945969) deri ved from phytozome v7.0 (chr-ID scaffold_7; pos 8964837 to 8965263 reverse strand)
tactgattttggattgtctgtcttcattgaagaaggtgagtttgtgtaatcaaatcctcttattctggtttttagtgttatacatatgcaaatgttttagatttcttaagattctggagttatgttgtggatatggattttgccaagaatagtatgtatcttaagaaccttgcttcatttagtgatgttttagtaaatagtggtaagcttgaaaacagaggttttgctagttttgtgtgaacttgagaatgtgtgtaaatggattattacagaacttgtgtgttctcttccttttcttatttgtcaaattatgccagtttagttagttgatataattttgtgttcctatgcttgatgtgttttgtttctaaaccgtaaaacacaaattgcagggaaagtttacagggatatagtcggaagtgcgtac

SEQ ID NO: 41931 - DNA, 708 bp, Arabidopsis lyrata
  Intron number 3 from transcript 902111 (locus 902111) deri ved from phytozome v7.0 (chr-ID scaffold_4; pos 20205193 t o 20205900)
agtttaccaaatctcatctccaagtaagtggactcttaccaaagcacttgactgtcgatttcttttgagaaaaaggcattactttaaggagtatattgctcataagtactagtaacttaactcattcaggaagtgttgaagttatatagccaagagttacctgacatgaaatatgcttcaaacactgggaagcaatctgcatttctcgagagatgtgtttttaaagggtaaatctttttctttatcataaccattctttacttgtttcaagctggactttccattatagacacttcttttcgccaattttcacttaaatcattgagaatggagcccattttgagattaatatggaagctatctaatgctttggtttaaaatttcactatcttgcagaaagtactgttctttggttttgaagtccacgcttggtggaggctcagatgaggtaattaaatacgctttagttatttgctctagtaagcaagtcctttatcaaaagcagccaaggccctggaagaatcttaacgatatgtgtagttttatgcacttaagaatttgctgtttagtttcaacaggaagaatctgttttatttaatctgccaatgaatcacattttagatcctctgctccgttgcatctgaattgattatttggtgtgtgctttttgtagatcttagctgcaatctcatatcaaatagtccctgc

SEQ ID NO: 41932 - DNA, 774 bp, Arabidopsis lyrata
  Intron number 2 from transcript 494176 (locus 494176) deri ved from phytozome v7.0 (chr-ID scaffold_7; pos 24515565 t o 24516338)
cgatatctgattccctcctcgacttggtttctgaggtattcattgtgataactcttctttgttttctattctttaacgagcaagcaataaagtatggacataaattcacatattcaaatttttagtttatatatatattgaaatacagggagggaatatagttgaaatgtatatactttgaagtttgtttgaaaaatcgctaggtgctagtcgggcgttcggtatgggcctagcgattaatcgaactaaattaatcggggattagttttagagttattttaatattttaaaaatatattaatataatattattttcaaaattgtagtaaacacataaatatatatttaaggcaaatttttatgatttttcattaaaaattatgacttttattaaaattttgagcataaattattgtaaaacatcacaaacttccaattcaaatgtttaaataacaaaaaaaagagttgttatatacttgcaatcacaaaataattaggatatgtaagaataggcggaaaataatcggattatgctggaattattcggattaggcggagagtaatcgggtgactgatttttttaagggattagtcattaatcgaggcgtagagggtgaccctagcgattaagtggggagtaatcggactaggcggggatttttagaaccgtatattttgaaatcataaatttgtgtgtatactgcatgattaaaaaagtgttgttatatgatttttgaaatgtgttttgagtgcagggtattgtgaaggaatcag

SEQ ID NO: 41933 - DNA, 732 bp, Arabidopsis lyrata
  Intron number 1 from transcript 925557 (locus 925557) deri ved from phytozome v7.0 (chr-ID scaffold_2; pos 9176296 to 9177027)
ttttacttcgttggatattcattcgaatatctggagcacaaaatagatcaaatagatcacaaagtattcgaactatgattcatacttaatactcagacctcgtagccggacttctttccgttctatcttataaactttaataaatcaaaaaaaatttctgcttttaaactcttatttggatcaaaggacaaacgcttctttgtattttatgtttttagtcattatagctatttttttgattgaataagtgatgatccaatggttctcactcagtgaactttggactttgaaggtttcattgaattatcgtggttctcgtatgaatctgaggtttcaattgattagttaagtagggtcttaacaagagaattcctatcaataataaagaaaacaagaagaaatccctatccccgttccatacaaataccaaataaaaaagacaataaagataggtaatctagaagattcaagaggcctgtaacgatcaacacaacataaagacgaatgagcttacttgattttttggcatttaaccacaaagacgagctttcgcattttgactctttcatatctttaaataatattgaataagagacaagtttaaaactttatattccatatctgtttcaatcagtatttaggtctttttttgtttgagctgtacgagatgaaattctcatatacagttcttggagggggagtaaccttggtttacctatctcaataaagttt

SEQ ID NO: 41934 - DNA, 357 bp, Arabidopsis lyrata
  Intron number 1 from transcript 473334 (locus 473334) deri ved from phytozome v7.0 (chr-ID scaffold_1; pos 14008373 t o 14008729)
aatttctttgtctcaggcagctctcagtcccaccggtattaacagaaactagttccctcttccatttccgagaaaaatttcccttttttcgatttttacttcttgggtttcatattagagctatttcttcttgtgggtttaagttcttggaagatatcaagtggaaaaaattaatttttgggctgtcctgcaatgatgctctaaaataaaagtgtataagacttggaatgtgaatgatttagtgtgaagtaattcaaaacagtttgatgaagtttgtcatattttagtgtgatttgtcggtggggaaagtagaaaagctaagttttttttttggggtcttggttgtttaggatttcg

SEQ ID NO: 41935 - DNA, 419 bp, Arabidopsis lyrata
  Intron number 3 from transcript 481235 (locus 481235) deri ved from phytozome v7.0 (chr-ID scaffold_4; pos 2033851 to 2034269)
ttattgatcttcaatttggtattcctttcttttgatctctctatctatggaccaacctttttttattattatataacacttttgggttctttctaatgatagggtttagatcaattcttgatttctttgtgtggttttagctaattgttcttccccaattaggatttttacttcataagatctaacagttctgattagtactaccaacaatggttatgtaatacttgacttcgtttgtctgaaaatttcttgccttattagaaatttcttatggtgaatgttgaaaatttgattaggaaagcaatttcttatgtgttgatttttatatctctactattgactattgttttttttttttttttaattcacctgttcttattgtagaattgtgtgattttatcaaatcctgggtttaaaga

SEQ ID NO: 41936 - DNA, 241 bp, Arabidopsis lyrata
  Intron number 1 from transcript 946563 (locus 946563) deri ved from phytozome v7.0 (chr-ID scaffold_7; pos 11902885 t o 11903125 reverse strand)
ggtcgaggaatctttttcccaaataaggttcttaatcatcttcttaaactcacttctttatttgattgcttttgatttggatgtgattatgaaaattgggtttaactctatatttgttgttgttgttgaattgtactcttctcttgttgaattttgtattgaatcagattcctttgaatatcgtgcctctatgaagcttctcatttgtgttttttttcttcttcttaatgatcccagtgtg

SEQ ID NO: 41937 - DNA, 1047 bp, Arabidopsis lyrata
  Intron number 1 from transcript 949683 (locus 949683) deri ved from phytozome v7.0 (chr-ID scaffold_8; pos 14480819 t o 14481865 reverse strand)
cttggtcgggttttggagatcaacatattggtgtcagttcacaatatacaaccctacaacgaaacaaattgttttgatatattttagaaaggcttatctttattgataatcatagcaaagtatttatacacaatggtatttcctaatcttagatagaatcatatcatagaagatattattgacatattcttgaatatatcctaataccctcccgcaagttggtagtccgaaatttcgaacaccaacttggacaataaatacttagacacggcaaggatggcggctaggtttagtatttgtagaagattgaaaaacagcggcttgtcaagcggcggcaaagtagaagaactcacatgtcttcgggtcactgaaacactagtagaattgtagaacgtatgtcgaagttgatgatgaattgcttgagagtgaagtcttcaagttaaatcttcaaatcaatatcgtgatgtagaagtaccataatagctcatgtatctcataaaactttacgtaagaggtcatgaaataacgtgtgtttcaccaacaatagaagtcaacgttgaagcaattgttaggatcaaatagtaattagatagtgcggaaaacacgagaaggatatattttttttaggtttagaacttttagaaaatagaagaagatagcggaagcgataccggcttttgtagcggtggtggctagcttaatgattttagaacgaaggcagcagttgctgaagccaagcaacggcggcagtagaaaagaaattaggtcacaagagctttctgctctgataccataatatattttagaaaggcttatctttattgataatcatagcaaagtatttatacacaatggtatttcctaatcttagatagaatcatatcatagaagatattattgacatattcttgtatatatcctaatatgtttccttaccctatttgccctcaacctcaagatggatttactacttcttcgggtacgaccctttgaagaatcaatacacaagtagtgtgcctagctaaacaaatagatccgtccaaaaac

SEQ ID NO: 41938 - DNA, 993 bp, Arabidopsis lyrata
  Intron number 1 from transcript 354696 (locus 354696) deri ved from phytozome v7.0 (chr-ID scaffold_7; pos 9569120 to 9570112 reverse strand)
agtgtgagtcagagaaaaattctttaatagagtaaaaaaaattataggattttttaggttgacaagatttgtaatttttttttttttaatcacttcatagattgttgtagctttggtttcttgtatttaaataatccatcactatccattacaaaaaaaagagtttgtacacgtgctaaactagtttttactaaatcctatatattagagttttatatttataatgttttcttcattttaactctaattaataaggacaaaatacaaaatattacacaaatttcaaatataaaaatccatttttatgaatttgtttttctgaaacatatattatgattagttgggagttaaactaagttcgaatttgttagaagtcatttttgtgtaataatatctagctacaccatgactcttgacaaaccaccaatcactagacattagtctaagctctaaagttgacaaaattacttaaaatggatataactgtaaaaggagataccctttaattctgatttattattgatatttttttttggttggctttttgtaacaatggaagtctacatctaataatgagccaaattattttccatcaagtaataattatctccacgtttgaaaaattgcaatatttgttaaacgcgtacatggtgatcaccattccacatcaacttcgcaaatggtctacttttgactcgaagctaacgtctttgttttagctactcgtcaaaataatcgtattatattcctataataatgacgttgatttaatattttggtcaaataaataatcccaaaattgaaaatctatataacctcattaactcttgttctctgcaactcattcagtttctcaacaaatctttagaaactttctaaaccagacaaggatcaagaacattacttcttctttgtctgagacttcaaacacaagaaaccaaaaatagatatgagagagcttgttctatctctgcttcttctcttcttagttca

SEQ ID NO: 41939 - DNA, 945 bp, Arabidopsis lyrata
  Intron number 1 from transcript 482071 (locus 482071) deri ved from phytozome v7.0 (chr-ID scaffold_4; pos 14856802 t o 14857746 reverse strand)
aactcaatctcgacctcatcagatccgtacgtttaaatctctcctctctgatatctagatgttttacgattgtagaaacccagatcttcacgagatctagaggttttttagtttgaattttctgggaaacgcagaaacaaaatttgattaggagtgttattgggaatcgcgttattgaatttagaaacgtagaagatgatctcactcactggcggtgacttttctttctttctctaagattttttattttttattttcgcgggtcctatttagatccacgtgatttctccaatttcttttttcaatttttacccaaaataaaagctataaccttttggccgtgaacaagcaaattagttaaccatcaccatctagcttgattctaatgaaatgtttcccttaagtggttttgtagtgagcttaatctgtgttcttttttatctatattgatagtcttgagtatttttgggttcattgatgtgatttaaagtaaatgtgcacatattcgtgtaaagtttgatttttttttagcaatggtgggaaatgatgccaggttgaatatttatgtgtaagaaaagaaaaaaagaaaaaaaaaaaaagaatatttatgtgtaaataaagatcttgattttttatagcaatggtgtgaaatgatgtcaggttgaatttttttgtgtaaatttgtttatatattaacctttacagctaatttcatggcgaggatcttttgcttttcttgaatagtttgatactgattgacccttgtcgtagttaatattcaaaacataaagaatcataaccacatttgggtcccttgataattatattccttatgatccaagttgtgttactttttggtaccaaactggcttttgttttcttatgttagtttgacgtttatgtgaccaatgtggtgtgtttttgtgtaggcgaaagtgtttcact

SEQ ID NO: 41940 - DNA, 436 bp, Arabidopsis lyrata
  Intron number 1 from transcript 493847 (locus 493847) deri ved from phytozome v7.0 (chr-ID scaffold_7; pos 21616651 t o 21617086 reverse strand)
ggtatcttttggtctatctctgcttctcagtctgggtaagtttcataatcatactccttggaaactagatgttgaagattttgaaagttatattgatgaaataaattattgattttaattggaaattcagatataacttatgggttcacttcaaaactatattttttttctttcttcttcttcttcttcttctaagttccactagtgaagttcttcacctcaagacaaggttctctaggtttttcttgattcgattgatttttttcttttgagcggacttaaactcatcatacaaggtttcttggtcttctttaaaagttaaaaaaaaaaaattctcttcttcttgaagttcttgattagttcaagaaaatgttctgtttgttttcttgatccgatttgatttttgtttttgttaaaaaattaaaagagtattaga

SEQ ID NO: 41941 - DNA, 675 bp, Arabidopsis lyrata
  Intron number 6 from transcript 480678 (locus 480678) deri ved from phytozome v7.0 (chr-ID scaffold_3; pos 22277891 t o 22278565)
tggtgtcccaatagttcttgttggaaccaaactaggtaagctccttttttggcatatatgtctgctaatttcttttgtgtcgtattcgagacaaaacgcactcctgttttttggttttccccattgcttcaggttctctagagagttgtgaaacttttctacaatacatttactgcttctgttttgatttgttcacgtcgacgagatacagtatttaagcttttgcttcaccagatttgtgtttataatacattcgttggttctgttttgatttgttcacgtccaagatatatacatgtagtagcttttagctcgtttgatctagtggaaactaggcctgatttttggtatcacaaatcctgcaataatctaggtttacaagcttgtctgtgatgtttcttctttctgttctattaaatattgggatacgttatgaaacaattggtatatcttatttcacattttctcttgatagttaagttgtaagagacaaccacatgcaattagggctggttttcccaataatctaggtttacaagcttcttctgtcaaaattggtgtagcggtttctgcttcaatttcgccctgctgcctgatccatctagacctaatatttttgtgacttttctgttgcttattttttgtgttcatcataataaatgccagatcttcggg

SEQ ID NO: 41942 - DNA, 494 bp, Arabidopsis lyrata
  Intron number 1 from transcript 945390 (locus 945390) deri ved from phytozome v7.0 (chr-ID scaffold_7; pos 6522266 to 6522759 reverse strand)
agaatctgcttcaacaaaggcccctccaccaatctgtatgtttacttcattcctcttttgtttaagtcatcattttgccgtaggtatgtatgtgtttgatcgattgcttcgtcgaggtgaatgtgcaaaggtttggttctccggcatcaattgagtagctcgaattatcaatttatctttttacgcttagaatcgataactggtagaccaaatctaatctgctgattgacttttgaggaatctcctaatttttttctgaatttccttcctgtgatagtttcttcaatgagaacaactagtgtcacgattcttactcttgtgctggaaaaagtttctcttattatgattgccttctttcttatctttcatccggctacttcttctgtacttctttgcttggacacacatttgataattggagtaaatatctcaagtctttgtcttgtttctatgaaacaggctacatcttaccttggtcatcaccgctactgtct

SEQ ID NO: 41943 - DNA, 673 bp, Arabidopsis lyrata
  Intron number 1 from transcript 352198 (locus 352198) deri ved from phytozome v7.0 (chr-ID scaffold_6; pos 20935539 t o 20936211 reverse strand)
gagtcggggtgagagaacaaggaagaaccaaagtaaacgacgtcgtagaccattttgtctcgttcaatattgtctggactctggagcaagaataccctgaaaaaaaaattatttttcaattactaaaaattatataaaactcaaaatagatcaaatatttttcaatcaatacaatcaaaacaacaaaagtctctacagtgttgacacctcagtttttggagtgttctggaggtgatacctcagtaaaatcgatacccaatcaaaacatatcaaataatacaactcaaatttatcttccaataatattattctatttttccacatcactttttctgattaaatttcaaaacaatcatttgttttggtccaaccaaagtaatagcccacttaatagtccacttagaatacaaaaaaaatctaaaagcccttggattttaaaaacgtagtaggtaagcttccgagaataactccaccgccggcgtccgatctttccaccgtgtaatcgtggttgactcgccgtacagtctcttccaattgtgaaacctccggtgcttatgcctctgctcctggccaatcgtgtcggccgagtttcttttgcgtttaggatcatatgcttttatcaccggaactcggcgtagacaaggatttgctcaataaaggaacaacaaaagaa

SEQ ID NO: 41944 - DNA, 365 bp, Arabidopsis lyrata
  Intron number 1 from transcript 927446 (locus 927446) deri ved from phytozome v7.0 (chr-ID scaffold_2; pos 18972457 t o 18972821 reverse strand)
ttttcgaaatcgttaaaaaggtgtcaattcatgtcgactttgaaaaaccatatataacacaatttgctcgttgcctagcttttgaattgtttgatgttgcagaaagagttgtggagaagaaggtttagagaactatagagatgtcctcatctccgttccgtgacaacttttcctggaggaagtacggacagaaaagatcaaaacttcttcctatcaaaggttagtaattagtacaaaaaaataaaaacagagtaaattttcttctctgtttttgtggcggacacttgtctactacacggttgattaggctaaattattgataatcattgattgcaattgtcacaggtgttactatcgttgcgctt

SEQ ID NO: 41945 - DNA, 803 bp, Arabidopsis lyrata
  Intron number 3 from transcript 944077 (locus 944077) deri ved from phytozome v7.0 (chr-ID scaffold_7; pos 1160312 to 1161114 reverse strand)
acaaggcaagaatcagttagcgtatggtagtgtaacattctttaatgacaattcatcggtacattttatagttttcctagtcgattttatgttacctcctctcttccttgatgtacatccagatcattttgttctcgacagtaagtcacttcaattcgacattgtttgagatggctgtggacttgagaagtaatggttaacggattcactttatttcaaaccgtatgattcaccgtgacatgaagccacaaaacattcttattggtgctgggtctgtagttaaggtaatataacctttctttggctcctatcaggaattatgtttgaaattctgtttctatgcttcccacacacatgagttgttcatattgttgtttcttaaagataagagttaggaaagaattatcgttacaatacgataattagaaacttggatctttccgtctatgatttatgaaccatggatctttccgtctatgattgtttcagaaaactaagttaatcatgtaagtactagaagaggatacggctagccaggaatctcatatacttagctaaatataagtagaaacgtaagtattttcaatgcagcttgattatatgatttatttaacttctctttggcatcaactaacttgtctcccctttgatttttcagctatgttattatattgtaggtggagaaactcatctgagttgtcgtacttcaactcctattgttatgaaagctattacatctataaatgtgatgattgtgatggcttttctttcatagtttcttattttttctttattcttgtgtt

SEQ ID NO: 41946 - DNA, 709 bp, Arabidopsis lyrata
  Intron number 3 from transcript 908631 (locus 908631) deri ved from phytozome v7.0 (chr-ID scaffold_2; pos 14398010 t o 14398718 reverse strand)
ggtatggccatgggaggaatgaaggtaaactgatgtacgaagtgcaagttgctatcttagcttaagaagtttgtctaatgttagtttattttgtgtaagacttggtgtcacttacgatgttagtataagacttggtatgatgttatgtaaaacttgttttggttaatttgatattaatgttatgtattttgatgatttatgtaatatataaatagtatataaatccaatttaaaaaattatgcaaaataggattcaattataaatttatataaatcaaattaatatattcgtatagcgaaacaaaaatgctacaacataatataaaacagcacaaaacatgtgttacaagaaagtatattaaagcatttggttaatgttataataaaacgacttacaatagcatactaaaaaaatgttatcgtatgtgggacacctactataacaggggcataaaatagcatttatgaaaacgctataaatgacatattatagcacttctgtcgtgttaaaaatgtgcatttttcttgtagtgaattcatgaaacaatggctccaattcatgaaagtttttgtcctttcaatacctaatgaaactgtgaaacaatgattgattttgtaacctcttctaaattctttcatgaatctcttgcgatgtttcatacaaaaattgttagctaaatttggagaacttttttgaatccttttccaa

SEQ ID NO: 41947 - DNA, 484 bp, Arabidopsis lyrata
  Intron number 1 from transcript 919978 (locus 919978) deri ved from phytozome v7.0 (chr-ID scaffold_1; pos 4634623 to 4635106 reverse strand)
agaaatcgtcctcttcctgatcctcctcacgtcgagcgatttctcgtgagcttccttcactatcccttcctctttttctttgaatttccgctagttttctaatttatagcatatgggtattcaaaattttctttcaaggataaacaattaaaggttggcattttttcgtgctctgatcttcttgtgctctatttgtttttgttcaatatgaatcctcgattaggtctttaatcagcacagttttgagatgatacagaatctggaagcgtgtgatttcatttatgtatattgtggaatatctggaaaacaaatgtgagaattctctagttttgagcaaaaagtttcgtcacaagtctgtacttccacttctcactatcatcagagtaattggtgctttcttctctagatgatagtaaatttaggctaatcactgggtgatatattcgtggttgtgattaggtgttgaaggaagcttcaaggcttt

SEQ ID NO: 41948 - DNA, 885 bp, Arabidopsis lyrata
  Intron number 1 from transcript 925616 (locus 925616) deri ved from phytozome v7.0 (chr-ID scaffold_2; pos 9493423 to 9494307)
ttggtggagaagacctcaggaacttctacactttggttctttcccttaaactctcttttgtctctttccttcttttatttcttcggtgctacgtaaaacttctttccgaaaatagatattattttcctttttgggttatattgaaaatattaaatatttcttgggcatacaaagaccttggttaaaaatgccccacaattagatatttattgtttttcccatgattaccttaattagatatttcatccagttattattattttttttttattatttttttttttttgggcaaatcatccagttattatttaagtatataaatttatagtcgaccacaaacaattctcttctttcttgacctcatatctaaatcccagatgcttttccaccaacttcttgcataaattttttttttcgcataagaatcttgggatttttcttttgttcctcctaataatttaagtggcatttgtttgtttgtatgttttttttcaataatttctgcgatactttttaaaaaagcataactaaaatatatggcttcaaatctgaaagaaatagaaaattgatgttcatttaaacaaatatatatctatatatatatatatatatatattgatgaatctctgttgtggaatatttgaagactgtttaatgaggacattcaaggctagcctttaagatactctcttctatatatagatatgtagctactaccttttttctattcatagttttatgtcttgtgttgtctcattttccaaacttaaaaaaaaaaagagaaaaaaaaaaaagaaaatcaaaggaccttttgctttcttgatttctttgagaatgataatcttatcttcttatcttctttgtcttatttgtttaatgaaggtt

SEQ ID NO: 41949 - DNA, 847 bp, Arabidopsis lyrata
  Intron number 1 from transcript 346013 (locus 346013) deri ved from phytozome v7.0 (chr-ID scaffold_4; pos 20596921 t o 20597767)
ctttacttgacgtggttcccagtttcaaacttgtggtgtatcctctttggctggaactttctttatttttcgaaaatttaattcgatttaattattataattgtcaaagttctccaatttgtacaatgctaattcaacactcgtgctgcattaggtgaaaacttattcacactgggaaacctattattgttgattaattaaaacttttttttgttagtgttgcaaaacaaaattatcatttatgttgttatatatatttatgaatgtagatacggatatgattgaatcgcacatgttaacacgtattgttccctgccggggaagaaggaaatcaaaatcattggagaattataagcatcctacctaccttgattactaatcattcgtagaatcattttccctaaaatgtcatttttttttctaaatacacccttgattactgaatctacataccaaatcataaaaataaaataaaacgtatcttatagcaatattgtttatgctatttcaacactcgtgctgcatcaggtgaaaacttattcacattaggaaacctttatataaaattatgtttctcatgatatatttctaaattatgttactttatgaaacgtatgcattcagttgtaaaacaagtttttttctcttctcttttttgaatataatttaatatctattaaaaaaaaatgatatattgttgattaaaaccttttttttttgtgtagtacaaacaaaaacttgtttttttacgctatatggacctgtctcaagtttttagcctaggatttcaaaattttaaaatgctcgacaagtttgcctccaggaccagatacgaaaatcaagaaaa

SEQ ID NO: 41950 - DNA, 679 bp, Arabidopsis lyrata
  Intron number 1 from transcript 920353 (locus 920353) deri ved from phytozome v7.0 (chr-ID scaffold_1; pos 6149226 to 6149904)
gacagaccgctgaaactgctcgacagttcttacaggtttgttgctcgaaactgcttgatttgttttgttctaagctctgattttttagtcaactgatggattggtctgagtgagcttaaccttgattcagtttctgattttgggtctaaagtgtatgtttatttcagcttagggacatattgttgaagatattttgggatgtcgacttgaaaccctagattgggtttctaaatctttcagcttttgggaaaaatttctgacattttgggtattcgagttcaaaccctagattgagattagacgccgagagtttttttatttatttgtgattctcggttgatctggcttttcgtgtaacgagatctctgtgatttgagagtagcctggtttggtcttcattgtgattgagggtttatgtgatgagattaacttgcccttttttaaattgtttgttaacttgcccttttttaaattgtttgtatgatcacaaacctagagacacattccggaatttagctgtttttataagttctgtttagcgtataatgttgttgtttgggattcaccactcttctgttgatatttagttattatctccgtacttgtgtaaaattactaacatagtggtatttttctatcaacaggcgacaagctggaaacttgaggaagctattcagct

SEQ ID NO: 41951 - DNA, 860 bp, Arabidopsis lyrata
  Intron number 1 from transcript 491980 (locus 491980) deri ved from phytozome v7.0 (chr-ID scaffold_7; pos 5902728 to 5903587)
tacgctttacgactccttcctcttctctcgtgtaagtttctctctctctgaaattctctgtttttcaaattacatttctccgtcgaagttttggattttcggaatgaacagcgtatgtagtgttctgcctcgtgatttttgtaattggtgttctgggtttgtgatttatgttgttactcgccactaaattcctctgaacttctaaaaccataatccattttgcgtaattgagatttctctaattgtgactttgatttattctctgttggatccacggtttttaccctttcaattgcttgggttaagatgttttctatgagtaatgcctctttgtttcattatgttttggatccaaatgcaatcagtgaacagtttatagtctggaagcggattagttccaattggatctgtttcatttcacataatcacacttgtgttgtgaattctttgctcttgcgttttgaataagtttacttactggtaccgaattggtcgttattctattcatgagataagcattcctgttattctgcattgtgtatttctttcttttttttccttctcttacttacataccctgtgtttgttccactgccagctttatttcttctcttcttttatgacatttctctatctaagttggttataagatcatgagaatcaagtattcaggcttagtttatcattaagtcttttgattattttcccatgtgagacaacgcttcctagtttcatccaatgcaggagtcattgattgcatgttatcattgcgtttgataaatagataacttccagtatattgacctccattcatgataaatttgtgtgctttatcagaaagggactaagaagacaccaag

SEQ ID NO: 41952 - DNA, 386 bp, Arabidopsis lyrata
  Intron number 3 from transcript 918959 (locus 918959) deri ved from phytozome v7.0 (chr-ID scaffold_1; pos 817957 to 818342)
tcgccagggtaagctttctttttctagcatgagtagtcattatcttttcacagagtttgaagctaactttttcttgtcattgacatattgcctggattggaattttgtgattagtatgagtaaaaataagattttcagatgagaagaaaatataggtttctgtaagaaacttgcttgactgttttttggtacaattgttattataattatgtttgatctcctgttttaacaaatgtccaatattgaaatttttattgctttgagtatcttgtgatttgatgtttttggtgacagtgtgttgtttgtttaagtttttgattactcagataaaattttgtgtgtttaatgcagagagtttcacatcaaatcattcaaattctacctgg

SEQ ID NO: 41953 - DNA, 601 bp, Arabidopsis lyrata
  Intron number 1 from transcript 928281 (locus 928281) deri ved from phytozome v7.0 (chr-ID scaffold_3; pos 2635344 to 2635944)
tgtttatctttgtgcgtatctatagccgtgtgtgatatggtactgatccatgtgcaccagtgtagttgtagtagtcatttgattccaaagctttatagatgttttcacggaactacaatcaatcgttaatccatgtacatacaagcacttttttgtgtaaatattactgacaatttttctctggcttgatgcagggaatgttctgtccactttgatctccctctcacatatgtaataatcccttttcttctttctcatgtttttttcttttttcacattcgttttgtgtatgtttgtgtttacgtatgtactctatttcgaacgtttttttttttttaattattttcttccttagtaatttgtcaccaacataatttgtatattggtaaggtttactataatgcgtgtaatctgtcttgttttagtggtttctagctaggatcattactcctcagatttatataagtattactgttttcagatttatataagttttgttgtttttttacaaaaaagaagaaggatcattgtagtcaagagttataagcattttcatgtatatacaggccagagtatatacaaatatacaagaagaaatcag

SEQ ID NO: 41954 - DNA, 165 bp, Arabidopsis lyrata
  Intron number 3 from transcript 481213 (locus 481213) deri ved from phytozome v7.0 (chr-ID scaffold_4; pos 1847302 to 1847466 reverse strand)
aaaaattcacgaagaagtaagttttttttttttttttggtaaatcaagaagaagtttgatttataatccatgatttaaaattgcttttgagttacattaagagtgagtttgatttatttttttgaattaggtacaatttcgatttcgagaaggagaagccattag

SEQ ID NO: 41955 - DNA, 389 bp, Arabidopsis lyrata
  Intron number 3 from transcript 473497 (locus 473497) deri ved from phytozome v7.0 (chr-ID scaffold_1; pos 15387937 t o 15388325 reverse strand)
tttccaggtctctctctctttctctcttccattacatttcttcttcttcaccaatggtgtttcttgatagagatccatttgcatgtgtttttttttttttttttttgtgtttggtatataaaaatagtaatatattcgagatcaaagcatcttcaccatccccaagaaaattaaaagaactgtttgtttattacagagttggttcatgagtttctgggacgttttcgattttgtaaatcccaagattccttaaaaaaaaaaaaatcgatcaaacagtaaccataaatttttccagctaataacgacaataaaaaaaaatattacagaactgaattttttcatgttttggaacaggaagctattggagttaggttacaaacgaagttcaa

SEQ ID NO: 41956 - DNA, 372 bp, Arabidopsis lyrata
  Intron number 2 from transcript 474895 (locus 474895) deri ved from phytozome v7.0 (chr-ID scaffold_2; pos 168463 to 168834 reverse strand)
cagccaaggaattgactattgcaagtaagtttctgtttttattgtcgggtttacattgagttattgctagtaagtttagatttttgctttgccttcaattgcatggtgtgtttcggatgtgtctattcccatgacttatttgttaactatatacttaataccacccaagggtcacaaaatctgagggattatatcagattattctcttctttagtttgtcgggacgatgtaaactttttgattgctgtttactgcgtatacattaattgttgaatgctgcattggtttggatttagttattggtaatttttttgttcttattgattatccccttctaaaaatttgacaattggtgaattctaggggacattt

SEQ ID NO: 41957 - DNA, 916 bp, Arabidopsis lyrata
  Intron number 1 from transcript 916050 (locus 916050) deri ved from phytozome v7.0 (chr-ID scaffold_8; pos 5956329 to 5957244 reverse strand)
aagacacgcgcatagaaggaggaaggaaaagagaggtgacgtctgtgaggagagagaaaaaagcttaattgtttcttctttttaatatttgtttttcttctaccctatttgatttttacgttatatttagtgtttgaaaacattaatttaaatttataaattttatagaaaaaaatctggtctttttttctctatatattatgatttggatttctaaaaaccgacaacaacttataaaaataaaaaataaattaataaacttggtttatataaagcacaaaaaaaatagtatagaagcaaataaaatactaatgattaacatagtggtgatagtggtatccacaatgcctaataaatcatgtttataattaaaaatatgttgtaatatacataatcacacaaaaataggtataatactttactatctcttatatattatacttaaaatcaacttttaactctaaaatactaaaccctaaatccagaagtctaaacccaaacccaaaacatatatctaaaaacggtattaataaatatgatgttccataaacttacaatactattctatttgagacaaatctattgaaaaattgattttcttcttctcgtcttctttacttctcttgttcattctcatccaatcaatattcatctctttttctatattgaatgcaatcgatcaattatcaaatatcaaactatgatttgtgatatgacttgggtggattcaagttggaagagggtaaaacgaacaaatgtttaattaaggaacaaatgttagatcaattggaatagcttatgaaaaagataatggtagataaacataagaaattgaattagaaaacagcgtgatgatggtgatggccgtggtgttgggtggtggcgattacaattgtagcagcagtgagtagtgaca

SEQ ID NO: 41958 - DNA, 320 bp, Arabidopsis lyrata
  Intron number 5 from transcript 947483 (locus 947483) deri ved from phytozome v7.0 (chr-ID scaffold_7; pos 21038233 t o 21038552)
cctagtttgtggcctttatatcgaggtaaataattttgtttgtttcttattctttagctttgctctaaaatccatgattaggcaccatttctgattcatttgctagagttcaatagttttgtctctactttccacagttcctagtctatgtgaaataactttgttaggaaatcaaattttcttggacgtttcagatttggttgttgtggtagcatactatggatcattgccatctgtttttttcgtttaactatattagttagtgatcttcttttttcttttcaggtttctttgttgatattaatttgttcaagtcaaac

SEQ ID NO: 41959 - DNA, 458 bp, Arabidopsis lyrata
  Intron number 2 from transcript 487419 (locus 487419) deri ved from phytozome v7.0 (chr-ID scaffold_6; pos 2281444 to 2281901 reverse strand)
atcgattgaaagaggtttgttctttatcctttgcatcttccttggtatgttgctctaggttgtattttaaagattgagcagctaactttaccggactattggttaatcgaggatgagagatttagctgttgatctttgttttatagttttattggttgtcttgatccactggtgatggaatcctgtacataatctcagtgaaattgtattagttctgttccatcaacaagttggttagctgtatatgcgttgctttaaagaatagtattaagtggtgaaattttcattagcagagtgcactccctcaataagattcaaattgctaatttaatgtttttttattgtctgaattctttgattttcttgtaccactgatgaaagtatcagatttgcacctatttaacttcttttaaaaacctacagatacgtgaatatcataaaaggcatccttctggacg

SEQ ID NO: 41960 - DNA, 342 bp, Arabidopsis lyrata
  Intron number 1 from transcript 487419 (locus 487419) deri ved from phytozome v7.0 (chr-ID scaffold_6; pos 2281980 to 2282321 reverse strand)
ctcaccactgagaaacttgtacgttttctttcttcttcgcctcaattcccgcatttgttttttctgaatgcgttaagatcagtgcagagaaacaaacttgggttgctgaattcttttaaataacaggtgttaaattgagaagaaacttcagaggttggtgttgaatataggttattgttggggtcttaactgtgtatgtagggattctaagtttagagcttcagcattatttcacaagtttgagtatattttgttgataattctcatcactagatgatgccttttgattaatgctaaccttgattcttgttggctgtaaggttgaaacctacgaagataagg

SEQ ID NO: 41961 - DNA, 565 bp, Arabidopsis lyrata
  Intron number 2 from transcript 314515 (locus 314515) deri ved from phytozome v7.0 (chr-ID scaffold_1; pos 27174491 t o 27175055)
tcgaacatgtaagatttggattaatgtttgcttgatgctttctcttgatatgtttggttactggtaacgaaagatggagactttacaaaagaagtgtactagtattgtagcttgaggccagtttgtttaacttggtgttggttttttctgttgtttctgtatcaagaagaagttttgagctctggggcttggttttgcttatggtgattcttcttttagacaaggatcaggacaatttggagtacaaggacaatttggagtacaaggacaaagaatgattgctcctcagttcatgggggattttggctctccattgtcgaacaggtaagattgggatttttgtttgttttctcttgatatatgtttggttactagtagagaaaggcagagactttacggatcaaatgtagtagcatcgtagcttgtggccagtttatttaacttggtgtttgtttgttctgttgtttctgtatcaagaagaagtttttagctctggggattggttttctttatggtgattcttcttttagacaaggatctggacaatttggagtagaaggtggtt

SEQ ID NO: 41962 - DNA, 535 bp, Arabidopsis lyrata
  Intron number 2 from transcript 474396 (locus 474396) deri ved from phytozome v7.0 (chr-ID scaffold_1; pos 28059835 t o 28060369 reverse strand)
acgtagacaacacaggcttcgagtaacactctcacatgctatattgtttatcgttatatatgctcagttgttttcaaaaatcaaagattctcgttaaaattagaaatatgatttggatacttcaacttttaagttttttattaaaccaaaaaaaatagatatatacttttaagtcttttaatatgtgaaaagttgatttttcccatgatatgcaattactaatttggtcagttcgacattttttggatgaataatttttatttgtataaaaaggttatggcgctgcaaagaataataaattttctctattaatttacattcctctaaacttttattttcttataagattttaagttcgtttcactatttacaatatatatatatatatatatatatatatatatatatatatatatatatatatatatatatatatatatatttgtattcgaaatattcttctcattatatgtatgtttaattgtctattatgtctgcagctcacttgagcctctgcgaaatttgcgtcttccca

SEQ ID NO: 41963 - DNA, 448 bp, Arabidopsis lyrata
  Intron number 1 from transcript 951864 (locus 951864) deri ved from phytozome v7.0 (chr-ID scaffold_225; pos 9879 to 10326 reverse strand)
aaccttacctctagttcacgcgaacgtgtaactataataaatctcttttcctacccattttgctcacataagacatccagcgaagaaaccaaatcctagaatggaagacatgtaaagctaatatggtgaaaaggaatgggaacgatgatcgatcatgagcaatttttgattccatgtgtgtgatggatttttcaataatctatagcgaatagaagaaatggaaaggtcataccctgaagaaagcaatgatctataaaaaaacaaacttagcatgatctgaaacatagagcttgctttagtatacaaggcaacaacacatcatcaatgtaagattggaatagaatgagagaaaggagtacccgtctaagaggtatacagaacagctctatttctttgaatccattatgacaactagtcttctcacctgttatcgggtgttttcaagaat

SEQ ID NO: 41964 - DNA, 928 bp, Arabidopsis lyrata
  Intron number 1 from transcript 935298 (locus 935298) deri ved from phytozome v7.0 (chr-ID scaffold_4; pos 21392841 t o 21393768)
tgttgtgaaactcaactctggtgttgattatcgaggtcggtttctctctctctctctctgcattttggtttactgttcaagttcttttataccctgtgtgctatctataagcttgcttctgtttttggtggttaagctattggagtcttatgcaaacctttgtgaattttgggttttagatgactcaatgccattctttttcgccatgttaatggaacctaaggatgtttgtttaaagaatgaccctttctttgtttaagaattgcttgattttgattctcttttgatttgaaaagtgcatctctgaagtttcatttttgctgagcttagtttcgaaaggctttcgtatcgttaaaccatgatatttcccaatcttgtctccaagaaactgtgtttgagacatgctccgttggaatttgagagtgattttaaatttagatgatagctttgtgactctctgagagcttctcacttgagatgttaaatcatctctagatgacagagccatatgtggttgattttgtcctttcctggctactctttcctccttcccatgtcatgtgctggtcttaataaatatctccaaatatgttctgtgaagtgtttcgagatgcatttacacttacttctgatagaatatggactttcaccttgcaaagaacctagctatggagcctttatcacctgcgatttaaggacaagaccttggtctcttgaactctataataacttacagactaggaggacttctagcttgattatctttctttggtttacctacaaaagtcagacttattctttctttggcatatcatgttgtatcaagctaatttaaaagatcttttcggtcacacacggaaactacacatgacagtatgacacaacgctttgtctctgttcttgtttgcaggcattctcacttgtcttg

SEQ ID NO: 41965 - DNA, 471 bp, Arabidopsis lyrata
  Intron number 2 from transcript 487733 (locus 487733) deri ved from phytozome v7.0 (chr-ID scaffold_6; pos 3686285 to 3686755 reverse strand)
ggacggtataactttaccttgtaatagcaagcacggtaaatttttgtttttaactatcttcttttgactgtttatcttgttctcacaattccacctttgctagtaatgtgtatcctcctctcttttcttttttatggacaacaatgtatcctcatcccttagttttcatgtttttgttactgtgttgtttcattaaggttctgcatttagttaggattttataactgcagatcttagggatttattatataactagtacttctgcggtttgggactatttatgtgctcgagggtatgagaggagatgtgcagagtgttttcttttcatcaacaacgttttggtttttgtctctatggacagctatatgcctatattagtttgctttctttggataatcatgttgacaagatttttgatgtctgctatattttgcaggtatctctctaagcctggaacaggtattcacatct

SEQ ID NO: 41966 - DNA, 445 bp, Arabidopsis lyrata
  Intron number 1 from transcript 494051 (locus 494051) deri ved from phytozome v7.0 (chr-ID scaffold_7; pos 23329095 t o 23329539)
ctatttttatagttctttgaggaagagaaagattggtgtttactaaggtgagagattctgttcttatggagatctttcgcattgtaggatggtttaggaattgaaaatcatcttggggttagtgtcttcaatggatcttgatattttgattttgggtatgtgagaatctttaaaggtctaatttttacttatttaggttgacctgtggataaatttgaattctatagctgattatatatataaagattgcatctttgatcttggtttagtttatataatcatttgagtccatgatttggtcagcttcacaattagttaaagagtttttgctttacttaatgcagttgtacaatgaaaattgcaacttgtgtggttctactgtatgagacttatcttatctaaagactgtttcttttcgatttgtttgttttacaaggttgaggaa

SEQ ID NO: 41967 - DNA, 964 bp, Arabidopsis lyrata
  Intron number 1 from transcript 901082 (locus 901082) deri ved from phytozome v7.0 (chr-ID scaffold_4; pos 15479477 t o 15480440)
aacccactcaaaggtatcatttttattatccttattccccaatttttaacctttttttttttgggatttcatatttgttgggtttcttgagaaaatgttggttttggatttgaattttgccgttgatattttgaaaaaggatcaatttttctggtattttgttaaaattgaaactggcgttttcgatttttagttttttttttcgatttgaaatttatttaatgatttttttttaccatctgtatgatatgatgccatcttttctttatctgacaacaccagactcttctctctgtttctgggaaagaaaatatatttattaatccaaaatgtgtttcttttttcttgcgaaagtttttttttattttcctcttcttcttcaattactttgaagaaggtggtagtgactattgttttttcttcagactttttatctgctttcatgtaaaaaatgttggatttgtgtatgaaatgtctctgtaactaactctttaaagcgttatacttggttagtttctgggattgtgcaaagtatataatgcattcttaagttgtttgtgtttggttatagaaatgcttagtttctctgtcttttagattttcttgctgtttggttgtttttcatcttaagatttcaatctaaagtcgagatcttgttgaatttaatgtgaatcatcaacttttcaagcattgctaatgctgatgcaatattcattggaagtttcttctttggatttatgctttgtgatctttgaaccacaaatcaactagaagtttctccttgtcctttttcagttaaacatgactgaatcagctttagttaattatatgctataaagtttgcttgcttttgctactaattaaggaaacatagttatgtgcttttatccttgagatcattatgaaatgaaggtaacatattacttactctctgcttcaataggaccacaagggaatccacacc

SEQ ID NO: 41968 - DNA, 652 bp, Arabidopsis lyrata
  Intron number 2 from transcript 923063 (locus 923063) deri ved from phytozome v7.0 (chr-ID scaffold_1; pos 23856790 t o 23857441 reverse strand)
gacgctttgcgattccttcctcttctctcttgtaagtctctctctgaaactctctgttttttcaaattacatttctccgttctcatattttggttgaggttttggattaatgaacagcgtatatagtgttctgtctcgtaatttttgtaattcgtgttccgggtttgcgatttctgttgctactcgccactaaattctctgtttttcctctaagcttctaaaagcataatccattttgcgtaattgagatttctctaattgtgactttgatttcttctctgttggatccacggtttttaccctttcaattgttgttttctatgagtaatgcctcttttgtttcattatgttttggatccaaatgcaatcagtgtacagtttatagtctggaagcggattacttccaattggatctgttttgttccgcataatcacacttgtgctgtttgctcttgcgttttgaatacgtttacttactggtaccgaattggtcgttattctattcatgagataagcattcctgttatgctgcatcgtgtatttctttatttgtctttcttctcttacttacataccctgtgcttattccactgccagctttatttcttctcttctttaatgacatttgtttatctaagttggtagtaagatc

SEQ ID NO: 41969 - DNA, 653 bp, Arabidopsis lyrata
  Intron number 1 from transcript 922950 (locus 922950) deri ved from phytozome v7.0 (chr-ID scaffold_1; pos 23054095 t o 23054747 reverse strand)
agaaggttaaagaagccaacgaatccaagaaactggtacttttttcttcttctcttgtttagggtttttttcagtttgatttgattacgttatttagggtttacggttttctttatttgttagcttaaacgtggatgtgttcaataaagcttgcttttgatcctgttcttgtcttaaatctttgtttggtctgaatttgatagaaacttgtattttttctcttgtcctctgtctagggtttttagggattaggttttcttgattacgttattttgggattaggttttcatgattagttagcttaatggtgaatgatgttaaaaaaaagcttggttttgatcctgttcttgtcttaaatcattgtttggtctgaaattgataggaactggtgctttctcttgtcctgtttagggctttgtttaatttgatttgattgctttacttagggtttagtgttttcttgattagtttctcttgtgatagaaactagtactttctcttgacttgtctagtgatttttcaatttgatttgattactttacttagggattagggtatgtcttgattatttagcttggtggtgaatgatgtttgtgtactgatttgttctgaaatttttgattgaaacagattgtgatagacttcacagcatc

SEQ ID NO: 41970 - DNA, 471 bp, Arabidopsis lyrata
  Intron number 1 from transcript 941415 (locus 941415) deri ved from phytozome v7.0 (chr-ID scaffold_6; pos 7863555 to 7864025)
ggagagaataagagatactgtcaacagtgtggaaagtatgtttcttttcttgcttcttaacttggctttgagatttgatcatggaatttagaattggatttgatagctgaatccagcggcaactgtcttagttaatctcctatgcatctcctgggcttttttatctgtggttgacttaggtgttgttcagaattgttcctgagatttgatttgcagcacaaaatcatcgaagatcgggatggttttctgttgtctgtttgattgggatagaaactctgaatctattcgttaggaaattggataacttggggagagatttgaatgattccacggaattcacatgaatcattaaatgagcttaactggtttttttcgccgttaccaactgtttagtagtcagtattattgtttatgtatttattttttcctatctatgctgtatccatcattgaggactatctggcaggtttc

SEQ ID NO: 41971 - DNA, 885 bp, Arabidopsis lyrata
  Intron number 1 from transcript 318837 (locus 318837) deri ved from phytozome v7.0 (chr-ID scaffold_3; pos 9218213 to 9219097 reverse strand)
caagtaaggatataatattcatccaataaacctaactctaattagttgatactttccctagaatgattttcaagatttgactttttgatcttgaaaatggatctttattcatttacttttcttatttttcttctaaataataactctcgatatatcttccattttccaaatctccatcatgagaaaatccctagtacacactacgactttttcataataattattactattataactcgagaatgacttttatttgatggtacaagtcatcagctgtaccagggattgatggctatgaaaagatcaactaaaatcaatcaataggtttaggatcaagaagatcttctttaaccaacagtcttttttcatagtgactgtttctaaccctaaaatatgatcagtcctccttttccatttttattgcctctcttgatttttgcgcagttatactacataacactcattaccctaaaaagtaaatgaaaaagaggatgataaatgtcttgcagattgtttcgtacctctttatatcttcacatcataacatagatatattttatgatattgtatttttattaaccctaaacaatcatacagattttaagtgcaaaccttttatcaaaaaaaaaaaatgcaattatacagctttagatctttttttttaatatctagaacttttccatcaacttgacatcatcataacatttacaaggatcaattgaaaaacgaaaacggtgtgacagttgcatgtttcaagattagtttagattgtaatctgaaatctctttttgatcaaaatcaaaagaaatggtttaagttacgcgcatatatagcaggacatgattaacgtacacatgttctaatattatgatgaaattttattag

SEQ ID NO: 41972 - DNA, 957 bp, Arabidopsis lyrata
  Intron number 2 from transcript 928863 (locus 928863) deri ved from phytozome v7.0 (chr-ID scaffold_3; pos 4603318 to 4604274)
gaaccaacagttactccaccaattctcgtcttcaggttcttcaatataaaatcttcttttaatttccttttagttttaacccaaatttatatcgatattatttgtggatacaaataaatttttcaatcatttaattagttatgataaaattgtaaaatctaaaacatgaactaactaataattaaaatcaaattattacattcataccaaaaaaaatcaaattattacatgaattcacatctactatataagaacaacatatttatgtccgtttatatgaattgtaaaaaatccaaatattatgcatgagtagttgggtatattttaatttagtttagtaaagcgggtatatgcgttattgttagtgacggttttgccaaacaaacaaacaaaaagattaaaaaaaaaaaaaatgacagttcctattggactataaggtttgattagatcacttataagttttattaaaaataagacatgtacaaaagtataaggtttgattagatcacttataatttttattaaaaataagacatgtacaaaagtcgaattttaaacgcccgaatatgcatcaacacttatgatataaaaatgaattaaaatcatgtattgtttgtcgttatcgtatggagctgggtccagtctaggtttatatgtcacgggtcgtaaatggaatctgatataacatgtagtgccattttcaatctgcctaacaatttcgattatgattccctctatctctaaatatgttgtcctgcctcatatttgtaaaacttcatcctaagaaattaatacatgattatatatgtctgtgacaattccaaaacgtaaaagacgtacagttccaagttattaatgaatatcgatcgtctataataaacagattatggagagaataatagtttttgtttaacgtagtactgtctcttatttggtttttagagaaaagttttaaca

SEQ ID NO: 41973 - DNA, 743 bp, Arabidopsis lyrata
  Intron number 1 from transcript 488853 (locus 488853) deri ved from phytozome v7.0 (chr-ID scaffold_6; pos 8275274 to 8276016 reverse strand)
cgatcgtcttcttgatttcaattgaaacaaaaaggttagagctttcgattcttgagggttttcttcaaattcagggtttttcttctgttgttatgagaatttaggattttcatatcgaggttgaatcttagcttgattttggagccgattgcttggttagggttttgttctatttgtttcattttgtggaatttgacttctaatgtgataatccattgactagactagatcattgtttttggatctttggaattgcaatgaattcaaatgttggatgttagtagcctcattcatataagtcatcttggacattgtggtctttgttttctttgttcatatttgttagtagactatttgttagattttgatagataatagtcttttatcatgattttggctgttgctagcttctttccttcactgttgggactggtcttttgatatgttaagctttcatgaccaactgtaatactaaaacacaagcattagtattactgtcatgaaaacttgaacgtcctgtgtattgcttctgcgatgccatgtattcattcattgcttaggttaattaaaattgttttcttagaccatgatgtcgccgtcttcttcggtatctaaatgctatgtagattgctttcactaggtctcaacagttatgcgcttggatgttttgctttggttattaacaagtggttcttgtctactttgcaggaagattgccaaggcaggagcaataagtgaaaaat

SEQ ID NO: 41974 - DNA, 593 bp, Arabidopsis lyrata
  Intron number 1 from transcript 926802 (locus 926802) deri ved from phytozome v7.0 (chr-ID scaffold_2; pos 16178430 t o 16179022)
gcccgaagaagatttgtagctgtgatcattgtaagtgtaagaattcttccaattctcttgatttctagggtttctaaatgtcactattatcaatttttgttttgttggttctggtttactttttgttttgaagcggctttgataatttgaaaaacaaacgaatcgcgactctgcgtttcaaagtttcctgtgaattgcttgattttgtgttactcgattttgtttaagagggattgcttttcgtttttgttttgtttttattttgtagcgctttcgataatttgattaaacgtaaaattgttacggtcggttgtggtttgttgctctggttcttctggctttttttttgtttggtttcttccttgttttgtttttctttcgaacccaaaagagatcataggcagacactcaattattagtgttctgtcaggttcttttttggggacattgtcccgtcgagtttggacccatggcttatatagtctttagaccgagactgaaaccgttcctttacccacggcttatttctttgacaaatatatttggaattggtttcagtttactggtcaaagatctagttacccacggcttaa

SEQ ID NO: 41975 - DNA, 449 bp, Arabidopsis lyrata
  Intron number 3 from transcript 480628 (locus 480628) deri ved from phytozome v7.0 (chr-ID scaffold_3; pos 22034885 t o 22035333)
ttcaacacttcatcaggctaagaacgtcacaggtgagttccattgaaatgtctttgctttccaatagaatcatcattatatgtgtagtaggccatgaaatgttttgacttttctgatgttttgaagattcatagtgttttcatgttgattagtttgcttttgcctatggaattttataactgtagtggaatcattatatgggtaggccatggaaaaactgtttggacttgaaatgttttaactttttgatagaatctgaggttaagattcatatagtgttttcaggtggtttgtttgcttttgtaagtgcattggaatcattatatgtgttggccatgtaagttttggacttttttgatagaatataagcttaagattcagatgtgttagattgttttccaatggagtctatttgtctctaattgcattgtaatcattatgtgtaggcc

SEQ ID NO: 41976 - DNA, 517 bp, Arabidopsis lyrata
  Intron number 4 from transcript 478897 (locus 478897) deri ved from phytozome v7.0 (chr-ID scaffold_3; pos 6194040 to 6194556)
atctaagaactgctggattacttggaagatcaaaggtaactgattttgcggttcttcttcttctttgtttcacctgattttgtctactttctgggaatttctagtagtataagtgactagccttcaagtttggcattactgcagggatgtatctagattgaattgcaatgtaagatagcttatagagaatgagaatgtaaatgttttggaaatatagatgctggtttgatcctgatccgccaagactagcattaggctagtggtaatgtaatgtcactgtgaatccagaagaaactactgattttttgaagcaagatagagaatgataaatctacttggaaataatggtgttttgaagcaagtactgtaagcttggacgctgtgctgtgggttttttggggaatgtccagtaaaatttctgcgagctgaaagttgttttttttttttgtgttttttctctgtctgcttgttgatctagtaacagtatatttctcggggaatgcagggaacaattgat

SEQ ID NO: 41977 - DNA, 625 bp, Arabidopsis lyrata
  Intron number 3 from transcript 899871 (locus 899871) deri ved from phytozome v7.0 (chr-ID scaffold_4; pos 3355010 to 3355634)
atttggcagctttacagtttttggtgagcttgcaggtaagctcaattcatttggtgagctttcaacagatgaaagatggtgttttatagtgttttcggttagtctagataatagttctcctaagattggttgggactgtttaaagaatcgtcttttatctgcttgtccatcctgcttagaatatttgtacttatgtcgtcaatcaagtgtctctaagcctccttcgctttatcttttcaagttcttttgctgtggtaggaaaggattgattcatgttaagtgtataattgttgtcttttgtcttgtttttttggtgttttctttagatatggttgttaaaacattaatttttggtgatttttagatgttactaaagtcttgacagggttagagtttacatacaaagagttaatgtcatgacatcaccatatggaagagttttggatatgttttcatcactgctccaatgtgagtttatctgattttgatgttatacagagagaggaatcaacaattagcaatgtgattattttaattcttcaacataccattgttcttttttcttaggaaacgagtttggtctagtttaggttttgacaagaagggccaaaaatcagtatacgtt

SEQ ID NO: 41978 - DNA, 507 bp, Arabidopsis lyrata
  Intron number 1 from transcript 948682 (locus 948682) deri ved from phytozome v7.0 (chr-ID scaffold_8; pos 3431719 to 3432225)
tctagcgagcaaggtgaagatagattgttcaaagccacaaatcaaatgaactatgtaaagcaagattttatgtcaaatttcttttatttcttcttcggttacaagttcaattttcattctgaagtgatttccttaatgcattattataaaaaataaaataaaaatgcaagattttctgtcatgtttctcttatctcttaacgttttcagtttttcgttctcaacaaaatcttgtcttaaaaatgaacagaacattatcaatctttgtgttctctctgactattgagacatcggaattttatttatttatgtgattcttgaaggttgcaagttttatggtaaagaatcaaaccatttgtgattggttatagccttcctcaaccgatgtagaaacattttcgatgatgtagtctattcgatcaactattgtgtccttattgatacaataacaccaaaaaaaactagttgttgagagagcaatccacgacaagcctacgtgaactaccgt

SEQ ID NO: 41979 - DNA, 845 bp, Arabidopsis lyrata
  Intron number 5 from transcript 894825 (locus 894825) deri ved from phytozome v7.0 (chr-ID scaffold_6; pos 14311396 t o 14312240 reverse strand)
ctagtatgactgcatctttgtttctcttctaaatttccaacttttatttgtatttgatttttatgcaaaggattctgatttttctccaactttcagaaagtagagataagtgtctttgatgtgagaactgggaggatggtttcaagggtagtgcggatgattttttcgttggtagtttgttgctgatgggtgaaggttcgtttgtaaactagctccattgactcttgcttctatttggtcatcaccctttgtttttggggagtctaaatactcttaagtttgcataatatctttgtagaaaatcagtattctgcatttctgctcatgtctatcaggctgattggattgtgaaaccatagctggctgtttagaacgtatttcagatttctaaccggagcatagaatgacttgctctaaacctctattgcagcaacactgattaagcaaaactttggtcaccttactacaatgcttcatgaggagtccgcattgctaagaactgttggaatctttgggcttattttaatatttttggtctatgattcttgcaatagtctgactatgtctttgtcatcaggcttctacttgattgcaatcatcacactaagtagctatgctagatatacttcttgaagaagaagaaagagacaacaaatgaaaagaagaagaacgagaatgttgaccctaacaaacccaaaaagcattgcttcttcattctttctaccctgggacttaaacttgaaaatacaaaacagtcagatccaatctcaaaatgttttctaactaactgttctgtatataattttgtagtacaaacgcaagaatcgggttttcaagaagagctt

SEQ ID NO: 41980 - DNA, 920 bp, Arabidopsis lyrata
  Intron number 1 from transcript 902344 (locus 902344) deri ved from phytozome v7.0 (chr-ID scaffold_4; pos 21204849 t o 21205768)
aaacagattgaaatttcctctctctaaacttttgagtaataaaaaataattcttgtgcagagagttgtgtagttttgaggatgctctataaattggatcttcacacagaagcgtatcatgacgacaagaaaacttgaaagggaactagagatttggtccatggattccaaattagagagatggaggaaaacctattcaataagtttaatcgatgtaactacgaccctttatccatccatggatggcttgtttgttcacgtggcggagcctctcaccctctacttgttgggttatagctccttaatttggtccgacttcatcaaaactagttcaatcttttttaatgttttgtccattacggatttgtttttcttatttaatgcaattatgatgatcgatggaacttatatctcaacttcgacaagaaaaaaagttgatggaccagataatcaagaaaatctggacaatcaagagtaaatttctaaattccatgaggtaaccacaactcaaataagttagaacacaaaacgtaaatttggatattctctcctcaatcatcttgtgttagaaattttgttccaccgaaacacagttctcttcaattagaaatcacagataaccatctcccaaactcacaatggacttatttaccaagcatctcagcacaagggacttagttaccaaacaatgctaaagcttttgaatgatagaatccagctcccgtatatctgctgctctaaagaagcaatactctcattatgccaaaaacatcaattgtaacaagtttgtaacttaggttacaattctaccaacatcctagtatcataccaaagaatccctcttgcaaaactcaagttcagataaaacattcgtatgtttgaatagaaagaacaaaaactgtagctgcttttaatttggag

SEQ ID NO: 41981 - DNA, 608 bp, Arabidopsis lyrata
  Intron number 1 from transcript 941550 (locus 941550) deri ved from phytozome v7.0 (chr-ID scaffold_6; pos 8437355 to 8437962)
aactcaattccagaggtctcttcttccttctttaaccctaatttctctgcaaaattggatcttttgatcatcctcttgtgtttagtaatctcagatcatgtactagggttttcgatttcgttctccttggagctgagtgctttcaaatttcaaaattgatgtggtgattgtcatagggattgagggtttcaaatctcgacgtgattgggtgatgaagttgtgtttttttgagccttgatttttagcaacattaacttaccttgtttagatttcttgattctgtcttattgttgattcattagcaaagtatgtgagctatcaactgcaaaaagagttgttttatgcgaatgtttatatggaaagtgcatagcttttttcaggaaatcctagttctttcttcactctcttaattgagtaatatatactcatggaaggagttcatataaagagtcatttccaccaatccatgatttttaaagttatagaacagcctctgttgtcatcatatttatgcttgaacgttttctaactagtctttataatttgtagttaattctgaatctcaaacctctatgacactgtaattctttctaaattgaacagtaaga

SEQ ID NO: 41982 - DNA, 520 bp, Arabidopsis lyrata
  Intron number 1 from transcript 471517 (locus 471517) deri ved from phytozome v7.0 (chr-ID scaffold_1; pos 5688245 to 5688764 reverse strand)
ctattcgatttctcctcgatagattcgtcttcgaggtaatatgagttctgtgatagtgtctcctaaagctgttaaatttatagatatcttcgcagtagtgttgcttaatgattgttttgtttcatcaatgccttattttaattgttgcttcaggtaaaagtatagaaaagcttctataagaagaatgattgtagctgaaaagtatctatttttgataagtgtgaagaatgatttaaaccttttcttctacttttgacaaatgttagtgtatgtgagaatgaatgttgtttgacacttgattgagttgtattcttttcaattttacacatttgtggtagtgagtacttgacatttgtttagcgctagttctttctcttgttcctcatcattcatgtgtgtgcctttggttacttacaagtagggtttgttgaaagctctttttttttggggtcaagtcactttctttctaactttgacttgatgattggttctttgtagaaattggcaaaacatttgatat

SEQ ID NO: 41983 - DNA, 389 bp, Arabidopsis lyrata
  Intron number 2 from transcript 917013 (locus 917013) deri ved from phytozome v7.0 (chr-ID scaffold_8; pos 15951198 t o 15951586 reverse strand)
ctattgtttggaaggtatctattgcatctcaacatttgagcatatatatatatatatgaatattgttcaacgaaagcttctaaccataattaagattcctttcttctgtaaccaggaaatctttcaatactcgaagtcgggaccagtgcttcagtttcatgacctatcccgcttgaatgttgaattttctaaatctaatcttgaaatgttgccaatgcttcttgagagctgcccaaaactagaatctttcgtattggtaatgaataactttagccctctgagttatgcatattgtttgtgaatttttttgtgtatacttcttttctcaatttgttttcttctatatttgttttcttccgtttttgcaggaattggttaagaaccgattc

SEQ ID NO: 41984 - DNA, 564 bp, Arabidopsis lyrata
  Intron number 1 from transcript 477568 (locus 477568) deri ved from phytozome v7.0 (chr-ID scaffold_3; pos 957850 to 958413 reverse strand)
ccggtgcagtatcgcaggtgcgtttttttccaatttgtttcgcgttttgtgagaaatgcgtttgcggtggtgggaacgcggttctgctttttgacgccactatcgatttaaaaaatccggcgatgcttttgcttttgtgtgtttgcgtcttcttcgatatccgtgtgctttattatgtgagatgggcttaccctaaatgtcgtcctcaatacgcaatttacattattgcccctgattgttttatttgagttgttgtagtgttagtgtgtgtacaagtttctgagaaatggtagataggtttgaattggtggcaatattgtagtgtatatgaatagtttttgctcatcatagttgagtagctagctttcctctcgttttcatttttgccatgagagaaagaagatggaatttggaaaccaatgataggattgaaactgactgttattggtttgtgaagtggtttggagctgagcttgtaaatagtttcatatcacttaagttatgacttacaaccattgttgttggctttaccaaaacaggatcaactgtagaagggaagggagc

SEQ ID NO: 41985 - DNA, 239 bp, Arabidopsis lyrata
  Intron number 3 from transcript 345260 (locus 345260) deri ved from phytozome v7.0 (chr-ID scaffold_4; pos 16736134 t o 16736372 reverse strand)
ttcatttgaatacagccgaatattctggtcaacatgtatgtcttcttctaatttttgtttttgaaaggagttacaaaatctcatttagctattaagacaggggactaataatatattcgttatatgtaaactaatagagaaaataaaaatatatgattgttatccatgcaaaatatatattatagatgaaaattatactaacatattgataaaatttacagttcgcaacaattgagacc

SEQ ID NO: 41986 - DNA, 436 bp, Arabidopsis lyrata
  Intron number 2 from transcript 345260 (locus 345260) deri ved from phytozome v7.0 (chr-ID scaffold_4; pos 16736469 t o 16736904 reverse strand)
ttcaacatccattgttgaaagatcacaagatacaggtaacgtagcatatagcattgggtaaactattcgagatttgaaatttaatttgatctagtccaaaatagaattatatagatttttcatatcgaatcaaatctcgcatattccatttattttataaaacgattttgaattttatattacaataagtaaatattaaatgttatgaagattcaatttgttctatttttacaataattttattttagtcaaggatgagtattcctaataaacttttggatgaataagtttattttagtttaaaattttataaaatgtgaataaaatagttgtggtcaatcaaatatgaaactaggacatccggaaacatcaataatgatgaatcttattttcccttgtgtgacttgtgatacaatgtaggaaacattcagcctgg

SEQ ID NO: 41987 - DNA, 222 bp, Arabidopsis lyrata
  Intron number 1 from transcript 930857 (locus 930857) deri ved from phytozome v7.0 (chr-ID scaffold_3; pos 13931112 t o 13931333)
tgaacataaacggtttttggatttgccgatcacaggtaagcatcacatcaatcaactttgattttgtttctaggaaaaaaatatataaagtttttgtcttttaaaaaaagtaaaataatattcttcaggttcaacattagaaaagatgtaaaacgaatcgtttggtttccattaatattttgtacagttaggtcaagcaaagctaatctttaaagaacatcc

SEQ ID NO: 41988 - DNA, 858 bp, Arabidopsis lyrata
  Intron number 2 from transcript 477743 (locus 477743) deri ved from phytozome v7.0 (chr-ID scaffold_3; pos 1642557 to 1643414)
ccctcgccaagtggtgtaaacaggtttgtctttctctgtttctacaagtatttaacacgttttgggtttttgggcccaagtgaaagtttgaacctttcttggattggaatcggatatgttggaagattagggtttggttttgttgattgcatgatctattagttttgaacacacttcccgtggatttagttttgaatggaattggaagatccttttgtgtgatcttgtccttgatgtttttgttcttgtttgggttatgttgcttgtctactaaagttatgatttttctattgcaattgtatgaagtaataatgtcttttgataactctggcctatagcgccaagtgtttgctaaagttgcagcgtttttacttctagtgttagttttctagctgcgtacggagtgtcatataagctaagaactttaccttggttgagttcactttcactataaacaccattaatggtctgtttaggaattaggataccatttggtccataaaagcaatccatttgttagcatttatgtagtctctacgtttcaatagatttgtcctagtgagagacaaaattccatggaacttgaatttccaagtaggcttatcatgcggttctgttatttatacatattgtaagaaaatattttgactgtagtgtctctgtgaaaggtcaaggtagtttacataagatcaacgttccatttttcaaagtttagatttcctagattattgatgcctgcttgtgttcactatctttactgagtaagtactcgaaaatttgttgagccgcttattcacttttggctatacctcctgggctgcaggttcctcttataaattactttcaagaccttgggag

SEQ ID NO: 41989 - DNA, 752 bp, Arabidopsis lyrata
  Intron number 1 from transcript 473746 (locus 473746) deri ved from phytozome v7.0 (chr-ID scaffold_1; pos 21670961 t o 21671712)
ccccaagaattctcaacaactccatccttcatctggtaaaaacctctttcaatctctcgaatcttttagactaatcttcttcgtgctatatagattgtcgattcccgttttgagcttatgagatttgatattatgatttctaatttagtatctcaagaatccaatttgattgtgtattggaggatcttggttcctttttttttatgttgggtcctttcttttgtcaaaaatggttttgtaattcatttcacaatgcaaaattagagcttgaagaggttttggtagacataagtgtttatcgaaaaagtgtgaaacttttgtttctgatacactttttagcttccatttgtgtcatagtttagatatcttgaggcagttccactaatatctctgtatacagttgtggtgatctgtcaaaaatggttttgaaatgcatgacagaatgcaaaattagagcttgaagaggttttgatatagataagtatttatcgaaaagacgaaaaagtttgacacttttgtttcggaatcactttattcatcctccatttgtctttggtttagatatcttgaggcagttccattaatacctctgtaacaattgttttgttttctcatttcatatagtgaaagtgagctttcttttgtgttagaaagaatcgaaatccggtttgcatctttttatgcagatatataagtcactgattgttgtttgttcttattacctttcatgctaggtgtttttctgaagccaa

SEQ ID NO: 41990 - DNA, 584 bp, Arabidopsis lyrata
  Intron number 1 from transcript 928699 (locus 928699) deri ved from phytozome v7.0 (chr-ID scaffold_3; pos 4025060 to 4025643)
cttgtgacggaagtaaaataaagaaatcaggtaatgatgaacaatggatcccatatcatcattatgttctgtatctacaatttttctacatatagtattttctttaataggaattttacagatactctctatttgatttatcgggttcgaaattcagaatcttcttgatcatgtaaataggaatttggttgtggcaactgattcatacctagctagctttgcttcgagatgtttattaatcgcattttagagtacctaaacaaaatgtggagtactttgttatttggattaaaattcagtaggattaactttgcctctcttataaagccacgttttttgtccttttacatacaatacacacattataacaaaaacagacttaactaacaaaatacatcttcggcgattaacaaaataaaaataaaacagagtttaaataattaattagtataatattggtattttagaattttatttataaatacatgtgtgtcatggggtattacagttatctaaaaaaatgggaaaagattaaaacataattctaatctctattttccaaacaaacttgaaagaggtctaca

SEQ ID NO: 41991 - DNA, 535 bp, Arabidopsis lyrata
  Intron number 1 from transcript 350644 (locus 350644) deri ved from phytozome v7.0 (chr-ID scaffold_6; pos 6114512 to 6115046 reverse strand)
tctttctcggaagctcaagattccggtgacaagtggtacgttttccgatttccttattctattatttgcactatttaattatatgattaaaacttgaagtaattattgtaaagaaactttaatacaatgccataaagaaaaagatatcagtgttccttcttcattcataaaatcaaacattggctaattctgatcaaattaattaaaagcatagttatatgcatcgtatatagagttgactactgtttttttttttttttttctttcagttggtagttgccaaagttttaacatagtcgataatatttctttgattagttaaaacttagtgactagtctaaagattaatagaccacattatactagtatagtatacatttataggaagaatacgtgggaccaagaaactagacttttggcctaaaatggcatgtatcagtttacactttttttatttataaattatacgataccttcctactaatattttgtactaatgctgtttttttttttaattaacagtgcatctcaatct

SEQ ID NO: 41992 - DNA, 352 bp, Arabidopsis lyrata
  Intron number 2 from transcript 326587 (locus 326587) deri ved from phytozome v7.0 (chr-ID scaffold_6; pos 9670723 to 9671074 reverse strand)
catctcctacgtaggaacatacaggtatgcaagacgtcgatttatgaatttaattggtgcactcgcataaatttttgatatcaagattattcttcagaaaaaactacctacctcattaaatatacttttgtagtaatcaaagtctacaaatccggagacttaaagcaatattaatgctctaaaactggttaaaaaattgatcaacaatattataaataccattttaccaaaaaaaaaaaaaaaaaacttattgttatctaaacaatagacggcaccggagtgtcaaacatataatagtttgaaacggtatgctgcaggtacgcttcacccagaatagccaaccgcgacatag

SEQ ID NO: 41993 - DNA, 775 bp, Arabidopsis lyrata
  Intron number 1 from transcript 325246 (locus 325246) deri ved from phytozome v7.0 (chr-ID scaffold_6; pos 2344068 to 2344842)
atataccacaaggcaaagattctgtgcaagaaaaggtttgtttttttattcattttgatgtctctacctctttggtggaattcaaacaatatagagttgttgtgtataaggaaggagatgggttcttaaactgatacttaatttgtccagtaccttcgctgagacacattttgtatcagtttattacttagtttgtttagatgttgaaacagagtctatctgttttcactctaagtctaattgcttcttcattttacttgtcactgtggactgtttgtcttactctgcagttttgttttgtttagtttggtttttacaaacttttagacgtagtaaagctgcatctctgcattttcgtacatgtcacttcagcaactcactccagatgtagttttgtctttagagctcaaggtctattcttctgaagctctctaaaagcaactttgtgatatgttttttttttttttttctgatatgcgagctccatctgctttctgctgtgtcactgttaaatatagtcttgggaaaacaataaaggctagtttccaacttcatcccatccctttgagcatatcccaatcttgagttctccaagtgatgcattcgcagaaagaaaaagtatatcaagcatagttatctgaaattccacactcgtagttaactttactaaactatttgattgccaaaggatatgcgtcatagtatgatctaatgataatatgaatgtctatttgtggcagaaaattctatctcaagaaaagaaaattcagaagct

SEQ ID NO: 41994 - DNA, 242 bp, Arabidopsis lyrata
  Intron number 1 from transcript 493236 (locus 493236) deri ved from phytozome v7.0 (chr-ID scaffold_7; pos 12120117 t o 12120358)
aggcttgaaatttctgtgaatctacgacggagactgtaagttccgatcatattcacgacgatctcgttttatctgcattcgaatcttttcttcctcgtcgtgcaattcataaattagattatttgtttatccagaacatgatggatcaaattagggctttcattgtgcggatttgaatgttgaattgtttgattttgggtttagcggattggtgaattacatcagaatcagtaatcaggaaa

SEQ ID NO: 41995 - DNA, 687 bp, Arabidopsis lyrata
  Intron number 3 from transcript 480818 (locus 480818) deri ved from phytozome v7.0 (chr-ID scaffold_3; pos 23444123 t o 23444809 reverse strand)
gtttttgggatctgattccgtttggaagatttttccaggttcaattttctcggcgttttgattatttgtttgttaattttgaattttgtgcggacgatgaattggctttagagaggatccgatttggtttaggatttcgtttgatctcgttcctgattctgttaatatctggaagcatttgtgtaatttgttgactgaggcaatgctcgtggctgtgtgtaggttttcgctattagaagctgtgatgctggtggttttgacttttcttggtttggatagagttaggatacttatttgaaattgtctcattgacattgtcaatttattctcctgtagatgtttgattcttctctttggtcatcataacaagtttcttaagatacaatggtgaaattgtgttgttctctttaggaaaacaaacataactttgagaattatcatgttctagaatctaggttgtcaatttgagtcgcacacttttggtgtgacattctttttggataaactagagagacagaatcgaattcagaagaatattaaatccttatttgatttagttttcagagttgtctcttatgctctactatggtttaattatgttctgctatgtatagatttctgatattcagatgggtttttgcatttaagttttaggtttcgactggctctagctgccaagtggaattg

SEQ ID NO: 41996 - DNA, 538 bp, Arabidopsis lyrata
  Intron number 1 from transcript 891500 (locus 891500) deri ved from phytozome v7.0 (chr-ID scaffold_7; pos 21399047 t o 21399584 reverse strand)
atcaggtccataaccaatggttggaaccagaatattatttctcatccaaggaaaagagtaatgtaacaaagcttctcaccggaatatgcaatgtcaagatcctctacttgtctgatgaaactcttgaggtcagtccaatatttctcctaatcttttgttaattgctactcaaaaaagcaaaagaagaagaaacaaaacaacctgtatattgattaattagtcttgtttctgttattaaagcaaatggttaaaggcttgacttgatttggttttggtctttcaggtacttggttgctgccttgatacaataccggtattcaacaacctcattgagttaactattgagactagaccagatatagaatggaaatcattgccagctatactctatagttgtccaaatctagtaacccttgttttcgaggtactatacatacacaatcctttaaatcaaccctaccatgtttttcaaaacacacttagattatgaaactgtttcctttatgtttcagggaatccatcacatatattcatatag

SEQ ID NO: 41997 - DNA, 886 bp, Arabidopsis lyrata
  Intron number 2 from transcript 489539 (locus 489539) deri ved from phytozome v7.0 (chr-ID scaffold_6; pos 12495406 t o 12496291)
tttctcagcttttatccttacctgccatttcaaaggtctaaatctttctctctctttatacatgtaagaaaaatctgattggtcaataacaaattgagaaaacgaagatccaaattatagctaaagagaaacctttcttgggttcaacttctgaatcctaataaactgtggtttttagttttttttttttttatataaaaagtaaaaactttgagtaaaattggtcctcactttgtcacttttgagtgaaatgaaattttttgcttctttgtcgctcaactttagaaattttatcttatttaatggttataaaatcagaaaagcttttaacttgtttttgaagcaaatctatggggattaagtgtgtttgcttctttttgccttttaggtgttcatatttaaaaatagtattaagcaacaacatgctgagaaagttctcattttattttcttgttagttttcccggaaaaagcaaaagagtagaatcttggaatcttgcaacttgtttttcatttccttattaagaaatatctctagatgtgttttctttaaacagaaactctatttcccttcaagtcaaaatcattttttcatatttatatcgggatccctatttatatcaaaagataatctcagaagcttgtttcaatggaattccatgtcagacttatgaatattccactaaaatgttaaatttttatcttttgggtagtctagattctcaacactatgactcatccaagttttttttttggggtagtctgatttttttttcctacttttgacattatattatctccctctagcactatccaagtttctaaacaaattttggtttcctgttttttcaggatcatcttaaggcttaagcttaaggaggaagttt

SEQ ID NO: 41998 - DNA, 373 bp, Arabidopsis lyrata
  Intron number 3 from transcript 490677 (locus 490677) deri ved from phytozome v7.0 (chr-ID scaffold_7; pos 413065 to 413437 reverse strand)
cctcagcgaacaacagcttgtcgactgtgatcaggtttctcttttctttctctttcttctcgattacctttggattatgataaatctcatcagggttagattgtgtttgtcttgtgctaaatatatacatgtttgatcacttatcaatcaatatgatgatatttactgtttttcggattaagatgatacaactcactacttagttcatcatttggcctactctaaatgatcttgtttctcatcagtgcctagataatttgagctgttacaagccataatggttacatgatcatgtaataatctctgtctaataaagtgtccttgtcatctctttacgcagtgtgatccagaggaggcaggttcctgcgactct

SEQ ID NO: 41999 - DNA, 511 bp, Arabidopsis lyrata
  Intron number 1 from transcript 931758 (locus 931758) deri ved from phytozome v7.0 (chr-ID scaffold_3; pos 22913417 t o 22913927)
cttttgcagctggagctagccactacttcattcaggttttgagattatatattgcttttaagttttttctattacaacttgagctctttggaacatacaagattatttcttcaactaaagtaaaatcaaagggtagaatcgaacttttttttttaatgagaatttcaagttttaattcaaagctttttttttaatttttattacaacttgttccttacaaaatataaactataaaatatgtccttatttgtattgcaactataaaaattaggattaaaagaataataaaaagctctaatatagtgacttcttaccatttattttaaaaaattaacatgattgttatgattaaaccccatctcttatcatatcaccacttttactgctatcgtttactcctaattttcccttttttttttaccatcttgtataagtcatcaaacccctatatataatatattgggatttgatcttgttttcttggaccaggttacccttggtgtggcactca

SEQ ID NO: 42000 - DNA, 501 bp, Arabidopsis lyrata
  Intron number 1 from transcript 474065 (locus 474065) deri ved from phytozome v7.0 (chr-ID scaffold_1; pos 25216602 t o 25217102)
tctctcgatcttctgcttttgctcctccgattaaggtaattaaaacctccgatctacttcttcttgtgttggatctcggttacgattccaagttacttcaaaagatctttcggatttatgatttgattgaattttgatcggaaatgttttgatcttggctccgattagctcaacaattgatgtttgacttgatgttcgttgaattccttgttgtatttgccatggatcctgattctttcgcttcttctgtctatagaaatctgaactttgaaatgtttgtcgaagtttgacttcagaatctgttgatttattgacggatgaagaaactaagtgatcatctggaatctgaatctgtaacattttgtcatccgatgagtatgactctattgatacattgaattgaatctattgtgaatgaaaagcctgctttgattaatcaagtgtttgcgtctttctcgatcaagattcagatctttatgttttgattgcagctcgtcgatc

SEQ ID NO: 42001 - DNA, 456 bp, Arabidopsis lyrata
  Intron number 2 from transcript 485398 (locus 485398) deri ved from phytozome v7.0 (chr-ID scaffold_5; pos 15140515 t o 15140970)
gaactcagacgcagaaacttactcaagaagttcaggtttgtatacaatccatgaaatgcatgagttattgtttacatgaagtctccttgttttcttaaatttaatagtttccaaaaaaatcttccttttttgttactatttgagatagcataaaaatatggataccattagaaccttagattgatatcctgactcacagtgattaatttcaaggtgtttataaataagatctcttggattagggacggttaacatcgatttcgattcaaagaaatttcttcttcttttcaagtgaaatctttttcttagatgagtatttatatatgtgagtttcgtaatctctcaacataaatctaacaaaacctattatttttaatgaaacaacaagcgtattaattatttttgtgtttttgatctttaggtataagagaagaatcaaagagttagaagcttcat

SEQ ID NO: 42002 - DNA, 639 bp, Arabidopsis lyrata
  Intron number 3 from transcript 312817 (locus 312817) deri ved from phytozome v7.0 (chr-ID scaffold_1; pos 7844142 to 7844780)
aatataacttcgcctgctggaagtcgtttcttgtcagttgactaattgagctctttaccacctcctattccatttcatgaattcgtttacatgatttgttttggatccaagttgttagttcttattatattttttagagctttcaacgtgacggtttgatggcattttacgttgtaagactatgcatttaatttccaaaagttccagaccatggctgatataggtgtaatacgagtagattgtttacatttgtgtatacatggatggttcttgttttatatgtatgctcagggttgcttaagtttgttgaggtacccagcatgcttttgaaacctctcttgcaaaatatccaagcaacctggcatgaatattcatatgttgaagatgctaaatgtttttgtttttcatttaattagatggtaaatgttggcatgcatataacggagcattttctccgacatcaaacatatttaattacgaccacgtttctccattatccaatttaatattctttaatgatttttaaaagagtctcttcagattgtccaagtccatcatttctagtcttccatcaggatcctgccaaaaatctgaaatttcagagcggtgtagttcagagagggaaagagtgtgggatct

SEQ ID NO: 42003 - DNA, 491 bp, Arabidopsis lyrata
  Intron number 1 from transcript 930901 (locus 930901) deri ved from phytozome v7.0 (chr-ID scaffold_3; pos 14445731 t o 14446221 reverse strand)
atatcgattcagcttcccagcgccagttcgccaccgtaatcaataccccactttctcatcttcactccccatttattcacatcaaacaaaattaatgaccactatcttcaaaatcatagcctcttatgagaatcctcctataaaatctcagctctccgactacaaagagaaaaaaaaaaaaaccaaacaatcactacaatcaaaacatggcaccaaaaaaaagcataacagtctccctaaccattcacctttcagattttcaatgagattgatggagatttctgtgacgaagaagtgttagtctgactaattcgtttcagggaggccgggaatttcaagagagacaacatattgatgggtctagaactgcttgtcatagactcccatatatgtctttaatattctcaatagatttacaaatccaacttgaatccaaactaatcattcagcctacagtcaaaagcactgcaaggattcatatctgcaaaccg

SEQ ID NO: 42004 - DNA, 515 bp, Arabidopsis lyrata
  Intron number 1 from transcript 317933 (locus 317933) deri ved from phytozome v7.0 (chr-ID scaffold_3; pos 4607004 to 4607518 reverse strand)
gaacctgaagtcccaagacgagctcctagtgcaaggttcgtttattaatcccaaaatcaagttttgcataaaaagatgatcgatttttctggtattgtttggtgattgcggttctcgtagttcttgttctagtgaacaaaatcttgaataagattcagtagtttccataattgaaatcctcttctgttaatagaaccagggtctctttacctgcaattagtgtatcctctgacatcaattatccaaactttttgacgttcttgaatctttagtgagatagatagatttatgacttcttgtgtgtatacattttatagctctgccttctataattagagtccctgacatcaatgatcccaaactttttatttcatgttcttgaatcaaattctcatgtcttcgatgagtctggatgaaaaacgctattgtgtggtttaactcttttgttagctcagaagctgattagaccttgattgtaatgcagtgctaccgtgtttggagtctctaccgagtca

SEQ ID NO: 42005 - DNA, 671 bp, Arabidopsis lyrata
  Intron number 2 from transcript 484481 (locus 484481) deri ved from phytozome v7.0 (chr-ID scaffold_5; pos 3308871 to 3309541 reverse strand)
atttaagggtttaccaaacttggaaaggcagcaatgtgagttttttttttttttcttgagttgggttttttgtttttgtggtttttgttcttcttcgagctatatatgcttcattactcttccccttttctacttattgtttagtctattaaattagattaactatgtctcaatttcaacctaattcaaattggaactttattaagtctttaggagaatctagctaatgcgttttcgtgaatcctaggttttggtgtcgttttcataggttgctttagatgcttttgagctgaacaaggcattttaactttatctgaatatagctcaatgatggattgagttactttggacagacatctttgtatatatatagttgatgcctgtgtataaggaggttttgaataaccttctctttgtaatttgtattgcttcaagccatcagctagagactctaaatacttcttgattgtttccttactctgagtactgattgagacttgtgtgatgtactgattcaacagtccattggtgaaatgttttcctagatgatttttgttattggggagtgctttgttttcgaaagtttctctactggagtgttgttaacttcacttattttcccgttttttttggcagatattctttcttcagggaaggtttgtatttgggcc

SEQ ID NO: 42006 - DNA, 469 bp, Arabidopsis lyrata
  Intron number 1 from transcript 490348 (locus 490348) deri ved from phytozome v7.0 (chr-ID scaffold_6; pos 23835447 t o 23835915)
gctaattcgcgtacgttgttcttgatactctcaattgttgctgattagatttttctccgtctcgtgcttgttttgatatgcgatcgaagctttttgataatgatagtagaaaaataggatactgtagcttaattcgtaggtgacgttgaatgattttaattcagtctgatgaagttgagctcggaaatggtgttgctattagattgcaatctgattttttcaaattctcaaaaaatgagtttcgtttaagctttggattcactatgttcttctcggattcatggtctatggtttctatttgttacggaatcagcatgccatagcacactgttggatcatgattcttgtgtgtttgcgatatgaaatggtgacgcatctatatacattttactatatttagagtagttctgattaaggattttggattgttatgtgactttaggccaaaacatcaggaaacttgtgaagg

SEQ ID NO: 42007 - DNA, 484 bp, Arabidopsis lyrata
  Intron number 1 from transcript 485927 (locus 485927) deri ved from phytozome v7.0 (chr-ID scaffold_5; pos 17305376 t o 17305859)
gccttgttactcgattacaaggcctgaaacgaaaggttcatttttcgactctctctctgtgatcggtgttgtaaattatgtagacgaaactgaatcaattaatttagcggttaaagttttgattgagattttgttaaatgatttcacttatctggaaaagatttggatctcgttggatctttggatattgctcttgtcgagtttggagatcaaattaaagtatctgtctttggcaattatctcttagacgtttagttactacagaagattaccagtaggcattggatctcgatgaatttgatattatatcagatcaaggggatgcaatgtagtggagttgtttcatgggaacttcccatctgactatttgcattgtcttccaaattttttatcatttgggatggtttctatcctctggagtaacaaggttatgacatagcttatgtactttttggttttgtgcttcagttggaagaagggagca

SEQ ID NO: 42008 - DNA, 490 bp, Arabidopsis lyrata
  Intron number 1 from transcript 925289 (locus 925289) deri ved from phytozome v7.0 (chr-ID scaffold_2; pos 7264946 to 7265435 reverse strand)
gtggtgtcaatatcacgtgagtttctctcttcctctctgttatgtctcagtttgattgctactactcattggttataatgttgtctaaaggtcaaattaatgctgtataatgttgtccaaacctcataaacccatgattgtttagtgtatgaaattgccaaatgcaaaaacatgtttgagttatgtctatttcagagtaatagacaaaatgtgagtatatatgtgtgtttctgaagattggttgtttaggaatttcagtgtggtgaaagctgtgttctctgattgtgaaatgaaatatctgaaaaaagtaaatcttttaacactactttcaaatgcaaaacatgtttagactaaactgtgtttatatctgaaaaagtcaaatcttgtaacagttttgtcaaatgcagaacatgtttagacaaaaatgtgtttatatgtctcagtgaagctaatctcttgtggatatgtttcaggtttgtagctgttggaa

SEQ ID NO: 42009 - DNA, 590 bp, Arabidopsis lyrata
  Intron number 2 from transcript 923636 (locus 923636) deri ved from phytozome v7.0 (chr-ID scaffold_1; pos 27164610 t o 27165199 reverse strand)
atctcaatctcgatcgccgtactggttttgtcaaggtatggagttttgcctttgtttcttagtagctcttgatggttttatgttgttaaaatttgagtttgttagattgatgtcattatgccttttggtttgttatagtgaagctaattcttttttttgctttgttggattgatgtcatgttgtaatttagagatgagtgcaatactgttttgtcgtcgatgactttcctctttaacatacttaatgtgttactcaatgtaatgttgagtatcaaaatagagagccaaaaatgataagctaatctttgtgatgttacatacatattttacattgcttaacaaaagattcggaagatgtaatattctgtaaagtgcaatgctgtttttccccctaaggacactcccatttaacttgctttcatgtgttaatccatgttttgtaaagtgtcagaaatgaagggccgaatctgataagctgtgttctagaataagagtttactaatcaaatttaattcttcttcagtttgcttgagttcccatggaagctgtattaattttgtacactttgctttgtcatcttgatcagggct

SEQ ID NO: 42010 - DNA, 1002 bp, Arabidopsis lyrata
  Intron number 1 from transcript 911017 (locus 911017) deri ved from phytozome v7.0 (chr-ID scaffold_1; pos 5094406 to 5095407 reverse strand)
ttcgtcttaaaatcatacgccgcctcaaagataacgtaaaccctctttctctttctccgttgtcttctcattgcatcgtgtgttcttctttccttgatcctctaattagggtttaatagtctctcgattcccagtacattcgtggctttaggagcagtgataatgattcagtcgattttgattgtttcaaaacatcaaattggaatctttagttagtttgactttgagtaatagcgaattcgattgagaattagtcaaactttttgaatgtttgttgcaaagtttgctcttttggttcatatagactgagcccaatcagtccttaatttgtggttttaggtactttactcggcagctactcggatctcaatcggaaaattccatcttttgtttcgtttttactgtttgtgttgttgtcacagagtgatatggtaagtagttgtaagcaaagataagtctgtgcttggtctcagggaaaatttatgttaatgtgtgattcctaacaataccagtcgtttaagatagggaaagtttggtcattgatcttgattttgggataagtgtaagtaaaccattgatgatttggagagcttaccaaactgccttaagtttttcttagctgaatcagatcctagaggagagagttctcttaatggtgttagtctgttagatcacagctatagctgattcagagtttcagtattacttattgtgaattggttagtcaggttacttatagctgatatattgttcattgtctttgaggagtctttatacttagccatccagtgagtattgtcatttccgcaacttggtagaatttttagataagagtgaagttgacttctcagccggagaagttaatgtgaggcaacgaggactgttcttttaacagtgtttgataaccatataaagctttgttcttctggactgcctgtgtttgccattgtgttctgactattaaagtgggtcactggattgcaggaggaattacggaacaac

SEQ ID NO: 42011 - DNA, 705 bp, Arabidopsis lyrata
  Intron number 2 from transcript 494615 (locus 494615) deri ved from phytozome v7.0 (chr-ID scaffold_8; pos 3865381 to 3866085)
agaaatctgaagtctttgatctgcgaaacgaagtaagatttgtttgattttggggaaattaattttattgtcttttttttgggggtaatttagcgattttaagagcatctaatttcggatcatggctttgtgcatgactttgaagtcttcttctgtatgatttatagagatttgacttcaactacgacttgtctgtttttgagtttgacgattggtctaaatcttgtttgattttttttcgctatttatggttttggtcaattgattataaatcaaattttatagtctgaaatgtagttgtttaaagagttatgattatcattaaggagcttgtgagagctcaagaagcaattgttagttcctttttccaagctgagaggaactttcttgattctactgtcctgccacaacaaacttagagcaactttttccgattttgctcgtttacggcgatgaaatcgtccaaggcttttattttggttccttcagcttggttttagatcattttggatatattttatgtaatggcagttgcaatgtaatttaaaagtcttgtgagacaaataagctgaggctcaaaagcatgcgatgagtactctgtggaagtgaaccgtgaaatgaatttgacagttcgtgagaactaggcctttgacaccctttgtttctacaggttgctaacttcaatccttcagttgggtcgtttgt

SEQ ID NO: 42012 - DNA, 603 bp, Arabidopsis lyrata
  Intron number 2 from transcript 481012 (locus 481012) deri ved from phytozome v7.0 (chr-ID scaffold_4; pos 335864 to 336466)
ctcttgctctttctggattcgaagacattcatattgtaagttttttcctttttctgttttcgtgacttttagtattcttaacttgtgatttcttcttcttcgtcttcttcttctcttttgagattctgggtcacagacgaaagttcaatcatttcaaatctcctattgtgctactggatttgatttgagattttagggttattgatgatttgagtaatttctacatctttgagctttttgatttgcatggttcatgagatcacatcgggactctactggatactctatatgggttaagtttgacttgggagatggaatcatatgtctctagtctaggaggactctctgtttagctgtcttcgccaataggtttagtgtcatttctaagactctggttaggcaatgtatactttggtttgcatgaactactgtttaaattttgggattttgtagattcatgtttaacgttttggatcagaaacctttggattttacttgtggtccttctggatttctggatttggaaaatggatagagcagtgacttataagattagtttgtaaccgtgattaagtaactgattctcttgtgttgcagattgac

SEQ ID NO: 42013 - DNA, 532 bp, Arabidopsis lyrata
  Intron number 2 from transcript 495985 (locus 495985) deri ved from phytozome v7.0 (chr-ID scaffold_8; pos 18698349 t o 18698880)
gtttttggtggtgttggtcgagaaaagagagctttttctctgtgatcaatttctcagaggtagaaatcttttctctttgtttctttgattaatctggaaaaaaattcgagaaaacgatgaacttgagattttgagtgcaccatttatagattgattagtcactagatattttagtttcacttgaatccgtatatgtcgatttgttttagagttgcagtttttaattgattttgctgattggaaaatgagttaacaaaaaagggtatatgattagttttcgatgttgcaaaaatggttaattatggatctctgttggtgtttatttttggtttggtttgtttaaagttggaaactttgtatcccaaactaacaaactcttccttctctccttagcttaatcgtttctgctgttttaaaatctgttttctatgaatatgtttatgtataatacctttttaatcagaagaaaaaaaagattcatccttttcaaaatttatttcttctattttttgcagtgaaatcaatcgagcgg

SEQ ID NO: 42014 - DNA, 465 bp, Arabidopsis lyrata
  Intron number 1 from transcript 478649 (locus 478649) deri ved from phytozome v7.0 (chr-ID scaffold_3; pos 5149935 to 5150399)
ctcaagctctcctcaggatcgttgatcgcttctagatagtttatgtttcttcaacagtgtttgtcttatcgacagtggcggacccagaaagtttttttaccggggtcaaaatgtatgacaataattaataaattttttttttaagaaaaactaaaaacaaacaacattttttaaaaaaataaatcacaaataggttcaatatttatgggtgaagcaaacaaaaaaaactaaaaaatatgtgagaaatagtgccaaacacaaagtagtagaaaaatattagaaaacttaaaaggtttaaacacaaatttgtaattttaagggggtcaaaacagaaaacatataaataatatcataaatattaaaggactataatgcaaatttagaattttaggtgggtcaactgacccccttcaagcctttttgggtccgccattgcttatcgatatattatcagtgactttaact

SEQ ID NO: 42015 - DNA, 631 bp, Arabidopsis lyrata
  Intron number 1 from transcript 491946 (locus 491946) deri ved from phytozome v7.0 (chr-ID scaffold_7; pos 5823642 to 5824272)
aagagatctatcggtacttgcaatctttccaaagagtacgtttctttttctggaatcatcactcttattatatgttgttgcgtgtgtatatataaaagcatcgaattagtagatctgcaccgtttttgagttcctacgcaaaaagatgattgtttttttatatacgactcaagtccttccgatgtaattcgtggttatcacttgtttgtttaatcaaccactccttttctttaattatttagctttttttttctttcttaaatgataacgtgctttgggattaagtgaaaacagagcaaagcgtcgaaactgaaagtgattaggtcaagtcttcgtaacttcaacttgttaaagaataagatccttacttttttgcttctaatcattttttttttttgggtttaaataagtttaaattcaagatcgatcatgataagtatatacacaactcttatatgatctatattgatctgcatagtttgatgatatttcttgtttccatgagaactcattggttttctaatctctcattggaatcagactttgaagtatttactatttaggttaaatctcattaaataaacaacaactggtcaagtgaatgggtttttgtcttgtatgttttagtaaa

SEQ ID NO: 42016 - DNA, 817 bp, Arabidopsis lyrata
  Intron number 1 from transcript 488545 (locus 488545) deri ved from phytozome v7.0 (chr-ID scaffold_6; pos 6917391 to 6918207)
gcggtatgttctacgttttttttcttgtataattttttttactcggaatcggtttaggtttcctttgctgctagattttgttgcgatccatattgtttctcgggaaaatttctcacgattgaaatttttggttattgatttgatttcttcttctgaaatttcgattatctgtggttagattgttccacttgccgacatatatctccgatgctatttgtttgaattcgtcgttattttctggaatcgaaattgattttgcgattctgtatttgcaactctggatttttagtttattgtgtgtctcgggtgtgatctgtaatagtgcaactatctatatctccgtgatttctaggttttgttttttcgtttattgtagcaatatcgcgattgtgtgaatctcaatttggaaccgaattttgcataggtcattgtccatattacttttaaattcgttcagccattttcgattagtttcctaattgttcatttgcgtgattctatctagtagttttggttggattttagaagcaaataatttgatttagaatgtttatctacaattgagtcatgtgtcatatctgaatcattatgagcaatgtgttttactataaaagtataaccttgtgaaactctgagctgacgtggggtgctttttttatgggacttttgatcgattagatatacttgatacaaaaatagttgaagtgtaaacagtttcattacacacctgttttattgtttccgttaatgattctttcccttttgattctttgcgatgacagtcacagataaggtcagtaaaagttggcaatctctc

SEQ ID NO: 42017 - DNA, 768 bp, Arabidopsis lyrata
  Intron number 5 from transcript 471166 (locus 471166) deri ved from phytozome v7.0 (chr-ID scaffold_1; pos 4108913 to 4109680)
actctgttgacgaaattgtcggaatctgcactgaggtaatctcaaatcttacttactttcacacttgtatatctgtacgtgtctatgtgagatgtcttgaattgtggtgaattgtttagtctcagcttctgattttttcttggcatgtgacttgcaaatgcacatagaggttagaaatgcttcaaatcttcttttatgttttttgaactagaatcctgattcatcttatctcaagttgtttagatcatatctaatcattttgtagtgtcaaatgaatgtgcctgtttagaaaatgtcctttgtaatgtcgatgcctcgtttgtagggttgtgattatgcagcattttcctgaaaattggggaatgatttagtgatcttatactagttgagttatagtcttatagatcgagaatggagagggtcatgtgactcggtttagaatttctcaatgagcggttttgagtttaaacccatgtagaaagttcaacaaaaagttagtatggtttgaaaatgagaggggaggtttgcattaactcgaatccaacatattgtcgtcttaataatgatcccaaaaaaaagagccttggtgagggatataaatctaaatctggtttacgaaaaatcgcttggaagttttggctgcgtgataccttaaaccattctctaagtctgttatatttcttggcatgagacttgggagtttaacggtttttgctttggaccattgtgattcttggcagatcttcgggacgttcttgcgcagtgagt

SEQ ID NO: 42018 - DNA, 389 bp, Arabidopsis lyrata
  Intron number 1 from transcript 477722 (locus 477722) deri ved from phytozome v7.0 (chr-ID scaffold_3; pos 1590487 to 1590875 reverse strand)
agaaaccattgttcttctacgttaacctcgccaaggtaatgatcgtaaccgaaattcatcaccggatctacggtttttcagatcaaacgagtcttcgtttctcaatttttgactgatcttctttacttgagtccgagatccgcttgattttaagattgtagattccataaacgaatcatcgtgttagtttttcctggattttgattcttatccgttttttgacaatgtatagtatttgattcaggatctatctttatcttatcggtgtataatgcagaatttgctatttctgtccaccaagtgtttgattgtattagtaaaagagtaattggatctttccgttgtttgatgcagaggtacattcagcaacacaacgaggtcgagctttc

SEQ ID NO: 42019 - DNA, 801 bp, Arabidopsis lyrata
  Intron number 2 from transcript 947726 (locus 947726) deri ved from phytozome v7.0 (chr-ID scaffold_7; pos 22376176 t o 22376976)
agctaaattcaaggccgttgagctcgacaacgaaagtaattatttttttcaccatgaattcgtttcatttgctgtgtttataatgaattcgtttcatttgctgtgtataattgttgttctattgcttgttataccgagattcgagtttaggattttgtttgatccaaggatagtgttttgtttcgaaaatttctctgtttaatttatggtttcggaaagttcgaattgttctgaggtttaagtttaggttattgatccaagtattggttttgttttgtagaaactagaaacgttcgctggagtttcatgtgtagtttttttggtccaagtgtaggttttgtttgtgaacacattgtcaaaattttctttgttttctttaaggcctcatgatcatggggtattatcttccacgagtcaaaaaagtttcagaaagcatatgaacattatcctaagcacttattgatccaagtataggttttgttcatgaacttacagtagaaatcttctcttctttctatggagattcgagtttatgtttttgatccaggtataggttttgttcatgaacgcattgtacaaaatttctctgttttcttcgggcccttatgattatttggtgcatatatctttcacgagtcaaagaagttttagcaagcatgaatattttacccttaagcagtcttacaaacaatgaactatgagtttttgcatttgttcagagttgtagataatctagactcaagcattgttctatacttctgctctttttgaataattcattgctgttgtttaatacaggtg

SEQ ID NO: 42020 - DNA, 765 bp, Arabidopsis lyrata
  Intron number 1 from transcript 476640 (locus 476640) deri ved from phytozome v7.0 (chr-ID scaffold_2; pos 16514980 t o 16515744)
caacttcttgcgctcttcatacttctccaggtactttatcttcttcgtcgagttccttgtgcttcagatacgtgagaagtgtttctcttgctctgtctctttgatcttatatatcacgtgggatctgaattgtagttgcggtattcacaagtctttcccaatttgaggatgtttttttctatggtttctgcgtttttgttttggaatattgatgattatagattctaaattatgcagctttagatactaaactaaatgacgaatctttatcattcattattcgcttgttgaatcttccactcagctcatagatacggaactctctgttcattgttgcttttagagattaattcatgttcctgagagataaatttgcaaaaaaaagttctacttttgtaagtttccatacaaattaaagaaaaattgggtctttatatacaatttcttcatggttgtgttgattagggatctctatttcgtctggtcgttgttagatgaactgtttctttcgaaattctgtacatgattgtttgggaaatatctatgtgggtcacaagtatcaaagacttgggatcttaacatttgctttaggttactcaaatggcatatctaggctcttacattggttttctagtctcatgtcggcaactcaatctttgtctttaccaaaaaaaaaacaaaacaaaaaattcaatctttatggggaactttaggtggcactgagtaatatttgattctcattgctgcagtttgtctggaaaaaag

SEQ ID NO: 42021 - DNA, 312 bp, Arabidopsis lyrata
  Intron number 2 from transcript 476640 (locus 476640) deri ved from phytozome v7.0 (chr-ID scaffold_2; pos 16516279 t o 16516590)
tggcttgctctattcccggaaggaaccgatttcacgtatgaacctacattaagaacatgttgcaacgtatctttaactgctctagatatattagctaattcataagtaatctgaatcttcaaagatatctttcagtttctccttggtaggatatttaacaccattgtgcatctgtcttgcaaatattataaaccagtaaccctcatttgcaataatttgcctgctattgcatgaatgtttgaaatgctgctcttcatatattttctttcatattactgagaccttccttattttgatatgcagtgaagagaa

SEQ ID NO: 42022 - DNA, 596 bp, Arabidopsis lyrata
  Intron number 1 from transcript 494966 (locus 494966) deri ved from phytozome v7.0 (chr-ID scaffold_8; pos 12472795 t o 12473390 reverse strand)
gttcaatcctcatcttacagagtatgtgaatgtaaaattgattactttggatccatctgctctgtttactgtatatgttttgagtactgagaaagtgatagacttactaatcaagttcgctttctaaaacacatttgtcttcgaattagttcttattatcaatgcaatggtgatttcggtttgtgggtttcgttaaagtagttcgctttttggttatagtttgtgttcttaaggttttactatttgcacaccagttgttcgataaaatttcagaggcttctgggttgacttttatccgttgcttatatcttcgaataataaaagtgtgttacttttatagaaaaaatgaaattgcaagtagtttacttgagttctgacttagagccctcattaatcaaactaattctgtttctaggctctgttatttcgtagaaaaatgtgttttctaaggaacttgcttggggaaaactacttcacctatatcattctggtagaagttcttgtgtcttgctggaaatttgcgtggaaatagtttttgagatgtgatttgtcttcgttcaggtattgtcaggtagaagttgttcaaatttaaggag

SEQ ID NO: 42023 - DNA, 773 bp, Arabidopsis lyrata; identical to SEQ ID NO: 41428
  Intron number 1 from transcript 920617 (locus 920617) deri ved from phytozome v7.0 (chr-ID scaffold_1; pos 7149107 to 7149879 reverse strand)

SEQ ID NO: 42024 - DNA, 814 bp, Arabidopsis lyrata
  Intron number 2 from transcript 493886 (locus 493886) deri ved from phytozome v7.0 (chr-ID scaffold_7; pos 21882530 t o 21883343)
agtatgtcttctttatcttccagatcttgatttttagctctgtgtcttaatctcttttattaaatctttgaatctttactctgttttcagctaattttttcacaatatttttaaaaaattgtatattcgggtcttaatctttgtataatgttttgatctttactctgttttcagataaaaaaaaattcttaagaaaaaaatatttttggatggattcttggtcttaatcttttttttttattaagagtgacaaaaaaagaaaaaaaaatattattctataaagttttgaggtctactctgtttccagataaaattttcactttctaaaagtatttggatggattattgattttcattatcttttttataaagttccaatcttactatgttttcagctaattttcattttataaaacaaataaaattgaatgaattttggttctcaatctctttctataaagtttaaagctttattcgaattttcaaaacaaatttttgaatgaaaatattagtgatggagacatatgaactgttgtgatacttcaattatttctcacattttcagtttgccgcaagcaatcataaaccaattcttgaacaagatcaagaaaattgggttaccttttgtttattagttgtatgataagtcttggtctcaaatctctttctataaagtttatttatctttactcagttttcagataatcttcatttttatttagaaaaaaacttgtggaaaatattcagtgatggagacatatgtgataattttgtatagatttttaaactgagattttggatttctgcagaataa

SEQ ID NO: 42025 - DNA, 939 bp, Arabidopsis lyrata
  Intron number 2 from transcript 480993 (locus 480993) deri ved from phytozome v7.0 (chr-ID scaffold_4; pos 233204 to 234142 reverse strand)
cttctcaagaatcactttgaagaagaagaagacaacaaaactcacaaggtaaagccttctttcactcatctagcacacaaattatactatacattgtgtatgaacaagtgaagatttagggtttattagatttcaagatgtggggtatcttgcattcaagtcaaaatcaaatattatattgaattagtcatgattccttttaatgttaacttagacttttgtttttcctttgtttcattattatgataactcaagtgcgctggtgacatagactttggagaggatacaacaatttattgttagttattaaattcctatctttttttgttctgtctgcttttgcgtgtgtaagattacaatcaaactactttgaatatgatgataacttttcctttataagttctttcttttccattaatatatagagatatgtttaaacagagaaggtgtggtttgtcatttgcgggaccttttgttacttatattttctttaaagaaactttagattgattatacatgacttcgttttcaagcatagtgggtgaccactaaagaataaagtcgctagtcttttttgttgtttgttcttcagttaaaggttgatcaccttctaagtaaactctattttgctattctaattacaatatcccttcctattaataagtaataagtcatctctctttcggtttctttttctttctgtttaagcagtgtgttgaagaaactttgaattctagtgtttaactacagtgtaatcgacatactctgagtttgctttgtttaactgttcatgtttcctttatcatttctttatggttggaaagtaaggactcttttggtctcttctcagatctattctgttcttgatagctttcagcaatccttaaaatatgaatgaaatgagctcattgtgcatcattgtgatttgaccagtgagca

SEQ ID NO: 42026 - DNA, 429 bp, Arabidopsis lyrata
  Intron number 1 from transcript 480993 (locus 480993) deri ved from phytozome v7.0 (chr-ID scaffold_4; pos 234118 to 234546 reverse strand)
gagtaaccagacgaagaagaagaagaagggtactgtggttttctctctttctctccgtgtttttcgcactagtgtgatagagatcctggctggttcttctttgagtttccaattccacgagttctcaaatttctcctccaatttctgatttttatttggatttaagtgttgctttatctgacattttgaccagcttgaagctaggaattatttagggtcaagtgttcctttttctccctatttttctagatcgagattgctatttttggtaatttttgtggagtttctttttttattgatagattcagaattttatatctagggtttattaaatttctcaaaaattggttctgtgtatgtgttttaatactgaaatctgtagtggatgttgcagatttgaagagcttctcaagaatcactttgaagaag

SEQ ID NO: 42027 - DNA, 787 bp, Arabidopsis lyrata
  Intron number 1 from transcript 936631 (locus 936631) deri ved from phytozome v7.0 (chr-ID scaffold_5; pos 4718114 to 4718900 reverse strand)
ccgtcgccaacgtccatccgactcgggtccggcaggtactgtttatgactcttctccttctcgtgatttgtaaatgcttgattttgttttatttgctcgatttcatattagatctgctattatttttgatgtttagggctgtatagtgttcgattacaaccagtttttaactcgatttctctcttggctctgtttattccatgttagcttcatttctctgtttctctaggttttttggtttgattttaggttagtatattacttcagatgatgtttataattgctttttcgaatttcaaagtgaaaaaggtttgatttgtctttaatttgttctaatctgattgttaaataaagattctaagaaacgagtgtgttagtatagtagttgctcatctaatttgcttaagtttgtgtttgtatattgattctaagaaactactgtgtttgttgtatctctgttattatttgtctaagtatgtgcttgttctttacttctaatttacctttcaataactagtgtttcctttccctaagttaacctatgatagcatatcagcatataatctcaaggatagcattctccttgagatggtaaatggtcttctaattttccaatgttattagtttttgcttctacatttcgactaatattcctctttatttttgtacatggttaaggctggtttggatggcatgggcacggtaatgaatgagctgtctaaaagcgtagttaaatgctcttagtgcagtttctggtgggcaattcttcagcagccggcaactagac

SEQ ID NO: 42028 - DNA, 324 bp, Arabidopsis lyrata
  Intron number 1 from transcript 942781 (locus 942781) deri ved from phytozome v7.0 (chr-ID scaffold_6; pos 19850045 t o 19850368)
agtagtaatagaagaattctcaactgatcctgctggtatgtatttggttctttattctctttgaatctatttctctcactcatgactttaagcaataagaagagaatcttagtccataatgaaattaatacagtataactagtctaagagaagaaactgattctctgcatttctaagaaaacagaggatccacataactttttgttccttcctttttgtttttgagaagcatgcatgtgtatgtaaatctatttacatatttgtcatgttatttgttttatgtttataggaaatttggatttctctgagtttgtagtggtgccg

SEQ ID NO: 42029 - DNA, 189 bp, Arabidopsis lyrata
  Intron number 5 from transcript 921997 (locus 921997) deri ved from phytozome v7.0 (chr-ID scaffold_1; pos 13030156 t o 13030344)
aggctcaagagaatctgcatcaacagagatttcaggttaaaaaaaaaaaactgaaacaagacctaattatgtttctctgcggatgatggaacagagttctagaagaaaagagaacagagttacactctgttattttctactgtgactactcatttgattttatggttcggatcaacttattctcaggac

SEQ ID NO: 42030 - DNA, 443 bp, Arabidopsis lyrata
  Intron number 3 from transcript 490777 (locus 490777) deri ved from phytozome v7.0 (chr-ID scaffold_7; pos 822422 to 822864 reverse strand)
acctgcctggcagacttgttttcgcaggtatttatcatctttgcctttcttctccttttgagagtttcatttttttgtttactcttccgtgctagtcctcacttgaatccagtgactaatctttcattcactgaaaatatttctcttgtgcaagcttggtttactcttgctttttcacttgacatcataagtggattgagtcacttatttaaagacacaagtcaatgtttttggtataacatgaatttgatactattgtggtgtatattgttagtttatcttcgagaatctaaatgttcttgatgtagtgcttagtatgtcatcatctgtttgattatggtatgctagtcattctgtagaaaaaagagagtgtaatcattagtctgatcattctaattcattccgtagataagttcccagaagaagaaaactggtgttattgc

SEQ ID NO: 42031 - DNA, 624 bp, Arabidopsis lyrata
  Intron number 1 from transcript 477492 (locus 477492) deri ved from phytozome v7.0 (chr-ID scaffold_3; pos 670717 to 671340)
cttgtaaggttcttggtcgttcttaactggtacgcttcaaaagctttcctttctctgtactctcgtttctgtgcaatccacgaaatggctctcgtttttgtactcgagcttttttttttttcttccggagaaagatactagatttagtgattattaggggtttaattaggattacagttatgtgctttattttgtgatcaatggacaaacagaggacttcctatagggttattagcactttgttacttggctttacttatatgtatgtgataaatgtctctctaatttgggattcttagattatttatgaaattttcaatgattgagagttgcgtgtagctccatacttttgctgcgtaatttagattttgaagactgaatatttctttttcaacaaagatttgaaatcatttcgtgccgagagatatcagtattttggtttttttagttaagaactgtcctaatttcttgaaaattttaatcaaattggtttgatcattatgtggatatacatactatttgctagctttgaatttcattagtcatatgtaagttgcctttttcacctaaaattttttgacagatttttgtgtcttttcttgtatctgttgtagatctgtcaag

SEQ ID NO: 42032 - DNA, 603 bp, Arabidopsis lyrata
  Intron number 5 from transcript 473223 (locus 473223) deri ved from phytozome v7.0 (chr-ID scaffold_1; pos 13256198 t o 13256800)
ctcttcaggtcccttttcctctcttttctctatttctttacatataaaaatctaaaattgttttgataattttatgtatttaagatttgatggtttgtgtttgagacattctctgcggtttatttggctggtcaaaattcaaaaacaaagtatatacatttttatcttaagatatactagtatattttataattaaaaatttggtaaatattttttcagataatttatgagtttttttgttgttgctaaattgggtcaagggatgaagggagtaaatgagatcggtgtggatggtcaacaaaaattttcacatgcgatttcttctcgtctcttctcttttatcctttttttataaacaaaagagaatgggttttaaaagttcctttttcttgtgtgtacgtctagaaaatctatgtagacactgagcctcacgtgacaattactattacacgatggacattatgcaacataatattcattttataagtgacgtttcaaaaacaagccaaaaaagtatttagagaatgtcttttatcctaattttgacccctacaacatttccaaagtctaaattcccacaacaatacccggtgattgcaggtt

SEQ ID NO: 42033 - DNA, 973 bp, Arabidopsis lyrata
  Intron number 1 from transcript 940624 (locus 940624) deri ved from phytozome v7.0 (chr-ID scaffold_6; pos 4588784 to 4589756 reverse strand)
gaggaaacgccttgccttgacttctaagaaacctggtaagctgagttttgctttgtcgtggttatcatttaggttgtgtgtgattcctacatggttttgaatgtagttagaactatggatagaatgttcccatttttgggacccgaagcgcactggttaagtggttaactagatatattaagagaacaacttggcttattccggttgaaatgtcatgtgaaactgaattgattcagcgattgaagagatcatatttttgagacagagtgatgtagttttttaatgttcatgaggagattggagagtgttggtaaagccagtatttgaattctgtagtggccaagtgaggcatcgagtgtgaatcagtctctagtctcaatcaatattgaataggaccaaaccaatagattactccaggaccaaacctatagattactccacttggttagattgaacagatttgctttggaacatcggcatgtgttggttcctagtacttgtgatttgtgaagatgggatattcttctagagaatacgaacaaaaatatggaatcactgggtggaatttttgagtaatgtgttttgctagaccaggctataataatttcagaaaaatgggatttggatgttgtttataagatgaaactatctctatagtgtggagacatataaaatctggtttgcttatgcacattgagtaaaggaaacaaaaaaatgtagatggtaataggtaaaatctggagttgaaattattagctggctcgctattgagactattggatattccataagcttgaaattttctagaacatatcattcacgagtattccttccacagtgaactacttagaaaggttgttacacgcgatcttagaagtggaaactgataggcatccatgccgtgcttgtacttatgctacatgtaggttgattataacttctggtaatttattcttcatgtaggaaaaacgca

SEQ ID NO: 42034 - DNA, 372 bp, Arabidopsis lyrata
  Intron number 1 from transcript 945553 (locus 945553) deri ved from phytozome v7.0 (chr-ID scaffold_7; pos 7193354 to 7193725 reverse strand)
ttttagacaccaatcgttgcctccgaggagccttggtatgctcatcttcttgttttttggctatacatattattttcgttactataaattctaatagtgtttgtttttttaaacgattgtatgttttggatgaatgaaagcaaccacgatgcatgaagaagattcaggtgatgtttcaattgatcttttatctttaatttatcgattttctaattttacaaaaatgttctcaccgagtagaatatacttttgagttttgagttaaatctttcacagtctgttgtggattagcaacgtttcaagccatattaactattgtgttgtggcagttcgaaagattcatataaattggactattgctacaaaaaaaac

SEQ ID NO: 42035 - DNA, 350 bp, Arabidopsis lyrata
  Intron number 3 from transcript 933001 (locus 933001) deri ved from phytozome v7.0 (chr-ID scaffold_4; pos 10317795 t o 10318144)
ttataaaccgggagagagagatactggtaatttcccttatttgtgtctatgataagtcccttccccttgtgttctgttccgtgtctttggtgtcttagtttgcgttaccaagaatttctatgttatttgaattatttgtcttctagtgatgtcaacttaaagcatgagccttacagcggaacatggcagagtttttgctcgattttttcttgaaatatcaaaggtttctctgctagtgtttcatgttattcttttgcactatttgatattttatcatttgtgtttttcgttatttgctcctcacgtcttcaataggctatcaagtatctctcggctgccggatttggtgc

SEQ ID NO: 42036 - DNA, 493 bp, Arabidopsis lyrata
  Intron number 3 from transcript 902115 (locus 902115) deri ved from phytozome v7.0 (chr-ID scaffold_4; pos 20219715 t o 20220207 reverse strand)
atctcgttactctactcggtatgtctaataattcgtctatctctttttctattatttaagaacttttaaggaagattattttctaatttcttgttgagtttgtctatttgtttatattaaaactctatccatatgttcaaagaaacataagtattagtgagatcttcaaagttgcaactaagccatatgctgctgcacacatcacatgccaacatgaaaaacgtggaagtgactaaaagttggagtgaaccttctttcattttattgatattttagcaaaaacttttagtttattagtcgttgatttgaggaaaatcaaaatggaaacaacaccttttttcgtcgtcttactcaaaatagaccaagaaaatttgcgacaatctttttcataaggaaaaattggatacatccttggaacaataacgcatctaaaagagttataattttcttgaggacaggtgcacatacgataggccaaacggactgtctcttc

SEQ ID NO: 42037 - DNA, 651 bp, Arabidopsis lyrata
  Intron number 1 from transcript 479444 (locus 479444) deri ved from phytozome v7.0 (chr-ID scaffold_3; pos 8326184 to 8326834)
cacgaatcttgttttgaagaaatttaatttggtaaatatatagtatatttttaagctcttttctctttattattatccgttttctgacttgtggatctgtctttgtctgatcatccaatttttgttgtgtttcctctgtttcgtttatgaatcatgatgttagaagaagtagtaaaggaagtaactttcggttgtgaaattggagttaaagagagtctctttagtagctatttgtttaaatttatcggtttgattcttgttgctattagggtttttaagagaaatgagttgattttcctctggaatctggaatagatccgtttcatctttgctgatttgctctatgtatgagtaaactctgtatctggtgtgaattcgttttccacaacaaaagtcatcagatttcattttttttataaacattatacaaagatctgacctttattaattgactttactgtgtttttacatttgttcgcacgcatttatgtgggttgtccagtttcgctttagttttctttctcttttatatggatgtgaacatgcattactgacacagctcactcgttctctgtttcatggattcttagcattgtgtaatacactctaactgctttactttaattttataagaagggttttagggcttgg

SEQ ID NO: 42038 - DNA, 739 bp, Arabidopsis lyrata
  Intron number 1 from transcript 909505 (locus 909505) deri ved from phytozome v7.0 (chr-ID scaffold_2; pos 18349106 t o 18349844 reverse strand)
ccgtgaacaagcttttcgaagaagaaagaacccaggtaactaaaaccaactctttctcttgcctatctttatctttatcaacaatatgcttagattgtgactaacacaaatcactacgctgttagactagatgtacaaaaacatcataatttaagtagtgacctatatagtaattaaatggttcactagtttctgcaataatttccaaaaaaaaatcaagaatctttgattaccatataatatccgatgtgacatacatagcaaacatatacttaaaaaagttacacaagactttcttgtaaaattccttggtttacattttttatttcctagtcttagaaaaggtcattatgtcacaagttacacaagactttcttgtaaaattccttggtttacactttttatttcctagtcttagaaaatgtcattgggtagaaaagaagccaatttggatagacaaagaagtaattgtgggttattggttgcaacatagtcatgaagatatttagaaatgtgattgagacaattaacaacttcaaaatgtcaactttacgtggataagaaaacgggattcaccactaatccattttaaactattttcttaatatcaatcaacatgtattgtgagattattaaagatacaagccatcataactatttctccatcaaaagctaatatggctactagggaagagagagataagtatagatcagtccttgaagatgcaggacaggttca

SEQ ID NO: 42039 - DNA, 848 bp, Arabidopsis lyrata
  Intron number 3 from transcript 938351 (locus 938351) deri ved from phytozome v7.0 (chr-ID scaffold_5; pos 16961012 t o 16961859 reverse strand)
gacaacattgagaaggtatgcctttgtcactaattataggaaaaaatgaacaagctgagacattctgattaacagtagcacgccgatcttgtatttttggtttaaggtgatagcatttttatccacatgattttgcaacaaaaaaaaaaatactgtagaaagatactgaacaacacataccttctagaagagctatttgacaccaaatgaatggatttactttcatggtagttttactggataaatgtatcaattgctcttctcacaaccattctttcattgccctatatctggtaagttatattgtttgcggattactctctgtgtcttctttccagacccctgtcaacttttaaaactatgacatatttggtttgagcatctaagtcttttagaaattaagaagttgcatgcaacttgagtagatttccagacccttttgaccggcttggtgtcatatacatctcaattagaatttagtactgaggaaatttacataggataattacagcatgaactccctgcttctcagcataggaaaggaattggttttgctatagtaccttaagtttgaggtcaataatgttataaacaaattaacttcaagtaattttcatcaaaatccaatttttttggtgctggaaaaggttaggctaaaaagtaacttcagaatttgtcgtagcatctctaatagaagatggggtttgtcccattttcactgaactagcatgtgccactagatactgattatgagaatgaaacgatgaggatttgcagctgtttttgatgattctcttgttgatgttataacaggttctggacagaggagagaagatcgaacttctggt

SEQ ID NO: 42040 - DNA, 628 bp, Arabidopsis lyrata
  Intron number 1 from transcript 943245 (locus 943245) deri ved from phytozome v7.0 (chr-ID scaffold_6; pos 22509806 t o 22510433 reverse strand)
aaccgatttcgggttgtccgccttcatcgaagaaggtgagctatagaggttgatctttcatagaatcatcttaggttgatttggtatgttaatcttatgaatctatacgattgtcttgcacaagtctctttagtatcgaaattcatcttaggagtttggtagttcattgaatcgtgatgtcatatgctcgagaacttcttgttctcgagtaaggatagaatgttatgcatgaaggaatccaatgttctgtgttcattgaagaaagtgagctcgagattgatcatattctttagtgtattgatatttgagtgcgtttaataggttttggatccaagtatgtttattaatgtttggttctatatgactgtcttgcacgagtctcctaagtatcgaaaatctgcttattttttgctttaatcatgagctagattggtgacttatgttccaatgcatagggatgggactctactctttagtaatagaatcaggtttatgttgtcttattattgtacagattgtgatatctatgattttttcaaatatgccgttttctttgattttgatttttatgtttatatgcttcatgctaagtttgtgaaaccaaaacgtacaggaaaagtttaccagg

SEQ ID NO: 42041 - DNA, 658 bp, Arabidopsis lyrata
  Intron number 2 from transcript 490624 (locus 490624) deri ved from phytozome v7.0 (chr-ID scaffold_7; pos 154247 to 154904)
aaaaagcgcaaacagttgcaggtacactttcttctttcttttgttatcttagcagattctcagatgatattttagatcttgattttcaaaaacacaagattagttcaaatctagattggtctagtagaaactatattcgatgactacaaggaaagtttgagtgttgttacatagtagatctcgtatattagttccataaatagagaggctgttcatgcttttgacttgttttgtgtgctttcttaccagagatcctttttttttttttgtttttctccgttttctcttccacttttggtatctgaagtatattcaactgttacatgatttaagtgggattttatttgatgcggtttttgttttgagttaataatggtcctaacgccgaccaaatagattcttttaatctgaaaaacaagttgatacagccatctgttagattttacaccgggatttgtattctcttcgctgtcagaatttacaaatactatacaaaatcattaattcccggggaaaccacgtgaactcactaatgatgactaaagtctcacgtcacatttattgttcttcttaaagtagatatttttaaagtaggttaatttttgtcgttttctgtcgactggtttgatgaggatagacggtggagatcaaagtgaaa

SEQ ID NO: 42042 - DNA, 449 bp, Arabidopsis lyrata
  Intron number 1 from transcript 475111 (locus 475111) deri ved from phytozome v7.0 (chr-ID scaffold_2; pos 1807932 to 1808380 reverse strand)
tacaggtaattagttaaaattaaaaatgtgattggtcaatttttgttgttaacttaaactttttaacagtctgtttcttgtcaagtcaatttcaaatccccaaatatagttaaaaaaagaaggatctttaatttaaccaaatggttaatctgtgtaaaaaattaaacttttggtctaatatactgttaactcaaataaagattttgttagagaaaaataaagatttgttagatgaaatgtgaaactgctgtggtaaatggtaattcaaccaaacatcgttaggagataaagttagagttattacctttttaagattttgctagatgaagtatgaaattattgtggtaaatggtaagtttatgtaatgtaataatatgacatgatttttgcatttggattgatgtttatggaagtttcatttgatgtttgtgtgaatctgatttggtagc

SEQ ID NO: 42043 - DNA, 808 bp, Arabidopsis lyrata
  Intron number 2 from transcript 480817 (locus 480817) deri ved from phytozome v7.0 (chr-ID scaffold_3; pos 23436549 t o 23437356)
tttctgtgttctctgttccgtcccgtgaagcaaatgtaagttggtacaacattattggctttttggatttactctattgaaacactgctacagttcttttcaaaaggatctttctttttgggttatatttgatgtttgattctttgcttgtggatgatttgtgaaagtgggttattcttaagtcttgatattttttttttgattttggtgattttaattttgggaaaatgtcggttaagtgactaaaagattctttcttctttgtttgtctcattaattgaagagcaatagttgttatactgtacttactgttatgctttttttatataaatggtatgagatggagctgaactttcttttacttgattattgtgtttaggcaaatttctctggagtaagttctttgtcttcaagctgtgttttgagtttcaagttcttttctttggggtgggttggatttggtttctgctctttatgtgtttggttcttgataaattcaagtgaaacagtgagaaagatgaaagaatctcttccttgtttgtttttggtggttcttgtgggttttggagatgattcttatgtttctctgtacagtagtttgattatgtgttgtctgcattttgtgggaaagccttgtccttttagaccaaaactatgtccttatgagctctgagaagagtgtatgagattagatgatcagggtcgtctttttattttggacatctatgtggtctgaggatgcttatgcattcattttgattttgatgctgcagttgaatctacagcaaaaaaaaataaagttggagct

SEQ ID NO: 42044 - DNA, 741 bp, Arabidopsis lyrata
  Intron number 1 from transcript 473735 (locus 473735) deri ved from phytozome v7.0 (chr-ID scaffold_1; pos 21445434 t o 21446174)
gactcctgacgtatacgaaggagtgcggttcgtttgagaaattcctacctctctatctatctctgagatgtttggatttttcaaaactctatggacatgcagaagagaaatgctatccccacgcagaccaagacagaactttgacttgttcaaataacaattaaggtgaagcagggtcaggaacaacgaatctctttatgataaacggatccattttgcaagtttgttattacgggtagttcctgcaaaggatcggactaatgacgtatacaagaaagacttgaattctcgatgtagatgctacatagttggttctcatccttcagagactacgagtgtaataggagcatccgtcgacaaaaggatcaccctaagatgattatctcatggctattgagaacgaatcaaatcagatggttccatttctcaatctttcggacgtgctcctacggaaccaaggtcgaaaagattgagaaaaatcagtcattcacaaccactgatgaaggatcctcgaaaagttaaggattagtaatccgttttagaaatagaaaggattcgatcttatacatacgcgaggaaagtaatcaaaaaagaaagaagatgagttcttctttacttttatcacttaggagccgtgcgagatgaaagtctcatgcacggttttgaatgagagaaagaagtgaggaatcctcttttcgactctgactctcccactccagtcgttgcttttctttctgttac

SEQ ID NO: 42045 - DNA, 423 bp, Arabidopsis lyrata
  Intron number 1 from transcript 477858 (locus 477858) deri ved from phytozome v7.0 (chr-ID scaffold_3; pos 2163565 to 2163987)
gaaatatcaaaagtgcttcgtcttcttcatcggagaggttcgttctttttttcccttcttctctcttgttctgtgtatgtatctatctctgtgtatattataggagctgtaaattaattttgtttttttcgtgttttgactttttttttttctctctctctctctctctctcgggagattgaggaattcatttaattgatgtgttcccagggggtggtttctgcttttggatagatattggtttctataataggatcggaatttaaatactagcatttaagtaattttgggtaactgtagaatttctatggtcggaatcaaatcgataccttttatgatttttaattatgtttcttgatttcttgtttgtttttgggttgatttgcagatctggtgctctgaattggagaattgaggtttgag

SEQ ID NO: 42046 - DNA, 496 bp, Arabidopsis lyrata
  Intron number 1 from transcript 487431 (locus 487431) deri ved from phytozome v7.0 (chr-ID scaffold_6; pos 2321578 to 2322073)
aacgccgcaaattgacgtggcacgagcgatttctcgtgagcttccttcactctctcttcctctttttctttgaaattcccggtatttttctgtgtatatgatctgggtattcaaaactttctttcaaagataaacaaagttcgctttttttccgtgctctgatcttcttgtgctctatttgttttttttttttggtccgatttagagtgaatgaattctcaattaggtccttaatcagcagagttttgagatgatacagaatctggaagcgtgtgatttcatttatatatattgtggaatatctggaaaacaaatgtgagaattatctagtttgtgctaaaaggttcttcctttctacaacaagtctgtaatcccacttctcactattatcagagtaattggtgctttcttctctagatgatagtaaatttagtgctaatcactgtgtgaaatattcatggttgtgattaggtgttgaaggaagcttcaaggcttt

SEQ ID NO: 42047 - DNA, 797 bp, Arabidopsis lyrata
  Intron number 2 from transcript 315035 (locus 315035) deri ved from phytozome v7.0 (chr-ID scaffold_2; pos 551040 to 551836)
aaggagctgcttcatctgtcttcatcaaagaagctgtaagatctttcgtagcttaccttgacatgttcaattttgtgtgagattgtgtatgctgagatttttcttatacctgccaagttacagacttacagtattagctgctctttctctaagcctgattttgtgtgtgctactttatagagtgattcagaattcaagcaatatctataggttgatgggattttctcagtttaatatcaaggttctgtaattactattgagtagattattttcatctataggaagtagaagagagatggagatcaaatcttatccttcagctgttgtgatcactctacgatgctgtgtacaatcttatccgtcttatatacatgagttttctcttgcaaagccttggcataactcaattttatcagttaaattctaggttcttgcattttgggttaatgaagttattgaacaagtcttgtattggtacatttcaacacatatgattgatgataagtagaggtactcaatattgaagctataaagtttctttcttgtccggtattttaagtaatgggtcaaaatttagcgtaatgtgtttgttaatttcaaaaccatgattgactgtgaattgttgattgcatggacgctaatgtgaatcaagcgatacaatttaaatgataatcacttgtaatgaggttatatagttataacggtacaaatgccaggttcttgtcgggatgaatgatgattaggttcaatgaacttgaaacaaggttttgtttgtctatatgtttcaggttagactc

SEQ ID NO: 42048 - DNA, 363 bp, Arabidopsis lyrata
  Intron number 1 from transcript 927816 (locus 927816) deri ved from phytozome v7.0 (chr-ID scaffold_3; pos 921354 to 921716 reverse strand)
atccgagaagaaggcttcctgttagttcttttttcgattctctcgtcctcttccttgctttatttcttctcgctttcattcgttagatcccaaaaaattctaggaattcgcaagagttttcggccgttttcgcagtttatttgcaaagaatggttataataattcttcggatttttccaccaaatgttaaatttttatccactttctgtttggtgaacatcaatttaaaacggtgatcgtgatttttgaaattggcataatgtttctggttgcttgtaattttaaaatcttatttgtttttattcctagtttgtgaaatttctctaattgcttctttcaatttgatttacttcattgcaggag

SEQ ID NO: 42049 - DNA, 800 bp, Arabidopsis lyrata
  Intron number 4 from transcript 486723 (locus 486723) deri ved from phytozome v7.0 (chr-ID scaffold_5; pos 20701573 t o 20702372 reverse strand)
ccccgcggtacaccgcgggtcgatttttttataactaaaatattatttagcaaaattttaagttgtatttgttttgttaatattgtttattttgtttagtgtttctgattttataattaaattttgatttttaattctaagatttcatccatagtatattgtttaatattaatatcgatctaaacccgttgcaccatataaccccgttccgtaaaattaaacatcatttgttatttttttggaataatatttttatccactacgggtcgcaggttcatgcggataagcccgtagagagttgtgggtttgcgtatcgacccgccaaaagaaaagctatcttttgaaaccttttgttttatttagaggttttgagaaagtatccctaaaatataattttcattatatgaaaaaaaaaaagaagtagaagaaattgtaatatcaacattcccgatttttacatcacttgttactattaattttttttttttacagataaaaatcagaagttaactaagtcgagatttttaaaaagattgtgtagagatttttggtaaattgttgagaacatatttgatttcaaaatctttacttaaatagataaagaaagattttgtagagacttttgctaaatatatgagaaatgaatttcatttaaaaatctttacttaaataaaacaaatctaaataattaatgctaatggcatgccattgtaaatacttatcaacttcaggatttatttgctaattgtgatccaaaaatgtatatatagatattatgagaaaatcggttgtaacttgta

SEQ ID NO: 42050 - DNA, 812 bp, Arabidopsis lyrata
  Intron number 1 from transcript 493723 (locus 493723) deri ved from phytozome v7.0 (chr-ID scaffold_7; pos 20329973 t o 20330784 reverse strand)
gctgaaacctaccttcaggattcagcctttctcaggtactgttcttccatctccatcggcttcaattttactgatgaattcatctccgaactaggcatgccaatatttatcagtactgattgtgtataaggttaagtttaggatttgtggagcttgatgggtgtttattgttaattgggttgttggttcttctggatgattgttgtgtaatttgtcactaattgggttaaattacactatgatcaatcaaactctgtttgctatattcttttgtatgattgatgctgtttaaaacctgaatcctttcatgaatttctattgccaacacaagcaattcgcaaagtcggtgataataacctaatcaagctctaagttttggaacgaacagagtgtttttgttcagtttgatatctttattagatcatgaaacttatggtttctggcttgcttgagaattaacttgtaatcaggctctatgatgttcttaagctgcgaagccttgatcttaaaagtaattgtacgaatgtcttgggctattatgaatttctcgtgcttgttgcaagtttattatgaacttgttagacacttaagatcatgtatatcattatatcactatactgaaaataccgtattaaattgttgagaagatttttgttgcattttacctccacgatatataactaatgtatgatctagatttaagcatcaccagtgagagcttttattctgagaagatctttgtttcatctttctgatgttatgtggctgcttgtgcaggttttctgttggattcagatagcagctcgtacttg

SEQ ID NO: 42051 - DNA, 643 bp, Arabidopsis lyrata
  Intron number 2 from transcript 485847 (locus 485847) deri ved from phytozome v7.0 (chr-ID scaffold_5; pos 17033820 t o 17034462 reverse strand)
caagctactgctgctgcattgtttaagcacttgaggtaattcgtttcgactctgagtaatctctctatagctaggattgtttgcttaattatggttgcttggtttagagagaatatgttcctcagaaatttcatggtatgtagaattcaggttttatatgtgattctgatgtgtgcttctcgtgtatttactttggagatttactggtgagatatgtcaattagggttcactttgttgttaagcaatgatgtttcttgttcctggtaatggaagttaagtggaccaacttacgaaagcatctggtttgatatctgtagttacgtttcctcctgtttatgtttggacaaagttttgaaacaaccttaatgcattaataaaagattgtatccttttttgtacatattatatattggatatctgaaatttttattaagtatctccataggagtgttaagtttttctttttcttctgtatcactttagcgatctttatgttgatatgtcaaatgataatgcatctgttgttatcatgaatgcaaacttcttttgtggatgggtgtgaatagatacttctctcgaatttttaatctattccagttctttgcagctgtgactggggactgagagtctcaatccttgacg

SEQ ID NO: 42052 - DNA, 754 bp, Arabidopsis lyrata
  Intron number 2 from transcript 915164 (locus 915164) deri ved from phytozome v7.0 (chr-ID scaffold_9; pos 1336066 to 1336819 reverse strand)
gatttggtgaagcaattaaactcaaggtttgacaccgttaatacaagcatcaaagaagtgtcttcaaatatggagaaggtcattggagatagagtagaagcgaggatggatgaaaagtttgaatatatggagaaggagttgaaacagatgaaagagcgtctgaatgcaattgagcaaggggtagggaaatctggtgaaaacgctgaggaaaactcagccttcaaacaaaccaaacctcccgaaaagccaacacaagtcgaccttttgctgaatcaaaaagaaaaagcaacaccaaaaggtccagcgaaacctccacaaaaccagtctgttactagtcctctggtaagctaacagtgccagacatatgtataaatacattgcggctgagttattattatcttaataaccttgtacctgagttttcattatcttgatcacataatggctgagttatcattatattaatcaccttacggcggagttatcattatattatggctgagttatcattatcttaatcacattatggctgagttattattatattaatcacctaacggcggagttatctttatcttatggctgagttatcggtacatttatgcaggagaaagatactgtcgatgttgagaaggacattggtattgctggtgttagtaagaatctggaaaaggaatttgctaatgtcattgatggcaaatctgctattgatttcatagatacgttacctaataatattaggaaattacgctcc

SEQ ID NO: 42053 - DNA, 621 bp, Arabidopsis lyrata
  Intron number 2 from transcript 491120 (locus 491120) deri ved from phytozome v7.0 (chr-ID scaffold_7; pos 2400209 to 2400829 reverse strand)
tcgacaatcattattagtctatctaatttccttctttaaccctttttctcagtgactagtgcatgaattctgattggaagtaatcaaatcccaccaaaaagctcaccactttcctaaatcttcaagcatacccatgattttacttttctcaatttacctccttttttcaggtttttatatatgtagtcctcttgcttgttcctcatgctttctttcaactagattttcatttgcctgacgaatctgcttttctttaaaggatgattttggtttggttttgggttttggcatctctgccactcatttcttgacaatccttcgttgttctcttctctatctttgaggtaagggtttaatcctcgtgacactttttcagttctaaagaaagctactttctttgcttatgtaccatattctttttgtttcttaagaagtttctagctttctcttcttatgctactctttaataaaatcccattttgattcggtgaagtggctaacaatctctcattttgtgaccagtgattctcaagtgttttggggattttatctcaaggtttttgtctaattgttgtttgtttatcaaacttggtgttttcaggaactggttaaaccaaaaca

SEQ ID NO: 42054 - DNA, 404 bp, Arabidopsis lyrata
  Intron number 2 from transcript 891374 (locus 891374) deri ved from phytozome v7.0 (chr-ID scaffold_7; pos 20567210 t o 20567613 reverse strand)
agcgatcctggagaagaaaaagttattgcttcaaggttgtggtgtcgcagacccactcgtgatacatgatctccataccaaatcttatgatttagtctaccagcctacctcccatggagattttgtttattatttcgaaagtttagtatctgttttatcaaattaatttgtcttcttttcttttatatcagtgaaccattgtaattcaacatatgtttttcattttgatgtgtcgcttattttctttggattcttgttgtattctgctttcttagattctatttttttggctatgattttgttgctgatggttcttgagtaagttatcaaatcccaagtctttctatgatccattagttcctcgattattctactgatttctgcagagaccagcttacaaggtc

SEQ ID NO: 42055 - DNA, 664 bp, Arabidopsis lyrata
  Intron number 3 from transcript 480328 (locus 480328) deri ved from phytozome v7.0 (chr-ID scaffold_3; pos 18638738 t o 18639401)
acaagccttcctctgctttagagtaagtttctggacacacattttagatattaatggttatttattagttttctagcagagtattgtagattctctatagaaatactttgtgtattgacctataatcttgaatcaaggttctgctgaaatgagggactggttaagttagggatttaaaacaaaattttgaccatttttatggcggtttccatcctaggcctttacgtattttagaccagagcttttgtgaactaaatcctgatatgaaagttatttcatgggctccatatacggacttttactaagaaattgatagaaagtttctgtcagatttgacatatgaagatcatattttcataattttatttgtttttcttccttgccaatctcctatgcattcttcaataaatggatctcgaagttcaagttcacgaatgcagttttacaatatttgttacgtattaggctaactgtttacatatatatatatatatatatatatatatatatatatatatgtatatatcaaatcggttctgtaaaatcttgcattcccgccatgtgattttcttagttttggtttttggaaatctcagctcctcaggttatttttcggtgattttcttcagattcattcaacaaaagctaggtggtccttctgtct

SEQ ID NO: 42056 - DNA, 568 bp, Arabidopsis lyrata
  Intron number 1 from transcript 478080 (locus 478080) deri ved from phytozome v7.0 (chr-ID scaffold_3; pos 3187069 to 3187636)
gaggaacaatctctattggaagatttgctcgtcaagtaatcttcttgctctctctctctctctctctctctctctctctctctctctatgttttagatttgaatttgctgttttatccattgttctttctatctgacaagatgtagtaaattctgagattagcttcttttccatggccttttagcatcatgtagctgactctatgaacatggttcctcgaattttgaatcggaatatgtgttgagaattgttagatttggtgggttttttgaattatatttgagaagcagtggtatttgattagctgattgtgagttttgtatgtggtttcatcaagtatggtaattaataatataaaactaaatgacttgctagtgttgttgtatcatatttatgataggctcattagtgttgcaaatgtgaaatttttaggctttaattggaggatgacttgtctacttatctgtaatgattggttgtaaattttgcaggagccttgttaaatcctatcactcttttaataatttatgtttatataggtacgcgacagaaccttcggtttttcgat

SEQ ID NO: 42057 - DNA, 707 bp, Arabidopsis lyrata
  Intron number 1 from transcript 358466 (locus 358466) deri ved from phytozome v7.0 (chr-ID scaffold_8; pos 20583677 t o 20584383)
cttgcgaaggcgattttcgagaagagcaagagctggtaaatttttcgacatcttccttcttcagatgacctaaaacttgtttccgagcaaggattttgtagcgatttcgtgtttagaaggaggattttgcttttgttttgttgctaaaagtgttcgtcggaagtgttttgagtttggtaaatctggatctggtaacgatgaactatttgatacttgaacgaaactcgatttctgaaatcatagacgacgagattttgaacctatcgaacacactcattgatgttgtattccgattttggtatggattcgttgcttattttctctgcgttgatcttaggtgcgtgataggattttgatttcagctgtttattctctccgattttcgctagatctggtgaatttctgattgggcactgttgtacgatgcttgttagctaggttcagattcatcgttgcttatttatctgcatgattagttctctatgtgtttttaggttttgattctctccgatttagatctctatgttaggtttatgtgctctctgattcaggatctcgatgtttgattttgcaatttggtttgttgctaaatgtgttcatggtttgcgtttaattttgctgtttgttttgttgctaattgtgttcctgacatgaggctttctttttactattcttgaattttgtagctcctctcgttgtccctgtga

SEQ ID NO: 42058 - DNA, 481 bp, Arabidopsis lyrata
  Intron number 1 from transcript 937306 (locus 937306) deri ved from phytozome v7.0 (chr-ID scaffold_5; pos 12399334 t o 12399814)
gcgttaggttctcttctttgccttttcccctaaacgtttgacttttagcttttgttctcggcatatccctagatttgaagctatgtgactgattagcttcttccattttgctttttctttcaaatgaggattagatccttacttatctctttaagaattattcgttttactttgagaatcttcctaagtgttttgaagaagaataaacttaatcagcccttgcatttaactaaatcatgtcttgtttattatgtatcattctctggattcacttcttcctattagggaactggaaataacttctcattagattctgactcttttgggcatatgttcaatctaactgttgtttgtagtgatatgtttctaatttgacaattcttgtttgaatgttgtatttttaagcttcttatttagtaaatgcgagattgagagttatctttcagctgaggctattctgcttggagcaacctatcactca

SEQ ID NO: 42059 - DNA, 466 bp, Arabidopsis lyrata
  Intron number 1 from transcript 348439 (locus 348439) deri ved from phytozome v7.0 (chr-ID scaffold_5; pos 16586650 t o 16587115 reverse strand)
ctgctgtggatctaggcaacgaattggtattattacatacatcgctggatttttctctttgtagttgttacggctttaaactctgtttcttgagttcttgcagttttatgttcaccacatgtttgtgaatatgtttgtgggtctttttttgcaaaatgcatttcctctgttttctattttgaaaacgcttttaaacatgtgatattaacttattgttgatggatttgtgcttctttgatacctcaaaaagattatttttttcctttttatcataaccatcttttatgttttggagcccacagattccgcatgggaatgtttgtctctaaattttttatagtacaaatagagtatctttggttttgatttctcttcttagctcatttgtcaaactatctgtagtgagaaagatggtttactctgtttcctttactattacaggttttaaggaacattgatctagtct

SEQ ID NO: 42060 - DNA, 545 bp, Arabidopsis lyrata
  Intron number 1 from transcript 947835 (locus 947835) deri ved from phytozome v7.0 (chr-ID scaffold_7; pos 22974507 t o 22975051)
tcaattgacaccctcaaagacttgtcgaagatcaagtatgtttcttgctttctttttggattttgggtttgtgggaattgtcgtttttctaggttttatcttatttcttgctcggttatgggttaaagatgtgagctttgttcaatttttaaggaaaaggtgtgacctttttgtgttcctggttcgaaagtcttcagattgaattgggtaatgattcagtgactaagataacttatatatttgtctttttatcgacttcatacattgggggtacttgttaatttaggttttaggaataggtttgtgtttgttttatctgactttgaagtcaagaaaattgagactgttcttgaaaattggagaatctgtttgttttcttatcgttgtgagatcggagaagatcaaacaagtttctttgtttcaagagaaagtgtctcttttttaattgagtggttttagtttttggagttgctttgcttgtatccgtccaagtgtttggtttttgattttggctggatttggttcataggggctttggcaagtgg

SEQ ID NO: 42061 - DNA, 538 bp, Arabidopsis lyrata
  Intron number 1 from transcript 471407 (locus 471407) deri ved from phytozome v7.0 (chr-ID scaffold_1; pos 5111071 to 5111608)
cgggattctcactactcttttgcaaaaaaaaaaagaggtaaccacaatttctcaatctctagatgaatttctcttacaaaaaaactcatctttttaggttggattgattttggttttacctttcaagttgaagcagttggcgagctttatactcttgttcttatctagattcctgcaagtttgttgctttttctttatgtatctaagtttaagcctgtctagttgattaagtcgatgcatttcaatgattcgattcgagggttttgcgtattccttaggattttgagctcaaaaatcttcattatcgagttttgtgatgtgctttagttcttcgatctctgtaggaatttgagttatgggttttgttttagattcactttgaagctaaattgagtttcatttgtggggaatacaaatggaatgttttcgtcaaaggtggaatcttttccaatttcagttgctgtttactttgtggattagtgcttaaatctgaggttttaagtcttgaaactttacagatcggaggttccgaaggtga

SEQ ID NO: 42062 - DNA, 553 bp, Arabidopsis lyrata
  Intron number 1 from transcript 948141 (locus 948141) deri ved from phytozome v7.0 (chr-ID scaffold_8; pos 109085 to 109637)
agtgagccaaaggtaagatgcattgacctatcaagaactactttctttccaggtttctcttcgtcctcctctttcctttctctttcttttcttttcacgaattattagatttcccaacaacatcgttcgttttcttccccaaaaaaatgtgtttttttcctacaaagttgtctctttttcccgatgaaatgatatagagtgtctttaacgtgaacttggtgcaaagattacatttttttgaggtgaaatgaaggatactttgttatgaaaacgaagctgatccttttataatagtgtcttccttagttatctgtatacatttttttttgccatgaaaaagatgagtattttcatggaaatgaagctgatcgtgatcgatcgagttagttcgacactgatctttgattgtttctcccttgccatgaaaaagttgagtttttttttcaggtttttgagcattaaagtctgaagtttttgatgttttccatatttgatctttgcacttattgtttacagagggattctacgcgacgaacaatcagttccagacaac

SEQ ID NO: 42063 - DNA, 706 bp, Arabidopsis lyrata
  Intron number 1 from transcript 493370 (locus 493370) deri ved from phytozome v7.0 (chr-ID scaffold_7; pos 13235598 t o 13236303)
cttccggtaactaatcgttgatcactgtttgagttattctttctagagttcaactataatccatgaaattttattttatgtgtatgcaaataacatattttttaaccaactagcgcttggactagtggcgaaaggcgaggaccctttaaaggtctcattagtctgagtgttggttaaaaggataagactatacgagatcttggcggaaagatgtacatgcttcggcttagaactctttgattttaagcatacaacgataattctcatcatttagttattgatttcagtccgaaacttgaatttatgaataaaagggaacaaataaagtataatcgtttaatgacatagccaccatcatatgtgatttagcaatcttattcattaacatggtaaaaaatgtatatatatactccctccatttcataatataaggcgtttttagataaagttttttgtttcacagtataagtcgttttcgagtttcaatgcaaattatatattattttaatattttatgattatttatattatacggtctcttatatgattgtttgaacttttaaaaagtatatcttcttaatcggcgtgcttttacctaaaacgacttatattatgaaacggagggagtatattttttgttctttttccacgatgtcttgatcataagcattatcaatgttgtgaatgtgacagctgggagttgtga

SEQ ID NO: 42064 - DNA, 849 bp, Arabidopsis lyrata
  Intron number 1 from transcript 937917 (locus 937917) deri ved from phytozome v7.0 (chr-ID scaffold_5; pos 15300965 t o 15301813 reverse strand)
tggaatcccttctgcggtatgatctctctctatctcttgctcgaaatcaatcgtctttctcctcgaaccgttggtttgatcattcgttttgcctatttttcatctgcattagatactctatcatagcaaatcgatggatctagtctattgttttttgcgccttgtctcatgacgactatcttttggtaaattaattattatttatgcgtttttcttatttgtaaaaaccttgcagaggcagagattgaagtgttatgggatgtcaatgattgcccaatcccttatggtcatctcgatactaccgatgttaaatgcaacattatacgagcccttcagagtaagggttatcatggtcttctcacaatcacagcttttggcgatctggatcttgtgggtagtgactttaatggattctgtatctttcccacaggcactgccggtccgagcatttgtgaggccctacacgaaaaataaaataatgcccaacatatttataagttttagggctaaatttttttttgacctatttttagtaaattatacaaaaataatgatattttgaatattattacattcaaatttaattgtttgggccctattttatttatttttttcgaaaaaaactttagtttttactaaatattttcattttatgagcctttttaccaaaaaaaaaaaaaaagccttaaaaagaaaaaaaatttgtggtgccccaagcggtggcttgggtggcctgtcctgcgggccggccctgcccacaggtgtaggttaactccttaaacgcctaaactctcttttagttttgtcttcttcatcatgatccgcgtttatatgtggttgcaggagcta

SEQ ID NO: 42065 - DNA, 807 bp, Arabidopsis lyrata
  Intron number 2 from transcript 313572 (locus 313572) deri ved from phytozome v7.0 (chr-ID scaffold_1; pos 12755962 t o 12756768)
ctggatttggagaaggttaagtctatcttcccatagtaagttcctcaagtaacctcctctatcatagagtttctaaacacagttgttgtctttccagaagaaacttgagttctttgtttcaagtattgctgtggaaagttggagtttaaatttatgctttgtgctagatataagttacctttgaagttgggttaagattggtgttgtgaaaagtagacagaaacgagcattagcatttacttatttgatcctgtatagtgtttgtaggaaaacatctctcattgactcattgtgttacttttagtctttgagtcagctttatctaccatgttatcacaatcattagttccgttttttcgtttgaagtggggagattgtgaatgtggaggtggtggatggaggaatgatttgctcaagcggcgttctagttgaagaaatgggtgatacaaatgaagattgctacatagtgaatgtcgcagtctatgtcggctactagtctatcgttcttgtatggtcgaccccgggttagagcattgtcatcctcgtcgatagaagagaaaaacgagaacacttcagtcacttttagttgttgtatattttgatttcagaaccatttttggtttgtaggcgtgcatctatatcacaatttcagtttaaacattggtttgattcacactcatattctgtaagttgagtgtcttacagattcagtaaatggttgcagcgtttggtgcggtctagaaataattgcgtttgcctcaaatctctaaagtccgcgggaaagttttgcctccttaaacctaaaaa

SEQ ID NO: 42066 - DNA, 496 bp, Arabidopsis lyrata
  Intron number 1 from transcript 471025 (locus 471025) deri ved from phytozome v7.0 (chr-ID scaffold_1; pos 3567757 to 3568252)
gcgctaagctccatttacaagtccaggtcttttttgtttcctttcttctgactgattgtttttccagattggtggttctgcttttgtatatttctgatgaaccaaaatccgtttggcacatttcaaaatcatcccttttacctttttagtgggttaagcttgtttggtcgaattcttgagcaatgcatcattgtgtcttgattaatgaactcttggtgtggttctgtttacagctctgggttatggttatgagcttctttgtcatacttgtggaatttttaggtgtagttttggtttgagttgtctgaatactacttcctcatttgtgtttataatgatttgtttctgtgaagctctggctatcactagtcttagatttgtttgtggtgattgaaactacattcttgtattttggagataaagatttgcttacagagttggctttgttgttgaaatttcagtacaagaggaaggttcatcagccaaaaggagcact

SEQ ID NO: 42067 - DNA, 671 bp, Arabidopsis lyrata
  Intron number 1 from transcript 937003 (locus 937003) deri ved from phytozome v7.0 (chr-ID scaffold_5; pos 10579778 t o 10580448 reverse strand)
gccctggatctcgtttgtaaaatcatcttcctcactctccttatccccacaatctctcaaatctcgttttttttttcttgtttaacttgccacaatttgtcttatcttttgaaaattccgatcagattttatcatgttttgtttcattatcatgaaatgaatgagtttagtgaatagtatagctcacggtgaagtattgattgcattttatatttgctctaattgtgaaactttcatgttatatttggtttatttcttcaccatgtgagattatctatgtcaatgagactagtttagtgttatatttggtaatcaagattctgaatttataattttgcaaattcttgtttgtgtgtagctgatatagtgattggcttatgtatgagattgttatatttagcttatgtcttcaccatttgagattggcttatgtatgagattaagtttgtgttatatttggtaatcaaaattctgactttgtaattttgcaaattcttgtctgtaatgtaggtgattgtagtgattagcttatgtgtgagatttttatatttggcttatgaatgagattagttttgtgtgatatttggcattttaagattctgactttgtattatgcaaattgttgtatgtatgtagccgtgtgtgcgggaactcccacgggctgatcagga

SEQ ID NO: 42068 - DNA, 429 bp, Arabidopsis lyrata
  Intron number 5 from transcript 330190 (locus 330190) deri ved from phytozome v7.0 (chr-ID scaffold_7; pos 18356751 t o 18357179)
ttcaaaggtaatcaagatgcaaactttatatagtctttgatgtattgagatcttttgattcatttcaatggaatgatttggttatgttttgtttgttagttcttgatgaccctgagaactcttttccacttagcctgtcagtcatgaacttgatcaaatcgacattttttcgttgctgctagctagtatcttgagtaatgtcctgttctcacttagaatatagatatgaaatctccctaccatcttctggagatatacttctgattaattttgatgggatctcgtttagagttttgttattttgcatatattatcaagtagtgggcgtccattatttcctttttctcagcaatacctttgtctgtttgtttgatggttgatagcctgactatagacgacttgcatctcaaataatggttttctgcagag

SEQ ID NO: 42069 - DNA, 634 bp, Arabidopsis lyrata
  Intron number 1 from transcript 927709 (locus 927709) deri ved from phytozome v7.0 (chr-ID scaffold_3; pos 561399 to 562032 reverse strand)
cgtggcaagctctacgagttctgcagcacctccaagtacttctctttagatctgtgtttagatctttcatttttctagtcttgtgatgatgagttttatctttcttgattttggttcttgattgctttttaacaaaatctgatctcttaggttttgattatagaaggataattcagtacttttaagggattgaatttcgagatctgatcttttctcatcatgtcaaattcttacggatttttgtaatctttatgtagatttaaaatttatagctaggagctaggtaaatgtcataatgatatactaatatgtaatatcattgtctctacacagatatatatgtgattagaacttattaaagtaaactaaagattcacagtcatcaataaaaatgaaagatccaacgtagaataatctgtggttccatgcattaaccagtctcaacctcatgcagacatttaagcacttcatgaatttaattaattatatcccatctttcaattaagggatcagatcccccaagatcttcttttaacaaagttttttttattatatttgttagttttttatttttaatttggtcactaaatttttagtttcatcttctcctaatttgtgtctttgatatttcagc

SEQ ID NO: 42070 - DNA, 499 bp, Arabidopsis lyrata
  Intron number 1 from transcript 892883 (locus 892883) deri ved from phytozome v7.0 (chr-ID scaffold_6; pos 3852344 to 3852842 reverse strand)
tcttcagagaacacggtaaactatgttctaaactctttaggttgttgaattagcttagtctggaatggttaaacttttggtttcttaaaggtttgaatcttgatatatagctgcgtttcaaaggtagaatcttgtcgtttactgtctttatgggtctagaaaaagcttttgtttttctctttttaaggaactttcttcatggttttgttgtttctctcagttctctgtctgaatgtgaagatctatactttgtttcttctggatgagatctgttctctgttctttttcaccttcttgttttgtttgtcatttgtgtgttatgggactaatttcttggtgagatttgaaagtttgggctcaaattcttcctaggatgtgtaaaagctcactgatttttcactgttttatatgaatatatcagacatgtatcttatatctcttcaacttgttttgtataaccaaagcgagcaattccttacgactttgtgagaaacttctc

SEQ ID NO: 42071 - DNA, 647 bp, Arabidopsis lyrata
  Intron number 1 from transcript 331300 (locus 331300) deri ved from phytozome v7.0 (chr-ID scaffold_8; pos 12344928 t o 12345574)
atttcaggtaacctatctatcatctattaaaatttggttactaatgttatgataaataattttactttaaaatgtttcttatgtacttttaataaggtgacttgtttcggagtaatcggtgatatgatattttataaagttaacagaatatattattaaagttaccgtgtatttctaagaaaaacaaaacctacagtaatttttttgttgaagtttttaattatctcatgggtgtaaagcataaactatcaaaaaattaaagtttttaagttgtatatttaattttacgtgaaaatatttttactccactacgacaaaaggtcacttttgcagtttatttttaaaatttaaagatcgcaatatttacttttacgtgaaaatatgtttactccactacgacaaaaggtcatttttgcaggttatttttaaaatttaaaggtcgcaacttttagatcaccagtgcaattagattaaaacgaatatttcattttaaactaactagtcatggttttaaaattagtgtttaaaatcaaatcgaaatcagaagaaaaaaatgtgcactagtaagaaaatagtcgtttattgaaattaatcaatttttattttaaagtcgttgaatttgtttgtttataaactaaacaggacaa

SEQ ID NO: 42072 - DNA, 404 bp, Arabidopsis lyrata
  Intron number 1 from transcript 939681 (locus 939681) deri ved from phytozome v7.0 (chr-ID scaffold_6; pos 829578 to 829981 reverse strand)
cgctcaaatctacgtgaatagtaagtttttgttttggtctgttcttgtttccgtttaagctggattaatctatttctctctctctctctctctctctctgaacaattggggaagtatcgtgaaattctagccaggaacgttcgtttgtaatcgaataaaactgtaaatttaaatcaagaacgacgttgacaagatgggtttgattggtgttgatcaggatccatttgttgtcttattgttatgttaaaacaaaatggatacattagatgatcttatatgtggttctgtgatatcaatcaatcaagaatgtttcttttctttgatttccaaagccaaagtctgttccctttttttgtgcgtttgacgttgttttttttgttctggctacaccacaggctacgcca

SEQ ID NO: 42073 - DNA, 477 bp, Arabidopsis lyrata
  Intron number 3 from transcript 893817 (locus 893817) deri ved from phytozome v7.0 (chr-ID scaffold_6; pos 7941727 to 7942203)
atttcatcttggggggcggccaatctatttaccaggtgaaccgttacattctccacaaaatgatattggttttatatattataataacatcatactaataccaaatctaaattagttctgaaacttttgaagatttgcctttaaaatggctaagaattttattacatcgtctatgattcgaatgttttcataaatccgaaaaggaaaaaaatcgaagtgaaatttaattttctatggaaagtaaagatatgatcaaaaatttaatccaagctaagaatgttgtagatttgattttggtttggtaaccatttatcaaaaaaacctaaaactaaataaaccccgtaacagcccttggtttttcacatattttatgggctcattgcctcattgtagaactcaaaaccgggtctagttgatttaaacacattttgtgtggttgtagagctgtgtgatacaagtgctaggtgggcagctaga

SEQ ID NO: 42074 - DNA, 548 bp, Arabidopsis lyrata
  Intron number 2 from transcript 492590 (locus 492590) deri ved from phytozome v7.0 (chr-ID scaffold_7; pos 8461384 to 8461931)
cccaggtatatatatatttaaaaaaatcttattactctttttcaaaaaaattgatatggaagattatcatcttctatgaagaaaacacaagatcttgttctcaaccatcaactcttttttccttgtaatcgtcaaaacatcttttttttttctttttttctttttttttataaaatcgtcaaaacatgatttctcttcaaagaaatttctaattcctttatctatgttcgttctatatttaatttaattttcgcgagtttgaattaattgtaattatgatttgcggtgtttgctgaaacaattaaggtttcaaagaattttctggaattaaaaaaagaaaatctccaatttgtatggaaggcatcgtcatatcctggctttaccgtcatctaatagtataataaacagtaataatcacaagtcaattttaattgacaatttcaatagatttttttttaaaaatttatttggttgtttgattcatatacacaagagtgagtttaaaagggtcactgtctatatggtcacttgcagggtcgtaattgaca

SEQ ID NO: 42075 - DNA, 434 bp, Arabidopsis lyrata
  Intron number 1 from transcript 939780 (locus 939780) deri ved from phytozome v7.0 (chr-ID scaffold_6; pos 1244230 to 1244663)
tcgtccatctcagcgacaattgtatccgggtatggcatctgatgctttgaattgatctatttgtaatccgatacctaggttttaatgaaattgatttctattggattttgctctaatttgacgattttttcaatgaagttgtaaactttaaaacaaatattctgtttatttcgaacatccatcatagttcacggtttctgcaaaaatggaaacaatgagaaacttttctacctctaaattgcttgaattgtatatgttatatctcctctgtcattctcaaagctttgaactttctgctcttctgcaagatttctattgtttaaaacattttggatccttcgacttacctatttaagattgttggaagcagacattgtttgttgttttgctccttctcttgacctttatgagtgttgttatcattttgtcagagg

SEQ ID NO: 42076 - DNA, 746 bp, Arabidopsis lyrata
  Intron number 2 from transcript 473401 (locus 473401) deri ved from phytozome v7.0 (chr-ID scaffold_1; pos 14651094 t o 14651839 reverse strand)
gggtctctctctctctttctctttctcagatgttcataactcctaatacgtcgtcgtttcgtatttagcaattataattattgagaagttcttgttaatgtttatgtttttaatgcttattaggatttgtatagacagttttatccataactataattaaattaagtagattttagctaagtaataattaatcatgttttttccctagtttttgttgttttttctatgattttagatttgttacaaaaaatgtctttttttttttttgcttaaaggttcacatttttttactcattgaatatttttttatgtctttatgtttcttgagaaagctcacgcttttgggaaatgggttcttcttgtctcgttgcccaaaaagctcagatttggtgatatttccgacaaattttctttttcctttttttatgtgtaaaatttgcatggttttagtaaaatgtttggtgatttttttttgtttagtgtcgttttagtttcttaaatttgaccttttgtttaccccaaaatttcaattcgaaaattctcacctaccaccattcaatttgtatttactcttttataacgttagatttaaatctgaacataggtaggtgataatataaggtgttacctttcattgtaataatcaatataggtcagtcgatttatgagggttcatttatagttttgctgcttgagttttgatttttttttttgttttttggttatttttgttttgattttcaggt

SEQ ID NO: 42077 - DNA, 827 bp, Arabidopsis lyrata
  Intron number 4 from transcript 892230 (locus 892230) deri ved from phytozome v7.0 (chr-ID scaffold_6; pos 922113 to 922939)
ctttcattactttgcctggtaaatttactctctctccccctctcttttatctttattacaaataaatttatgaaaaattatattattgatactcatttgtgaaaactttgcttctacatttagagtccccaatgtatgatgctagaatcttttaaagttagatgtgttagtgtttgtttccccccctacataatgtatgttagtgctttaacaaaaaaaaaaaaaaaaaaacttttattagtcatatctcattatatagaactttaaagagtgcgtttaataagtattaataacatgtggttaatatgatatgtgggaaatcccatgagtcaaagaatcacgacaaatagttttgaaataattaaagtgaataatcagaaaaagtacttgatccatcaacatccaaaagcagtgaaaatagatgtcgacaaaggacatctgtttcttatccaatttaacaaattttttatgttctcagtttatatatatatttatatttttgaacagacattaaaagatcataatatgggttgcaaaatgttgttttacttttttgggtagtgctggtttattatattctgagagaaacaaaatggtaattatgtagcaaatattgtgatcacatgaatgatgatgagtgcactaatgtttgacctttgacttgaaaaagtaccaaagagaagagaaggacttttcattattcagatgttgacttttctttagaggtcaaaaatgaaagtgaaaaaattaataaaatcttcctaagttttactattcgtgccacttgactaagtcaacgagtcctcactatcaatcatcaggtggct

SEQ ID NO: 42078 - DNA, 709 bp, Arabidopsis lyrata
  Intron number 1 from transcript 935133 (locus 935133) deri ved from phytozome v7.0 (chr-ID scaffold_4; pos 20780476 t o 20781184 reverse strand)
cagtgcaagcccctctcggagcaacaggtgcctgcaactttctctttagaccttagcctttgacgttttctctactttgtttttatcgatgattagatctgttttttgcttttttgagtggaatggtatttatttctgtgttttaggtttcttcgggtacgagactatcagatttgatttgaaagtttcgttttttttttttttgaaatgaacgaaatgttaagatcttggcatttatgttctcacggaagttcattttcaccgcagttttatgggttggagaattggctttgcttctatggtttgatgatgaaatttggctgcatcggattcttagcatagagtgattttcacatctaagctcgtgtttttatgtgcctggtaatgtcaatcgggattcttgtggactgatttttttctatggagctggtgatttgatgtcgatgataaatttttcatcttttcgcatcagtaagctgcattagtagctgttatcaggcaatacctgatcattacttttagggtttttttttttttttttctgtttgtaattgatttttctgtttgctgcctgtgtcaagttgatttctctaactatatattttcattttcatgtgtttgatagtgattattatctgtatctcttgagagtgttaaagaggtgaatatcatatgcagcattgttttattttccttaggttcgagcatt

SEQ ID NO: 42079 - DNA, 919 bp, Arabidopsis lyrata
  Intron number 2 from transcript 475653 (locus 475653) deri ved from phytozome v7.0 (chr-ID scaffold_2; pos 9721143 to 9722061 reverse strand)
aaagaagaggtaatgttaaaccctattttattgcttctctattccttattctttactggtattgcaggttcatttgtttaaaaaagtagttgtgagatgtttctagttattcttttttgctgactggggtaatggaactttttgcatgactatttgagaccaagcacgagagacattatgagctatctttccacattttcatctttattttgcctcttccattctcaaaataatgtccaataatacaatgcctctttaaattcttatgaaatgagaactaccattgatattaccgtctttttatgtactactagacttgaggttcaggaacatagaccaaatattacaacaatatagtgttgccagttacttcttcggagactaacctaggacagtcaagaatcatttctacctatgtaatgaatttatattcatcatgtgattacaaagtttacctttgttctcagcttctggcaaaatggtgctgaaaatattcaattttttttttttttcttctttgatgtggtagtagaagatctttaatgaattttaatgtagggttgacatcagtgttctgaaagtcgaagccccacgtttgatgttagactttgacctatttttgctgtgagaaatgaaaatgtttaaatcagggctgacatcgggatactagttatagcaagagcaaataagccacagtttatcagtcttccaagtgatactctttcgttttatcaatccaagtgacacttattaattctaaagacacaaatcataccgattttatactaatttgagttacattgatctgggaagtatgaattggtttgatcttttattctctcgctcactcttgtctgtttctcaagtatgaagctataattcacgtttcttttgcaggaggctctaaaaagaaggttga

SEQ ID NO: 42080 - DNA, 531 bp, Arabidopsis lyrata
  Intron number 5 from transcript 472324 (locus 472324) deri ved from phytozome v7.0 (chr-ID scaffold_1; pos 8943579 to 8944109 reverse strand)
ggtgagttacgcaatttaatgctcagaaacttgcgttgcgattgtatatctgctataacagacatgctgtgacgagcgtatcagttttaatgtctacctgctagtccatctaacagccactttgatcaagtggcatttttcaatcacaacatggacaatcacttagccacttagggatcttgagtgtagcactatgatgtgacatgttgtgattggtaacttgcaggaatacaaaaatataactgcagaggatatgtggccgagctcaatttgttttggacaggcaaggtcatgaatgtttttggactttgatagtgccaaaattatctagattcttggaatagacattttggagtggaattttagacttttttcccctagcttagcatcttcttttcatagtgtaatgtattctagctgtttctgtataattgctactcttcttctctaataatagtgtctagcctaaactttgctcatatgtctctaatattagttgttctttttggtgttctttcagggttacaccat

SEQ ID NO: 42081 - DNA, 222 bp, Arabidopsis lyrata
  Intron number 2 from transcript 480877 (locus 480877) deri ved from phytozome v7.0 (chr-ID scaffold_3; pos 23879175 t o 23879396)
agagctcagtttcctcgtattgatcaggttccattctattcgaatcgatttgactaaattggacactctgaaaattagttaaacaccttaaaagtatctcctttttcttctttgttttgtcaatttctttgtacgttgatgtattcttatagctgtttcgtctcctgcctctactcatctgtttcaggcttcgaccccacccttcatattacagtcgcagtt

SEQ ID NO: 42082 - DNA, 660 bp, Arabidopsis lyrata
  Intron number 2 from transcript 486008 (locus 486008) deri ved from phytozome v7.0 (chr-ID scaffold_5; pos 17666149 t o 17666808)
cgaagtccctgagactgctcatcagattagcagcggttcgtttcttatcctctatctttggaatttttgtttttattgtcctttttttttgtttgttgctgctctttttgggtgaatctacttgtcgtttattgcgtaatctcaagcttttttcttgaagaaaactcttttacaattggggaattatgctccttttttcattaaacttttcttgagaaagaatacatagacaaagaatagaaagggtcgtttagctttttgtcttctttgttagattcaatgatactttgtttcttgattttaccatatactaagctactgatgcatgtatatgaaacatcaaggaactgaaatgatgattttggtggtgccctcttgtgaaacatatcgtatttgatgattttggcgctgtcctatagttaaaaatgttgtctttaatgatttgatggataccctctagtgaaaaatgatgctatggtgattcaagaacgtgaacattcaatacggaatttaagttccttgatcagttttcctcttcctcaaagtttttagctagcaaacggggaagtttgctatgaagactctgttctcttttgttcatatagtctattcagtgttgcgtgtgtgtaagcttaactgttgaacaaattgtacagattc

SEQ ID NO: 42083 - DNA, 687 bp, Arabidopsis lyrata
  Intron number 3 from transcript 356885 (locus 356885) deri ved from phytozome v7.0 (chr-ID scaffold_8; pos 6408332 to 6409018 reverse strand)
caccgtggagcaattattggtaagttcagaaactatcactcagtttcactttacctcaaaagaacaaaaccactttttgctcatttgtttcctctttttaacactaaggtgggatagtaaaagaacacgcttcaaactcccataccgtaaagttgttctccgagattggaaaaaactaagagaacaatgctagtctgtagaccttgattctcgtcctccatttaacatgcctactttagtccatgtcaatgaaataggagttcagagtaactgttaatgaatagagaccatggtgagtcttttgttgtttacttgaatgttattttggtttttattatgtgcattgtgaatcaatggatttggtaacttattatattcaatctattgttttgttttgtataatattgttgtttctaattttacttttgaattttatatggcatatttgatcaatatgatgagtgaaaccgtagaagataatgaatagaaagggtgtaaaagttgagaaggaagtcattggaaaatttgagtatataccaaactggagagtaattcggctacaaagagagttgtgttagctttgaagaaaaagctatgtgatgctctaccttttatttatgaattttatgctatgaatatatgtttttgttagggttcaacttcagtctccggattagagacttatat

SEQ ID NO: 42084 - DNA, 574 bp, Arabidopsis lyrata
  Intron number 1 from transcript 323836 (locus 323836) deri ved from phytozome v7.0 (chr-ID scaffold_5; pos 16360646 t o 16361219)
aggaagagactcgtcgtcttgctagtattcgcgaggtttgttttcattttccctttttaaagtttaaaactttaagatctgagaggttttatttgagcttggtctgaaaattacattcatgcaagtttactactttttgtgtgtttgtgtttctctgtgatttgagtttttgttgctgtttctgtgattttagaagagtagggttttgaaagattttgaaattatagatttgggactcaggggataggggaaatgggaaattgttgtccttttgaaaaacttcgatgatttgcgaatgagatatacataaatggtttagctttgtaagcagatgattttgcatgtactcaatttgttgaacaaaggacaaaaatttctgttttgagttaatgagttttgtaagtttctgaagattagatcacactgtgaagcaagtctatatgtatgtgaaagctaagatttagacatgaagacatgaacatgtgcttcttgtagttgagttaacaagttctgttctcaggcaagggtttaactttgtggaaattatcttggttttattcaggagctcgagact

SEQ ID NO: 42085 - DNA, 518 bp, Arabidopsis lyrata
  Intron number 4 from transcript 478124 (locus 478124) deri ved from phytozome v7.0 (chr-ID scaffold_3; pos 3288259 to 3288776)
ttggtaaccaataccactgtctcagctttatttacatgttaggtagcattggtaggtttgattccaggattttcgatcaaacttagtcaggtcattcaaaagttgagctacgaattaagagatgaaatctttagatacttttcaagaaagactaggttttttccccggaatgatcagttgatttgagtgattatataggtctaatattgtttttgaaaataagttaagattcccagtgatgaatattttagtaatctggaacagtgacaaaatggagctccctcttggaaaatttccatggaggttttagaggaaccattgttgtagatacttggcaacttctgagggtttcttcgcaaaatgaaagtttttctttttcttactggttattgggattctgaaacattgaactacacactgatttcatgttttttccatttattattgccattatagctacttttgttactatcacatttggtgaattttgatcaggttgacagtcgtctcgtctcagc

SEQ ID NO: 42086 - DNA, 505 bp, Arabidopsis lyrata
  Intron number 1 from transcript 318360 (locus 318360) deri ved from phytozome v7.0 (chr-ID scaffold_3; pos 6639336 to 6639840)
tcgtcgaggtacattaccttaatcttttgtacttaaccaaacatgtcgctaaaatcatcatcttaatctcgaatgtgcttattttgtttattaaatagtcttcaatttgaccgtaaccgaaaataatcctcaaatcttttataaaactcacatttaatcaacgttaaatctcaaaatacatttttactgggttagtgacaaagttgagaatgtttttctgacaaaatgatcaatctttttcgataacccaaaatgattcaattagagaccaaagctagtaatatagtagtttgtattaatgatgtcaccatgtcataatccgatatttagataaattagtacgcatgcatcaatttggggttcttgttgaaattatcaaaagaacatttctttaatattttatttttagaacatcaaacttagaatttagatggtggtcaaaaattgtcaatattattatgaatttataggtgtcaagtccacattcggaggcagtgtttgcgaa

SEQ ID NO: 42087 - DNA, 343 bp, Arabidopsis lyrata
  Intron number 2 from transcript 950383 (locus 950383) deri ved from phytozome v7.0 (chr-ID scaffold_8; pos 17888837 t o 17889179)
gccgtgaacccctccaggtatgaatttttacactagaaagttttaatgttcgagttcctttttcagaagtcaatccaaattatttagttttcttttaatccatataatatatacataatattccatccgatgcatattaaattatagtttagtcacaattttcgtaaactgatatttacaattttcatgcagaaattattaatatgaagtagaagaaacatcaaattataaaatgttgtgtagtgttttcccttcttttaataccggttcggttataaccggtttagatcacatcgactcaaatttcatcacctaaaaatatgttttatctttcattagaccg

SEQ ID NO: 42088 - DNA, 513 bp, Arabidopsis lyrata
  Intron number 2 from transcript 482291 (locus 482291) deri ved from phytozome v7.0 (chr-ID scaffold_4; pos 15869901 t o 15870413 reverse strand)
aaggtacgatttttttctccttctccgctagagatcggccttagattcgtcgattctcgtcaattgaatcgatcgagtaattgtcttgtttcattgtgtcttcttttgatgctatgattgatcaattgaaattagatctctgtctcgatccgattgatgaaagtcgccatttttatgattcttggtctggatttccattgtaatggagctgattttaaatagttctatatctgcatgtatggagattgttggtttcgattttcctcatgaatatgactctttttttacatatttgattcaattcataacctttttgtttgagttaatgtgtttctcagtatttttttatgttgttgcccctttgtatagtattgattatcttcattcttcagtgttaatttttagaaagattgtgatcaccattgttcattgagttgtttataaactgcgtaatgtaatatcggtaggttttttctcttctgttctcatatttcagttaagtcaaagttgaaa

SEQ ID NO: 42089 - DNA, 159 bp, Arabidopsis lyrata
  Intron number 1 from transcript 358053 (locus 358053) deri ved from phytozome v7.0 (chr-ID scaffold_8; pos 18546440 t o 18546598)
ctccgcatccacagatgtaatctttttctccttatgaccttcttctttactcagtctttaaccaattttctgtattaatgatttcttctcaatttgaatggactttacttttgtttttgatatttttttaggctgaatctaccacggagccttcgcaga

SEQ ID NO: 42090 - DNA, 629 bp, Arabidopsis lyrata
  Intron number 4 from transcript 358053 (locus 358053) deri ved from phytozome v7.0 (chr-ID scaffold_8; pos 18547335 t o 18547963)
aaaaaactgcattgaaaaaagtaagcaaaacatcttttgttattcttggtaaaagattgctaatcagttattcacaaacctcttaaaggctttttgtcttcaatagttacgctaaatatgtgtttatgaaaatgaattcgctactaagaagtctccaagcagtgaagattcatctagcttttgtttttttttttaatgagcttatattagtatttttaagagcttccttatgtttataaacctgaaaatattaacctcctagggaattgactccaaaaatatcttgttttgacccaaaaaaggtggaagaatatgattgctgttttgaagataaagatgcatttggaaacaatgagagaaccattttggttaggggattcgattgttcccttcctagggatgatgtcaagagcgcattgaaaaaatactttggttcatgtggagagatctcaagggtttttgttccgatagagtgtcaaactggttctcccgcagggtttgtgacttgttcctccaatttctgacaacttaaaagttaaatgcaaacgagaagaatatttactccttttcttttttcagatttgctttcattgatctgtgtgaggacgaagagaaggcgttagcactag

SEQ ID NO: 42091 - DNA, 561 bp, Arabidopsis lyrata
  Intron number 1 from transcript 473362 (locus 473362) deri ved from phytozome v7.0 (chr-ID scaffold_1; pos 14377245 t o 14377805 reverse strand)
tgaagcttcacaatctccaggtttgtttgattttggagatttctagggtttcttacttttcgtagatctgtttatgaacttagggatttggttgcttacttgctttagagaaggaattgttgcatgcaattgtaaacaaaatcaatttaagcatttttgtggagtttctatggctgatgatttgattgtggtcacttaaaaggcattgggctttgagtgttgtagttctctattttcatggagctttgagttcttttggttttgagtcttggagttttttttttctattttcatggagcttaagttcttttgactggtaggagaacaatgtattgaggtttaagtcattgaaatgttgtctagtcattgaaatgttgtcttctgctgtgtctgatttcactggattttgttagtagaattggtctgtttaatgcaaaaaacaggcagcttttaaccagaaacttcactgtttttatggattattcatagtttctgtttgagattgtgattcatttcttgcctcattgtagaatccggcgaacaagaaggagattcactgcg

SEQ ID NO: 42092 - DNA, 790 bp, Arabidopsis lyrata
  Intron number 1 from transcript 949979 (locus 949979) deri ved from phytozome v7.0 (chr-ID scaffold_8; pos 16018435 t o 16019224)
ttatttggtaactcttcatctaatcaccatttaagtgtcatacttgcttactcacatatctgaataagtctctcttttttctcatctttggtgttatttgaccacagaattattcccaagacactcatgcctagagaggtattcttcctttaatccctaattaaacccttctgatctttgatgcttttattgctttaccaggttagtagcattgatttcttcaaatcttcagcatcattttaaagcttttataaattcttaaattgtggaaaatcaaagtattaaagaagaataatgctgattaaaaaatagcaccgaaaagtgtttaactctttgactgtttttgttggccaaagaggatggaagaagaaaatgttggtaaaaacatgttttgtttcttggtcaaactcaaaaatgtaaattgagtcagaggataagtcctttttctacaaaggacaattctgcagatgaagcataatctggtgaattccatataataataataaaccttttgtttggaatttctttgagtagagagttgttttgttaatcaagtctctgtgatatgtagtttttccttaataaaagagttaaccggtttagctgctgctttcaaatttatacaccaattttacaatggcttaagtatgttattggtgcttatctttctggagttgaataccctttggtctcttaattggtctgtttcttattcaatgacaggtataatttggtgtaaagcaatttgtttttaggtttttgagaggaaaggccgagactaacacttatc

SEQ ID NO: 42093 - DNA, 629 bp, Arabidopsis lyrata
  Intron number 1 from transcript 477436 (locus 477436) deri ved from phytozome v7.0 (chr-ID scaffold_3; pos 444467 to 445095 reverse strand)
cttctcatctcaagcgatctggcaaggttagtggatgattgctcttctttctttttgttaagagtagaaatgttccaatctttatttgttgaagctttatatgtacaaatcaaacctctttctgaaatgaatcaacccaagtatccactttctgttatctggtgtgttctgctagattgttatgtattgaaataactgtaaattaagctcaaattgcaatgttttttcatagttcatagatgttgctgttgatttttttgctggttagcatttctcttagaccatagtactttgaattgtataatgtctgttaaatgtagtgaaatttgtatatgttgctaatatttattgaagattaagtttacatgtaagtaattgttaatagacattgttagtggcttccaattgtcttcatttttcttaccattcaaatgcttgatgttcttaatgtgattggctttgttatgtctgttgaatcaatttagactagcaagtgcagtgattgaaggttgagctcccactttttaccattgttgatagacagctctagttgttcggtatttcttgtttgtggttttcacgagaccataatgtaatgtcttttgtttgtttcagatcgagcttcccac

SEQ ID NO: 42094 - DNA, 920 bp, Arabidopsis lyrata
  Intron number 1 from transcript 475711 (locus 475711) deri ved from phytozome v7.0 (chr-ID scaffold_2; pos 10650620 t o 10651539 reverse strand)
ctacgaagaacccttttggattcagacttttctcggtatgttttcttattaaaggtttctcctttcttagttaaattcgcttctagatcttaaatttcgattgatcttaggtgggtttctatagaattgctccaatttatgattttgatttgatttcttaatgttgtgttctcgaattcatggttaaagtttcgaactttatcatcaaaaattctctttgtgtagattactatgaccaatttgttaccttttctctgctctttcagttgtcaatcaatttggattttaaccatgttgattggtttcgattgagggatttatatggatttgactgagatttgaatcttcacactttgattaccaaaatcagaagaattttggttaatgttttttgtttggcatctgtgagagttcatgaaacttgtgatttagatatagctgacatgcctgtaatagttttaattgatagaatgtatcttggtttttgtaagcattaggtttagctgttcttcgtgggtgtgtactacgagttggactgctatgtctatgttttttgtaagaactttagctgtgaaatcagtgtatttagatgtaaactttagctgcgaaatcagctgtgaactttagttggactgctatgtctagtttacaccttttatttaaaatatcatcctgattaacagaatgaggatgctattgaaatgtcaatatggttttatgcatgttataaaacgtaccaggacatagaagtgttttagatgtaagcatcaccgtggagagaccatttatgagcggggtgatccgtgtatttgattatatggattgatcagtaatgtagtttgatccaatcaacttgattctgatgcttaagcgtatgtttggcaggtttaccagttggactcagatagcagcttatattt

SEQ ID NO: 42095 - DNA, 604 bp, Arabidopsis lyrata
  Intron number 2 from transcript 496697 (locus 496697) deri ved from phytozome v7.0 (chr-ID scaffold_8; pos 21683677 t o 21684280)
ggcaagaaatctgtcaaaaacaacattaacaagaggtaactaattcatttataaattactcatttcatctcattgttgattagtatgttttatcagtacttacttgtttttaaaataacatatggttgcttgagaattttctatatatgaccatctagtaatcctgttgttatagaatatatagccactagaccatatagtgatttgaatactatttaatggacccgtattatctaccgacacactgggaataaaatttagctaccatatacatcatgcatgtgatgtgtgtgtttttgtttatagaaatatattaaaggtccatatttaaaattgattgattagtggtatatggatcaatgaatccatcatatagatttagtttgactcatattatagaagaatcagatataatgaagtcatcatctaaacatataactttcaaatcatggtttgaaagaaaattacgcactctataatgggttaattttccaaattcaaatgtaaggaaaaatatcagtatttatcttggtgcgatattttgtaaaagtgactaaagtttaacacatggtgaatgaatttgtatatataggaattactacaa

SEQ ID NO: 42096 - DNA, 305 bp, Arabidopsis lyrata
  Intron number 3 from transcript 477609 (locus 477609) deri ved from phytozome v7.0 (chr-ID scaffold_3; pos 1145925 to 1146229 reverse strand)
agcagaagaagagccaagacaaagagttgcaggtaactaaatccaaatatttacacattttgttatttttccttacaagtttcttttttaacattttcctactgattgcgtaaacgttgaaaatatactatattgcaaaggttttagtataatacacatttttctaacatataacgtaatcacaaactcaaatgacaaaaaaaaatgcattcgtaacgcaacaaaaagaaataaactcaagagtgtcataataatcttcttcaaataactcgacatgatgaatcttataatttaatgataggaca

SEQ ID NO: 42097 - DNA, 768 bp, Arabidopsis lyrata
  Intron number 3 from transcript 497288 (locus 497288) deri ved from phytozome v7.0 (chr-ID scaffold_143; pos 13107 to 13874 reverse strand)
cgacacacaaccagaggtatatacatatctatctatacatatattattattttttgtgaaaaatctacatatgcatatgtttgtttataactattaataaatttgatgatatgtattatgtgttctactgtacttgatggcctcatgaaagggagtgtaattaagggttgagggattacataattagcatatgattacaaatagaatctcttaagaataagtgaattcttttttggaagtttgggtaagtttgcaagaaaaacaacaaaggcagagagatgaggcggtggaaaagaccaaaaagttatttatcgggaaactcaaaataagtagtatatttttgtagcatatgcaaaaataagtatattcttagcatataattatggttttaattatttgaatatactccatattttaaaagattaatggattcatccaaaaagctgcagagactttcctttctgtcgggacagctgctacgtacgatcgatcctttagctgtgtcatcttttgtttttgctgaatttccataaatttatgtgctttttcactccaacacatgcttgaaaagaccgttttgaccctggtctttaacggtctcattctcctttactcctgtccctatctggaatttgttttaagcataaagtttgtcgctttaccaagattttgacttattttgttaccaatttttacattttccaatgctaataattgactaatttcaaaaaatcttgaatggttttttgcataattagaaaccttccc

SEQ ID NO: 42098 - DNA, 887 bp, Arabidopsis lyrata
  Intron number 1 from transcript 494337 (locus 494337) deri ved from phytozome v7.0 (chr-ID scaffold_8; pos 1044582 to 1045468)
atcaacgttctcagaaagtgtaagtttcataagtgttttcctaattaaattatttagttaagcaaaaaagatatatttagaattcacatgaatgatcaaacttaacttttttctttgtttttattcaccaaaaaaaaaaaaatcttctattcttctctaatcttaattacgtgaagagaaaaaacccattttttgtttttcactttcaggcccaaattaatcaaaaatcgttttcttgaaaattattttcttgtaaactaactgaacaatattgatttcaatgtattttacccaaacataaagtatagagtttgcatgacataaaatgacatctttaagaaaacacgatcgagatcttaattttgatgaaactatatatttacttgtgaatattcaattttacatttttatgttttttttgataataaacttttatatgtttaggtggaatttaagttccataactgaaagaatgacaactcaagttatttcgtttatatttttctgtaatacataatttaatagtactgagtattgggcttctgtcctgatatttttttttcaaagattattaattccattgttcgtacctataattattgatgtataaatcttatcctaaagaaaccacttaaacaaaaagacgtgtcccatttttttttttttttggcagactatcaccttaagattattgtatttcttgtgtcctatgtcctaacaatcatttgatgcttatcattatttaatagtaaagttcaatgaatcgaagtcaaatgtacggtacggtgccattaattagagaggaccaacctaattaagaattaatttaatgagtaacatatggttcatcagagttaaaacaaagaagaaagaggagaagaaaaaag

SEQ ID NO: 42099 - DNA, 863 bp, Arabidopsis lyrata
  Intron number 2 from transcript 937551 (locus 937551) deri ved from phytozome v7.0 (chr-ID scaffold_5; pos 13579262 t o 13580124 reverse strand)
gtcggaaccgcttattactacggtgataatccgtggaagaaatgagctgcagctacttgttcacataattgagatgacactcgggaaatcagcgggcaaaggtgtgtggttgctctcgctccgagtgtagaaatccgtggtcttgctaggatttataatttgtaagggcgtataatattacatgatttgaataatttaaagaactgaaaaatgtcttttgtatcttgatcaattgattatattgattcgaagaaattctagactatatcatctttactcttacctgtcaaaatctcatattctttcatccgacaatctatgagttatttatttgtttacagttatgattgagttttgacttcttgaaagatcgtttgtgaaacatgggacgatgaatcattacaaagtattcacatagactctattttccgaatatataatggcaaatgagtggaagggaagagattatgtattagaaggcaagctatatgatttaacaacatctaagtggaagacaatggtgggcctaatagaactttgttttccataagtgtagttttcctaatcataatcttgtttttttccagcttattgcggttcttgacctttctaaatgtgaaatcctaatcacattttatggtctttttagccaataatgattatggtttagctaataatcatgtcaccaacacataaagatgggaccaatgagaagcttttggaatgatacacttttaaagcgtgtctggatttgtgaaatctcatgactctatattttacagtgactgatctctgagcttaactcaaactgctttttttctcctcaaacaccaaaatgtttaggttacttttgtctgaaatcc

SEQ ID NO: 42100 - DNA, 538 bp, Arabidopsis lyrata
  Intron number 2 from transcript 319771 (locus 319771) deri ved from phytozome v7.0 (chr-ID scaffold_3; pos 22653375 t o 22653912 reverse strand)
ccatttacaagctgagaggtaattaatgtcataattcattagtatttttttttcttttctttgtaaaatgttttggttaaatacacgtatatttaaaatttatgtgatattgtataatactctctctgtttcacaaaaagtgtcattgtaccattttgcatacaaattaaaaaaaaacatttaaatttcttcttttttattaataactaaaatcgtttctctctaattaataagttaaaaaaaaacagggataaactgagatttgatttaaaactctgtattgaaaacacaaaacgatattttttatgaaaaaaaaaaacttaagactatttgtgaaacaaaaggagtataaattatggtcatagaagaataattttaaacttttcttaacaaaatatgaacaaaaattgctaaaacatgaacatcctatagaagagatggagtagtaattaatattgtgaatatatcaaaatagtaactaaacgggtgttgtgttggtggtggtgaaggggtggactcggtggaggtgaacctggag

SEQ ID NO: 42101 - DNA, 698 bp, Arabidopsis lyrata
  Intron number 1 from transcript 319771 (locus 319771) deri ved from phytozome v7.0 (chr-ID scaffold_3; pos 22653950 t o 22654647 reverse strand)
tctcgtccactttctttacaggtattttctttccttttctcttataatcaaccataattttcatgtatttaaatagtttagtctcaaattgactctatgatcatgatattagtttttcattaaatagaataaattttggtaacaatattctttcaaaccgtttcttattttgatacatgcctaattgaacgaagagtgcaaatgattttttgcttttagggaaagagaggtatgaatttgttgtttgtggtgatggtagctagagctaatctaatcaactaagttgttttaactaaacatagagatcaaagttcaaactaattagctgatgtcctctaattgtgtaaataaattggcaaataagattctcgatcgcaaaaagaatcttaaagtactactcattgtgtccatttttttctttcttttgtatgttaaaaaatgtcttttcattttttattgattcgtttagaggaatcggacaaaactgaagcggaatgtcataagtttgtctcactagtggatgttactatatatgattataatatcctttggctgattcagcagagagagttggtcgtttaaataattgttctcctaattacctttttctttatacatacatatatcacatattaatactaattagtttgtaatatatgaatgatgcgaattatcagacaatagacttgaaagtaagg

SEQ ID NO: 42102 - DNA, 709 bp, Arabidopsis lyrata
  Intron number 1 from transcript 938670 (locus 938670) deri ved from phytozome v7.0 (chr-ID scaffold_5; pos 18197706 t o 18198414 reverse strand)
atcatcggctgggttgagtttgcctactcatctcctcacaggtttttctttttatttataacgtcttttactagaacacatcgacacatataatttatctttaaaagaaagaaaaaaaaccgacacatggtaaccaataccaaataagttgaggaaattacccgagagatctgggaactctttgtgttgtgtctaaaacctacctttttaagccaataaaaatatttcaagttgaggagagaaaagaacaaataatatattgtttctgttttttcaaaatatatatttattgtttgagaatgagtaattgaggacatcaaatctgttttatgagtgttgcggtgaatcagcttgagttttataatttgattttcaggcttgatctaaatattcttgtgcaaacattccttggatccgtcccaatgttgtatattttgtatcttttatttttgcatattgacaaaataaaaaaggggaaacttaagtttcttttgctgcaattcaatgaattgttccaaagccataaggctactacagatctgtgtcagccaaatctttgtggcttgtcaattggtcacctgatcgtatgtatattgattatataggcttttctgaaaaatcaaataactaaattaactaattatactttataaccttgttgtatatatgaagagggaattgttcaaaacataaagtagtgcctacttgt

SEQ ID NO: 42103 - DNA, 545 bp, Arabidopsis lyrata
  Intron number 2 from transcript 485715 (locus 485715) deri ved from phytozome v7.0 (chr-ID scaffold_5; pos 16574500 t o 16575044 reverse strand)
cttcatcctcgtctactgcaccgccggtatctctggtatgaatcttctttaatcttgatttttgtttggtttagattaagattatgcactttatctttgggttttagaagtacaattaaaccgaataagctgaataagttttacttatgtaagtacaacttgcaaactcaaaatttagacaagtaaaacttatttggtatggttttgttttttgtttattcgaaatcaataactttgcaaggaaaaatattgtttggttgacatcacaatttaatcggttcaaaatgttaggttccaaatacgaaaaacgagttatatataaaaacatttaataagggtcatgattaaatcggttcttatccgaatgaaatatctctaatctaagtctactaattattttaagcaattgactaaccctgtcctaaccagaattggaaaccgattaattaattgccttgtgtgccttaaattctcaagtggtaacattgtcaactctttttgtttccttaggtggtcacattaacccagcggtgacatttgggcta

SEQ ID NO: 42104 - DNA, 620 bp, Arabidopsis lyrata
  Intron number 1 from transcript 488845 (locus 488845) deri ved from phytozome v7.0 (chr-ID scaffold_6; pos 8249451 to 8250070)
gatcaatccttacttgggcttgctttcagtgtcctgtacgactctctctctctctttcccctttctctgttttctttgtttgttccttttaagtttctaaaagttaatttgttcttctttagtccacccaaagataccgagttcaaaacctgctctgttttgtcacttttaaattttttagtaagcttatatctaactatacgtttgaataattttctactgaggcactgttggtttactttttctttgaaagtatatatttattttgggaaagtgttgatctttcttactatcttcggataattcgtgggttttccaaagagtactcatttacttagaacaactggtcattcttgcagatctcttttctagccttgtaggatttgctttaggttttaaggttagcttttagatagcttagaggcgctcctaactttggtttggtcaactttaaaaagtgtaaacgtaaactttgtccatagtcggtgtcaagcatatgttaaatcaaatctcattgtaatctaattgtgtaaagagtttgtgattaatctaatcactgaaacatttctactcttcgtgttcttatgatttggtccaacttctaggctcttttgggagcc

SEQ ID NO: 42105 - DNA, 357 bp, Arabidopsis lyrata
  Intron number 3 from transcript 936143 (locus 936143) deri ved from phytozome v7.0 (chr-ID scaffold_5; pos 1882295 to 1882651)
gtggtcactggttgcatctatccttcaagtcctgggtatgtttgtttactaataacttccattaaactcttaaaatttgccaagaactcataaaaagtgaaaatcaaaatttaattctttattcatttcatttaatcaagaaggcagaaaggaccaaccattctcaacagctgaaattgacaaataaacatttttctgttttttcttttacacttttcaagatttggtaaagagattgtttggttaaacttctcttttatatatataacgtgccttaaaagttacaagtttggtgtatgttacatgtttttttcttacacagaagtgcagggacaactccaacgaccggaactcctt

SEQ ID NO: 42106 - DNA, 796 bp, Arabidopsis lyrata
  Intron number 1 from transcript 476542 (locus 476542) deri ved from phytozome v7.0 (chr-ID scaffold_2; pos 16105795 t o 16106590 reverse strand)
tcgactttgcccagatcacagaatcctcgtaagtgatcttgtcttttctttggatcttcaagatcataactttttgatgattatgcttttggtgtttttgaaattggaatctaaatgtcatttagttaattaacaacactcgtttctttgtaactttggagaaatcatactatggaattacgactgatcagagctgctagccttctaatttttcaaaaaatatatcatatctgcttcttaatccgattcttttttactgtttgagttacgaggtgatgaaattatgattgttaaggaaataataatctttaaaatcctctaagttaacattcaaatacttatcctgtaacttgattaaaattgcacatgtaaaatcctgttacatgtgttgtatatcacaaataatggatgaaacatacttaattttgtccacccgtaaaaaaaataaatatgaatgattaggtgatataaacttcatgtaggcagtggacgaaaagcaaccttttagttccgtgtttttatcggcctacgttagcaatctgtcacataccggtttaggtgaccataacgcatctcagggttcacacacacacatgcttccacgtgaaaaaagagacaaaactagtgtctaggtgacatacgcaaatgatacctagagatactaacatgtatatatattttttgtactaatcaaaaacattcttataaatgggaaaccttgtaagttcatggttatttatttttcttgttatcaaaatgtttttttttggtttgaataatactttaggaactcttc

SEQ ID NO: 42107 - DNA, 531 bp, Arabidopsis lyrata
  Intron number 1 from transcript 944626 (locus 944626) deri ved from phytozome v7.0 (chr-ID scaffold_7; pos 3407652 to 3408182 reverse strand)
gctcagaacaagaacattcaggagaggaaagagaggtaccaatcgcttcttcttctttctttcactatgagagatttgagatttggaattttgttttgacttcgagacattgtttagggtaaaattacttgtttgagctttattctctcttaatctttcctgcgaatcgtttggtttctcttttgatgataagcttgcgctggttacttccttgtactgcgaacgttttagtcattgctggctatggaagaaacctctggctcagtttctctgtattggttctcaactccaactttcatggctgctaatttctctcatcgagactaattcatctttgtagttaagaatacatccatgtctgataaattgtttagcctcaacatttctattctaataagaaagaatagcgaagctattatatttattttctgtattactctattagcaccgttaaagctgtgcgttttcttaaccaacattgtttgattcggtatagacggtggatcttagaaagaaagttagcttcttctg

SEQ ID NO: 42108 - DNA, 366 bp, Arabidopsis lyrata
  Intron number 2 from transcript 952617 (locus 952617) deri ved from phytozome v7.0 (chr-ID scaffold_964; pos 286 to 6 51 reverse strand)
ctcttcatatagccaacatcgaccctcaaagaaccgtaagtgtcacaaaaatatggaaatcttttggactcataaatcatttgtttgttttgatctcataaaattaaccgtttcattgtcttgtagatgttctttgacgacagtgttcgaaacataaacgcattgctctgaaaaccgtcctggtgaggttttttaagaaaacgtttattcccctaatgtatagagtgaagattaattgtgtttatagttttgtgtaggtggggactttacagagagtgaaaatgtgcagattatatgctagctttagagaacattcatatataacctgaaggaggctttgccggagctctgggaatcggaggctaa

SEQ ID NO: 42109 - DNA, 931 bp, Arabidopsis lyrata
  Intron number 1 from transcript 333289 (locus 333289) deri ved from phytozome v7.0 (chr-ID scaffold_320; pos 6503 to 7433)
atcttctcgactacatcgctgataggttacctatcttctctctatctcttaccactcgctatgtttgtttcatgggaatctctccaattttttagagaaattgatggctttagacaaataaatatgtgtcggtatatattttgagtatctgaaaatgtgtttgttccttttttttcgtgaggattagggcaaaactttgttcattaattataagagatccccatttaattataatcgttgatttttatttttattttgtttatcactcgtgttaatgaaactccacttatcttgtctttttattccctgttactggatttgctatgaatgcactttggatattcagttactcttactcgagaatgtatgtcttgcaacttaaagttttcttctaatgtactctacgtctggtatgaatgcactcatgtttgcaactcaatgttcatgcctttataatgttttaggagtcaaaaaaaaaatcagttttattttggagtcactggttatatgatgatgttatgatagtccttagttctcacattgttcgatcgagtcttgttttgtttcacatcgttaattactgtcatatcatacataattacttgtcctttgtcatggctaataatgataacaagttgttaggttattagcattataagaaggctattagcgttatacaattcttatcatagacttgcttagttgcttaaagcatctttaaagtttgatcttttaggtccaaattgaaacaaatggtttgctcttctgtgctgttcttatttacatgcttctgagttgattagtactatgagaatttcttatgttttttttttttaagaacgtattgttgttcttcttatcgtttatgatttaactcgacacgctattatatatttgtagatcaaggaatctgagaagtcttggacttgga

SEQ ID NO: 42110 - DNA, 411 bp, Arabidopsis lyrata
  Intron number 3 from transcript 350872 (locus 350872) deri ved from phytozome v7.0 (chr-ID scaffold_6; pos 7287393 to 7287803 reverse strand)
gtggatattggaagtggtaacttgtgagcttacttggacttgtgggacattgtttttttctcaactcaactctgtttattctttgtagtcttcttctgaaagttgaaatatgcttgcttcttcaagtaattctttatagtcaccaccaatcctgttttcttggagacttttggttgcaaagttggcatctttccgtggaatctgaatttgattttgagcagtcaaatcactatcccttatatcgttccttatcttgcccctgtttatgcttgaaatgtgtcttaactcttaaaaaccaaaactttcctatttgatttgcgttcttgcttctctgccttgttaatggatttggattcttttactaatactgtggttacttccttatattttaggtagtggcagatttctcct

SEQ ID NO: 42111 - DNA, 508 bp, Arabidopsis lyrata
  Intron number 4 from transcript 487401 (locus 487401) deri ved from phytozome v7.0 (chr-ID scaffold_6; pos 2213787 to 2214294 reverse strand)
tcgctggaaccaaaggcaaggtactacaacaactttagtttttcctggtaaagcgcaataaatgatactaaatcatcttctattagtatcaggagttggttttgttagtttagttactccactatcttattgtgaccgttacgtccttatcactgctttgccagaagcctaaggtttttgctctgtggggatttgagagatacgtttctgcttgtacatatgtgcgagaaggacattggtttgagatccttacatgccaggagatgcatatggtttcatttgatggagtctcagttttgcaaagttgtcactttataaatcttggttcatagttgatgtctcttatcacttcttctttctagatcgtgatatcacaaaggaaaatgttatgaaactagcagtgaatttgattaatgaaagtgattcattgtttgcatggctgattactatctgatccagcacctaacatttttcttttttgtttcttatgtggcctcaagggatccac

SEQ ID NO: 42112 - DNA, 772 bp, Arabidopsis lyrata
  Intron number 1 from transcript 932516 (locus 932516) deri ved from phytozome v7.0 (chr-ID scaffold_4; pos 3002938 to 3003709)
accgcctcctattcaatataaataccttgctcgtattcaatttcagatcataactaacccttgttttttttgttctttttttcaaacttttttttgcttctacctaattttaatttttctttttattgtagggtggatgtatggaggggacgatgtaaactggtgtatggaaaatttggacctaattcaatgaataaataggtgatcttatagtttatatgtacaaatttgattttttttttttgtatttatggtttcactattttcaccactaatcaatttttataatcaaaaagtttggtttcaacttttgagaaggtaatcatcgatggtttggtatgtttctttttgttgtaaaaagatgaggtacctcccgattttgttgaggtacatgttcttattattttcaaatatgtcttttttcagaagaaacactcaacttttgataacacagttgccacaaagtcagaaagatgacttatttcagggatgaatcttcagaggaggctaatttttgtcgttaatacaatttaagtattcctctctttagattagggataacaaacttggctgttaaattcaggaattactcttcgttgccaatctctctccccaaactaaaatattacatatatggaagtagtaacttaaagtttttggtatcgaggtcattctaaggcactgagattcggactttggtatgtataggattcgttttccatgcactaagatttaattattgtttaatttattggtttttaggtttctttcc

SEQ ID NO: 42113 - DNA, 459 bp, Arabidopsis lyrata
  Intron number 2 from transcript 485255 (locus 485255) deri ved from phytozome v7.0 (chr-ID scaffold_5; pos 14085509 t o 14085967 reverse strand)
ttctaagcttaagaagactctactcaagcttaaaggtattgaaagcttttgagttttaatatgtttcttcttggtgtaatctaagtattgagtccttatacagattttagtttggttttgacttttaaaatgttagtaacaaccaaagtaaaactaaatatacatgaatcgttaattataatgctggttctcattctatttcttattaaagatttgtcagttttgtatatttttgttttcattttctaagatattaaacatgaattaattccttttaacaaaactaaggttaggcttggttcacatatctggataacatctcaaccaaatcttaaccataatgaaccgattaaaaatcggaacatcgattttccggttatctcacatggtcagatgttttaactaagttatccggttgttattggttaacttgcaggagtagaagaagtggaagtagag

SEQ ID NO: 42114 - DNA, 711 bp, Arabidopsis lyrata
  Intron number 1 from transcript 323422 (locus 323422) deri ved from phytozome v7.0 (chr-ID scaffold_5; pos 13694432 t o 13695142)
ccacaaaccacctagtcctccatctcaatcatcgtaatactccctctgtttttgaaaaattgtcgttttaactgtatttagacaagttaagaaaatgtatacaatgactatattaaccttataaaaatgacaaataattatttacaaataatttgtgtttaattaaatgagggtaatttgggtagttattggcattagttacattattaccttaaaacgacaactaatttaaaacaaaaaaatgctctaaaacgacaactattcgaaaacggagggagtaataatctcttcacttattacattgaatttgattgttctcttttttattttgtacatgtgtttctgtttaaatattaaattattatgtttttctgtaaaagatgtttctataaaaaaaattgaaatttttgtaacataagtgcaaaatgttagtttctgtttaaatgttaaattataatgtttttctgtaaaagatgtttttatatataaaaaatttaaaaactcaacataagtgcaaaatgttagtttgtgttttgcgtgtatgcaaaaacattatgataagtaaaaattttgtttgaacaaagaaaaataatatttcaattagtaagtacaaatacaaacttaattgcttgtgtttgaaacaactatccacatgaatgtgtttttttttttgttatgcgtatagaaaagtgacagtttaattattgcagg

SEQ ID NO: 42115 - DNA, 480 bp, Arabidopsis lyrata
  Intron number 1 from transcript 899618 (locus 899618) deri ved from phytozome v7.0 (chr-ID scaffold_4; pos 1606723 to 1607202)
aaaggttacggagcacatggccaggggcagagggagagaagattgataggggtcaattgaccccggtgaaattttaaaaaatagtttaatttttatatgaaaaaattattgaccccaatccaataaaaatattgacccctataaaaaaaaattatgttacaaacccaataattacactatacttatagataatattagcctaataaaatttattttaagtaaatctactacaattaaacctattaatataaagtaatataatattttaacatttattttgacctgatctaaaaacgttttactttcttcttctttcttctttgtgtttttaatcaatttttgattgtgtgatggtggaaataagaaaacatctttcacatcttttagtatatcgacttatgaagctatcttttatgcatcttttagaaaaaaaaaatattttgaccccgatgaatagattttctggctccgccactgcac

SEQ ID NO: 42116 - DNA, 666 bp, Arabidopsis lyrata
  Intron number 1 from transcript 484579 (locus 484579) deri ved from phytozome v7.0 (chr-ID scaffold_5; pos 4165279 to 4165944)
gtttgcttctcctgagtacaatttctctgtttcaggtaacttcaataaagattctctttgaaggtttggtcttagaggttttcttgatttgtttcaagaagatatgttctttgtcttgtttggtttattattaattggattttattagatgtgttactgtaactatggtccatctttgtcttagtcatattcaaattatcaagaaccattgatttgggttattagtgtgactcatgggaccaacttatgctgaagtttgaagattattgctagttctgtttatgggttttgtactttttgactgttgttggcttttaaagttatgattttgttgggaagttgtgatcttatgttaaaagtttcaaaattttatcgatttgatgtaagctttgtttttgtgaaccttatagaggaatgtgataccactctttgttggcttgtgaaaatttcgattttttgggaagttgtgacatttcttatggtataattccaaacttgatgcaagatctgtttctgtgaaccttgtcgactttggcttagtgttgtaaaactagttctttgctaataccaattttctacaatgagagtcaaactctttcgatatgttgactcgatcgatttctgttttgtttacctttcttgttactgtaccagctccacttaaga

SEQ ID NO: 42117 - DNA, 717 bp, Arabidopsis lyrata
  Intron number 2 from transcript 890146 (locus 890146) deri ved from phytozome v7.0 (chr-ID scaffold_7; pos 9759759 to 9760475)
agcgccgttactttggtatactatcatcttttcttttttttttggtttatcagcttctcaaattttgctttgtgttttattttgtggccgtttggagaaaaaaagggacgattttggcgtatgaaatggttacaatggtaattgaattctttggcaatgaaacttaggctacatcatttcgtttttctgtgatttgggtgtgctcttgtttagctcaaggtttaatcttttggaagtttgtcaattgagtcaatctccgtgcaggtttagcttgttgcaaatctgtttagtaaggcactgttatgaaagttagataatttgagaaacgtaatgttttttatgaagaagatctcattgagtgtggaaagatagatactttcgactagttctttggtttttgagtgagatatgttgcaaggtgccagttcatagaaactagatgttaatttagagggatccacagatgtagatgtgtctcgttttagttaccaatcaattgaagttgtgaagctttcacaaactcttcttaaacaaatcatttgacatatgtcgagtttaacgaatttcttctttagtttcatgttttgttgatcaccatatttggcgttttacatttcttgctttgttggattgaataagtatgcattcttagctaatgaccttttacttttaatagcttggaatatttaaactattctttctgtgtttgtaatgcag

SEQ ID NO: 42118 - DNA, 980 bp, Arabidopsis lyrata
  Intron number 2 from transcript 475070 (locus 475070) deri ved from phytozome v7.0 (chr-ID scaffold_2; pos 1477246 to 1478225)
ttctcaccttgaacgacgtcttcgcggcttcgcaggtatagatggttttcttgaaaaacagaaaacttccggtttagcttaccggtttgatttggtttacttcctaaccagcacgtagaagtgttcaatctgaacttcaccatttgcgtatttagtgttttttttgggatctcttacaagaacagaaacaaacaaaactatggatagatttttttttgtctggctatcaattatcatcactttttgatcaactctttatttttctaatgggttggtggtttttctttcatttcagtgattttaatcaattaggtttatatcaatattttagttcaatttttggctggttcgttatggatctgatcagttcaaatagagctcacatttcactcacatattattcattttaaactgatcttgttataattaagaaaaataatgtatcgtaaattttctatcgatcatttatgttgtaaatggtataataatgaaaattatttaaagagatagaaatataagggagagagagtaataatgtgggaagaaactatacatttctttgttaagtgaatcaatggtgtatcttacaatggagtggaagagcatatttatagtaccaaataatttcaccaaactattcaactactccaaatcattcaactactccaaaccattctactactccaaaccattccactacaccaaactattccattactttatggtagtgattgaatgacttatgagctccattcaatattcaagagtttgatttttgtaacagatctaaagtttttggtcacatttttttagtttagtgcatatagactttttttcactttcacaaaccttaaaccaacagttacaagactttacccggagattccactcttactaaccggtttaataattaaaaaaattggtcatgtcaacattatattgcaggttcctttgaagagcttggaattcaaccgctcgat

SEQ ID NO: 42119 - DNA, 557 bp, Arabidopsis lyrata
  Intron number 1 from transcript 322901 (locus 322901) deri ved from phytozome v7.0 (chr-ID scaffold_5; pos 4083305 to 4083861)
gtgtttggaattctctcgccaaatctgcaggttcgtttaatttcttcttaaaatcaaattcaattatgatttattcactaatcaattatgatatatacacacatatatttgtatgaactagggtttcttcataacatgcaaaagtacgtatatcttatacgacaaaaaatactttttcttacgttcatttctttcatatatataaagatttatatacacagatataaatcttattttcataactataacttttatttaaacgtatatatgctctattatattcgttctttgttaaagaatcagtctacatctaaaaacgttttcatgtgttggatgatgctttatgatggcctagtggtagagtaaaattatgtaaaataatatttaagaaaaaacatcaacaaatggtacacgtatttaatttctactcatatgtcatacgtggtattacttaattataattatgtgaatatatgcacgtagtacgaatcatattgattgattggtaaaatgaatgtataggtctaaaacgcaccggaaaaagttgccggctccgg

SEQ ID NO: 42120 - DNA, 605 bp, Arabidopsis lyrata
  Intron number 2 from transcript 938467 (locus 938467) deri ved from phytozome v7.0 (chr-ID scaffold_5; pos 17460376 t o 17460980 reverse strand)
tgttgctgatctgcaagaagcgtttcataagagaggtaaaagtttcaaaagttttcatttttacttgacctttgtgacttgtcgaatgttggaatagatctaatctgagtgtataagctagtgttagaatgtcattttctattgcagtttttatgtgtttgagttctacttttagaatttaatgcttatgggttatataatcaagatctatgtggaagcttaagtatctaaacatagttttgcttttgaatcaatcatcacaaccttttgtcattaatggatcaatcccttttagccaaaaaaatgttcactttagattgtccattaatgacaaaaggttgtaatgacaattatctgaaatcttcttcttactgcaatgtataatcagtgtgtccccattatgatttgaccgtatatatatctctttccttcaaatcttaatctggtttctttactgtaagtgtattaagcagagatcttgaagtctttttcttgacatcttggatagaattaataatgtattatggtatttccttctattgtgtgatttgggttttgttgtttcaacagctaagaagttttacccgtcgaggcaaagactgact

SEQ ID NO: 42121 - DNA, 189 bp, Arabidopsis lyrata
  Intron number 3 from transcript 906617 (locus 906617) deri ved from phytozome v7.0 (chr-ID scaffold_3; pos 22298220 t o 22298408 reverse strand)
ctaccaaagttcttgtttcttctgtaagtaacaaagactttcaagatttataaatcttttctttttttttcttgtaacgtgaacagaaacagaggatctgggtctctatatttgtttcttctttgaatctatctgagtttattaatgagatttaatgggattgtttgataatgtgatagggcttcaaga

SEQ ID NO: 42122 - DNA, 550 bp, Arabidopsis lyrata
  Intron number 2 from transcript 951307 (locus 951307) deri ved from phytozome v7.0 (chr-ID scaffold_8; pos 21626389 t o 21626938 reverse strand)
ctctctttatttgggtatgtagatgctatgctacaagtataattgaatttatcgatctgctttgatatttctctttgcctaattaatgttatcatgatttctttctattcaaagtaaaaaatgttaatatatagaaagcaaaacgtaaaaattccataatagtctgatttacgcagatatatatttgtgtttattgatcaaatttaatataacatttaaagtttgcagtaattttcttatcaatattcttcgaaattttactaataaaagcaaatttggaaaaaacttttttctttgtccattttgcgtttataacgttggggttttaaaggaaaaacattaaaaagtatttgaagaaagtatataaaacttaagacataaacaaaaacgcgcaaaagcaaaaatacaatcagggcttatttacatacatgacatactatactagtataatcagttaaactttatatatgttgaactaattatcagtaaaactttatctatattgggattttcagtgtgacattgagcttagacttaaacggtgtcgcat

SEQ ID NO: 42123 - DNA, 509 bp, Arabidopsis lyrata
  Intron number 1 from transcript 332886 (locus 332886) deri ved from phytozome v7.0 (chr-ID scaffold_8; pos 22577016 t o 22577524 reverse strand)
gcgattacgcctccttcctttttcttccattttgggtaaatcctttttcttctttcatcctcactttatttttggatgatgggttcttcgatttttcacgaaagttttaatttttaacatcaagtttgaatcttttctactactttgcttcttctatcacttacttgttctgggttttagttcgatattttaattcaagtttcgcctttcgttatcaataggaatagttccttactctttgtcttttttttctgtttatagaactatttcttacttctgatttcttcaaatgagattctctttttgggtactagtcaaattttcatttggttcatttttgggtgatattttgttttctagaatgtttatagcttttttaagtagtttgtgaatccccaaattacttaaatatatatatatatatttcattgtttgttaaacctctcttatgtgtttttgtttatgtgttaacagaggagcatcatttggttcatcaaaggcttttcatt

SEQ ID NO: 42124 - DNA, 166 bp, Arabidopsis lyrata
  Intron number 2 from transcript 336483 (locus 336483) deri ved from phytozome v7.0 (chr-ID scaffold_1; pos 16007792 t o 16007957)
tattcctcaggtcagtttcttctctctttaaatgaggaagatggttttactacgaatctattggagtaggccttattgaacatgttcattttgttttgattttcttactaatttgatgattgtgcttgcaggtgaatagtgaagaagagctgcagagcacattgat

SEQ ID NO: 42125 - DNA, 457 bp, Arabidopsis lyrata
  Intron number 2 from transcript 477455 (locus 477455) deri ved from phytozome v7.0 (chr-ID scaffold_3; pos 502623 to 503079 reverse strand)
ctttctagtttctttctctggttatattccttcaggtaagctgaaagattctatctttattcaagcttttctctgttcattatcatatctactatctagggttttatttcgtatctgagtcttagtgcaactttgcttccttctttgttccccatgttttaattatttttttgaaatttgctaggagcttgtgttgtttattgagttctttaagtttggattttggaattgcttgagcttttgggtacatatggaaatagacagggaagttcttttgtatgttaagccgtttaatggattagaaggagcttcttagcctcaaggagaagatctttttgacatttcagcttcaatgctctgttattatagaaagagagaatctttgaaacaagaaaacaaaaaagcttcagtattttgtgtgctcatggtgttgcttttgggattgtttcagaagcat

SEQ ID NO: 42126 - DNA, 555 bp, Arabidopsis lyrata
  Intron number 4 from transcript 481620 (locus 481620) deri ved from phytozome v7.0 (chr-ID scaffold_4; pos 11355480 t o 11356034)
gctgttttctggaaaattggctgtcaaaattctaggtaccactctcattctcttaattttttttttctttttgggtatttaggtaatttttatgtctcttaggtctaccaaatgaaactttattcagtcaaatatattcagttttttgagacttgtttgttacttgttagtttaaagtttgggaattttgataaggtttaaaactcagatctcgaggatgactagaattatttatctttgttttcctgttttcttggagttttgtgtttggtttgatcttgtttgtcttaaagaatctttcgatttgtagttgttttgtcgacaataaccatatccttgtctaaagagtttaagttcttaactctcttgtcatttcaatttttatttcttgtcttgttcgtttttgtctttttttacctcaaaatcttttgtaatcatctttttgtgttattctaacttaaccattgttgcatctttttgtcgtgtgtattctaattttatttttttggatgtgttttgtttcttgtttttgtgaagcttgttgatttgggagga

SEQ ID NO: 42127 - DNA, 865 bp, Arabidopsis lyrata
  Intron number 2 from transcript 904097 (locus 904097) deri ved from phytozome v7.0 (chr-ID scaffold_3; pos 4878561 to 4879425)
ctggcttttcactttttgtgtatggatttggggcctacttggttaggggtaatgttcagtatattcttttgagatttttcattaattttttatacacaaatgcgtgattgtttcgtttttcatgcttagactgtatgaagatgaataaacgccgtcgagagtgggagaaagctgaagaagagaggaaaagaaaagctcacgatctggctttttcggttttcaataactaatccgtgagtcttcaatgaatgaattcagaataaaagtttgtgttggctatgcgtgtgtcttcaatgatgaatgaattcagaataaaagtttgtgtttagtttttgtttggtactgtgctgggaacaaaaaaaaggaagcttaaataatctatggttgtgacttgtgattgatgttgtgaagatttggtcgaaagattttatttatttctagcctggcaaacttgatttgttattgttgtattcatccctatttatgcttgtgtagtggagttagggatgatttttctatgtacagctccaaccctgaaaacttgaaatttgcttttccattgtcttgcatgctctttcgacatcactgcgtctttcctccctaacattcatttgctgtttgcgatcacatatgatgttatttagtaaataactatcattctcattaaaagatgcaattgggggtttacatacatttgaccatgccttaaccaactaaaccaagctatacagactcaaaccaaactatacacaatgtgctatacaaatgaactatatactatgatagatgtcagtaatgaaatttgatatgaattaatacgtacatatcagaaaagagatcacagttcaagtgccagcgaccagtc

SEQ ID NO: 42128 - DNA, 580 bp, Arabidopsis lyrata
  Intron number 1 from transcript 479664 (locus 479664) deri ved from phytozome v7.0 (chr-ID scaffold_3; pos 9505635 to 9506214 reverse strand)
gcttccaagtgattttggattcgtgtaggtaagctctttcaatcctctctatgatttcttttcaaataactttgagctttaatcgttcttcctgcaattttcgttttttaatcggtaggaaagttttctggattaggtgcgaagtttgtgagttcaaaatttggttctctttttgtttctggggaatcttcgcactgaatattgagctttggatttcgaaattcgaagggtgtcaggtcttgtgatttgaattcgcctaagtttcagtattactacctacctggagttgcttaattttccaatttggataagttgtttcttaaatcttctctgggtttcatactctattgagcgcaagtagtgttgacactgataatcagcactctttttggtgtgaggtgggttttgcatgtagactttagtttcattagtcagtttctttggagatgattcactaattaataggtgtatttaatctataaggattgttgagcctatgatttattgtgtttgtatcttggtgaaatctaaaattggtttcaattttgggaatgtttcaggtaacagaagaacttaactt

SEQ ID NO: 42129 - DNA, 424 bp, Arabidopsis lyrata
  Intron number 2 from transcript 486577 (locus 486577) deri ved from phytozome v7.0 (chr-ID scaffold_5; pos 20117777 t o 20118200 reverse strand)
tcatctcctgggtcgtcgtaatcgtgatcatctaggtaaatggcatcccaatttctgtaatttttttaatgttggaatgttttgaagtttcacatgccttagatttgacgttctttttcattttgtatacttgctaattacatttgttgtgtttaagtctttgtggttggtgatgaagttaatgttctagcttgaatttgatcaaagccaacatttttcttatgtttcttattaatcaaacgctgactttattcaaagggtgaatcttgctatagctcttgacgttttttgggtttaatttacaagggaacaactctgtttctagattttgtttcatagtttagttttgaggctttgagctcatgaagaagtgtgttgaatgaatcttggcttctgtgttgttggttttttgacagaagaaagc

SEQ ID NO: 42130 - DNA, 285 bp, Arabidopsis lyrata
  Intron number 1 from transcript 936070 (locus 936070) deri ved from phytozome v7.0 (chr-ID scaffold_5; pos 1505904 to 1506188)
ggttcttcaaaaaagagtgtaaaggtctttgtttcgattttgttggttaatgtatatatctgtgatcttcttgaaatggcttagaatgattatgagtttatggaactttgatggtgctacttatattgtatgctctgtgaggcttcttgttttcttgtaattcagaaagtttgtgttttggtgtgagaaacacactgatttgaagtgggaaacgtttttaccgatttctggaacccacttcacaactcctaaccaggccagtgttggacacccatggttaagaca

SEQ ID NO: 42131 - DNA, 496 bp, Arabidopsis lyrata
  Intron number 2 from transcript 344066 (locus 344066) deri ved from phytozome v7.0 (chr-ID scaffold_4; pos 3296227 to 3296722 reverse strand)
gtcgacgaggtgggtttggctaaacccaattagtcaaaattggtttcaaaacgtttctttatttccctagttttcatgctttggaatcttttgtgtgctttgttattctcttccgctttgttgaactgtatgatcaccattgtaccatcttgtaacaattttatttataatagaactaaaaaaaaagtaatagataaaattttaaaccaaatttcaccgtagtaaattgtaatatttcattacaaataaattatctttgtaagagaaaaataagtcaaggaagtaaaattacatgtatgagaaaaataagtcaaggaagtaaaataagtcatgtacttgacttaatttcattacaaataaattatctttcgaaattaaattacatgtaagagaaaaataagtcaaggaagtaaaattttgtgaccaaagaaaaaagaaaacttagaagcaaaaacaaaacgaatagaattaatatcatttactttctttcagtgtg

SEQ ID NO: 42132 - DNA, 474 bp, Arabidopsis lyrata
  Intron number 1 from transcript 892272 (locus 892272) deri ved from phytozome v7.0 (chr-ID scaffold_6; pos 1073385 to 1073858)
gccttatcgccaccgactttctaggttctactctcactcagtctcattctcattctctacaatctacatcatcttttcttaatgtttctctacatgatagataaaatcttcatacgaatattactaaacatcaacaatgaaataagaaagttagagcgttcttttataacatttgacagttattatgacgtcttatatcgtttgaacattaatatacttttaacgaaaataagcatgaatttacaaaagtgaaaatctttaattttcgttctcaaatagtcaaattcgttaatatataattatttattgaaattgaagtccaaaaaaaaaaacttccttcgtgcagcaaaacagttaggagcaatattaccgtacctctggaggactcacggaaaaaataaagtaaaattaaacagaggaatgaattttgctttcggagggtccgaagtattcgactctccggttgatcgatcg

SEQ ID NO: 42133 - DNA, 602 bp, Arabidopsis lyrata
  Intron number 2 from transcript 334100 (locus 334100) deri ved from phytozome v7.0 (chr-ID scaffold_1; pos 3024703 to 3025304)
cagcagactgtaagattcctctgcctcgatttacgatttgattgaccgatctgtaatttttgtattgaaactggaagttacatgtcttggggttcttaaggtgaatggatgggtgtttgttctcagttagggctttcgtatgtgttatttagctttatcgttgagtttgcgtatttcttctaaagaactgttgtttgaatctgctctaatgcttgacattgtgttcttgatcttagcatagtatctttcactttggtaattttggatgaaactgtgataatcatcaaagtagccttcatttgaaaatataatctaaatatctagaaatgacagggaaatttgcaggagactgaaccaagttatagatttaattcttggtgtggtaaagaatgtgccttttcattgaatgtactaagtggtgattaaagattcggaaaaccaatccttccctttttcttgaacttttgagtgctgctactctctgattaggtgttgtaagccgtcttgtatcttctttgtttagatagtgattgtttgccctttcctttttccacttcaaccattgaaattgttccatttttccatctttttgtaactctcag

SEQ ID NO: 42134 - DNA, 564 bp, Arabidopsis lyrata
  Intron number 2 from transcript 486108 (locus 486108) deri ved from phytozome v7.0 (chr-ID scaffold_5; pos 18023512 t o 18024075)
tgaggctttgcagaactctcgccatcgtctcacgagtaagctccgtttttttttttgtttgggttctctgattcttgtcgtaaaaccttatgtcttgaaattagagctgatttttgtcatgtggataaacaaatttgaaattttgcttggtgggtttatctgaatttagctgggcatagttaggttaatttaacagcaatttggggattttgcgtttaaggaactggctctcttcttagatgtttgcggttatgttggtgcccatttcatctgtactgtataatccatggttaatgttatcaaagctgtaaacttttatactctccatggtgttcaacatttataacaaggaaagtgatttatagagttggctttgtttgcttcagtagtgttactttaatttacttaaactcgggtacatatatctcccttatctagtttttttctggtagtagcttagcttttgtgttattatctagaactgccagtggtgtgtcctggcttttgtgttttttgctactgtatctaatcctttttgtttctcttgttgtgttagttttgcgg

SEQ ID NO: 42135 - DNA, 421 bp, Arabidopsis lyrata; identical to SEQ ID NO: 41315
  Intron number 3 from transcript 497511 (locus 497511) deri ved from phytozome v7.0 (chr-ID scaffold_666; pos 1149 to 1569 reverse strand)

SEQ ID NO: 42136 - DNA, 495 bp, Arabidopsis lyrata
  Intron number 1 from transcript 922663 (locus 922663) deri ved from phytozome v7.0 (chr-ID scaffold_1; pos 16941534 t o 16942028)
caaccacatatgtaagccctcaattccctctaattaaattattttatatggatttgaatgtattatgaccattaactatatatcgtatatgccttaacagtaaaaaaataatctaattttttaataatataattgagaattagtcgatgtctgtccaaaattcatctcattacctatctcattggttgtttccgaccttaaattcttctaatactagaatcaattggtgtgagccttcatttatgctttatatcctttgtatatttataatctttagatcttttatatgcatataaatatgtatgaattatttagttatctttaaactcgttcttctctttagatatactgttcactacatatatgttttccgctttaatcatttgattcatatatgtttcatttgttttgattgaatatctatatttttaaaattttatttcaataccttaacctaattttttttattaaatctttgtaaacagtttgcttgag

SEQ ID NO: 42137 - DNA, 579 bp, Arabidopsis lyrata
  Intron number 1 from transcript 488243 (locus 488243) deri ved from phytozome v7.0 (chr-ID scaffold_6; pos 5691061 to 5691639 reverse strand)
tggctcgaagaagaatcctccgccgcctcctccaagttagtcttctctctctctctctcatgattcctttttgatttcccctttcacgaaggtgatttgatttcgtaaactggtttagtcttctatttaccgatttttttcttccacttgtgatattttgatcatatgtcaatgatctgcagctgctagtttcaaagtaattggaattatagagagttaaccaattatttaagaaaattgcttctctaattcttttttgattgaatttgtatcctagtatcgaaccaaagatacaatgttatttgtggagaatttaaagatagttgaaacgattttgttgtagtttctattgcgatcatcagttgtattcaaggatcactgagatttggtaacttagagaaaactgaaaagattgattatgtggtttgggtgggtgggtataactgtgttttattgatcagtgttggtgttggtgatagatttgtagcaaaaagcaaagcaagttttgtgtgtgtatgactgatgagtttgatgcggttttcagggcagctgagtccataaaaccaaaggaaatagaga

SEQ ID NO: 42138 - DNA, 663 bp, Arabidopsis lyrata
  Intron number 2 from transcript 931791 (locus 931791) deri ved from phytozome v7.0 (chr-ID scaffold_3; pos 23147574 t o 23148236 reverse strand)
ctagctcacaaggacataggtttgttctatgtctttgtttttattcaaatgagcttaattatgattataaaaactcaagattaggataattttctcaaaaatgcgtgtattatatctaaaaatatctttgtttagatacaagaagcattagttttgtaacacaagtatttgatatttttcttctaattgagtgttagcctcggtcatttctttaaggtctaaagttgccatgtaattaataaagtcacacgtttccttcttcaatgccaagactcaagaagatccaatagctggtggcccacttggacgttaagttagcccaattttatttgtctttagtaataaatagctacgtttctcttaggtcttttgttaattggtttctctaggtcttacttaatatacaagttttaacatatctctttcttcgtttgatctgcaatcatgaattcaagttccataacgaatgatctcatcctggagatattgtcgagattgcctttaaagtcagtcgcgaggtttcgttgcgtgtcgaagcgatgggcatcaaatcttggtagtccatatttcaaggagttgttcctgaccaggtccttggctaagccacgcctcttatttgccatcgcagaaaaaagcaacaaagaagaagaagaagaagattgt

SEQ ID NO: 42139 - DNA, 721 bp, Arabidopsis lyrata
  Intron number 1 from transcript 906074 (locus 906074) deri ved from phytozome v7.0 (chr-ID scaffold_3; pos 18056532 t o 18057252 reverse strand)
ctgagaaggtaaaaggaacacacttgtgttggctttgctaactaagatgactgttgtgttgttcatggatgttcttatattatatgcttggtttttcattgtctagataatgagttgatccgattgaagagggaggctaagttgaaaggaggctaagttgaaaggaggattctattcttaaagaacattttcatacaatggagtacaaacagataagtctttcattaaaatcttattcattcatttatctctctattgggtaagagtatagatgtaggctaggggaagatagtatcttgtcatattaattcttcattgcctacacacataaaatttcttgttgaaaacaatttataaacatagattatctcaaatccaaatccaactaatacttaaacaaagctttccagaagaaacacaattatatatatatatatttttatgaagaggaatgtatacaatagtgtaatttagtactaaaacgcagctaaaggccttacatagaaggattgaaacaaaaccatttatgtgtttcctttttattgccactctttcatccaacagatcggagctagactctatcgttgccaagcatgttttttgttatctacaaatctgcagaaaaaaatgaatttggaaactaacaataatatttgagtttagaatctcaccatttttggctgtgtattgccatgatgcaggatcttaacttggactcgtc

SEQ ID NO: 42140 - DNA, 218 bp, Arabidopsis lyrata
  Intron number 3 from transcript 899968 (locus 899968) deri ved from phytozome v7.0 (chr-ID scaffold_4; pos 4126660 to 4126877 reverse strand)
gatactttactttgtatccttttgatccttcagttataaaagtttctttagtatctgatgatcggattcttacttgcctttgatatgtgccaaaagaaaatcttgttcagtattggcttgttttgtttgttaatattgctagtaatttaacacgaaaagaagagtaatggatatgattcttaatttttgcggtccttgactaactggtttgtaaagtc

SEQ ID NO: 42141 - DNA, 599 bp, Arabidopsis lyrata
  Intron number 2 from transcript 479867 (locus 479867) deri ved from phytozome v7.0 (chr-ID scaffold_3; pos 10834022 t o 10834620)
tataagaaggctgaagccagtttttggactggttagtcctctttcttttgttttatttttgttttgttctcttgagtttgaattgtgcttgtggttgtggatgcagttttgattaagaaagtctgtgactttgtaaatgtaaaggttcttctcttcgttgtttaggattgtaatgtagtcggtgttaccttgtaatcgtcgatgttccactttgattatgattggtggaaaacaagatatttttgtacttctaattctgtttttgattcagaggatgtttcatgtgtgttgtggtagttctgtttctgtcttatattatcatgaattgtgcttgtggttgtggatgcagttttgattaagaaagtctgtgactttgtaaatgtatagcttcttcttttcgttgtttaggattgtaatgtaatagatgttccattttgattttggtttgtggaaaacaagatgttttgtgcgtctaattctgattctgattcagagaatgtttcatgtgtgtgtttgttctgtttctgcttttattatcatcaattgtatggttgacttttatgaattgattgtagctgaagaggttgatctttccactg

SEQ ID NO: 42142 - DNA, 981 bp, Arabidopsis lyrata
  Intron number 2 from transcript 477497 (locus 477497) deri ved from phytozome v7.0 (chr-ID scaffold_3; pos 683717 to 684697)
ttccttgttttccaaattttgggggttttaatcaggtttgttgattcttgtcaatgattttggaaaacatttaaattttgtgggttttacttgaatctctactttagatttgatgtgttcctacaaggttgtgtttggttttatccagttccaagtaattacgtgaagtttgcctttttttggatctcattgtagatggttaggtctgcaatagtctcaattaaaccttcttgtttgcatattatcagttcagtgactcttggttccagattcgttttggtggtcataatctagttattcatggtttggttctaagcgagtaagaatctctttcaaatcttcgatgttcttctctcttgtggttgtgtggtttgggttctaaggtgatatctttgggtttgaatcttataaactttttgtttccagcttgattgattgagcaggggaatagttattatattaggtggttgatatagaagaaagggcttttcagatcttaactaaaccaaatacatagatttagcttaccaatgtttgacctaaccccatctcaccggaatataggattttatatgatcatgaaacagaaaatgagcgggaattgtagaatctatagtttgttagaatcattctctgtgggcttgtttagttgcatccatacgttattagattggcttgatttaagacaaatatcatgtctttagcattacatggagccgcagttctataccaaaccaatcaaaacttgtgctattcaatctaaattgcctcttcaatcaagtcttcccccataagcatgttcaatcgagtaaaagtgcatgtgcttaggacattttaggactggttctttcttccttaatcttgattctttgactattatgtggtggtattcttcgtctttccctattaaacttattgactgtaagagagtgtgatttcatcttaggctgtgacaaatcgggggcctgagatttcagaaac

SEQ ID NO: 42143 - DNA, 348 bp, Arabidopsis lyrata
  Intron number 1 from transcript 483043 (locus 483043) deri ved from phytozome v7.0 (chr-ID scaffold_4; pos 19509241 t o 19509588)
gagaaggttagatctactcaaagttttgatctttgttaatttaggtttacttcttcctgaataaaatcgataaagtggatacctttagtgtagaaaactgagaatctctttgttaatctgagagtttcaattttggattttgattcacaattttgtaaatttgaagttgtctgctagttagtgtccattgttctcagaagtaatcagtttattagatcggatctgtggctcttgcttagagtttattgctcaagtcgtatgttctgcaataacatgttgatccttaagcttgtaatgcttgtatagatctgatttattgatatggctttatgtttatgtgtagacata

SEQ ID NO: 42144 - DNA, 362 bp, Arabidopsis lyrata
  Intron number 1 from transcript 314880 (locus 314880) deri ved from phytozome v7.0 (chr-ID scaffold_1; pos 31363171 t o 31363532)
atcttgattccggtgagcttctagccgttaaacaggttagtttgagtttgaaattgttatcttcttctggaattttgatttactcgtctcggattttgattttgaaattagtgtcactttaatggttcttattggtaattaatggaatctataagctttaatcacagatttctactttgttttcggttgtcactgtcattgattatggtcagattttggaatttagggttttaagctcttagacttgtttttgaatctttttgtggctttgagttgttgttgtgatttgattatatcatgagctgattgtagttgtttctttctcaggttttgattgcatctaattgtgcatccaaggaaaa

SEQ ID NO: 42145 - DNA, 251 bp, Arabidopsis lyrata
  Intron number 1 from transcript 914902 (locus 914902) deri ved from phytozome v7.0 (chr-ID scaffold_1; pos 31764210 t o 31764460)
gaaaaacgaaagtgatttcaagtagttttattaaaaaaatatggtttttaataaaaaaaaataaaaatattgggtttttgtttttgaattgtatgatataaacttttgaaatgtgtgtataaagaaaaacagagttataagggtattaaataataaataaaaaagggcataattaaaaaactgtagtaaactaacactaatcttcaaaattttaagagtggcacctgcccttcctaataaaccgcgccgac

SEQ ID NO: 42146 - DNA, 908 bp, Arabidopsis lyrata
  Intron number 3 from transcript 937350 (locus 937350) deri ved from phytozome v7.0 (chr-ID scaffold_5; pos 12662346 t o 12663253)
cctcaaaagtgggaatatattccatcaattaaagggtataacaatgagatatttggggtttttgggttgttgatacatgttgattctgaaaatcacacgatgaatttgtttaaaggagaaaacaaattcaattaactctcttgcaaattctgatcaaagactcaaaagaaaaaaagattttattgcttagagacaaaattaggatttttgctcaagaacaattagagttttttttataaagttgccgatcccctcaacagaggacaaaccctcctatttatacaagttttgggcggttttagagataagttaaacttctaaatcttcggagcttgaatctttccttttcttttattttcgtgattcccctttatccaagaggaaaacttcttatgatcattgatgaagaagtcggttgcaggcgatctcccgtcttcgagtcgagctcgcctggcgatctccctctccagcccatcaacaggcttgaccaggattctccggtttaactgaattctcatattaattcgtaattcgtccggtttaagccggtattgtcggaggtgctaattcctgcaccaacaatacatttaattaaaatgctacagtaactcccataacatatttttgtttattacgttataatgttctgttttggtaaatttatattgtttgtttccgtctatagagcctatattgtgaatcttggtgatctgctggagcgttggagtaatggctatttcgaataaagtttttgtttgtttgagcttaattttcctaaggcaattgtgacacatatgtcgcttaatacaacatgaagcatgattttcaagtacagttttttttgtagtaacatctttttccacatgtttttataccttacaggtctacattacatcgggtacttggga

SEQ ID NO: 42147 - DNA, 993 bp, Arabidopsis lyrata
  Intron number 1 from transcript 932915 (locus 932915) deri ved from phytozome v7.0 (chr-ID scaffold_4; pos 6655601 to 6656593)
accaaccgatcagacccaccacaactcctgtcacggttagtcactcagtcccgtgtccgtctcctctacaacctcatgacaataacgaagattgatatgattatgttactcatgtccatggcaacacaaaacttatgcttctgtgctacatctctttattttggtgtgttgtgtattaagaacatgactgatgtgtatttcattttgtattttgttatgtcgttgactaagaacatgacttgtgtctttttgtaaaccaaaaatatttagatcatatgtatgtttgattaaagttttaatttgttgttgtttatttccaaattgaggttaaactgatttttatttttaaattgagcttaacaaaataacccacggataaccacaaagaaatcagtggtttgtttaattaccacggaaaagccacgacagttttgtggcaaaaataaccacggaaaagccacgacgtgtttgtgactatttacccacaagatatgttgtgactttttcgtggttaaatagtcacgaatactttcgtggtaattcgtagctaactttgccacgagaaaattcacagccacgacgctatacccaaggatttcgtcagtggcaattcgtgggtatgaaggcttatagccacggattctaggttacagccacgataattgtcgtggctatgccgttttttttagtagtgaatattataactataattaataattatttaaccatagagacaaattaagatggtgtcttaaaatttaaacacaaactttgtcgatatgtgttaattggatttgtgttaatccattttctctacttacgctgattatcacttggtaagtttttcctctgctccatgttttatgggtgtatgttattgaaaagattgaatcttgtgtcatgggattgagtctagatgtgagttatttgcatgccaatcagagctattttactgttgagatttcatcgtctctctttctccaggttggtaat

SEQ ID NO: 42148 - DNA, 348 bp, Arabidopsis lyrata
  Intron number 3 from transcript 345785 (locus 345785) deri ved from phytozome v7.0 (chr-ID scaffold_4; pos 19471723 t o 19472070)
cttgcccgcattgtttgacaggttaggttacaaatctgatttttctttactcccttgtgatttagaacatcttcctgaagaatagagtctctggtttcgttatctgttaccgagtctttagcacttgttttatggatttatcttagtcaaattgttttgaataagtctccctagcttataggaggcgtctgatgaagtcgcagcatttctagtaagtttgtttaaggttgttagtcttagtctatttaggtccctctgatgtaactcttttaatcaatcgaattattcagtttcctacttgatctgtttacaatattccctaactttgattcttttattgcatagacc

SEQ ID NO: 42149 - DNA, 853 bp, Arabidopsis lyrata
  Intron number 1 from transcript 900542 (locus 900542) deri ved from phytozome v7.0 (chr-ID scaffold_4; pos 12244061 t o 12244913)
cagaggaaagaatcaagtacaagcttgaaaaggtttgtgagagtctagtctaattcattagggccggtccggagggcaagcaagtgaagccaccacttcgggtctcacattattaagtgaagccaccgcttagggtctcacattgtcaaacattttttttggaagaatttttttcttttatattaacaaaaaggcctaaattgttaattatgcataaggcattaaagaaaatttagaaactttggaccggcaatatgtgtaccatgttttgagaagacgacgtaaatgaattaatgttaatgatcaaattgtgtagagatagtatttacacgtgatagtaaacttagtaaaaactttttttcactccatctagattctatacagatttaagtgtgtcaatcgggataatctgctgcatcaaaccacaaacgcttcagccgaatcatgtgaagcacttcctttgatactttcttccattttcttgatacaatagacttctctttaatccaaggttgattgatatcttcgagttttcattacttttcatggacaattcaattcaaaaactcctcggctttatgtgcccagccccggcccaaagaaactaaggccttctgggcaaatataatcttttttggcctattgttattgaaattgaatatatctttgatctcatgttaaatatgctattggcggataaggatcttgaggtataaactcttttttgtttatttttttcttttgataaaagtcttttgtatgttttagtactaattatatatttatatataactatatactgatataatacttggcagcttgattgttgggttgtctgctgattcaaaagctg

SEQ ID NO: 42150 - DNA, 379 bp, Arabidopsis lyrata
  Intron number 4 from transcript 483264 (locus 483264) deri ved from phytozome v7.0 (chr-ID scaffold_4; pos 20466419 t o 20466797 reverse strand)
agaagctcattgctgatatttttcctcgtaatcaggttcgtatctagccattttcatacttatgttgacttgttgcttcttgtagtctatggaagttggattttgatttccttcgacaagttcctacttaactgttatttaatctgtgtttctaatttttccggagtggcagaaatttttgtttttactcttccatgctttccctttactatgttaaagtttgtcgatcagcatttcatttctctttgagttgttatctagtgaatgagacactatgttctttggtactataatagaaaactggagcttccctcttggttatctaggtgggttggtttaatttattactgcttttgatttctgcaggaggaaggcataa

SEQ ID NO: 42151 - DNA, 593 bp, Arabidopsis lyrata
  Intron number 5 from transcript 353479 (locus 353479) deri ved from phytozome v7.0 (chr-ID scaffold_7; pos 3253923 to 3254515)
cacataccaaccagccaaccgtagaaattttgcaggtaggtgagttttgattcagcacaagtaaaatagtccgttaacattgtatcgtaaaacttcaaatagtttttgtttggaagctctcattgatgtttttagtttcactttttaggtcttgtatgtcaattctcataatataagctgcaaagtttctatagataatggtacagcacgtgtgtcaggtactcattgatgcactttggttttaactttcatcaacaatactataattagtgtataaaattctcactttgattactttctttgagatagcattttatggaccaggaacatgtaaatttggttcttcttgcaagtatcaccatcatatacagggagaaggaggaggatgaggagattctattactcctatctcattaagttattccattattcccgttttgcttaatatctcttcggtctcggtttttatcattttattgttggttcatgtctaggctctttttttttggttttctatgtttaatatagttaatttgaaattggccttcgtttttgcagatttgggcagaatttgaagcggaggaaactgatcg

SEQ ID NO: 42152 - DNA, 871 bp, Arabidopsis lyrata
  Intron number 2 from transcript 494829 (locus 494829) deri ved from phytozome v7.0 (chr-ID scaffold_8; pos 9931436 to 9932306 reverse strand)
gtgaggtaagctcttcaacattcctcaatttcttgcttattttttttgaggatagttgtgtgtgattaagtaggtaatcaaagcaactcatgtctgattttgactaattttgtgcaaaatcaaacctttgcattgtttctctcttagtgactctttttagaggaaaaccctgatggtagtcttcaagagtttattaatgattaaggaaaagattctagttcatgtcttgatgtttgtttgtcttgttttgttcaaaatcaaacctttgtagaggttgattgtctaatggtagcttccaagagtatatcaacgattaaggaacatatctagcgcccactctcctttgaatatgttaaaattaagaagaactaagtgtttgtgatgcactgatcagttttctttcttgtcacatctcatcttaccgatattttagctacaaattcaatcaagttataagtgtttgtgactgcgctagttagaagaagattttgaaccttatcctgataaagaactggcttgagaagatacgcaaatatatctgtatttataagagactatagattgacggatatttggatgaaagtatctgctttggtggactgaaaccaaagataatgtgatcttggaagtcctcgagccgccgagcctaatgacttcggtcatctatggcaatgcctaaaccagcaaaatcccatttttatgactttgaatgatatgatagaaggttgttttgtggagagcgagttgaatgggttgttgaaattgtaaattgatattagtgaaccaacatgtgacattgatcacaggactaagttttgaatttttatgtaatgcaggcacatcgtgaatccactgggacagtaacgacgac

SEQ ID NO: 42153 - DNA, 370 bp, Arabidopsis lyrata
  Intron number 2 from transcript 950684 (locus 950684) deri ved from phytozome v7.0 (chr-ID scaffold_8; pos 19118257 t o 19118626 reverse strand)
tctattccacttgttggaggcatttggatcattctgtaagttttcataactttaaggccacaattgtttctttgcacatttgtgttttcacgttataatggaccatcttttagtttagaacatgtttcagctttgtttctttgtgtttttttagtttcgtcttctttataagcatcgagcggacgcaaactacattacagtgttttctttgattcatcttcatgatccataggggaaggagattttttgggatgtgcattttgatcacattgctataaaacctcgaccattggcaaaatccggttaagtaatgaattaatgatgggatgttgcaggtttttggcgatatcctcagggatcgtttacggtt

SEQ ID NO: 42154 - DNA, 767 bp, Arabidopsis lyrata
  Intron number 3 from transcript 923098 (locus 923098) deri ved from phytozome v7.0 (chr-ID scaffold_1; pos 24116906 t o 24117672 reverse strand)
tgaatcgcgacgcaaaattcaccaacttcgttgaggtttgttgttttgattttaaaaaaattatcattttttgaatcagattttgcataacaaagattagggctcttcatatagacatttacactaatcttgattgatttcaaaagcattggcttgttgaaattgtgaaaattttctttaattggggcattaacattgttgtttgagatcgaaaattcggaatttagacaatgaagcttgagttagcttcgtttataactccatgtcgtagtcggtatcaagatctttatagcaaaactcgatatagccttagtgagacatgacaatgtgattaagaaccaatattttggaatggataacattcctgattcaggttttgtataacgaggttagggctatcgatactggtacagtatagggactaagctattttgattgattcgaagagcattttagactgcgaaaattgtcctcaatcaggatattaacattgttgtttgagatatagatagttcgatatatagacattgaagttaagtttctagctttgattattattttatgcccttgtcggtatcaagacctttctaaagaaagagaaatctctgtcttatgacttatgagacgtgaaaatgtgattaagaaccgattttctgtcattttccctagtgggtattcaacattcattgtgaatctgtcatgtatagatactgaatctgtcttgcaatcatttcagtttagaacacacaaggtaatatacaggcgtt

SEQ ID NO: 42155 - DNA, 378 bp, Arabidopsis lyrata
  Intron number 2 from transcript 494007 (locus 494007) deri ved from phytozome v7.0 (chr-ID scaffold_7; pos 22921387 t o 22921764 reverse strand)
gaatttgtgctttaatccttcaaggtacttatcaggtctgctccctagttcagcttatttgtttttctcttctaaagctttgtttttaacaattccatgaggcaaaaaaatttgtataagaagcttaattgtcacaatcagagcgtcgcagttcctagctagtgatgattcaaagttgatagttgaaaggattttgcaatagtagtgttagatgtcagaaaacattggtcatcatgatgtgatatagcctttttttcataacacttcaagttcttctgcttatgttaagatggttttgtcgattcatagtaatataagtatgttctgtgatgaattactacagccttagcacttggtgatccatctgttgcgactgtt

SEQ ID NO: 42156 - DNA, 466 bp, Arabidopsis lyrata
  Intron number 1 from transcript 493964 (locus 493964) deri ved from phytozome v7.0 (chr-ID scaffold_7; pos 22489147 t o 22489612 reverse strand)
tgcgaaacaagttcgtttcatcatcggagttatcggtaacagactcttccttctctatcgatttgcttcttcgtcgttctgattcacgtcgtactaacgattcttcgtcgtatacattgttgatctgaatccgaagcttttttgttatctctggatttgttatcgatctctcatgtttgatctatatttgatgtgtttgagttttatgattcgaaactgattttagctttattgatcacgatccttcacatatttgttgtgtttttgacctcgattctttcttcgatctcaatccgaagcttttttcatggaagatttatcgatgatcgctcatgttttttgtgtgtgtttaagcttgattctaatggtggatgtttatttgatctgtgttttatgtgattaattagcaaaaaatctcaatgtgattaacaaaatttatctctcgtttgtaattgtaacgcaggga

SEQ ID NO: 42157 - DNA, 587 bp, Arabidopsis lyrata
  Intron number 2 from transcript 342733 (locus 342733) deri ved from phytozome v7.0 (chr-ID scaffold_3; pos 12986739 t o 12987325 reverse strand)
gagtttggataaggtgaagtctgagccttcaaaaggttccacataaggattgcctcgtagaatggagggtatgtttgattttgtttccttaagagttttccttttctaaagtttcaatttttgtgttcttgtggtcttgtactgttgtatcctacttactactatgctggttttaagttaagattcttaagataattagttatggtctttagttttaactttgattcgttatctgctataagttatatggttgaatcatgaaatatcaatggcaacttaaggtacaaagagattgaaaactcgctaatttccctcttccagatgaaactcttagtcatagtcgattctgccgcactcttctaatgttagaatattccaaacattgtatgtagcatactctgaaaacagagtaatgtgatgatatttttgtatagcttagtggatgaagtcatgaagctgatttagtttccggccgctatgcatagctcacaaaatgttccaaacaagttttcccccttccttctcttgcatttgcataaactgatcatatagccagaagagtcactagtacagagtgttttgacttt

SEQ ID NO: 42158 - DNA, 348 bp, Arabidopsis lyrata
  Intron number 1 from transcript 327340 (locus 327340) deri ved from phytozome v7.0 (chr-ID scaffold_6; pos 21836910 t o 21837257 reverse strand)
agattacaagaatttcagacaaatcactagagaaagtaagcttctttcaccttttctcttcccaattttgggttttcgaaattgggtttttgattagagttagatcattagcctctgttatagggtttgtgtggaagcttctggtttctaggttctagggtttcgtcggattaataaagagaaattttatgggtttatggagtttcgaattaggttaacatgatcacaataaattagaggttgtttttgttaaactaatttcattgaagcaaaaactttgcatatcaggaacatgagggtttggattttaggtaattattttgtctattttgatttcaggattactct

SEQ ID NO: 42159 - DNA, 753 bp, Arabidopsis lyrata
  Intron number 3 from transcript 483956 (locus 483956) deri ved from phytozome v7.0 (chr-ID scaffold_4; pos 23174552 t o 23175304 reverse strand)
tttctctacaatcttatcattccaatcgtgaacaagtcagtgaattcctccttttaataattatcctgtcatcttctatgatctcctttaacatcctcctggatgtagtttaaaagcttaagggcaagctctactttctgaaatctttaaagtgaaaatggaaatatttactcaataggtgaccatcatgtccttaaaaaaaagaagtggctggtctcaaaagaaccactaggactgttcctgtagttgtaggataatggatatgtctcaaaagccaatctctatggaagtggaaggaaatcacatcaaattcttcaatgttatccattaatattgaaagaacaaaaatgcttaccacagtgtgaatatggtttcataatcattgtaccactaacatatgggatctagatacatatgtatataataaacactcataagaggtacttgccgtggtaccaataaaatcatcacaatgggtttctcactcaaggaagaaaaagaagtttttgtattttttagggggcaattagtggtatcatgtcatgtactataaagtttgcttccatcatcttttatccacacgccaattttgatgtccccaccaaagattctctgagaattttgaacagcactcactaaacctcaagaatctttcatatccattgaggttaccttttttaccatcttcttcttgctctgttttttaactttttttacaacaggtacataccaggacttgacaaaggcaaagca

SEQ ID NO: 42160 - DNA, 501 bp, Arabidopsis lyrata
  Intron number 2 from transcript 488055 (locus 488055) deri ved from phytozome v7.0 (chr-ID scaffold_6; pos 4921104 to 4921604 reverse strand)
tcttcccctctcccgtcccatcactgatctattacttggatttggtttcttcttcaaatcgcgcatttcctttttcgcctttaggttttcttgattcgttcgaatttcgtccctccgttgctcaggaatgatttcttgttcttgttatggatttgatttcaactgctatgttccttttgtcgccgagaatttgtgttttgaccttattcgattcagaaatgatctccggagattgttgtttcgtttttgattttctgattcgtttctgcaatggatccatacgtttgtgatatcaacgatgtagtagtaagaatagtcgtctctgtgaaatctgtgttccttcatttctcattgaagaatcaccatctttgacattgcagctcaaatcaccattttggtctttgatgttcaacaagaatattgtttttgttaagagaagattattgtattgacttattctcgttttttatgagaactgtaggataactttgttgtgagaag

SEQ ID NO: 42161 - DNA, 520 bp, Arabidopsis lyrata
  Intron number 1 from transcript 919557 (locus 919557) deri ved from phytozome v7.0 (chr-ID scaffold_1; pos 3051403 to 3051922 reverse strand)
ctctctgctcaaagtgtaacggttagtacattcgttcactcgacgtcattcttttaatacgtttttcggtggtattgcagtgttctctctcttttgatctaatctttagctcgttcttgaattctataatggttttaggattgaaaaagttgtgtgtatggagataattgcctctaaaatgtcttattctctaaattgccgcttattatttttacagaaatttagaaattgccgctgtttttttagaaaatttgtttagcgaatatatcccattaatttcggttggttttaccacaactattaatacccataacctcttatgttaaccctaatttttatttagcgatccccactccacaggttctttactactcttcacgtctcaccaccgtaactcttcttttctacaggtaattttattacttttttgatcataaaactggctttgttgatgaattttcttgttaatttcgaactttgtaactgagtttctttatctatttcatgaactcatgtagac

SEQ ID NO: 42162 - DNA, 861 bp, Arabidopsis lyrata
  Intron number 1 from transcript 894498 (locus 894498) deri ved from phytozome v7.0 (chr-ID scaffold_6; pos 11589779 t o 11590639 reverse strand)
gtccctctcctttaccagttggtgcaaggcaagtgatttaatttttttcgaattcattaataaagattgggtgaacgacatgtgtcccccccccacgaagttttatatagtaccataacaacatagatttcggatctcgtctccagtccacacaaaacgaaagttaaactccaatttctccctaaattgaaagttcgagacctcagtctccataaattcaaatttcgtggtttattattggtttactatgctgaacccgatgtcaaaccaaaacctagaataataaaccggccaaaacctagaataataaaccggataataaaccatcctcctctctctctctaccttcttcaccatctttaatccgagagaacatcaatagccttgtcaaaaagtaagtaacataatcatcaattctgcaaaattttatgatgcccaattgcttatggtacaacccgaaatctttataatgcccaattgcacaagttgtaccctaagcatttgcccaattctgcaaatgcttatggtacaacccgaaatctatgttgttatggtactatatgaaacttcgtgggggggggacacatgtcgttcacccataaagatttatcgaaattaagtatctaaccaaatgcccaaaaaacaagaatgtgacgacaaaaataaaagtgtttatttatttattattaaataaaacattaaagaaaacaaaaatgtattaaaagttaactaaaacacgtcattaagaatcaggtggctaggctaattgtgaaaatttgcatgccgttgacataattttcttaacaaaaaaaaaaaaacagaacaccaaatctttttctcccaccgatcaccaccggagct

SEQ ID NO: 42163 - DNA, 741 bp, Manihot esculenta
  Intron number 1 from transcript cassava4.1_003151m (locus cassava4.1_003151m.g) derived from phytozome v7.0 (chr-ID scaffold03049; pos 677059 to 677799)
aagaagtgctcacgttgtaaatccgttagatactggtacttttcttttcgagtttgttagttgtggttgtaattaattatgtgaacagtctattattatgatgatgatgattacgatgatcgttatctgcggttgcttgaaatattagctgatactgttgcaatctttgatgatagtcatttgttgtcgctggcaaaactttaatattggtatgaactatcaagttctttacaatgaaatatgggatttcttgttggttcaaggaggagcaccataggagtgttgcagttatgtaaatgctgtttctaattgctcgccctagatagaattactcaggatagctgtgctgtcagttaattaccgagacaacacctaatgtaatttggccagcatcatgactttatcaagaacgagattttgttaggttggaacatatttctttaattaaatctataaccatataatgttaaataatgcactttgatatattgtgcagttagtttcttatgcttttagaagatgataaactgtttagtgtttacttgtttatgtttatactgtttcctctctgctaaattatatgttttctcctcctgctgcatttttaacttcaagtttgttactttattttcataactgctaatggtagcaggtgttatctcaaagggttcttttggtcagttttcaaactacatgtaccttttaatgttttttctttgttttcatttccagctcagcaaa

SEQ ID NO: 42164 - DNA, 905 bp, Manihot esculenta
  Intron number 1 from transcript cassava4.1_014465m (locus cassava4.1_014465m.g) derived from phytozome v7.0 (chr-ID scaffold00080; pos 482501 to 483405 reverse strand)
tgcaagcggtgcattcccctcgcctggtggttaaggtcagtcttctctttctctcaatacttcccatatatttgttcactactagagctcaaggttactctataacggcgaagcaggtttctacccatgccctaactttctttctgtttttgtaattttgatataactattaaaaaaatcataatcccgagaaaaaggcctctgtctgctttaccttgccagttgctactgaatactgatatttggatatctaacaatttgtttctggcgggtggtaaattcacaacagttattcaagtgataaattctttgatagctgtttgccatgtaagctacttgctaggaacattgtccaatagtagaatttctttttctcaagtttattagacacatgacaaccttgtgatataagttgttgggtgcctgttttaggctacacgcttggcttgctgtacattagtttagcatccattttttggctttgtctgtaggataaacttcagtgaataataaaacaaaatagacaactattcacaattgtttaggacgaaaaaaggtgcaacattgtaatctcatattgttcaaatagtaccaacctttctgccgcttctccatccttactgttcataatctcaaagaattgaagatgaatggttattggtaacttctttctaaccaatatcaagtcattaaaagagaaagagacgatgaaatggggtcggtatcgctctgtgaccaaaggcttatatgttattgagaattactgattaaaagtacaggttggataatgaatgatcaagcagctcatgtaaaaagtaggtttttgcacagtttcatagtggacgtgatcttcatttttatcttatttggtacattctgtccttggcagggtagttttggcctag

SEQ ID NO: 42165 - DNA, 950 bp, Manihot esculenta
  Intron number 1 from transcript cassava4.1_007167m (locus cassava4.1_004072m.g) derived from phytozome v7.0 (chr-ID scaffold06656; pos 206479 to 207428 reverse strand)
tcccattacctgttccagtacgggcaagtcacaaggtgtgctctaaacacaagaagttgcgttggcatgtaaatgttaattatctgtttggccttctccatgtgcatgcgacttgtacctattttgtgggctcagctgataatgtgtgttttgggaaatatacacttacgcttgttttgggtaatattaaagattttctactttgaaggcaccggttattattttgatagataattattctttttcagaggaatattggattagctgtaatgattggaagtggtattctaacttaattgttttaacaagttttgagaaagtttatttgtggagaattagagaataactagttttagttcattatcatactggtttcctaatcctagaccatatataagtttgattgtttgagtttgctttttgtctttctggtttgtgttcagctttcagtaagaatgcatggtggcatgtttttatactgctggaattaacgagtcatgctctctcctgtaaactctttctcggtatttcttcagcagatagcttcttatctgctccatcttaccttttctctatccttcctctgcacccttcaaagataaggcatagttctataccatttttcccaatgcaatagtatgataatttgattttcctgtttggattatgtaatgtttacctgattattaagcaacacctatgtggttagtggatttagacttttatccttttatccccatccatataatttttttgtgtgcatgtgtgtgtgttgttgggggggggggggttctaggtatatggcgtgtcagtactattgtgcttccttggtaagtgtatggcctaagttgctttactgcatgatcggcattcaacctttcctttgtttatacatttgctgaactgtatcgttaaagactaacagattttccttcatttttgctagccaa

SEQ ID NO: 42166 - DNA, 620 bp, Manihot esculenta
  Intron number 2 from transcript cassava4.1_018965m (locus cassava4.1_018965m.g) derived from phytozome v7.0 (chr-ID scaffold01551; pos 569234 to 569853)
ttatcgaccagaaccgagtatgtattgctatacatttctgttaaacgaaagaggaatcatattctggacttcgagttgttttgatctaacagccaattaaacttaggtagatgatttaagtattttttttcttcaaattgttccgcagtctaggttagccatttgactttatgcagtgatacaataattatatgctaaccgaaagttgtttcggtgtttctgtagtatttccttgtgttatttggttgtgtagcaatatctgtgtgtttatctatttactatagaattttagcatctgcgcacttgtatttctcgagagaaactcgttgttgtgttgtttgtaaacgtaatgggggttggttgatggtaaaggcaggagactcacttccagcgtcctcagtctgaatatggagataggtcttagatttcgcctacttaacaacctgctaggattccaccttaaccacccttgatggtgtcagggtgcttcttaagtgtaatcctttttgtgtatatttcaatgcttagcaatagtaattctatttaggagttgctgaacatgaatggtggttttctaaagcttttgtttgtgtgttttttttcttgacaggctctagttg

SEQ ID NO: 42167 - DNA, 681 bp, Manihot esculenta
  Intron number 1 from transcript cassava4.1_000701m (locus cassava4.1_000701m.g) derived from phytozome v7.0 (chr-ID scaffold03614; pos 963354 to 964034 reverse strand)
caggtctgtttcagttgcttttgatttattttagtttttttttttaatttttcttgagtttatatatctatatcatatgcatactggttgttcttaagtgtcttattgttttgtgtagtagttataattcaaggacttgttaagtgtagaattcttcttatgaaactgttgtttttggtgggtctagagagttgtagaattcttcgtttgtgacgtttgttgtttctggtggatctagagagttgtagaattctttgtttgagacgtttgttattttggtgggtctagagagggcagagataatttcattctagatttttgttatgttcagatgactaatgcttgtctgtgcttaacattgcatggaattttaggtgaatgtgcacggatgtactttgatgaagttcatattggtttcagtgattagctgcaaaagagtgtttatttcgattgaaattgtgtgtgtcgtggtatttgcttaggtttttgttttctgttgatggtttgagcgactttttatagggtatggacgcagtgaatgcatgccttaaactagttcagtttcattctttttggtttttttgttattatcctcaaaaaaatctggaaattaatttcatgtaatgacagcgctgtgctctgacagttaagctatcacccaagtgttatagtctacacaat

SEQ ID NO: 42168 - DNA, 428 bp, Manihot esculenta
  Intron number 1 from transcript cassava4.1_017719m (locus cassava4.1_017707m.g) derived from phytozome v7.0 (chr-ID scaffold00341; pos 346363 to 346790 reverse strand)
ctgttgcctagtctcctagctaactcggtgctcaggtatgcgtttctatcctctacgctttctttactgcttatgaacctctgtttttcggccaagaaatctcagtgaaggaaattccttaaaccttaaaccttaaaccatccaaatcttaatgaataaaaaatttagatgaaaaagcctttgatttggtttcatttccctcttctcccaatcagacgactcctgtgatttaatctctaatcaattaactcccaactctagcatcggtcttctgtgatttctatctcctctatgaactgattttgtactcagattttagttttaatcaatcgaattcagattattttttgctcacataaatgactagattctcatcgtgttttgattgtctagggattgggctacacttatttcgaagtctatttcat

SEQ ID NO: 42169 - DNA, 1020 bp, Manihot esculenta
  Intron number 1 from transcript cassava4.1_030079m (locus cassava4.1_030079m.g) derived from phytozome v7.0 (chr-ID scaffold10173; pos 636843 to 637862 reverse strand)
ctcggtattgcttgtatatattcactggttctttagggaaattgggagttcatgtctttggtgtttggaaaatatcttggcttttgtttactggtgaatgacctgcggatctctgaccaaaaaaaaaaaaacagaatgacctgcggatgaattgaggaggctgcacatgattaattatgttgattgccaagcatgttactttgtgtatgctcatttattttcttgcctttgaattaaatatcatatgatgttagtgttgcactgatggatagaattttggagttgtaacaagaaaggctgagagttcttctaaggttctcgttgatccttggttgagtatagtaggatactgcaatggagattatggattcaagaaaacttttgaatgatgatgagttattcccatattcctaccatcacttgcttagggttaggagcaagactgctgcttgcatatgagcaaacagatcactataaccaatgaactctatgacaaggttattgacagaaaaggtggtggtgttgaaatgcttagcttgagtacgataaacttactgtaatttctaatagtccttttgcaaccaaggtgcttgatgagatgacttgtcactttctttgaggtgttagtttagttcccttgcatgtggttgctttcagagtttctggtttgatatttgggcaagataagtaatagttaaatgtcaaattaccattccaagtctcagctattggtgagttacttgtgagtaatgctgtactgctgttgattgtcatgtgatacagatgtattatgtaaagctacgcgtataaatagtgggtttagaatatgctgtttggtatttactttgattgattctagcctgagttacatgaatagatttattgcttcttgtgttttcatatttcaaagtttggttatctgctataaatttagattaaaaaatagagtattataacgctgaagtgcatttcgtgtgttggtgaatggtgatgataggagtaggagtacttggaagccaa

SEQ ID NO: 42170 - DNA, 325 bp, Manihot esculenta
  Intron number 2 from transcript cassava4.1_003372m (locus cassava4.1_003372m.g) derived from phytozome v7.0 (chr-ID scaffold08003; pos 88698 to 89022)
gtttatgtaagtaatcttctttgttaccaacagattgatgtttcttggaatcctttgataacctgagaatttattcagttcaaccattttatgtacaatcgattatgacacgactcgcgtggaatccaccatgttcaataattatgatagaactgttgtatatacatcggttgtattttaaagctttctccgaaaacgcatccttttcctgctttttcatgctttgattaatgggttcgaactcgtaacctgagtaccactgagatgttttacttgtactgaatttcaaacgttgcagatagtagctttgttccacctcttattt

SEQ ID NO: 42171 - DNA, 790 bp, Manihot esculenta
  Intron number 2 from transcript cassava4.1_015297m (locus cassava4.1_015297m.g) derived from phytozome v7.0 (chr-ID scaffold10015; pos 371254 to 372043 reverse strand)
tcggtttcggtcgcctatcctgacgcggagactaggtttttttttttttttttttgtgatttctaaagaatatttgattaagcattctcaaattttgaaggcttatataattaaccgctacttgtttgctgtttttgatgtttataactaataatcaatagacacagttttctttctggtcttgatctttttatggatatgaaacataataaatcttttcaaaagagttctaacttttttcttcttttttccagtaagccaatattttatttttcccataatttatgctcgaattccatttcctggttttggcattgaaatcatgacccaaacttgggttgaattgaggagaaattatacaatgcaatacaacggttatcattgattatggtgtaaccaatatggaacccaccataataaatgattagaatacaactttgttgacggttaacttgttaaacttaacttcttctgctagtcccttttgttatgaaaattttgagaaaagtaactttagtaagttagtaaaaagaagctttaatatacctcaaacccaaggttattatcctcaataaaagctgtacttgacttagtttgtttctccctttttgtagtgtttatatagatttctttatacaggtttgatcatccactgcatatttgattttaattgctaatatatggattcagttatcttcttctcgtggattttcaaatgcttttgttgttgaattagataatgtggtgttgtgcagttgtaaaggctgttgccacctcagattcagcctta

SEQ ID NO: 42172 - DNA, 782 bp, Manihot esculenta
  Intron number 1 from transcript cassava4.1_007361m (locus cassava4.1_005695m.g) derived from phytozome v7.0 (chr-ID scaffold06656; pos 960008 to 960789)
ctctcgtcggctttctctctccggttgcatctcaggtttttcaactaatagacttgacgttatgtatctcgtatacgcttagtgcttctgtaatgtatcgaattgctccttcttatttccttttattattttttcttttctgttattttactatccatgtgtgatctgcttcttctttgttatattttaataatcttcgttatcaatactctgctctattgctgtttttaacttctgtctttattttttatttgattcttggaataatttagggcaattagcttcctttgtgtctgtagtgcctggaaatttgagggaatatgattttttatggttatattaatcataattcgcttattaggagacattactagtgtatatttagatttagtttgtgtgcgtgcggcttacgtgtctgtttttgctcttacctgtttcattgttcattgggtgtctcttgcaatgccgaattatagtaacttgcttcttcagaattgttagtgtagatgtaattgatgaaactgtaatgcattttgtccattttaatgctttgacattaacccttcattggaatagtggaaaaatgtattcttcttaaatatgcaaaagattctattgccaatcattttattttatttttctgaataccaggtagtatgtggaaagaacatagtgagagtggttgtgtttgctgtgttatttggagattatgaagtttattgttattttttttttggataattgcaggccttaacaaaagggtatatatacaacttaaactt

SEQ ID NO: 42173 - DNA, 808 bp, Manihot esculenta
  Intron number 1 from transcript cassava4.1_001005m (locus cassava4.1_001005m.g) derived from phytozome v7.0 (chr-ID scaffold03049; pos 289673 to 290480)
ctccgcgtttctccgctgcaactagctcttcacaggtctctttaactcacaagcaggatgctgctctattaaatttttgtttccgcattcaatttgtttgcgtttttgtttgagctaattatgcatcatttccgttgttctttttttcgtttatgtggtgatattttgatccaattagtaatattttattggggaatccatttgtttttttttttttacatttattttaatttactattcctgtaaagagctttgctcttttgctgtttgatgaataatttgtgattcagttagtttaacttcatcttggtgcccatggtaactttacagtgtatatatttataagtatttatttgtttaatttattgaatgcactgtggaagttcagtgaattgcaaattcggagaatagaagcgaccaattgacattttattgcttttttttttgtgtgaatatattgtactttatttgtagttttagtttttgtcagtgtggacttctgctcatgatttatctgcgtataggaattaagattctgggacttgcattcagcttgataataaattaatttgatgtttcgtaaaattgcagctcgtctaaagtgttttttttaaagaaaaaaaaaactttcatccattgtgtttcttcaaatctaatctgcatggtaacttacctctcccaccctcaccatcatctgctctctcgtttatttatttactttacttttttttttttacgtttttatgcttcatgtcatgtgttcctaatcttattttctctgcaggctaatccatcagaattcactgag

SEQ ID NO: 42174 - DNA, 817 bp, Manihot esculenta
  Intron number 2 from transcript cassava4.1_028901m (locus cassava4.1_028901m.g) derived from phytozome v7.0 (chr-ID scaffold06656; pos 255377 to 256193)
ggaattgctgagacccatcacaggttatttctgttgctattcttatttatctcttatcatgcctgtttaatggtttatttattttacatttcaatgtatgttgataatttggaatcagttagtacatcacttgcgatgctttgcccttttagtgttttttgaggaaggtgttgttatttttatggcctttgtatttattttctctgatattaaaacaagatgaactaatgctcttttggttcctggacgtagaagcagtggtttggaaccagaacaaaaaccaaactggttcaagcaacactagaaaagactagtcaagactggattaacaaaaaccaacattgaatcagaccaaaattgtccagtttgattcctggcaaagcaagatttattaagaaaaaattgaaaaagaattttcatccattttatcttgtcaaagtggaactagaacaaaactagaattgggggaccttggagggccggttctgatcttgaactgaaccattggttcaggtttagcccggaactggcccttggtcaggtctacttggatggtaggagggaaagaaaagaaaatttctgtacacaatatgcagttaacactatcctttttttcctttatattatatctctcttctataaaccactagagagttggtcatactgaatagccttcttacttacattcatttcctatttctagtgttctcattttgaatatttctttgttcctgttcagttttaaatatgtgaaggtaacctttctagataaattgtggaaaatgttgcattatgcagggttcgcagggctcgaagt

SEQ ID NO: 42175 - DNA, 338 bp, Manihot esculenta
  Intron number 1 from transcript cassava4.1_017658m (locus cassava4.1_017658m.g) derived from phytozome v7.0 (chr-ID scaffold04151; pos 397773 to 398110)
aggtaaggaccgactcgccgtttatctttcgactggtattgactgagttctttctctctcctagggttttcatcagttctatttcttgttcctcattttactatactttattttgttaacttcttagagaattaaagataagatatacctgtagtgaaatacttagatatcagagtttgaattcttttgctcttgttttgcagttataattatttgaatttttttacttaattttgttttaactgtgattagatgctatatttctgataccctgttatttcttctccatttttttttctaaaagtttctggccttttgacattggcataggtattagc

SEQ ID NO: 42176 - DNA, 735 bp, Manihot esculenta
  Intron number 1 from transcript cassava4.1_003627m (locus cassava4.1_003633m.g) derived from phytozome v7.0 (chr-ID scaffold10173; pos 830726 to 831460)
aggccctcggtcgaaactggtacgtttccccccccccattttatctttttcttagtaattaatttctcttttttcccacttcccctatttcgttttctgagagaatggaggaaagtgttggtgatgtgagtggaattgtttgttggatggttaggtggaggctggctgaaaaccggtaattatttcgatttggtagagaaaaagaaaaattttatttgctttatatttgtaagttttattgctgagaaaatggaggaaaattgaactgggaattttgtggtagatgatgagcttgtaaagtggtttagattttttggttttgattattgtacttctggtgtaatttctggaattgggtttatgaaattgtcgattctggtcagccaacttgttattgtcttttctttcgtgaaggagaacaattgatgggcattctcgctctaagaagcgaaggtctagaacgataagtcgtttataacacgattgttaattcgcgattcagttggggttgtcggaaaaaacttatggttcccagacgacatgtcgttctcaactatatttgtacatcgtctgttatatgctttattctatactcttcgcatttcattatgcttagtattctggccattgtagtacttattttgagaattttgtgctgtagatgacatattaaccatatcgtgggaatttttatttccagtcggttcttacaatatagggatcctcgtgcgcgaa

SEQ ID NO: 42177 - DNA, 634 bp, Manihot esculenta
  Intron number 1 from transcript cassava4.1_007768m (locus cassava4.1_004325m.g) derived from phytozome v7.0 (chr-ID scaffold01551; pos 190104 to 190737 reverse strand)
caccagtgtggaggcaacgtcggcgactcctgcacgtaagtatatttattttagctctttttttttcccctccttgtgggagtttcgttcctgatcttcctgagaattatcattagatatttaaacttttagagaatttattaatttatcccaagaacaaatacttattttataaagacggataataatcttgtataaaaaaaattaaagtatttgtttttacaaattgattagaggtgttattatggcaattttaaaataagagctaattaataaatttcgtaaaaaattagggatttgattgtaattttccctactcatattttgaaatgggtagcatcgctgttctggacatgatgtacacgcgcctgtgttcgttcacacgtaatagtagtaatatgacatggagacgtagagaagcaagttagaattttcgtgtgcagctaaactgagtgttgcttattgaaagagtttttcgaatttcgtggtttgtttcctaggattggaacatgacccccgggaaaattattgtttctttcttcgcgtttgaggtttatactcgtcttcccgaataacaatgattaatttcttgcatgcagtataccattgcctaagtgggttggggaggaggtcg

SEQ ID NO: 42178 - DNA, 595 bp, Manihot esculenta
  Intron number 1 from transcript cassava4.1_004998m (locus cassava4.1_003166m.g) derived from phytozome v7.0 (chr-ID scaffold08910; pos 222250 to 222844)
gccgaggagtcgagacgaggtatgcatttttttttctctcttcagaattctggatttgttgcagagaaattgggagaaaaagaacaataaaaatgagaattttctggtggtttaaactgtatttttcaaatcaaactcccttagtttttgtgcaaaggcatgagcttgagttaaaaatgtagattttgttgatattttttagtatccctactaaaataaaacccattactaacgaaatattgtttaaattaattttcatttaatcaaattagttgtaatcattaaaagtaataaataattattagtattgtaacttgtaagtaatggctgaaataactatgatgtttgtatttaaaggcaaaaggttttatttattgcaactgcatgtacaaagttaaagttaaatgtaacgtatcaacagcagcaatctttggtcaaatgtttaacatttatttatcagccaccagctacctgcagcagcatcaaaaaggctcttagtttgttgcatttgctgattcaattagtaaaattgactccttagccctttttgtttttgctgagttttcttactatgacattctacttcattacaggt

SEQ ID NO: 42179 - DNA, 489 bp, Manihot esculenta
  Intron number 2 from transcript cassava4.1_000455m (locus cassava4.1_000455m.g) derived from phytozome v7.0 (chr-ID scaffold09761; pos 255772 to 256260)
gaccgccccaggtatatgattatggcctatgaactacgtgtgatagtgttagtagaaaaattatgctgattgatagattaactattcttactcttggtgtcatagaaatcaaaatgttggttatgatttgtagacaatgtcatagcaagtcatcaagtgttgattttgatgcaattgttgtgaactttacaatttctcttctttcttttgaagagtgttggggagggaggaaatggtgatggttgatttcatcgtttgttgtaagttgcctttttattttagaaaagaagtgttgtgtcgtggggtattttgatttgcatgattgcaattgttgataggctctagggaggagaaatgaaattgttggtctcttatcataatccacatatctaattttacataatattatattttatatttttttggatgatgccattttggtgcaacttttggtggcaggttggcaagtctctattgataaaaggtctt

SEQ ID NO: 42180 - DNA, 662 bp, Manihot esculenta
  Intron number 1 from transcript cassava4.1_002371m (locus cassava4.1_002371m.g) derived from phytozome v7.0 (chr-ID scaffold08910; pos 152858 to 153519)
cttttttcaaagacgttaagcgtctcgtaatcaaggtccctctctctatacgtatatgtatatgtatatatatatccatcgatcttcattttcttgtctttgcgtaaaatatgtgggtaattgaggatatttgttttgcgtatattggaattaagaaatgatgttacttggaggaagttggctacattttttaagactgcatgtcatctcagtgttccactttcctttcttgttcctacagctctccctaagcgagcgagatgtttctttcatttatttatttaccttaattggcatgattcattttgcaaagaaaataattcaaacgaatttttggaaaatcatgcaagatttgtaacttcttttaaattggaaaaaatttaaattaaaaagaagtgaattctttcattccaaacaagagcattcttagaaatgaaatcaattgaatggattcttgcaaaaaaaatttattccaaatggagggttattgaaatgggctttactgggatattggaatgtgaacttctttcggtgttgtatcattggaaattttgtaattgaatcaaattataaggaaatgcggattgtgaattttcaaggtatatttaaggagtttgtgctttggttattgaaggttgggactgctgttgtgactagaagtg

SEQ ID NO: 42181 - DNA, 559 bp, Manihot esculenta
  Intron number 1 from transcript cassava4.1_017998m (locus cassava4.1_017998m.g) derived from phytozome v7.0 (chr-ID scaffold04300; pos 119498 to 120056)
ttttgatatattgatacaaaccaacagagaaagcaagttctttcagtccttgtttttgattctcttcatctttagatctgtttaaactatttctgaagttttgtttcatttaggttttggatctaatgtttcatccttgtaatctagtactagtatgctatttgattctactttctttaacggaaacaatggttgattggtgaagcttttgcaattattgtcattatttttgaattttcatgattatgagttctttgattttggaaattttcaagtcatgtgagatcttttgttctgtgccttggaatgtatggatgggaagttgtttacatctctgaagtagctttccactaattgttgaaataattcattatgggttcagtaactctggatgaaggctgcactccaatcattcagaacttccagttttctccaaatgctttacctaactgtgatttatgaattcttgtatatttagtaatttgaatacagacattaacggttcctgttactgtgtgttccagattcactttgtccttcttattagtcgacaagggaa

SEQ ID NO: 42182 - DNA, 761 bp, Manihot esculenta
  Intron number 2 from transcript cassava4.1_031477m (locus cassava4.1_031477m.g) derived from phytozome v7.0 (chr-ID scaffold08316; pos 154927 to 155687 reverse strand)
tgaattcatcactagttgtgccaggaaaaccaaaggtatgaaaatcaaaggaatcagaaactcggttattagactatgcaatctatagaaacatgaattagctggatatgcttacaaattcaatggcatgggtgaattgatttctgttttcaacttcaacagaagctacgcaacttggttcaatggaaattttccatggaactaatttacaattgggaaggaagagaatgtacatttccaaaatttggttcatgaattggaaaggaagttttagtttttgtgctaagctaagagtaggaagcatttgggtgagtactggatgaagaaattaatttaggttttagcaactaattaagcagaagagaacatttaaatgtaatttattaacttgatgcaataaaatttagaggtttttgttttcttctatttttttttctttttggtattttctcctctgatattctcttattttctgagctcaacattgtacattggtgttaactttgcctagcattttcttcaaatttcatttcttcttagattagtcgaatgtaggcagccaataggagtaaggatcttatggtttgagttatactgatttcattatgcactctccattttattttttttcccagcgagcagcttaaattcttgaaatttatcttatgttcattactgtaattgagtatcgtttttcctatgctagtatcctggaaactattttctggtattttgatgaatcaggagatttggcacagcgc

SEQ ID NO: 42183 - DNA, 1002 bp, Manihot esculenta
  Intron number 3 from transcript cassava4.1_029957m (locus cassava4.1_029957m.g) derived from phytozome v7.0 (chr-ID scaffold06631; pos 583911 to 584912)
aaggtaagatgacgactgaatgttcatttgtgtctataactctaacagaacaattttcatttctggagctccttttttagtattttaggaatttgtgaaaaggaggaaccactagatatttacacagcttactttttactagtttgtgactagttaaatcactgttgattgaattttgctgggctgtctatggttgtgagcaaccatagtaatgtacccgttttgtataaatttctcttttattcaaatagattaaatcaattaaaaaaaatggagttctcataaagctaatccatggtcttcttaattgaagtgaaattaaccttttcagttgcactgtcagtgtgtgtgtatgtatatgtgtttattattactattgcaactataaaatggaaaccaatttactttcttagtgcaaagtaagtgagctagggtctagggtgactttcaaactgtaaaaggcacatatgttttggatactagttgtttatcatgtattatacacatgatacataaggatgtccttcaaaatttatacatttatttctataggttcaattaaccccgtgtgtgtgtgtgtgaactaagctgtcttttttttgttgagaaacttgagctgcatttcttcttgcagaaataaaattttttataaggtgatgctgcagttcaatgtgcttgatttgaagtggaacactgaatttttgtcattgtaatagcagatacatttttgcttgttgcaataaataattgaaaaggaatattcagatattacatctgtacattgctttagctggtaagaaatatctctttttttgttattttaatgccgtatagatacataacctgatgtgctcttgatcattatttgatctgcgccaattacagtactgctagctttattgtgcctgctatatttgatagtgtacctgtatccagttacaaagctgatgttacatgtctttggcaggtccaaatagcttcttgttcctcagagagataaag

SEQ ID NO: 42184 - DNA, 500 bp, Manihot esculenta
  Intron number 2 from transcript cassava4.1_012094m (locus cassava4.1_012094m.g) derived from phytozome v7.0 (chr-ID scaffold01127; pos 134328 to 134827 reverse strand)
gtccacggtatcctcggaaggttacattctatgatttaatgaaattttctttattattttcacttctttttttaggaatttgtttggttttgattttgattttgcttgatgatcgtcaagttatttgtttctattttggttcttttccttggttattttatttcgtaattttgcaagaattgagctgctttaatctgcaatagcttgttttaaattgtattctttcaaaaaaaatttcataaaatttgcaatttgtgaactcaacagtcaacacggctggtgttcgaatttttcgcttaatttgagcagtttcttgttttgttcaattacagataatgtgattttctaaatatcgacttggattgtcccatttgtcttgctctatctcagcagtcaagcatctttcacattgaggattctttagttattttatttgctcatttgtgcttatgcaattctctgcagtgcctcagattggaagtttgcagctgagcaatttg

SEQ ID NO: 42185 - DNA, 256 bp, Manihot esculenta
  Intron number 1 from transcript cassava4.1_012094m (locus cassava4.1_012094m.g) derived from phytozome v7.0 (chr-ID scaffold01127; pos 134975 to 135230 reverse strand)
cctttcgctccggttttagcttccttcgctctcaggcattttacctttctcttcttcttctctactcccaatcaaccggactctcatgcttcctgttttctcttgctttctctccatgtcaatttaatattcctcaggagttttcagcaaagcctagcatttctcattttattccagttttttttatattaatttttttttcaaattcaaatgtttattagctgacctgagagagataaagttggaattggatcaa

SEQ ID NO: 42186 - DNA, 900 bp, Manihot esculenta
  Intron number 1 from transcript cassava4.1_017372m (locus cassava4.1_017170m.g) derived from phytozome v7.0 (chr-ID scaffold06446; pos 148667 to 149566 reverse strand)
caggtcattaatttattcataattatcttttttttttaattttttttaacgaaaaatatttttcttataaatatttttcttataagttactttatcaattttaagaatgttattaatattattattatataaatttattaatattttttaaattataattaaaaattaaaaaataaaaaaatttcttaaaaaacatttttcataaaaattacttttaaaatacaattcttttcagcttagtcttcgttatttgagtttgcatttattttgtgaaattaaactatacataaatctacgacacttttaaagaaaaatattttttcaaaaatacatttttaattataatattaaaatataaaaaaattaaattcatcttaaactgactgttaataaaatatttaaagtttagaaaatatttcagttcaaaaaaaaaagtttagaaaatatttttttaaagtagaagtcatttcccttcttttgaaactggtaagtaatttttttaaaaactaatttcattttttttcatttaaaaaatatttttattaataattttataaatatcttaaatatcataatgtgaaaaatattttttaaaaatatatatatttttaaacaaacaagcctaactaaaaaataataaattaattttataaatatctccacatttaaaatttagctaaagcaagttaagtgataattaatcattgtatagtaatctataaaataaacattaaactataaaaaaataattatttaaaatgtagttataaatattttcaaaatttactgcttaactttaaaaaaaaaaaaaaaaaaactaaatttgaattttttttgttgtttataaaatattttttaaaaaaattattgataaattactgtaaaaatgggattgcaggt

SEQ ID NO: 42187 - DNA, 956 bp, Manihot esculenta
  Intron number 1 from transcript cassava4.1_004676m (locus cassava4.1_004676m.g) derived from phytozome v7.0 (chr-ID scaffold06656; pos 585419 to 586374)
caagcgtgggtataaatctagcacctttgccgtggttcttctttctttcactctcccttcgattccacagttacccatcttcaagttttctatctctgcggctaaattttgtgcctttctgtatttctcgtcgtgtatgtatatctatttgtgtggggtgtgggttggtgcttgtggcagtgtgtagcagagtgtgtgccaaaaaagcacagagggtttcgaacagaacactgagaacagagaccaaaaattcaacgaagttttgtttgagtaggaaaagggcttgaaagaatagcagcagtaacaaaaaagtagaaaagaatctgaaatgggtatctatctcttgctacttttagctgggttttctctccctgcttctcaactctgactagggttttggatgggctatttgtagtcctgaaatcaatgttcttttgtttgtttatttgactgcttctactggaaccttttgcagctttgtttgaactttatctttctgagtatcttttgtcttgaaggtgcttgttttcttgtaattttggtcccttcaatttcacttcttgtaggctgatagcaattcaatttctgtgatctttgaaacatattctggaacctggggattttagttacagcattattgggtttagataatttctttataatttgatgggaattgagcttttgaaggactatcttgacctcactgtgaatcgttaagtttcttgtatcctaagttcacactttgtggtatcagttgaagcttgtttatgaagttgtttttataataatttttagataagctcttcttttgatttatttttccttttgtacttttcccttctttgatcatttttagcaattaggatatcttgtgggtgattaattttgaaatttacttttggttgtttcttgaatttatagactgttactggtagctcaaacacaattttgaagga

SEQ ID NO: 42188 - DNA, 721 bp, Manihot esculenta
  Intron number 2 from transcript cassava4.1_003106m (locus cassava4.1_003106m.g) derived from phytozome v7.0 (chr-ID scaffold07012; pos 687422 to 688142)
agaagtaagtatagtctctgtctccttaaagcactgtttaatggattcaggttcagggagattcgtactcattaatggggtttctttttaattcaaaagatttttctaatgagtgggatctgcatatgctcttgtgaaaatacaaggtgactcacgggtgtaacagagtgagcgtttcctttcctttcctttccttctctcccctttgtgtgctctctcgaggggtctttgcgtgcattttccccctccctctcctctttttcctctcttttatatgtgctttatttcacgaagaacctgattctgtaaacacgagaacgaattacttttccgctctctttttctctttttatttttctttcactcaatctccttggttttctttttgagtttttgtctctgctgtattccttcacatttacctgatcacctctgctggaaagaacagagagagagagagagaggaggagagagagagagagagagactagcagagagatatgagccaactaataactagattttctcgttggaacaaaaacccgaacacctcttttttggttttctccacccttgcaatttctctgattactgttaactaaataaaagaaaactcttctctccttttgttgctgttgggtttatcttcatcaatccataagaccggtttctctaactttttctctttccttctgttgaagaagcataacttggaagagaa

SEQ ID NO: 42189 - DNA, 744 bp, Manihot esculenta
  Intron number 5 from transcript cassava4.1_003106m (locus cassava4.1_003106m.g) derived from phytozome v7.0 (chr-ID scaffold07012; pos 688882 to 689625)
tttctgttccgcggaagctacggtcaggtgtggttagttagaaggaaggaacacttgtcttatttctttttattattattctcttggaaagagaaaaagaagggttattaaaaattgatgttaatttatttaatatatttaatcataaaattctaagactctacgagtactgaatagaaatttaaactatttttttcaaatgcatttaatatattttttttcctaataagaactattgaaagcacactctaaggtgggatttttttttttattaattattagaaggcctctggctgccaaatggaggtttacttggtggtcggcctttagggaaagtttttgctgctgtttttttttaaattttttggggggttttttaatctgtgtaaattttgattagaactgaagcaaaactgaagcttttttactttccctttcttttcaaggacgcaagattctctctgttctcttttctaatcttatttgttgtgtttatgatgggactttcacggtgcattgattcttttcaataaaccattttgtatctgaaatatttgctttgttcttttctactcttaaaacttattttcacatgggaggtactttaagctttttacgtatctgaaaaaaactctttttttttctattttttccttgttaagaaaaaagaaaaatttatgtcagtgcttaataattttttttgggaattaatgctttggaaatttggacattttaattacagcc

SEQ ID NO: 42190 - DNA, 504 bp, Manihot esculenta
  Intron number 1 from transcript cassava4.1_003822m (locus cassava4.1_003822m.g) derived from phytozome v7.0 (chr-ID scaffold11236; pos 214577 to 215080 reverse strand)
ctccaaaattgatttccaggaatttcaattctcaggtattctctctaaaccaagaaccaaaggtaatgaatctttcgtgaattaaccttgtatctttcttttctttttcttctttatgaattgtttcatgaatgttactaacatgtatactttcttggtcttggtagttgaattctggattaattcaatgaattcttatctaacggccaaacaagtgatgggtcttgtcctgtgactgtttgatacaattctcacgtgaaaaaggaagttgattttagttcaagtgttagtttaacctccagaaatcacaaagataaacacaaatcaaatttattgttgaaaatttatctgattcgtgggcttttcactgcttaccatggagattgtagatatgaatgcaatagttgttatttgcatctgtcttttaaaccgagtcccttctttcaatctctttcttgttgccaaaattaattttcctatgcttcaatttcacagaattttcag

SEQ ID NO: 42191 - DNA, 858 bp, Manihot esculenta
  Intron number 1 from transcript cassava4.1_002432m (locus cassava4.1_002432m.g) derived from phytozome v7.0 (chr-ID scaffold03049; pos 614795 to 615652)
ccacacttctctacagaagtactatttactgttcttaaccaatacttatgtttacttctcatttatgcgaattctgtttggtttccgagaaaacgaggggaaggaacggagcaaaaatttctaagttgattttgtttatttgtttaaaacgtaaatcattgaatccttaacttgtttttctttggatgattctgctttctcaaacggaggtttatattatgtttaaagtatctcaagtattgtccgttatttttccagtttcacttgatcgcagtagaataggcttttgcgcaaaattttgatacgtaatttgtatggtgattgcaaattttgattatgtttgaaagtattatcatggttaattttgtgcattttttattttacactatgacatgttatctagaattgggtttatcaagtcacatgcgatgtccgtgtgttgctagtacgcgcattgttgagaagattggtttaaaaaatgtcagttataattgtcgttggtgaaattactagaatctacaagcacatctgcttatatgcagtcctgctggatttgcaattaggtgaattaagcctacggctaatggttgctacccaaagagaaaaatgaggggaggaaggaaagaaagatggaacttgttgactctaggaagcaaaagaagggacattttcatagaagctagcaagcagatattcatataacttcttagctaatacatcaaagtgtatacaataaatcctgttgaataatgaccgtgttaatgcatactctgtttcagtttgttgggtcatattatgattaattttttctttgcttacaataaaaaaattgagttttctttgcagctttatatcagg

SEQ ID NO: 42192 - DNA, 998 bp, Manihot esculenta
  Intron number 3 from transcript cassava4.1_007475m (locus cassava4.1_003415m.g) derived from phytozome v7.0 (chr-ID scaffold09151; pos 518125 to 519122 reverse strand)
tgagcttggataaggtatcattttatatacttttggttaattttgggtttacagtaaattttaaatgcttgaggaatatttcaatgagccattgggggcagtaacacagtgctcgaacgcctgccttgtagtgcaggaggtcaagggcagcaaccttcaattcttttgagaaatctcttaagtagtaaaaagaaaaggaaagagtattttgatgatctttgaatttgattctcttggtgtaacgaggatttattaacagaatgtacatagtggggctgagagtgtcttattatgtacaatgatcaatcatctaagtttcctatatcatcttactttgcttaagattcaagtcaatttatttgtcttttgtcagtaatacatgtaagtgttactggttaatgcttagaaatatgaaaatcctgggaagaatcatgctaattgtgcaagtagcggttaatgatccccctctcagctgtcgtttaatttgcatttttttggttgggaagtcttctcctcctttgcaatatgaaaactccagcaagtgatattaatgttattgcagatgctaggctgtgagacatcattatcttcattgacaatgaaagaattgttggtttaaagaccataatgcattatacctaagatgtgaaagaattctggtttaaggatggacaaaaaatctgtctaatattcacattcaacatatttaaaaatatatatttgcagattgatgagcctgctgacagcatgaattcacattttaaagttgatttgtattgtttcagtactactaagagtagtttttttttttcctgcaattaaacttctgtgagtaaaatttttaaattttcacctatagttttgggtgtgtgtggaggctggatggtttccccttcttagttattcatatttttgcgataaatttgttatttattttccagggagtatggcttgattggtgtatatccttttcttgacagggagcgaccgaatttagt

SEQ ID NO: 42193 - DNA, 700 bp, Manihot esculenta
  Intron number 1 from transcript cassava4.1_003176m (locus cassava4.1_003135m.g) derived from phytozome v7.0 (chr-ID scaffold06656; pos 1118613 to 1119312 reverse strand)
tggaacaagctcctagccaacaacattcctcaaaggttgtatcttcttaattgttctcctatgaagttccaatttgtttcacttcgctgattgtttggctgttgagaaaaaaattgaaggaaagttgaatttgttaggttttagtcgactgaattctatttctttatttgcctcgctggcgtaatttgaaccttttttttattgcaaatgtcaatgttcgtttcttttatgaattttctgaccttgcaactgatgattctctttttttacttcataaacatatagacacacataaaattagcgagtccagagctgagagctgaattctggctccattttttgtttgaagtttcatgcttattatgtattatcgactagtgtcctcggatcagaaattttgaataacttctaaggttgtggtgttcaaatgctttaaatgataattagccgttactgtttataaaaaattttgcaattggccacatttgtttatttggtttattaattttttttttattttgacttgttctctatctgtaaatgattaatttaatcgcttatggttcaatgtagttgaactatttaaaatgcaaatgttcatgggtcttttgtgatcttgtttgtgcctagacaatgctttttctttctctcttcctgttattccccttttaatgtgcagacgtgactttgactctttcag

SEQ ID NO: 42194 - DNA, 975 bp, Manihot esculenta
  Intron number 1 from transcript cassava4.1_010888m (locus cassava4.1_010888m.g) derived from phytozome v7.0 (chr-ID scaffold06550; pos 663580 to 664554 reverse strand)
agcagagcccttcctctcgcttttgggactgcaaggttgtgtgatttcctatttcctttgattatattatttttcctgtctggttgcggagcaaatgcaagtgtggatgtgaaaatagaagtcgaattatgctttttggatttttgatcaagcaataattgaacttaatagagttaaatagttggattaggcttgttgagtagatgctataaatagtttttcttattacaatagtataatcatcttttattcattttataatgagcatttttgtatactataaaaacggtagaggagggaattttggcttgttgattcttacatgccgagcgttggaagtgttaatataaaggggttatcattatattcccattttttaaaatgttaggaatactggtttctaggacttagatgctagcagatatactccgactattccttcaattcagttttttgcctaatgaataatgatgctaattaatttgcacactgagtaatcagagttgcacaattatctttgaccagaaaggtggaaactgtctctttgtcctctgtctgctgtatgcttctgtgaaactaaactataatccgcacttcatttcaaatgtgaaataagtaagtgttgcctattccaactgagctgtgagatgtgagtttactgttctgctgttagttattcagctgggccaatgaaaaaagtgctagtagtgcatgttatgtgtaagcttacaattccactattagctggttatttggctggccttgatctgaatggcctatccatctcagtgcctggacttttatcccaccctgtttttctttcaacctccattgctttgctttgagattgatggtaaattgtaggagacgctatttgtgatgagagtgagttgattgattttatcttggaattcatgaagatttcatgtgacttatgcaggcagttttggaagagacacacacaagaactgttcg

SEQ ID NO: 42195 - DNA, 706 bp, Manihot esculenta
  Intron number 1 from transcript cassava4.1_015221m (locus cassava4.1_011678m.g) derived from phytozome v7.0 (chr-ID scaffold10173; pos 579932 to 580637)
aaggagcttataaccaatctcacgttgctcttcaggttataacactaacatatatatttctttaatccctttccttacatttgcatgcatttttcttcagaaactgctcgatcgttagaaatattgaaatttacctttttttaaaaaaaaattgcatttttttagtttagattcttgtaaattattaaagctggtgatatattgaactagtatccagtagcggaggaaacttcgctgctggtgctgcgaggccaaggccaaaaattttcaaagtagaattgaccgggaaccaattaatgatgtgatttgggacatccatccaatgggtgtatgccacttcatcatttcgtttattttttgttattccattacagagtataattccacttgggttccaatataccaatcttttgaatttagatgcctttggcctttcatggaggaatatgagatcatagcctcgtaggaaagcatctccttctgtcgcccaaaacaataatggttatggtgttagttacctttacgtataaaataatatatccttgattttcacttagatccaatttgccatatatttaaagaatatgatttctgcatttaaatattaaacaggatttaatttttgtagttttaaatttattttttatatatatatataattttgttgaattatctaatctattgggaattatactgatgtttgcag

SEQ ID NO: 42196 - DNA, 461 bp, Manihot esculenta
  Intron number 2 from transcript cassava4.1_001598m (locus cassava4.1_001595m.g) derived from phytozome v7.0 (chr-ID scaffold06708; pos 362077 to 362537 reverse strand)
tcctttttctaccaagaatctcaatagataagagggtatgtttaacaatttttgcatggactattcagtcaaggatttctcctaccatatatagttccagttattgttcaaatatatgtggagtcgaagcatgaatgtcaattggcttgtttgacttttgttggcgatgatgttagagaaacaaatatatatggttaaaatagttcagaaacaagtatctaagtcgcagatcaaacatgaacctaattcttatatcaatgcttctttcctttataaatatcacaaagcactggtgaaaattttaacttgtcatacaggagcattcagttggcttatcttcttaatctgcaaaatttttatgaaaactttaatcttcaactatcttatttacaaataaacttttacatgatgcatgatcattgctaggtgaagcaaggtcttgcaatctcagcagctgtggc

SEQ ID NO: 42197 - DNA, 709 bp, Manihot esculenta
  Intron number 1 from transcript cassava4.1_001598m (locus cassava4.1_001595m.g) derived from phytozome v7.0 (chr-ID scaffold06708; pos 362585 to 363293 reverse strand)
ctttatcaccttctttagccaagaactccaaaagggtaactttattttttcacattttaaaataaatttgatttttttgaggtttttctttctgttattccaagtgggtaattttattttttcacattgtaatggcctgctggttttcttattcttgttctggtcggtttgctgcacatcctattctctagaggttgtttctcaatttgcatttgctcagttagtttgcttttatgcagtgatgtgtattttgattgattgattgcttgcttgattacaaggaaggattcttctggtttcaaaatgaagtttatttctttgcctactgctctatattaactaaaatcgtaactctgatgataaatcagagcatgattagctcaaagaaacaaataattaatgtgtacgtgcatgattgttcatagcattattagttgagaggactcatcaatttgaccagcctatttgaacgaatctctgtttcatttgtaaagttcagtgtgtcccagtgtatatatagataaaaagtgcatggcaactgatgaaacaccattcttgtgattatattcaggatgttttcaagtctccggagtatgatgtacttgcaagttgttattttctggatgtttcttgcatcaaatactgcttgatttcttgtctggtatctttgacaggctgtggaaagaaactgtcaaattgtcaaacaaaa

SEQ ID NO: 42198 - DNA, 607 bp, Manihot esculenta
  Intron number 1 from transcript cassava4.1_004019m (locus cassava4.1_004019m.g) derived from phytozome v7.0 (chr-ID scaffold05162; pos 279883 to 280489 reverse strand)
agattttctcctctaatttaacctcggatcgactggtactttctcttctttcctgtcacttcatatttttctttgatttatgtatattccattcttttccatttttgtttttattaatctttgcttagtcccgtttgttgaccattgaggaaggaaattagggtttttgcagctgcggttttaattctttcaattgtttgaaaaattcgtagcattacactgggcattaattttttgttcataggttcaatcaattatagtcccactagaatttccattttttaatggggaattgaattatgatggttattgaactgggttttaattagttatataaagttagaattgttcctttttcctcataaaagggtatttttaatgaatgattttattgaagaaatgtttttcattttttgtgctactttggtccagcttttctattcaaacttatcccagaattaaggggataaaagctcttggcaagtatttgcaattggagcctatgaacaagaagtttatgagtgaagatatttactttatccatttgttgaataatactatctaaattgttctttggcagagaatacctgtaggattcaccaaacat

SEQ ID NO: 42199 - DNA, 514 bp, Manihot esculenta
  Intron number 3 from transcript cassava4.1_023570m (locus cassava4.1_023570m.g) derived from phytozome v7.0 (chr-ID scaffold08232; pos 79266 to 79779)
aggaggaaagaacgcggaacaagaaggtttgcttttctgttttaatgccctgcatcacctgttactaataacataaaacgaaaataggcaatatataataaattgtagtaaccggttactgaatttaatagtaatgatatatttcatttgaggccttgacttgaggccttgaccataatgattggtaaaagcatacaccatcttacaactgcttgatgctgtcatgttgacctattgcattaatatctttaactgagttggtgaaagtgtctaatcttgcttcttgaattctgaaagagttcccaattctttgttatggacagttgtcctactttgtttatcatctctaatttcaaggtttggttttgaaggaattatatatagactaaaaatctaaaggcatgctgttttttgaggatagtgaattctttgaactcagcactttgtttttggaattgtctgaattcttcattcgacagatccaagcttcaattgcccagatatttcaacgaca

SEQ ID NO: 42200 - DNA, 696 bp, Manihot esculenta
  Intron number 2 from transcript cassava4.1_008590m (locus cassava4.1_008601m.g) derived from phytozome v7.0 (chr-ID scaffold07665; pos 30863 to 31558 reverse strand)
caacttgaaggtaagtttgtccgcttcatcctatcgctattttgaatagcgactgaatattgacgtgtcgtacacggccaaattcacccctatttggaaaataagttttcatgcttcccttttccgcaaatatttctcaaaaataatctcttatgggaaaaaaggctcattttattcggttgattactataaatcaatgagttgttcaattgaggaaaaaaatgattataggtctgaaaagagtagtggtttcctcataaagagctttcttgataataacatgtgagagtgttttcttcagaatatgttgtacatagaagtgattggatttgtggtgttcatttctctttttggagctactgttgtttatgttctgtttgcctttttcttctttagggatattaccagtgagttgatagtatttttgggtcatgtcagatccaatttcttaagatatgtgctgatgaggatctcatttttgttattttctcatgttaggcttgtgcgaggtagaaataatatcatagttattcagattattgtcttttattacccaagggcttagctgtatctttttgtttgtaatattagagggtaatatattgcaaaactacattctgaatgatatcctgaaagaacccttatttgttttggttttcaggttttctgaggagtacatttagtcttagtttctga

SEQ ID NO: 42201 - DNA, 644 bp, Manihot esculenta
  Intron number 1 from transcript cassava4.1_002018m (locus cassava4.1_002018m.g) derived from phytozome v7.0 (chr-ID scaffold09709; pos 53406 to 54049)
caccgtctgtccagtttcaggcctttataggtcaggtaagcttttctttctaattagaagttttctttgtgattagctccacaccagtttgttacaatagctgggtctttaactcatgttgtgatttgtttgatatctgttgaaatatttttggccattgaatattattggttaaatttttgaatctcctgtttttttgttggttaatttaattgaatattcttgatttttggttcttgttaatttgcaactttgatatggaaatatttgttttgtagattgtctctgtataatataaccaaacattctgtttggtttggttcttagtaattttaaagttttttcacattcagtttttttttaactcagtgattgcacaggcctagataggattttgaatatgagcttgttcttccacatttttgtttggtctaacttcaagattatacttaatttgatattttgctagctttgtaacccgaatatatatatatatatatatttttaatgtacttgtgtgaatataaattgtgtttgtttctggatgatttggttctatacctgtgttgaaatcctattcctgattgtttattatatgtttagctttgattgtgcaggacattttttacactttgaaaataatt

SEQ ID NO: 42202 - DNA, 708 bp, Manihot esculenta
  Intron number 1 from transcript cassava4.1_024173m (locus cassava4.1_024173m.g) derived from phytozome v7.0 (chr-ID scaffold03614; pos 2807837 to 2808544 reverse strand)
ccttcctccgctgatccgcccaagcctccggccaagtaagtctcatttaatttttctctttggttcttttgctttcccacgctttaccttgctgttgtttcattttctgctatatcaatcaatacagtcgtcgtgttgaacatatatcttggatttggaatttgattagcaactgtaaattaaccagctgcagaagatttcagtgtaactgagaaattcaactgttgtggagtttaacttctgtttttttttaaaaaaaaaaaattgttccccatgaatttttcttcttttctaatgattattatagtaattaattaatattagtgggtgaactgcagtattgatttatttgcttgaaatgtggattattttttatggcaatggatatggttgtcgggagcagagaaaaagaacaaaacataaggaatctttacttttctcgacagccaaacaattcaggataaaggaaaagcggatagatattagataatctacagctgagaacccaagcctacctctgaatagaataattcagtcgtacgaattcaccattttttttttataaattttttaaaaatcagctgctctttgttgaccattaatcacaaggattaaaaatttacaatactgcacgcaagagctctaacatagaaaatggatgggacaatttcagggcacaagttgtgggttggccaccaattcgatcaa

SEQ ID NO: 42203 - DNA, 633 bp, Manihot esculenta
  Intron number 4 from transcript cassava4.1_016690m (locus cassava4.1_016690m.g) derived from phytozome v7.0 (chr-ID scaffold09761; pos 537145 to 537777 reverse strand)
tttaaagcgcaggaagcctgctgctgttgaagaaggttggtgatgtattgccttcgttgttattatatgatatggtcacatctttttccctcatttgaacatgaagaatatgtagcatgtctgatcactgaagattttcttggcaaattttgcaaagaggaattagctggaaaggaacaatatcctttagacatagaggggaagaatttgctatcgtgaaagagctagaaactagccttatggttcttcttaatggaagaaaatctaagggtgagggcaatgtgggtttctcaaatatgcatggatagggttttgtatatgcataagggtgacaaaatatcaaggtgagtgttggctgccaaataagctcttgctgcatagatctgagaatatattttacttttatatgaccaatctatgtagataggaatgttactttgcgcagtggtatttagcacaggctattcaagagaacaacaaaatttttagtttgttgcaatttctttgaattgctgagttttctaaatggtgcattcaaacaatatacatctgaatttcagccgtggactgatctgatttaactccaattattttgtttgaagatgtgctaatcccttgcttttatggcaggtc

SEQ ID NO: 42204 - DNA, 522 bp, Manihot esculenta
  Intron number 1 from transcript cassava4.1_010720m (locus cassava4.1_010720m.g) derived from phytozome v7.0 (chr-ID scaffold06914; pos 194821 to 195342 reverse strand)
aagggaaggctgcattgcccttgaagagagacagggtaagattaagattttcgattcttgtttttgtagaatttcgatttatggtgatttttgttatcaggttactgtatttgattttttcccttttggagtaatggtttgattagtgaattatgattttgttatcaaataggaggctatacacttgattatcagtgtattgtttggtttcatgtgcttagttgatttacctggtttatctacttccctcattctgttaatacacttgatttacctaaatgattttattttcattttccaaatattttttgttggggcttgtttgttttggtgatttggtggattagagggagaggatggtgattttgttcgtcagttttagctattggttgttaaaactatcttcttagtgttgcccttttcaattgttgaagattattaaacactttcactattcatcttcttacccttttgttggaaatgccagacgagatctaagagattcttggaaattcaaaaatt

SEQ ID NO: 42205 - DNA, 391 bp, Manihot esculenta
  Intron number 1 from transcript cassava4.1_005758m (locus cassava4.1_005537m.g) derived from phytozome v7.0 (chr-ID scaffold03614; pos 124556 to 124946 reverse strand)
cctgacaagcccctccaaggaaaatccttcatcaggtattttcttccttttctccctctccccttttgcttattaatttttttttcctttaaacaatatttgacattaataactgtttccttctctgatggtctttttattgattatgatgcttagaaaattgcttcctttttgttctttggttctattgatatgttaattgttattttaaattgtgataaggtagatcatcatgttaaatgtcgcttgaattttaggaattccttttgaaaaaaaaaacatttgaattttacgtatggttccaaaaaaattgaagtagtattgctgagaactgaagatttttcttcccttcccttttaaatgttgaaatttattgatggcaggtttgaag

SEQ ID NO: 42206 - DNA, 602 bp, Manihot esculenta
  Intron number 1 from transcript cassava4.1_005893m (locus cassava4.1_005893m.g) derived from phytozome v7.0 (chr-ID scaffold03614; pos 2057034 to 2057635)
ttggatactaaggtaactctaccctttctcctccctgtaattttttttaaaattatgtattagttaaaattccatacaaggtatgcaatggctctttttgttattgcttgctttcttgatcttttcttttagggattaatatccctctcttgggtggatttgtctgtttgtttgtgtctgaaaatccaccatgcttgtggttgatcaaacatattaggaagagtttattgatgaagctatttgctgcttttaactcgaatcaatcagatggcatattttgccttaacgctaaagcaatgtacttgtttgatcaaatgtttcaattgctttccatccaaaattccctatttgtctatctgtatgaatttggtctgatagcttgttggaatcctattcacaaagcattattcttggtataaacctaatttaattgatgtatggaatgcttgttaattgccttttttggattccaaaacttcaatattctgtgcgtttatgctctaaattttgattagctttcctaagaatcttgattgatgatgctgtattaattaaattggaaatattgcaggggccagaaattcgaacagggttcttgaagg

SEQ ID NO: 42207 - DNA, 489 bp, Manihot esculenta
  Intron number 1 from transcript cassava4.1_020536m (locus cassava4.1_020536m.g) derived from phytozome v7.0 (chr-ID scaffold11239; pos 34558 to 35046 reverse strand)
aggtatttggttctacccttaactttcttaggaaattgaatcatatagatgggatttaattattgtaaatggatttaggttttggttcctcatttaaaattttttggttgaatgaaagtagtgattttgtttttgttgtttccttcgctgataagaagccattgctttgttagaaatataaaagtaatgcctcaatttaaaaaaaaagagttgtttgatctaatccctgttctttgtttttgatatggcttataatttttgggaaaactcaccctgacatcaattttgaaaacaaacatttaagctgttaatttctcttgcctcttctcgctaatccatgcttcgttttgtttatcttctcaaaaaatccacacttttagcattgattcgttttgtcacaaaaaaaaaaggataaataatctgaacgtagatgacagactgaacaaaaattgatttgaactttattttgactagggctcaacttctgta

SEQ ID NO: 42208 - DNA, 392 bp, Manihot esculenta
  Intron number 1 from transcript cassava4.1_011873m (locus cassava4.1_011873m.g) derived from phytozome v7.0 (chr-ID scaffold09565; pos 580600 to 580991 reverse strand)
ttgaagctaatttcggtgagttttttctccgttcctttggtgatttttgcttaaaagggatgatttgctttcttttttgaattttttttgggaattttgagggagctgagaaaaattagaagtctacgcaattaagcttaatatttgtaattgggtaagttgaagcttggggttttattgcttccaaagattatttggacttgtatgtacttaaatacgatctctttctttgtattgttactgttagagggttcatgttgaaataaggaacgaacttgtgtgaagaatgaaatccataatttttttcctgtacatatgtgtcatggtaatgtatgttctgactcctgatgttgctgatgattttcagctccagcagttaaaagctcaggtga

SEQ ID NO: 42209 - DNA, 832 bp, Manihot esculenta
  Intron number 1 from transcript cassava4.1_017279m (locus cassava4.1_017279m.g) derived from phytozome v7.0 (chr-ID scaffold00080; pos 161779 to 162610 reverse strand)
aggtagatctcgtatttgctattggctcttctcaggcaagtgttttctctttcccgatcgcaattttctttctttttcttcagtttcttttcaaatctcagatttcatctctgtttcgatctgatttccttctatgtacgcggaattctatcttgcatttttttgtcattcaatttgtttgttgtttgtgttctcattacttctgatcttaagatttcgagcgggattaagttttctgatgtctagatcttgataactgtttagagttttgattgttaccgtgtggatctctgtgttcctcgctttttcatttgtttgaatgatcgaaattattcgatgatgccttcgatttgaacatctatggatatattatatgcggttaggtgcttgatctacctataattgaagcctgatgcgagttagatgctgtcattctagaaaacagaaaaattaattgactcttttttgtagccttgtttgcacttccttgatttcaaataggatgcttcagattcaatcgaattataaccgctagtattaattctttgtggagaaaaattatgctgttgatatgatttgctgatgtaaaacgtggttcgttctcttctcctattctcttctatgacggtgctggctgtgcaattcggaatctataatgcttgaatgtttatcttaatcaaatttattaactaaaagcatatgcctgatgcactctgtgtcttcttagtgacatttagttttccctgggaatcttatcgttcttggggtgatgtggcgtagacctttaatgttttgacctttgttgattgtttggatcagcagacgtgatagg

SEQ ID NO: 42210 - DNA, 609 bp, Manihot esculenta
  Intron number 2 from transcript cassava4.1_013195m (locus cassava4.1_012989m.g) derived from phytozome v7.0 (chr-ID scaffold03827; pos 26857 to 27465)
ctgctgggagagattgtttactctctatccattctgtcattaatagaaattcttccttacaatgatctctcttttttctcttaatctctttaaccatacaaattcctctctctatcatgttcccatattcacaattgtgggcttttgttgagacaaatttgatgtttatcttccaaaataatttgcaggtttctcggtagctataaatcggtagttttttcatcaattttcaccttctagttgtgaatttgagtggtatttttgctggtttaattttgtgttgtcaaggttaagagggtgtcggtatcatgaatcaggataatttgttagacaagttgtggcatgagtttcattgcttgatttgttttttactgaaaaaaaaaatagtgcttttataggtttttaggtatgtaaaactaataatgtgaaattttcaaaaacttagcagttacaatagaaataagtgtaagatggaattgtatcaacaagtattttcctgacatataattaaggtaaaatgaaaatgtaatttagccttatttaaataatctcctcaaactaatagtttcttcaggtttttggattggaggatttgggcttggagagagc

SEQ ID NO: 42211 - DNA, 670 bp, Manihot esculenta
  Intron number 4 from transcript cassava4.1_005331m (locus cassava4.1_005331m.g) derived from phytozome v7.0 (chr-ID scaffold04175; pos 433318 to 433987 reverse strand)
attgtataaactagccggcataaacccgtttgcaggtacttctattgcttagctattatagatttgatacaatctctgaacgataattgtaagtttttgggatttcatctatgctttggttgattttctttgattctggataaccattgatatgtttacaaatactgatagattgctgaaaacatcaagtatttctaaacatcgtattggtatctgtcatgattcctctcttctgtgaagttaagcaaccttctatgcacaaatcatcagcttcaggttattggtttagttgtacaatgaaagtttctaagacttggttcaaagtttctaaacttgagactttcgcttgtgcctgcttacaagatactattgtttctttccagggctttatctttgaaccttttccaatgtgtttgtggcatctgattgtaatgttcttttgggacaattataaaaagagcgaattttaaggattaatgattttatctattcatgtgctacaatttatctagattataactgttgattaccagttttgtttaaagagattttctttaccttttgatgtggaatgaacttttctttccttgctattctaagttgccaatcgctttaatttctttttactgctgttgccagggtgcctacctactctagcgacaataccagt

SEQ ID NO: 42212 - DNA, 1033 bp, Manihot esculenta
  Intron number 1 from transcript cassava4.1_011309m (locus cassava4.1_011309m.g) derived from phytozome v7.0 (chr-ID scaffold01284; pos 154676 to 155708 reverse strand)
ctccaagtgcttaaacagcctctatttggtaaattttgaatcttcccttctttcttaattctcttttctgtaattgataaactctctgtttcaaattcatgggtattagttgaagaataaagcaaaagaaactgatttagctttctctcttcttgtctggggtaaatttatttatttttttctcttaccatcttaatttatattagcaaaaagaattatgagaggatggtgacagattttagcagtctttttcacaggagacattgacttagaagtgcttgtggtattaaacttcatttattaggtagttcactgtagttctcagtgttcttaagtataattctgtggtcctgataaccatcttatctgcaatatgatctgattccatgtgttctgtttgctcctctttctttttctttttctgggtaggtttagattttctcctatcttatatgaatttctgtttttctctgttttcttgctaattgggaaacactgtggccttctatttcatttctggaattccattgaaggatttccaaaccccaatccaacattttgaatatagtccactagttcaagatcaactcatattttgttgaattggcttgagtttgcttttgagaaatttactatttagtctcaaactcgtgagttgcttccttgttttggtcgttagtagttatttacttttttgcaacactcaatggctaaaattaacagatgttttaaaagtttagagagttttaatgtattttttaaaatcgagagactatctaatgagtttctctaaaataataattttccctttgctttttgagtgctatgtgggcttcatccttttgcattgttgtgatgttgctgaaaattgaaggcttaggctgcagatgaaacagattttgattaaatgttgcagcaaacaattaggagtttaatatttcatttaccaaactatgtgttagttccatcattagaaagtatgctttttacttgtgcagcttaacaacaaggagactttgaactcaagcaaatc

SEQ ID NO: 42213 - DNA, 920 bp, Manihot esculenta
  Intron number 1 from transcript cassava4.1_001385m (locus cassava4.1_001385m.g) derived from phytozome v7.0 (chr-ID scaffold07012; pos 1539320 to 1540239)
gccaagcctagggttcttgctatctctagtatgtcaattcctccttttccgtttttttcttctgatcattctttcgcattattgcttgcacgtgatcttctcgatctgtttcttttcggattgtggttacttgttttcttgtgcgttaaggaaatttcaagcaatatagagataatccattagggacgtctagctactgttaaaaccggacttggtgctaatgaataaacacaaaagttagccaaattcatccgaactcgattaaatggttgggatgtgtggctgctgagggattcaattttattgtgttatcatgggctggtgtattttaactgattgcttggatgcccaaatgatttggtttatgaaaagaacaatacgattaagaaacttgaacaactggcaacataatgtacttatgtattttgcatgctgtgcttatattggaaacttggatgacttacaaaaatgttatcagcatgcgtgatatagtccaagtatttttattttcttggttctagtatcaattagtttctgcaaatagccaaatactcttccttggggaaatacttgtgatgctttaatcatatgacttggcattgctaatggaatgctgttgaagcagtaaaggaaagagttttagcattgcacatgggagattttgacatgctctgttgtagatttgattttgttatttctaatttttagtttactgtactttgttagtgtctggaaatttcatatctcgctaccctctgctaaattgcacaaggaagttgataagatgctataagattgatcctcttcttcaattgaacatatgacagatcatatagtgtcatttgatttgcatggcagtttcagtgacaaatttaattcttgcagcaaaagcaaaggctactcggactaaagcatttctt

SEQ ID NO: 42214 - DNA, 979 bp, Manihot esculenta
  Intron number 2 from transcript cassava4.1_010361m (locus cassava4.1_010361m.g) derived from phytozome v7.0 (chr-ID scaffold01783; pos 13473 to 14451 reverse strand)
taaaggaccctctaatagaacctaagaaggagaaagtatgatttcttttttcctcaagtgttttatatatggctgtgtactgtacatcttttttatttttttatttttatatatctgagcttcagttatcttccaagttcactttttttaaaagaggaaatctagtttactaattcaatgctattttggtaatgggtttcatctaagtttcctcatacattcgatatagcactttgtgtggattgttggtattgtcctttaatgcttgtctgtttgaatgcttatcaagtgttgatgaatgttgaagaagttttcactgtgtggcaccagtgaattgaattattggcttttgttctttaactgttctatttgaatgatatggaaaggaaaaaaaattgtcatgaatgaatctttcacactatagtataatttacttttttctgagtgggaaacaatgtcttcaattttttttcctcttgagaaacaataccttcaatttaccttttacagattgtaatctatggctgtttgcttgaattgttgctgcattgataaaaagatgcattgcttgagcatttaaattttgaagcagctaattactttatatggtaggcaaaaaaaaggcaacttaactaaagctgctaatgagttgccattttcgtttcgtgaaggggttttcttttgcctatataaaaacctatatccagagtttctccagttgtttgtgttctgaatagacattcaaattgtttagacttaatgtagttcgatcttcagtaatacatgaatctaaagtctaaacttcgggctctttgtttttttggttatccatttttgaatggttgctgtatataacactgtagaagctgacatgatgactagtatcagtagttgttgtggtagttgattaaagagatcaaaatatttaccttttctctattcagctgcctgacattgaagattttgcatataagaaggc

SEQ ID NO: 42215 - DNA, 477 bp, Manihot esculenta
  Intron number 1 from transcript cassava4.1_001848m (locus cassava4.1_001848m.g) derived from phytozome v7.0 (chr-ID scaffold04151; pos 241656 to 242132 reverse strand)
tcattctcagatctctcaattcatcttcatcaaaggtttgtgtttctttttccttctctttctctcttatttttcactgatttctcgtttcttttcattttctttcaatgaagtataatctccatgataattttcctttgaattcttcgcaatattttttttggactgttgttgcttttctctggtctctgatcatctctctgcaatacaaattgcctttctatataattaaaagtttagtcgtctttttttagagttactttttcttccttcattccttttttgcttcgctttttaaagctttttatgtagagattggattattggattgcttgcctaaaacaagcaaaagaacagagtgatcttctcgttgatctcttctgcataaactgtcattttcgcacgcttaatacaagcatatttatttcttaaatttgattcagcatttcactgttttttactggttacaggtgagaa

SEQ ID NO: 42216 - DNA, 919 bp, Manihot esculenta
  Intron number 1 from transcript cassava4.1_002810m (locus cassava4.1_002810m.g) derived from phytozome v7.0 (chr-ID scaffold08847; pos 606468 to 607386)
ggacaagagtcaagcacttgctgaggataagaaaggtaactagtgggttttatatttggtatgtgacgcttgcttttgttatatatgatgaatgttaggatacgagcatcttgatatagtaggaattagtttattatcttcaaacattcattgaagttatcaagcatgtttttgccttatgtgtataattcttacatggttatatcattaaatcaaggaagtttcttctgtgttcattttgaatttaggtgtcttgaggaggctaattaggaacatgttttattatctatgaattgcgaactctagattgagtctacatttcggattatatatttttttaacatgtactatccttctaatttctatttctaagaaaagagatacaaaaaaaaatttctttgccccacctcatatcaaccagaagactatccgtctgtttaaagagtcattggtctcggaatttagtcataactgctttggcttggagaaaatgcaggtgtttctgagtcaaagaagatgtcaataattgattttattaatgcttatattgccaaatatttgtgctcttctttgcagaaagacaagttgtattgttcgggatttatttctagaaagattaatagcttatactgttaaaattaagaagtttaatatgttaaagccgtttttttgctctgagcaagattggctttgttaatatttcttcctcatgtttgtgagttgaaaatagtctggatatgattctattttgatttcttgttggaaacattttatacttatcatattcattcaaaagtgaaattaagtccaaagtttcaaacttatgaaagatataaaatcagtctaataccttgtacttgaagatttcttttgggaaacatggatattaattccttttcttgtcatgggagcagataac

SEQ ID NO: 42217 - DNA, 438 bp, Manihot esculenta
  Intron number 4 from transcript cassava4.1_026932m (locus cassava4.1_026932m.g) derived from phytozome v7.0 (chr-ID scaffold05587; pos 132790 to 133227)
ggcaaaaggtgtctaagttcagcttattccacaaggtagctaacctaacattatcataacttatttatttatttttaatctttggcttgtaaaattagaggaagaaaatatgatgtagacgttattattatttttttttaatgcttgtaattgacctgtggtccttgtcattgacaaactgttgattttggacatcaggatttaattaaaaagtaaacagcagtgttaatttcttatgtacttgcagaaagacggagtagtcctgcaattgaaggcctgaatttatctaactttgagaattctatggcaccagaaacagaaatcaaagaaattaggtatgacttaatatttttcttcttattgttattattattattttgaagaattaaggttcgtgttccttacattgtgattgggttgcaggattttcacaggaac

SEQ ID NO: 42218 - DNA, 929 bp, Manihot esculenta
  Intron number 1 from transcript cassava4.1_026437m (locus cassava4.1_026437m.g) derived from phytozome v7.0 (chr-ID scaffold06512; pos 2182391 to 2183319 reverse strand)
ctctgttcaccttcatcttttgttcttttgtgttggtaaggttttgaagccttgttattcatgtttacactttacatctgttacctaacaacctattatctaggcagctcctttttttatatatacatttaacacataattgtactgtttctaggtagattacctatggtgcaaacctcacactctgttttttcctactggtttctaccagaacttttgttagttgtttctgtttacctctctcctttgatgaactgagatatttcatgtgtgattcaatctctcccctgattagttaaggaagattgtactcaatattgacatgtaagtttgcagaagtttgtctaatggaaaaaaaataaaaattatgcgaatttaaataggtccatgccacttgattttgtgcatgtttatgtttgccaattcctccaagatcggacaacaagcagcatgccatgagcaagtttatgctttattttctgacattaattgtgagagaataagtattgatgatcttgagtgtcaaagaaaactattaagttggtgaatatggagatccttgtctcttcaaaatggcaaattattttctgatgtgctttattgagattgacaactagtgcagactgtagacaatgagtaattgatagggtgctaagcatttggtggaggtaatagagtagaactagttgactatgtgattctacttctgatgatactgggacactcatgttttgcatttcatgtaattttttccttaggccccaaagaacttgaaatacattaaagcttcttgtctttgattaactatgactcatcttattaagtaatttaattattgatgacctgcaactctactaagttgttgattgatgtaatatctttattctgttgcagtggacttttcaccctttcattttgcagtacaaaaa

SEQ ID NO: 42219 - DNA, 512 bp, Manihot esculenta
  Intron number 1 from transcript cassava4.1_011499m (locus cassava4.1_011499m.g) derived from phytozome v7.0 (chr-ID scaffold04314; pos 65697 to 66208 reverse strand)
cgacgtagctgctcatcgcgacattgttgataccagtaattattttctgttctccttttcctctagggttttcactgtatatgtttataattgtatatgcgtgcctattaagctcttcgaattcttcaatcagttgataagaagtttcagaagtagagttaaaagatttcgaacttgttttcgaaatgtgttattcctctaaatttactcatcctttccgttttggctggtgaatgtgccttttttctcccctcctggttggctgccaagaaaactcaagataaaaaatttataatctttgcacttttgagtgtgtaatgatttggatgttgcttacccaataaatgagaaaaagttaaccatggaactgtgttgttgaataatccaatcaaaagaagattgaatattgttgtttgtattttgtgttataatgtctctccagtaatatcataatttttgttttgtttggttgggtagttgataggcttaccagtgaaaacagattgccccac

SEQ ID NO: 42220 - DNA, 556 bp, Manihot esculenta
  Intron number 3 from transcript cassava4.1_007108m (locus cassava4.1_006521m.g) derived from phytozome v7.0 (chr-ID scaffold07012; pos 1231483 to 1232038)
gcggtcagattgctgagtatataggaagaaaaggggtacgtatgagctacaacttatatataatctttattttcctttttttttttctttggaattttggattactaaattatgcctttttctgttaattgcagtctttaatgatcgcagctattcctaatataattgggtggcttgttatttcttttgctagagtgagttccagtgacgcaattctatacagattttacagctggtttagatagataaggaaggaaaaatagtggaaagaaaaaaaggaaaatatgcaatattttctttgaatatttttcctccatttcgaaaagaaaataagacataaaagagtaaatgtacaatatgtttttttgaggaatgaacaataaagttaagaatggaaaattaaaaaagttcccttctttatcagcacgcaaggatgaaaaacaaaggataaaaagatggaaaattttccctctattatttttctttccttttcatgatttatccaaaacagagtgttaggctcctgtaaaatgctgacacaaaccggttatgtagg

SEQ ID NO: 42221 - DNA, 885 bp, Manihot esculenta
  Intron number 1 from transcript cassava4.1_001021m (locus cassava4.1_001021m.g) derived from phytozome v7.0 (chr-ID scaffold03614; pos 2216296 to 2217180 reverse strand)
aaggtgagcagcagtttgtctttctgttgtttatttctgtttttaactgatggataattgtgtgtaattggccctattttgttttagttttttaaggttttattaatgtatgcgtgagtattgcgtgcaaattttgttggacttttgatttagaaagtttaaggatttatatgggttcagtgttccatctggccggacaactcccttgcgggggtaggggtggctggggtgaggttgttggtttgcgctcggaatcagtattacggttggatcgctttcgatttggtttggcttttacatttgatggaaacaatctcggctggattttgataacttcaatacaatgtaaaaagataacatttttttctctaaattttggagggggagggaattggttcaagttcattggttcatagctgagtcttgcgatgtgagtttgcttttacaaggcgcttattcaaataaattaggtttccaacttattttggttgataaagttattacttctatgttgtttttaacttcttcattttggtgcaaagaatatttatctactttttgagaccatgtctcattttggtgctgaaagaatattaggcagttttgtcactattgttgtagtgaaaattatatggttgaaaggttcctaattttgttcttttagaagagctttgactggttgtaagatcgattggttagtgacgctagtggttccacaattcctaaggtagggggtgaggctacttaatgttgatgtggtggtcatggttattgctaaaatgaactaatttgatacttcattattattattattattattattattattattgttattattatttaaaaaaatatgaatttgtgtaatttgctttaatgcagttg

SEQ ID NO: 42222 - DNA, 348 bp, Manihot esculenta
  Intron number 4 from transcript cassava4.1_028116m (locus cassava4.1_028116m.g) derived from phytozome v7.0 (chr-ID scaffold01701; pos 335353 to 335700 reverse strand)
cagtgagtgtattcgcagcacctttaagcatcgtgaggatgaagcacatctttttttttttctttttaaattaactaaatatatattctctgttttgtttttggtcttttttaccttcccactctagccagcgatacccttgtcttctttttctagtttcttaatttcttttttgatttagtttatgttgcccactcgccaagcatccatcattaccatagactatgtacgaatattgttttattaatctaagtatgcatatgtgttgattgttaaagattacatcatctatttttatatatatacttcgcagagggttgttatacgaacaaaaagtgtggagttcat

SEQ ID NO: 42223 - DNA, 430 bp, Manihot esculenta
  Intron number 1 from transcript cassava4.1_014535m (locus cassava4.1_012388m.g) derived from phytozome v7.0 (chr-ID scaffold07991; pos 256448 to 256877)
tgtaagtgtctaaaacttgcaacaactttggtttcttggagattttcatgtttattcaaggcttcgtttccttttagattcttagagtatcgaaactacttttctaattggtcttagtctttacctgaaacagaagtctaattaaaaataaatctttaacttaatgctggagttgctaggcccaatagcatatgaaatgaaacagaaatccagtccaacaaatcagagtactaaaatgaatttggcaggtggaagttatttttattggaagagagggcgccagttctcagacttgaggctatatgtccagctgccatcttgatttcctaaatacagtttgactcttgtaaatttataggccatattaattatccttaattcttatgttcatgaaggtgatcgaagggatcagaaaactcttgaaaggctg

SEQ ID NO: 42224 - DNA, 933 bp, Manihot esculenta
  Intron number 2 from transcript cassava4.1_011166m (locus cassava4.1_011166m.g) derived from phytozome v7.0 (chr-ID scaffold06550; pos 586141 to 587073 reverse strand)
tttctccgacggccgtgtcttgactgattgtttcggtgggtcttcaatattctgtcttgcctttaactttattaattaatcaagcttttgagatatatatcttaaacaagtgatgggatcttgctttgctttagactttatgtgcaaaatggtgggttcctcttgcgtccaggcttgccacttttcttttttcgctttgcctgtaaaatgctacgcttactttatcatgtgcccttcatttttgtttattaatatttattatctccataagtttcgtactgctttttttttttttttctgcaatattcctttgccctatgcaactttgtctcacgttttccttctttattttcccttcttttagatccataagacaattttcttgttgttcagtctttgttttcaatgtcaattttccgctcctaattcatatgtctttgtcttctcatctcactacacagttaagcaactatgatttgaatccctaaataaaaaaaatcattaaaaatatgaacaataaatataattgactctcattatatccaaaaactcaaaattattaattttagatagaaccaccctactaccacttagatagaactcatttattataataatcttgttgaataatttttcaaacccacaaataaaataatttactttatttatttatatatatatatatatatatatatatatatatatatgcgcgcgtaagaaaatttgtctaaaatggtttattgtaaaagtaaaatacaaacaaatagatctcttgaaaaaaaaattagataaatttattttcatgtgtctattctgtgtatcacgaaagcaaaatggatataagaatttcaatatacatatctatactgtgttgacatgcgtatacatgtgcatgcagctgagtctattggggtgaagtctccaatcccatac

SEQ ID NO: 42225 - DNA, 754 bp, Manihot esculenta
  Intron number 1 from transcript cassava4.1_003404m (locus cassava4.1_003404m.g) derived from phytozome v7.0 (chr-ID scaffold01551; pos 3518126 to 3518879 reverse strand)
ttagtacgctttctgaaatttctaatcacttgttaactggtattttgctattaaggtagtttatgctcggtatggatggctcttatgccttacagataggaaatcattagcttaaggagcgagtcagggaccttgtacgaccatccgtcgtgctttgtttaactaatgcaatgtttaggttcaaaattgcttcgtcaattttagctattaacggcttataaactggatgtttaaattgaacttcaaccctttggctttggatgaatgatgaatcggtgtgatttctatctgcgttggctcgtttaaattatattataaccgctattgattggtacagaacaagaaatctaggaagtttatacaatggatgagaaactcaaaacatattaccctttatggagtattttggagacttccttcatcattttggttgatatgtactaacctttctatttaatttcagtactaggcaggataactattaccatcatattacaatattttgtttaatgatgacttaagatagttgattcatgtagatccaatatgttggaactttggatgatcaaagaatacagttttctggtattggatagagattgtttaggacttactactcctaaaagcagcttttggccagtctatatctgttaattgaatatgtaacctatgcttttcttcttcttcttcttttttggtttttttgttttgtttttcagaagaagaaaaccagtttttctttggattggccaca

SEQ ID NO: 42226 - DNA, 612 bp, Manihot esculenta
  Intron number 4 from transcript cassava4.1_007816m (locus cassava4.1_007801m.g) derived from phytozome v7.0 (chr-ID scaffold06711; pos 377949 to 378560 reverse strand)
tggctgaacgaatccaacaggtagatctgcaaaaccagtctccatctttttgaactttaattattgtaaattaagaatatatggtgaaaaactaagcttcttatgcgattcgaatggagtttagattgatttcgtattctaagataaccgtaacttgaaatcttgactgtattacaaaaatgaatcatggcccttgccagtcagttttgttcttctatgttcttaggtttcctggcctttccttcaattttgaaataatggtagagtaattcttgattttatatatattttgagtctcattttttcctattcaatgctgaggatcaatgtgtttaaaaaggaaaaagtagttgaagagcagttcataagagcaatatgtccgtctataaaagtgatgaaagaaacagaaccagtcttttcgataagttattttgaataattgagatgtagaatacaattatttttgctacttcaaagccctgattgatgtttggtctgtaccatggaagttcagcatcattatttgtggagccaactagttcaatgtcatgttgatgagttagttttaatgtcacagtcgctgggaccaagagcacgcagcttccggtcctt

SEQ ID NO: 42227 - DNA, 481 bp, Manihot esculenta
  Intron number 2 from transcript cassava4.1_025246m (locus cassava4.1_025246m.g) derived from phytozome v7.0 (chr-ID scaffold01551; pos 1225924 to 1226404 reverse strand)
ttaccatttgcatctctatttgatactcttggcatgtatgtatcatcagcatcagcatctccttctttctcctttttttcttttttaattttgaattgaagtatcatctttgtatagttttacatttagttatagcatgatagtatatatgcttctctatatcttcatggatcctggatggtaatacacacacacacaaacgtggcggaattagaagaaataagttgatttctactatctgcttagcttttttttcccatttgtgtgtgtgagagagagagagagagaagtggaagaaataaattaattaacatttatttagctgcttctactactatatttgcatttttcttggattcctagctactaaacttgtttcttgttcttatttttgttggttgcctcacaaatatgttttgaactttctgttccgtctcttataatgttgcatggaaaattttcctatgcaggtgcttgtgtg

SEQ ID NO: 42228 - DNA, 714 bp, Manihot esculenta
  Intron number 1 from transcript cassava4.1_003760m (locus cassava4.1_003760m.g) derived from phytozome v7.0 (chr-ID scaffold09761; pos 166703 to 167416 reverse strand)
tgggctgttcttcgatcttccaatcctctcaagtaagttgcctgtactcgtctctctctctctctctctctctctctacaagtattactctgtctgatgcttttctttacttatttgtagtggtttttctttgattggtcttgattccataactgaagagtaaagggaaatgtttccctggaaactcttggattgaattagggatgttcagggtagcttttttaattatacgagtaaaaatgtatagaaagtagagcagattgcaacaattagttatagtgcagtaaattattgtaattggcttgtcctttttctgtaagctttttttttttgttttaaactttttggtgttgatttccagtaagaaaaagaaaaaagttggactggtttgcaggcagggacccaataaaagtagggaaggtttaaatctcaattctctttgatgcacagctgaatgtgaaaaacatatctgaggaatgtgatggtgaattctgataacatgtaggaagtttggaacttcgttatgaatggttcctatatgagaaatggatacatttaggtcttccttggtaaacatgctttgttttgcctctttgtgaaatcatattttttggttggcttatctttgatttcttaatgagttttaatgatagttttaacatatttcttctattttcaggttccgaggattgagcgtggtagtttctcgagttt

SEQ ID NO: 42229 - DNA, 796 bp, Manihot esculenta
  Intron number 2 from transcript cassava4.1_009657m (locus cassava4.1_009657m.g) derived from phytozome v7.0 (chr-ID scaffold06711; pos 453809 to 454604)
ggtcaagagcagcgattttgccagcagtgcagcaggtaagaacttaaactcaacttaaactctttgaagtcagaattctttgattttaattgtttctcagctgcagttttagcttcattacccttgtttagattataagagttctctaagatcttaaattgctgagtcttgacatattccattagattcacactatgtgaacaaacttgtattagctctattagcttctaattgtagttcaggcattcttagcactacttgtgcaacttttctgagcctctgcaactgattgactttgatatgattatgaaaaatgatgctgcaaatgaatactttgccattaaagagaagaccagaagctcacgatcatggtcttcaaagaggtgcatttcctcgagtagtttcagtttgattcctgctcttttcatgcatttttttttttggcatttacctaggtttaatagcacaaatataattgtaatctgtgaatagtatgataataatagttggtctaaagcgcaaaaacaaaactttgtcgtcaaaatttcagataattgattgtatgctgcttggttaaaatgcacaggagcaagtaatggaagaagaatcttaattttccttatctgaatgtttcttaatcagaccctcttaatgtgcctttggctggggcatgacatattactactcatcccccaaagatgatcttttgcctgcaaaatatttcttcagcagttctaaaatttcgattgctctgaatgcctctataacaataggttccattccttgggggagtttg

SEQ ID NO: 42230 - DNA, 770 bp, Manihot esculenta
  Intron number 2 from transcript cassava4.1_024542m (locus cassava4.1_024542m.g) derived from phytozome v7.0 (chr-ID scaffold04260; pos 265348 to 266117 reverse strand)
atttttcattagtgcattttgttccttctgaatctgtatactgatgacaatatgtacttgggctaatattaatgttcagatgcttgcagtttttgcattcttttttgtccatgcatgcaaatttgcttgaatttctgtgcgaaaaaccttgcaccaatctagtttgagtttgctcttttttttagtggtactgatgtgtgtgcacgataatattcgacgatggtgacttctgtttcaaagcttcccatcaagttcatgttaataatgtcttagtgtgttctgttcctttcagcctttcattattttaatacactgggaaatgcttatgaactgcttcattataaaattcgatgctatgctatgaaatacttgcatgcttcttattttctgataacaaatatagcatgcttcttattttctgataacaaatatgacattatgttatttagaaaccttttcttaaatatttttttccattggtccataatatgggtgccaaatgagaggctagagactcgacctagattatgtcttccagtgaacactaaaagaatgatcaaatatgtcagaatataacatggttctttgtgaagttatctcttgtggacagtaattgactagaaattttttgtgatatcagaagcatggatgggattgttgttcatgtttattcagctcttgtgagcatgtgttccttaaaaagtttctccatgtattgaaattataattttgtgattgatcaggccttgggtccagcaattcttgttggc

SEQ ID NO: 42231 - DNA, 739 bp, Manihot esculenta
  Intron number 2 from transcript cassava4.1_015073m (locus cassava4.1_015073m.g) derived from phytozome v7.0 (chr-ID scaffold09127; pos 23466 to 24204)
ctgaggtatcaatattcacaatgcttggccttttgtgttttattcatattttaacctaccataattttaaaatggaatcacttgtttgttttgtcgtttgtagaagagcaaccttgtagtgacactctacaattatatgcttcttgtcctaaaggggctgtttattatcaagccaagttcagctaccaacaaggcaatttaagatcatgccatcattgttaatggatttttgcataagctaattaagttttgcatctccttgatttctttaaatcaaaggaacacacacagataaacagacttgcatgcgggtttccaaatacgagacaaacttagtcaaacacatggattataggaataatgtactaactactaagccagttcctcttttcaataatatgagtgatttcatctcttttttttttattattatatgaaccaataaagcattacaaactttttatacctttttgcattatatcttgagatttaataatcttaggttcaataacttttaggaaactctatggtttgagatgtctcacaaaaaagaagtttgcaagaattttagtagactcttcaatatgcttaaatctgaaagtacatttgaaggacaaacagcctgcttctgtatattttatatttgcacaagtattgtgtgtatcattttccaagctgatcatgtatgcaaatgcattttatagttaaaaaggtcacagtcatcttggaaaggaggaac

SEQ ID NO: 42232 - DNA, 845 bp, Manihot esculenta
  Intron number 1 from transcript cassava4.1_015661m (locus cassava4.1_015661m.g) derived from phytozome v7.0 (chr-ID scaffold04681; pos 24594 to 25438)
aactgacaagattttgttggtgggttcctctgcaggtatgtgtttttcatgattttgcaattatattctcatttggatgacgtgtttggggataatgattacaaatttttgtttgattggttttaatgggtaattcttagatctatgaaactggtgttcgtttgtgaatctgttacagctatcaggcatatctcttgttgcctgctgtattaacatccacaaagggaaaacatttaactgcttctcaccacatctgggctaaactaaaaaatgcttttaatgtcgagggctgattgaagatagtgggtagaatttcatctttcagatcaattgcacataattctgcagttagtagttaattttttatacaattattattatagttgttgttagtttattcagttcgatagaattagtctggcatgtcatttggttcacccatccagccattgatgatttcttgtgctttcgttgcttttttgtctgttttggtattgaaattctcgagtggatcgtggcagataggttcagttatgatggtggaaaattttagtgaagaaaactgttgagtacttgggtgtggaatttcttcaatctcgtattgttattctggcaagataactcttttaaaatttcgtttacatattcttgtttccagtgtgtattccaatttctatgcctctccaaccatgtcacttttttctcaagttccttattgtttctgttgtgggacttttctcatagcagaaggggtttctctcatatactgggaaagctcactaattttggatactgtaatcttgtaacctctggtacaggtgcaccaatttcaggatctgcagtag

SEQ ID NO: 42233 - DNA, 706 bp, Manihot esculenta
  Intron number 1 from transcript cassava4.1_008790m (locus cassava4.1_008790m.g) derived from phytozome v7.0 (chr-ID scaffold10173; pos 1019471 to 1020176)
gatacaaagagataggtatgtgttttgttctcttgttttccttttttaccttcattaattctgttatttagttcatgcaagttcttttttcagttgtttcatatggaaattatgtaacttcgcttttgaaattttggttagttttggaccttgattttgctctttgcaagtatcttatcagttttatgtggcaaacaggcaaaactctgatgctttgaacaagtgaaaaggaaaaaagaaaaagagaggaagttttttattaatattcttttttcttctttgttttgaaatggaaaggtatttatctaattaggaagtctttgatgacccagaacaacccaatcgtgattagagtttcctccccctattaattggtttagtgggctgtcagatttatttggatgacagcttgtgaattgtacttccagtaatatgcatgcatgagtgtgttgatgtatatattctttacatcttcagtatctgctgttataatacgcttaacaatttatggactaccttaagagttatgcaatctgaactattaatttattttcctaataaatgggttttaatgtgattattgacctggagaagttaggttaacgtgattaccttatttgttttggaacttaaggcttttgagcttattaactgtttaatggaatctgtaggatttaataagggttcagggatacactggcctttc

SEQ ID NO: 42234 - DNA, 535 bp, Manihot esculenta
  Intron number 1 from transcript cassava4.1_005730m (locus cassava4.1_005730m.g) derived from phytozome v7.0 (chr-ID scaffold11827; pos 5929 to 6463)
ggtatgtctctgaatctccttgctgcttatcttcctgtttcgattctgctatttatctgttttgaatctaggaaatcacttggattttcttttttgttgatggatctgctcaatttttagttcttttattgttactgccaatctgaactctgatctgaactatgtacttcatttgctaatttccttaggtttttcttttagtagatttattttgagttttttgactttatcagaatttcggctcctagccgaatttaggaagctgttttttctttagagttgtcatttattgttttggattatgtaattttcatcgggtttgtatgaagtaagctaaacatttgggcgcatttgcatggagaaatcatttggctgtattacataatgaatttgaagctcaattaatattgattgatattcttagtatttagcttgcctgtgacttttaacaattgcctgtcctttaacttgtttcaacatttatttgtttttgatggtagatattgaggaggagattcgttcattgcagcttgat

SEQ ID NO: 42235 - DNA, 744 bp, Manihot esculenta
  Intron number 2 from transcript cassava4.1_015282m (locus cassava4.1_015286m.g) derived from phytozome v7.0 (chr-ID scaffold03332; pos 148812 to 149555 reverse strand)
tcccttttgacaaaacttcctgggaagcagcaaatgcaagttattctacattgtatttagaccatgatatctggtgtttatgctaaacatcttgccttcactttgtttcaatcttccatgtaccttttagctgttcctctttcatatatgcgtatgtatagttgtctactgtcctgctgcaattatgcacaaggcttgttacctcaagccatgatttgatgcatttgtaggaaatagtgatttgccattgcttgcctctgtctcaaagttattctagtttaatccagttatcccttctttggctgtggcatccactgttatcttttgaatatggtcaaaccttcccgaacttctcctgaaatgttgaacttctaattcttgttccctgtgctttttggcgattcgctatcttctttttttggttcaaaattggtagttatgtttcttatattggcataataaattgataacctgagtagtaatgttggttgtgtcttattggttgtaaaggaaaagaatcaataaacatgttaaacgagtggaagatgagtgcctgcagcacatatttcactcattgtggtggcagcatgatatatttgtgttctcattataaaaattttccacattaattttgtaaaatatgggcatctaaaaccctagtattctgaactaaggtttaattattgtaattatctaaaaattttatagattctgccttttgtgatacacagatcagagaaagag

SEQ ID NO: 42236 - DNA, 745 bp, Manihot esculenta
  Intron number 1 from transcript cassava4.1_015282m (locus cassava4.1_015286m.g) derived from phytozome v7.0 (chr-ID scaffold03332; pos 149739 to 150483 reverse strand)
aaatttctgatcgcaacaagaaaaaccaaacttaggttaattctcctcttttttcgtcccttgttttcttctccttcccattttctcttcaattgttaccgatctcaattcataggctacccgatcggtaattttctggatgataggataataagatatgtgaatttcaatcaatgcattgtaaatttatctgatagtatttgttctggatttgacgagatctttagggttgttcacgtggttttatgagcaacagaagcattttattctttctgttatgttgatcaaggttagggtatctgcctgaattttagggttttgatttctttcccccttctgtgttattttggagatttgcaatttttgttcaaattctattataagatttgagatcactatggtttctgggtttccgtttttggtttttattagaggagatcatgatgtcccttaggatttgttaccttttaagctcttcttcttagtatctttgaggacataagaggaaattaaagaaacaaatattttgcgacaattggataatgtgcttttaaaaattgagcttcatttatcttgtatcgggtctaatactgccttatgttatttttttccatgatggatattcaattgctttcttttttcatcccttttaattgagagccattttaattcttttattggttaatggtttttatgcattgatttatagtaagattatctgttgatcagctatcattcaggtaaa

SEQ ID NO: 42237 - DNA, 816 bp, Manihot esculenta
  Intron number 1 from transcript cassava4.1_001031m (locus cassava4.1_001031m.g) derived from phytozome v7.0 (chr-ID scaffold12693; pos 12436 to 13251)
atctgctggattatacctgctaacgataactttatgtggctcaacctattcaaaagagggcaagccttaatgaaaaaccgggtgctacattgtctatatcttctttttcacggatgagaccgcgtattagtttatcagactcttgccatatgaccctgtattatggtaacaactcataacttattttggcctattgttgtgctacatcacttactattgattctattcataaaccagttcataaacttgcttatgagagcttttttttttgtttagtataatcataaacattcacaagatgttgaactaagtgtaaattttaagaatcaaattcttaaactcatttaagaaaaaagagtgtccaaccacatatactaacacttttcagtttcgcacgcctatatttaattctaattcagcgtaaaatttaaaatgcaactcggcttatttaaacaaaagttgatccaaaatggatctttatggagtctggtctctgtcggtttacgaatatctttttccctttagattcgtattcacacacactgcggactactagtcagatgaattagcgtgtaaaatttgcttactagtcaaccatgcacttcttcaaccgttgacgacaaaatgtttctataattgcagaatccttaggctaggactcgtgaatcagcagtctctctcttcttgtccaaaacagagagaaagaaatccacatgctttctacccacatgctttctcgcatctgcttatctttctcattcttaattctcagtttttgtcttcggttatgctttgcaagggattccataaggttta

SEQ ID NO: 42238 - DNA, 976 bp, Manihot esculenta
  Intron number 1 from transcript cassava4.1_023978m (locus cassava4.1_023978m.g) derived from phytozome v7.0 (chr-ID scaffold04523; pos 37988 to 38963 reverse strand)
cttaataccaaaaaggtaatccttttgtttttttatttgctgaactacttgcttgctaatcttgtcggaaatttcggtactgatgatttaattttttgtgtattatattttcgctttggtgccctaaattgtgttctttttatgttcttctgcgacaatcttatcttattacctactaaaaataaatggagaacagtttgattctttgtatatgggtttttaagtggattttatctgctctagtttaacgggcacttgctggtatgcatagagcacattttgattatgaaatgattgtcaatggaattgtacctcagcttgtggtggactggtagaaaaacctaaaaatttttctttatcaggatgaacttattttagtaatggctaatctagagaaacataatgtttattttggatagattgatttttttgttaccaacttatataactgttaactacacattatatgttgaatatggttttggtttttattgtctttgcaaagatttagattcatgctaaagctataggtttctagatgcttatgtagctcaaactgtaattgattgttgtgttctcaggaatctagggttggattccaggtgtttgcaagtgtttggggcgaaaggtgggcctccagataagggcggaggtagtgggggcaagtagtttatttataattatatataatttttatattttgcctcacttataaataatattttgcccccgttactcctaaaatttatattgtaagtagatataattttatcattgtcctcatttaaaaagaaaattctgcccccattagtttattaaactcttaattattatagactaatagttattttagcccattatttatgtatatctatataatataatgtatctatacatttaatcccataagttgaataaatcatttgcccttctaaaattaaattctggatctgcccctgcctccaaacaagagttt

SEQ ID NO: 42239 - DNA, 433 bp, Manihot esculenta
  Intron number 1 from transcript cassava4.1_016315m (locus cassava4.1_016302m.g) derived from phytozome v7.0 (chr-ID scaffold03614; pos 562828 to 563260 reverse strand)
ttgcagctgaacgaggaagagtgatttctagacctgtaagtttttgctacttccttcatttgattgttatgcttaaccataaactgacaattagcactgttggtttaagctctgctaattgtttgcttcggcccatttttgtttgcttatcacgctttaaacgtcactatgatgttaatggattttgtagttggatttttttttttcattttcattcttcgtgtataaattgactgataattatttaccggtgatcacttgcttaagaaccaagaagagaagaacaagatgggtacattgataattttcttgtggattaaaatgagttgtgattgatctgcctgcattcttgcttcatacttttaatgttgagaaacaaaagatcctttttttagtcatttcgttccttttttatttttttagcaggtaagga

SEQ ID NO: 42240 - DNA, 718 bp, Manihot esculenta
  Intron number 1 from transcript cassava4.1_003923m (locus cassava4.1_003923m.g) derived from phytozome v7.0 (chr-ID scaffold09360; pos 174029 to 174746)
cctactcctaagttctccaactccttcaccactcggtactcatctccctctctctctctctctgtatattaattttaatgaattatagacagtgattatgtgcatatgaatggtggctatgttctttaattcttgatgggtttactgataatggaatttaaggatgcttttacttcataagttgcatgttaatgccaagttcctgttctaacatgaagacaagttttgcagtagaatattatatggagatctgtaacttgtcatgtgttgttggagatattcctctaatggacaatattttagtgaactgggaacgtacattctctttgtccatttaaaatatgcttgattaatatctttgtcccaacggcgagttcctcttctacgtttcatttttcattttcatttcaattcccacatgtatttactgcattggtaagtgctcaggttttttcctagcctagcaaattagcaattacctcattgttatgttctttcttcagccttttggtgtttaatttgttgtcatcgcacgcattatgaataaaaaataaataaatagataaaaggaggaggaggatacccagatctcaaacttttttgtcctgcgggaatcctttattaagatttagggctgtgaagaattccggtgacgtttttgtctttgggtttgaaaatgcttctaattgattttttgttccatacagaattttctctg

SEQ ID NO: 42241 - DNA, 331 bp, Manihot esculenta
  Intron number 1 from transcript cassava4.1_000634m (locus cassava4.1_000634m.g) derived from phytozome v7.0 (chr-ID scaffold05375; pos 188368 to 188698)
tcgcgatcgcttcctttcttttcgtgttctactcggtattttctcattctcttttttcattcttttcttgcacacatctctttcaatttttaagattcaccgttactgattggttgccaagaaaacgaaaaaagaaggggaaatcttggggtttgattactttgcgtgtatgtaaagctgttttgtttggtttttattggaatcaaaacatataattactggacccctgaactttagatttatttgtttattttttagcagaagatattttaaaataattcactaataattttgggaaatgggatttgatttgaatagttcagcgcactat

SEQ ID NO: 42242 - DNA, 321 bp, Manihot esculenta
  Intron number 2 from transcript cassava4.1_000634m (locus cassava4.1_000634m.g) derived from phytozome v7.0 (chr-ID scaffold05375; pos 189053 to 189373)
caaggccttggcgccgaaattggtatgcaggatcttccttttttttgaaaatgctctatatgtaagcgtacaccggaagtttttttttcttcaaaaaagaataaaaacgattggaatacatttttttgtttttgagtttgatttgtctctaaataattctacaagccaaacggttgatactgatctgatatggattactggtagataataaatagtaaattgatgatgattatggtattactttcggatggaatttaatttttaaggaaattgaacttgcttgcagcgaagaacttaattcttgctggggtcaagtctgtg

SEQ ID NO: 42243 - DNA, 492 bp, Manihot esculenta
  Intron number 2 from transcript cassava4.1_011497m (locus cassava4.1_011497m.g) derived from phytozome v7.0 (chr-ID scaffold10173; pos 619286 to 619777 reverse strand)
ctgattatactgctggagttgtggtcgctttttatgtgagtattctgattgataaacttgtttatccaatagttttatggttatgtttggaagtttaatactccgattgaatcaatcaggcccagtttgatttatctttaatttgtcactcttattaagttttcttttctgagtttaccaatcaaacccagatggattttacttcagttttgcagatttctttccatgctgtttattttcacctgatttttattttttagttatgagctttcttcaggatcttgtgtcagattattcatttatttttagctatcagataaaaccaacataagcccatagatttcttttgccagttatctttttaatgctacttttgaactcctgccctgaagaacatgatgataatcaatctcatctttgttaatttcttctcgttctttcatgcataagcttattttcgctgataaaattccaatatttgattgttattag

SEQ ID NO: 42244 - DNA, 987 bp, Manihot esculenta
  Intron number 1 from transcript cassava4.1_009580m (locus cassava4.1_009580m.g) derived from phytozome v7.0 (chr-ID scaffold03614; pos 1132710 to 1133696 reverse strand)
gtccatttctcatagattcttccaccatcccaccggtaagcaagttctttaattgtttgtttattttgtgtgtgtgtgtgtgtacttgtttctctttctcgctttggtcatcagatttttggattcttgattgaaaatttcattccagcggtgcttgatttgatttgggaatcttcctgtgtatccctctcttttctctctcttcctcttggcataaaattttggtttttgttgataatcaccgtgtaaagctttgcttttgtttgtttgcttgtttttgtgtttttgttttcgaatggctagatatagaataaataaaagattgaaataatggtacgttttaagggtttcaagtctgcttcaactcttcttcttcttcttcttcttctttattaaaaaaaggaacagatgaactgagagttgatatatttattgttttcaatctcagaagagaaatggaacacccttttgcacctgaaattctttgactgtgcataacagctgggggccgtggtttaagcactagtgatcaataaaattagcttttcagggacagagactggagtttttgacacttttgcaaatttttctgtaagaaaaggttcagtgtgtatgtattattgttttaacacgaacttttcttgctgcttgctgagagcattccttgtccaatattttttattttattttatttgtttacagggttcaaggctgtatgctttattctcccctctctctttttgggtttactaattgttgatagcagaagatgctttaagctgatttctctagtcatctatgtgatattgttaatgtctagatgatgaagtgtagtgcacttctgctatactatgttgataccattccaagcatcatgaattatcacatctcgttcttcctgattcctctcactattgatattgaattgtttgcttcatatagtatcacatttccagcataattttgcagtgggttattgctccttct

SEQ ID NO: 42245 - DNA, 399 bp, Manihot esculenta
  Intron number 2 from transcript cassava4.1_013333m (locus cassava4.1_013333m.g) derived from phytozome v7.0 (chr-ID scaffold03614; pos 1953834 to 1954232)
ccagtgctccacgggatttcacaatcattgacagggtattcttcttaatcactcaagagctcatttccttttttttcattaggtgacaagtgcttgaaactaaaagtcaaaacattgacattcccagttcataaaattttcaatctcaactctgacttttgttgagggttcatttaggtggaatgtccattcaagaaaaatattttgtgtttctaccttacctaagaattgtaactagttcatccagaaaagagtttaggctttgaaatcgttaatcaaaatgctcagatatacacaacaaagttcatgtaatcttattttccattaaatatatgacaaattttttctctcttctcgttactaaacagggtagaagaaactcagttatcatagcaagga

SEQ ID NO: 42246 - DNA, 822 bp, Manihot esculenta
  Intron number 2 from transcript cassava4.1_005841m (locus cassava4.1_005841m.g) derived from phytozome v7.0 (chr-ID scaffold05162; pos 285058 to 285879)
ttgccaaggaggtgagcttttatctcttcttcttcttcatggtttatacactatctcacagtaagcttccaattcccaagccccaaaaaatcctttattctctttcggggaccagtgaccagtcgcaatccgccttgaatttgagagggtacttctgtcttttggtgaaaaggactgtattctagaaaattttcagttgactctagataattgtgatgaatccaagagtgttgattgtttgaaagtctcgagtcacaatctgctggctttaatgaaacttagctttgtttcttttctctttggctgtctgcttctctctaagtctaatattatcgtattagagattcctttagtgccattagtttaattttttttttttttttattaatatagaatgcatactgtagcttctctgctttcaatatcaactttgtctgggcaaaagcttacctcctgagacgaaatcctgacatgttttcaccggcttgcaagctgactgaaagaattcctgtctgaaatttgaaattcctagtgttaacatatgggattgttattattacaggcagaggccatggagccttatcatattgtaatggtattacattaaccaacgggctatttcaggtctataaatgttggtttgatttaattttcttagtgattttcagatttggatggtagttgtttgtcaactttgcgaaatgctatgaatatgttctcttgatgagtgaataacggaatataattaataaaaatgctcataactttcctattgattttcagattggctgaaagtttatattttgcttattatttcaggcc

SEQ ID NO: 42247 - DNA, 1017 bp, Manihot esculenta
  Intron number 1 from transcript cassava4.1_021880m (locus cassava4.1_021880m.g) derived from phytozome v7.0 (chr-ID scaffold03614; pos 1251139 to 1252155 reverse strand)
tggaaagcctaaaggggtgtgtggcacagaacaaggtaagcatttgttttaactttcatctgtcaatgtctaacacaacaatctgttcactaaatattggtcattactgcggactgttttatgccatgaacaagaatgagctgaaagtttcttcatgcgatgtcaaaatataagataagttataatatagtccctcagatttgataagacacacaacttaatctctatcattttaatgataaaacaatctagtaaaaggtttcaattttgttaacaaaatacacatgttagaattcattgttagactacaacaatttagtcctttaaattttgctttttgtaattgtttaatctctttaattttaatatttataataatttagtccttatagttttaatgttcgtaacaatttaatcccttcaatttggattggctaatggtatttaacagaaagattattttgttaacaaaataaaaaaaaggactaaattgttcactattaaaaaagtagagactaagttttagattttgctaaatctcataaattaccctgtaattaccctaaaatagatttttagtcattctatgacatatttttaagttttgatgactcttcattgtaataatctgattaaaatcttttgaaagaataagcaaggaatgactaaagagtcaaatgtattcctgctgttaaatatggatggaaaacttctatctctctctcttaacttgctggctccatcctttcttggcttgtttcctctttctattgcacactaaatggctttgtttggcagcctctcaaagttgcttttctcttcttcttctttttgttatttttttagaagcaaatgctgcctctatgtacatacgtcttctatcataaaacaaacaaactgagaatggtgcaattcttgaattttgatcaattctcaatttactctacatgtgcaacatgatttgttaatttaatcttcttgtttttctttttagggctattaaatcgctttctgtgg

SEQ ID NO: 42248 - DNA, 676 bp, Manihot esculenta
  Intron number 1 from transcript cassava4.1_016393m (locus cassava4.1_014831m.g) derived from phytozome v7.0 (chr-ID scaffold03614; pos 2468777 to 2469452 reverse strand)
ttggacccgtctactctcttccccaattccagcaggtcagcttcaatatatgttcatagtatttgtatttttgcgatttgagtcggtattttagtggttatgatttgtaattttaattttttaaattttttattaagaaagaatgatgctgtgttatgaagtttggggttttgtgaatcataattttgacttcttaatgcgtcagtttttctttcttattttttgaactgtttaattacacaagtgcgatatgaatatggttgtatgctggattgttgtgctttttgcgaaattttgtgctttattgataccaagaagaaacggaacaattaatttcatggataacttttttttctgaagaacatcaatatttatgaagtaaaatttcttgaacgaaataggaatcgttttgggtttagggaccaatttatctatgaaaattggttgttttgaggtttggaatatcgccgtaactacagttgtagtccaatcaacagccataatgcaccatagatgtttcatgcatctactcaataaacgcactcttgcagtaaatatttgttaatttaagcatgcatgtattcagaatagtggtatatggctagcacatttgttatacttccaagtgcgtaaatcacaagtgtttttgaacaggcacaacaattatttcaaaggg

SEQ ID NO: 42249 - DNA, 716 bp, Manihot esculenta
  Intron number 2 from transcript cassava4.1_015667m (locus cassava4.1_015667m.g) derived from phytozome v7.0 (chr-ID scaffold04882; pos 460441 to 461156)
attctcacccgggagtactccaaaatctgtaaactgtacgtgtttttaagttcttgatttccgtttgtatttgtagattgaacggctaagtatgcctacttattgtcgttgtgttgtaatggtgtcttgccagaattatggaccctgtggttttcgggtattttagggtttgaactgagttgttagggcttcttttggtttctactaatactaaacaagccatgctcgttgaaatggattgatgggtgttattttgacaatttcgctataaactgggtgcaaaacacattggtttaaatttggcatatatgttgagcttttcaggtgagaccatttgattgtgaaatacaagagatactggaaggcttattcaacttagtattttggtgtttatatttttcgcgatcgcctgttataataatgatctagtcctagttacttttcctttagacttaatagtctaatatcttattgtatctacacttattttcatgtacttcatactaattctgagtcaattttcccaactatatcaaattattagtactgactgccttacagtaagcattattgttggtaaatgaatgttgattagtatttttaagtgtaaagagattagccaacaaatgattttttttcttcttcttttcttgcgttttctcctttgtatatgaactggatatcctcttcttgatctcagagctgacaaaagtgta

SEQ ID NO: 42250 - DNA, 988 bp, Manihot esculenta
  Intron number 1 from transcript cassava4.1_006475m (locus cassava4.1_006475m.g) derived from phytozome v7.0 (chr-ID scaffold04175; pos 574781 to 575768)
agtttgttcttcaaaataaccctaggttaaccaaggtgagtttttctttttgtgatgctgtttgttgtgttttccgtgtcttgttatttgttgcttattcaaagatgtacaatttattagactcaattgcttagccttaattggctgatgtaaataatctgaactgtattatggttatgatttggcagtaaaatgtttaattttgctattttattgacagacttttctgagtttctctccttaaatccatgccggattatacttgtatctgaagcactgattatactgtgaaccctagtttaagtgatttgaagtgtatctatagacggtatactacagctgttagagcggtaactcataactgctgttgacagatgatgacttgcaggaagcaacagtttagcttttgggttattgttctttagcatgtttcatatactgtaaggtttcagtttgcttgtgcctgatttctgaaacaagtagtgaaggcaagatatcaaactgaacttgcttgtgttgaggcattagtgggtttaataataaaattttatgcataacatgattatagttacaaaactatttaaatagctttagtgggtttaataataaaattttatgcataacatgattatagttacaaaactatttaaataatgtcaaatatttttccttcctaatttacactgaagtcttgaggatcaggtggactcctatgcttgttcacttcattaatagttttgacctgtcaaacttttgttcttttggtcactgtgactaggtattgggatctactggaagcccaagtcaccttttttcccagactgcatatctcttctcagtttatttgcatcaattattatgggcatggatttttctagcatctttttctttaacttttatttagtttagtatatatgtttgctgtgctgcttttctgactttgattagatgctaatttttcttcctttgtgcagctgtgcgtgcctgg

SEQ ID NO: 42251 - DNA, 549 bp, Manihot esculenta
  Intron number 1 from transcript cassava4.1_029197m (locus cassava4.1_029197m.g) derived from phytozome v7.0 (chr-ID scaffold12147; pos 54813 to 55361)
ggtcacgcccgttctctcgagcaagccaagaagctgtaatctccttctccttatggtttttacttcttcattatgcttccgatttgattgatgggtttcggctggttaatttgtaccctcatccaaaaaccacctagacttctgaagctaattatgactaacttttttgttatagctctgaatttttacttgctttatttgtttatttttgtggatcacgcactgaaatttattcttctttgtggctcttcttgttcataacattttttttaacaattctctttgttaaattgtgaagtttttatttttggcttttttgcaatgtggtattgcaacttaattaacatgtagtctgaatgagcaatggccaaagaaatttcagcatttgcaaacaagacttaatcaatatttggtgcttgtgggttcttggcttgctggttttgctataatatgagtcaattttgtcatgtttatatctttttttttttattttttatttttataaattttataggtttcctaatacttacctgttggttgggtgctgca

SEQ ID NO: 42252 - DNA, 909 bp, Manihot esculenta
  Intron number 1 from transcript cassava4.1_031838m (locus cassava4.1_031838m.g) derived from phytozome v7.0 (chr-ID scaffold11110; pos 75652 to 76560)
ctgtagaacaaagcaagtggaagaggtatctgtacttatgcatatttattaatattttgtgcatttatcagtgaattcacaaatcagacatggtcacacacagacacacatcttccataggcattcgcttcaatgatttctcagttattttttccatatgaatgagtggcttgtaactcctcatggaacataaattacaaaagacatgtccaagaaaatttggtcaaataatgacagaaatggaaacaaaaatagttagaatggagtaatatgcgaaaaaaaaaaagcttaatattttagttgagatattatggataatagatagatcaccaaatccattcttaaacaaagtgcaaatcttaaagaaatctatcaattaagattatattttattgcttttatctagtattttcttatctctatctttactcagtagttttttatcagcaacaaataaattgcttgtatttgaatttagacttctactctaattagaagtaccacaattgtatgaacctccaatgcataaggagtttatttttattcaataaaacaagcaaattaattatttaaaactctcttattaatgagtctgaggtattaagagctccctttgataagctccttccctattaatagtcacttgggatcgtaacagcttggtatcagatttcggtaatattatggagaccaaagaatggcaattgtagaaattgatttgtatttgtgtgtgcttatggtaggtgagtagcatagtcttagttctttataaatttctcaagtcataaggtacacaatgatttgggtagtgtgctgcaagcattttatgagatcacattgtattttgattttcataaatctttctcgaaccagttgagagttctccgtgttaatgtttgtgcagctggt

SEQ ID NO: 42253 - DNA, 865 bp, Manihot esculenta
  Intron number 3 from transcript cassava4.1_019619m (locus cassava4.1_019619m.g) derived from phytozome v7.0 (chr-ID scaffold11862; pos 86380 to 87244 reverse strand)
gcagtaagtaaattggctataatacccatgtttctttgaaggcccatttttgtgatatatacagcccttaaagattggcttcctagaaatcatggaagcttattgagttatagatttgtattttaaaactctttttcgggttctctctataggattttccttttgtgttccttattatcacattgccttttgttcattaaaatttctctgtttctatgaaaccatagccttgcctttttgacctttggataagtagtttttaaaagctatatcttgcatgcttgaagaagagggcatgttcaggaaaatgcatagcatgcacgtcattggatgcatgcttatatgggtttctataattacaactggtgaaattatctgtagattggttgtcaaaatagtataaatctgccatattttttcttctgtgccctatctaagtttctacagtatttatagacttttaaatacatgagttggcatgatagtcatatatggcatgtctcatgaaactgcaaatggttgtgaactagaagcagcttccattataaaggcatggttaggtgttcctttcttctagtatagactgaatatgatcatatccttcaaacttgttgcatgcaagtgattctgcagattaatttgtcatatcaagtatgtttcaagttttgctctaagtggccttgttggtgttgtgattgattgcccatatctctttctcatcttcttaccactagtacaaccacctactacaacaaactaccacttttagagaggaggggtgaaatcatatcttctggtcaaatgttataatttaggttatatatatatatattaatctgtgcctaatgttttattattacagaca

SEQ ID NO: 42254 - DNA, 576 bp, Manihot esculenta
  Intron number 1 from transcript cassava4.1_000079m (locus cassava4.1_000079m.g) derived from phytozome v7.0 (chr-ID scaffold03614; pos 3872249 to 3872824)
gacaagtgaagtgaagagacagttagttatgcgtcgttagcaggcagaagaaaatgagtcgttagcaggcagaagaaaatgaatacaaagaaaaaacactctcctaaaagggggcttttttggagctaagcggacagaacagtgataaacactattttttaaatttcagatcatcataatcaataaaatttaaaatgtaattaataatatatattattaatttttaataaaatattaataatttttataattttagatattaaatagattgtttgataagttaattctaagattacataatatttttttcttaatttagtattttggccacagataaataagttatatttttttaaataattaaataattaaataattaatttcaactgaatactggccttcggtaaagagtatgggggaagccaagccactataaaacccaccaaaaactaaacctggcgccaaatgaaggctcccaagtctgtgcaactctacaattcaaagtttctcctattcctttcttccctcgactaaagatatgtgtatttatgcttgataaaattgagtgaaaaatca

SEQ ID NO: 42255 - DNA, 710 bp, Manihot esculenta
  Intron number 1 from transcript cassava4.1_000542m (locus cassava4.1_000542m.g) derived from phytozome v7.0 (chr-ID scaffold01551; pos 1210529 to 1211238 reverse strand)
ttgaccaagctttctgtttgtcatttctccataaggtaagcatgtaagtgtttttgaatagagtttacttaggaatgcgaaaaattgaatttttgaacgctgggctgtgatttgcttttgaccttgctgagggtttttactaggtaggcaaacagaatgctatcgtggaacaattgttttgtttggggggggggggggaggagtattttcgctggcattacaaaagaagcgaaagttttttctttctttctttctttctttcttttggttcaaggtctaatatatacagtacataggaattttattgacgctaagtaatatgagagaccatttaatatgcatcatgtggtttgaagaagcagaaagcaattcatttatgatatttgtgtgactatgtttgtctattgcatgaaaactgtgaaagattgaggaaaatgcgtgccctttgcgttaccgtttgacaaattttcaaactatccatcccgttggccatacaataactacagaatacattttctcctatttcatttgcttgttcaagacaatatcaatctcgtaaggcacactctgttttaggctgtaagcattccaactgcaatgatgtttacatgatttaagtttagagctttaaatggctaagcattagtttgcaaacaaaaattttgatgctgatgctatttttcctgcagataccttcctccagaaattgg

SEQ ID NO: 42256 - DNA, 454 bp, Manihot esculenta
  Intron number 1 from transcript cassava4.1_004677m (locus cassava4.1_004677m.g) derived from phytozome v7.0 (chr-ID scaffold03614; pos 3589037 to 3589490 reverse strand)
gccttgtcgttggggacaaaagtgtacaggtctgtgcataaggattctggtttttttttttctttatttttctaagaaatcccacttaattcagaaaaatatttttcgttttgaatgaaatccatactcaaaaagacgcctaagatgcttgatgggttttgtctttgtactgtgattacatgatgggttaagtagtttgtttattgtggatttatattcttaaagctattttgtgttcttcattgttgttaatgatagtggtggagatagttatcaagcgagaaagattgcttttaattttgccttttctattgataactaaaaccaaaaactttactattatattctttcaattacttgcatgaacttaatttcatcatgatatatgaaacacgagatagtaataatgggattatttacttcatagagatcaggaaaagtacccggtgtgggg

SEQ ID NO: 42257 - DNA, 292 bp, Manihot esculenta
  Intron number 3 from transcript cassava4.1_013430m (locus cassava4.1_011693m.g) derived from phytozome v7.0 (chr-ID scaffold10173; pos 470496 to 470787)
agattgctgaggctaaaggaaaaactacagcccaggtacaaaatcttttatacttttaattaaaaaaaaaaaaaactaattagcaaactgtcgctagctaattattgaatatgaaggtgtgcttgacatgggcttatgagcaaggagtaagtgtgctagtgaagagcttcaacaaggagaggatgaaagaaaattttagcatatttgatttggaactaagtgaagatgatttacagaagatcaatgaacttccccagcgcaaaggatttccagctctcgaattcatctccga

SEQ ID NO: 42258 - DNA, 405 bp, Manihot esculenta
  Intron number 3 from transcript cassava4.1_010002m (locus cassava4.1_010002m.g) derived from phytozome v7.0 (chr-ID scaffold06512; pos 223740 to 224144)
gttttggtgcttctgcatttcattggaggtaatttgattttctctcaagtttggtttagtgactgcaagtgtgtccatacttttttgaatctttagccaggtcatttgatgaagcttaggaaatatcaatgctgtactgaatataaactcttaagcatggtgaattatatatatgcttgaaataaattgcagtagaacaatgtatttaatgattgagcatgttcaagtgcaagtaattaagaatctgagatccagagaaaagaaacaataaaataaaagttctgacaagagttcctgagaaatttttgtaggttgaaacgaaatgtcctttgtagtcttaaactttggtgaacttttttgctcttcacagatacaacatacctgagttggccaaaagatacaagg

SEQ ID NO: 42259 - DNA, 521 bp, Manihot esculenta
  Intron number 1 from transcript cassava4.1_024259m (locus cassava4.1_024259m.g) derived from phytozome v7.0 (chr-ID scaffold09963; pos 55264 to 55784)
cattcctgagcctcaacaggtacttgtttctccgttgttttttctttgtgaagtaggatttccataaacattttatgaagcatggttacctttggaactcaaaacaatatgaatttgttaaatcttatcttcaatcatgtgaaacaaaaattaaattcctttgaattctgttattcataagcatagaaaagtcaacttgaggttgtttgctccaagttttatgtttgccatcctttgttgcccattgaattttttagacaggcttctggggtgttcaattcaatgatataaatggcttgcgaagtcacttttgagtcgcaaatctgtaatggttcaagcatcaatgaacttttggaaaacagtactctgtttacttatatatatccatacacattcatatgttgggatggtttcatgtctatctggagtttgacatttcttttgatatgtgccaacatgaactacttttcatattcattgtgttttatctttcaattaatgcagggaacttctaaagtcat

SEQ ID NO: 42260 - DNA, 1054 bp, Manihot esculenta
  Intron number 2 from transcript cassava4.1_002824m (locus cassava4.1_002824m.g) derived from phytozome v7.0 (chr-ID scaffold02815; pos 35550 to 36603)
cgagggttctttgcaattttcattttcttctactggtatgtgccattgtttaacgtcttttgtatttatttttttgaagtttccctttcccgaggtattgcttagggcttaaaattctatttctattgttttcactatctgttgagaattgttttgttctacttcaattgaattttgctttcttgtttggaatttcagtatgtaatcagtagttagccaaatttttaagttttctttattgatttagctttcattgtgcaaatttaaactgttaatttatctaaattacttttttatcctttgtgtgtgtgtgcttccagttttgatatgattgggtctctgttttggtgacaattggttgtgctatggctgctaagtattgacagttatctaattacagtctaagtttataccagttgcaattttacgtttaatattagataaattatctatgttctgtgttaccattttagtcctttactctgttagaatgcgttagtgatatgttttgtagttctataggttttaaaccaacccccctccaacccttgccccctccctgctttttcgtttttttggtttttttttttgggggggggtaagggggggttgtttgttttaccactatcataaattctaaacaaaaactgaattattttggaaaaaaaaatttttttacactgacttttatggctggaagatttctccccttcgctcaccatttcaatgaattttatttgtgttcgcttcctggaaaattaaggaagaaaaaagtgaataaatttcaaaattttctccacttttttggtttccaagtttacaacaaaccacagagacggagaaggctcaacaaaggtatgtcctccaaagtgtcaaatattgaatatgaagattcattgactgttttaatcttcgtttacattcattcttctaaatttgccagctccatttttttgtttttaaataatctttgagattttaaatttgaactcctgttaccttgtcctgtattttgacagaaaacatacagtgtacaagtctggatattggaata

SEQ ID NO: 42261 - DNA, 523 bp, Manihot esculenta
  Intron number 1 from transcript cassava4.1_017814m (locus cassava4.1_017764m.g) derived from phytozome v7.0 (chr-ID scaffold04151; pos 437376 to 437898 reverse strand)
ttctctcttccatcgatacttcagtgccgattcaggttttccttcagatcctcacttcactttcatatttgtatttctacagttattgtatctctttttatattctcgtcaattttgtttggcttctgtatcgctatgacgggaagtgtatgcttccgtggttatgatatgtgtggtcgtaaatggaagtgtatgaatggacgtatagataaagctccttgtgtttcgggggggagaaaattatcctaaactgcataattttctagctgttagtgccccacctaactcaatatgatagaaaatgattagttataagcattaagcctacacaggcaaacatgtttttctacatttgaagatgagcgcctttatttttatttttatttttatgtatgcatatgaaattgatttgagttgccctagatttactgtgaacaatgcctgtagaagcgagcatgcttgttcaaatgcatgtgtctgtgtatttgtatgtgagtgaacggtgtgttctgtttttcagcag

SEQ ID NO: 42262 - DNA, 1051 bp, Manihot esculenta
  Intron number 1 from transcript cassava4.1_013458m (locus cassava4.1_013449m.g) derived from phytozome v7.0 (chr-ID scaffold04151; pos 173338 to 174388 reverse strand)
taccaaagtaaacccatctgtctcaaactctctaggtgagtgtttttggattctttcttcatttacaaactgtttttggattatgtttgataagtagaaatggtaacctatgtatttgggtatgatctcaactggagttgtgaagaattttcgtatctagtcgtttgtttataagatttctgtgatggaattgaactgatttagttgaaactgagcgtaaatttcagttgctagtttggagaagaggattatacttgattaaggaatgaatccatgcttgagctttgtttcttacttttgctttctgtcaaacctcatagaaagcaaaaggaattgagaagcgattccagacttacataaatgatggtccaaaggaggtattgaagttgatgtgtttgacagtgaccatgtttaattaaacatcaaagagtaaagttgtaactgatacgttacagttttctgctgcaagttcgttttaaaaatactgcagatgatcaccagggggtagaagaaagaacaaaatggcaaataaaagaatttctatgatatgaactcatgtagattgttgagggcataaggcttcgctatgttgacaaaatcatggttggtctaaccaaaaatgttgatttttccgccagtttagcttcgagaagtcgattttgcagctgtcgaatagcagaatacataaagactaagatttaggatatatagactattcaaggttgtctttcgtgatgcggtatggtttggagttcaaagagttacatcccaatctgcattatggataacaaacttctgcattattttttttcttttttaggagttaatttccgagtactgagaagagagctatctaaatctcaagcttttccttttgatgcatgctctattttgttctctctataaatttgttttgtaaatagaggaagtgttctctgagaatcagtttgaaaatgaagagcaaacaattactaatatattagacttcgaaagcatgggatttaatatcttttaaattgcagctagtacttttattggtgcttcgcgacaa

SEQ ID NO: 42263 - DNA, 462 bp, Manihot esculenta
  Intron number 1 from transcript cassava4.1_006714m (locus cassava4.1_006714m.g) derived from phytozome v7.0 (chr-ID scaffold03614; pos 521571 to 522032 reverse strand)
acgtctctgtgcttcctctctagcatctctctcaggtattctccaaaatcctcttcaatttcacgtcttttctttatttaattgagttccctatctcgatttggttccttgaatctcaatttgctctggttgtttatttcgatttgctatgcattatgacttttcgttaggttattcaggttaggtttttggttttgaataggattttgatttcgggattttctttcccattagatggagttttattaggattttatcattgctatgtgatttttcttttttgtaaattagttttattttggcttctttccttcacaagccatctggttccccatctttcttttatcgtcttttcttttttcttttttttttcgtctcaggatatgtgtgcagtttttttttttgttcgtattgatgattttcttacccagggatttaaattgagtttcagatttgatcttc

SEQ ID NO: 42264 - DNA, 741 bp, Manihot esculenta
  Intron number 1 from transcript cassava4.1_018059m (locus cassava4.1_018059m.g) derived from phytozome v7.0 (chr-ID scaffold04233; pos 52823 to 53563)
acggttatatcgtcatcaagaaccgtccttgcaaggtaattaatctattcatctctcttgtttgcggattgggtagatctgtattaagatctttagctttgccgttttgattgatttgatctgccgcttcgttagatcctcatgtatgtatacgaggattggatccgaacctttttagtttttttcatttggatgaattttttatgcttcgtacgcggtcaattttgttgggggattttagctagaattaaacttagggtatatagttattttgcctctgtctcttttggataagatttaccataatttttagatgatcctgtatacacccgggtggctattgttaggagtctgaaaatttaagattacaagtaaatcggattatgttgcatactttgatgtttacaatgtataattacaaataaagagttctagatgctttccatcagtaattcattgtattagtttacttatttttttgtggggacacttggttattaaatgtgaagctgtgaattaggacttaaatgtgatgtatagtgtggattatgttgtatgatggctccaacagtgggttcttgatgttggcatgccttttattagattgagtcttcacctgtttgctttattccccttttatatctgttttagttgatttgtttcttctcattctctttctaaagcataactgtattctgtgtcacaggttgttgaggtctcaacctccaagactggcaagca

SEQ ID NO: 42265 - DNA, 746 bp, Manihot esculenta
  Intron number 1 from transcript cassava4.1_028319m (locus cassava4.1_028319m.g) derived from phytozome v7.0 (chr-ID scaffold06914; pos 1352473 to 1353218)
cccaagaaagagagcgtccagacacagaggaaaaggtttttgatgtttgttttgatctcattattgctgaagttgttcataattcattgtatatctattgttttgagtctggttgataatcttgctttttagatgcttagttatgactagaagcttctatactcttggtacgtctttgtgatatggattcctttattatttatttatttttgcattgttttttcttatgaaaaattgctgttgtctaaagtcgtttttctttagttccgatcatattgtagtttttctttagtattagttaggtgcttgatgtgtttctcgtctttgacagatctaaaagtatgatcttttggaggagaaattcaatttacattttattcaatctcaatgcacgctcaggatttttatgtttcaatataactcagtgttgcagagctttatgttaatggcctagcctttgtttgtcatccaaattgaattttgcatacagccaaccagttgacatagcttttaatgcaagactttttaatttggtgtttgcatttactacaaatctgttgtatatgtttccatgagtcttgtacatgtacagtttttgcattgttctattcacgggccttgaaattcacatattttaatatttgttgttttctgaggtgttggtttcttcactctcttctgtgatgtttactgtggaggtattttactctcttttatgatgtttacagtgaaggcatttcccaaag

SEQ ID NO: 42266 - DNA, 834 bp, Manihot esculenta
  Intron number 2 from transcript cassava4.1_009753m (locus cassava4.1_009753m.g) derived from phytozome v7.0 (chr-ID scaffold03332; pos 1092998 to 1093831)
tcctgcaggttcatttgtttacatatctggctatttatttagtcgatgaaattcctcaattcaggttgcttgatggagaattctatagaaattttgttttgattgatcaccatgcgtttaggcagttatttgagtgttagttaagtcattagggatgcacagtgatgatttacaacccttgctttagatatttatcaatagagtttttctgtttgcaattagattagagaacaggaaaaggtaatattggaattggaattatcttctggcctcttttcttgtccattgtaggatagatgagctgatgtatccgttggatatggctgcgtcgaagatatgctatttcttttttttttttaaagaatgcataaatgaatttcattgatgataatatatatatgttatggtgcattatctgggaggtccagcaactgcatcttggtttttgcgatatgccttttgttgttggatgtacgtttggcctccaataatacatgaagcagttttcactggttattttttctgtttataatatgcatttcattcataaagcataatcagtacaatgataggaataatccttgtatcacttgtagacaagtatcgatggctagctgggcccaatgctcaccggtggccagctaatcactccctaaaattacataaatgaaaataaaatagaaattctcctaaatgttccctaaaatattacatattgatgcccaaagttcttatcctgtgacattttatatatataacctatctataatgaattatgtctttttgtcattgttctcactgttattaactgtttttcactttcagtctcactta

SEQ ID NO: 42267 - DNA, 457 bp, Manihot esculenta
  Intron number 2 from transcript cassava4.1_002171m (locus cassava4.1_001595m.g) derived from phytozome v7.0 (chr-ID scaffold06708; pos 362077 to 362533 reverse strand)
ttttctaccaagaatctcaatagataagagggtatgtttaacaatttttgcatggactattcagtcaaggatttctcctaccatatatagttccagttattgttcaaatatatgtggagtcgaagcatgaatgtcaattggcttgtttgacttttgttggcgatgatgttagagaaacaaatatatatggttaaaatagttcagaaacaagtatctaagtcgcagatcaaacatgaacctaattcttatatcaatgcttctttcctttataaatatcacaaagcactggtgaaaattttaacttgtcatacaggagcattcagttggcttatcttcttaatctgcaaaatttttatgaaaactttaatcttcaactatcttatttacaaataaacttttacatgatgcatgatcattgctaggtgaagcaaggtcttgcaatctcagcagctgtggc

SEQ ID NO: 42268 - DNA, 944 bp, Manihot esculenta
  Intron number 1 from transcript cassava4.1_002664m (locus cassava4.1_002664m.g) derived from phytozome v7.0 (chr-ID scaffold00341; pos 89104 to 90047 reverse strand)
aggaggagggcaacactgcacctttcccagaaaaggtatgctatttttgctagtattgttaatttttcccccaaatatgtgctctctgaatttggtttatttcattttttttattttatttatgggtctaatggcagtttgatttgtttttatttcgtgaaatatggttcattttgtttactacgcgaggccaccaccacgttgggcgggcattgatgtcttgttggtctgttcagtttattgtggttttgttcagtgttcgtaagtgctgactcagaagggttgttatggtggtcttttttagctgcatgctgtgtgtaatctctcggtgctgtgctgcttcctcagttgggttgaagctctcaagcgtaaatgatgttttacatttagcttaggatgcattactttggcacatatattcagtgattcattgagatatttggtgtagccttttacttataatatgcgttgtttcagttttgtcagtagtggacttttggtgcttgcaatagttgattcgatattgttgtcttgtaagttttatacatataagtttttcttcctttgtttttagcaacttccactttttgttcttttggtaggcttagggctttgcaaggaagtatctggaaatgatttttctcattgggtttgattgccaatacacccctaattctgattaacattatttatgcacataaatattgaagcttttttttaaaaaaaattcttttcactatgtgttgtacacttgtttcattttgtgtgtctgttaagtgttacaaaattgtgatgtatctcaaaatttccatttttattttgattcagattagcatgttctgtttctaaaatcgcttgcattttgtctttgtggtaatcatacaaagtttcttattttttgtttccaaggttcaagtgggagggtcacctttatataagataga

SEQ ID NO: 42269 - DNA, 369 bp, Manihot esculenta
  Intron number 1 from transcript cassava4.1_025095m (locus cassava4.1_025095m.g) derived from phytozome v7.0 (chr-ID scaffold03874; pos 165494 to 165862)
gttgattattcccagactaacaagcaggtctgctttcaaaattaacttccttgtttttttttctcctttttttttctgatttcttttttttcaaaagcttttaggactctgcggtttttgataattacttagggaagttaaacggtggatatagtggaggtaattactgaagacggcttgtttttatgtgctcaaagagatatgtggaagggtgtgtagtactgtttttgtatgctaattcttacacatagcagatatcaaatatgttttcttttcagttcattatcttagctcactcatgtctgtgactccctatcaattagagtttgcttacaatgaatgctcttgattagtcaggtcggttggaga

SEQ ID NO: 42270 - DNA, 805 bp, Manihot esculenta
  Intron number 4 from transcript cassava4.1_013415m (locus cassava4.1_013415m.g) derived from phytozome v7.0 (chr-ID scaffold00341; pos 366077 to 366881 reverse strand)
tttgaggtattgtgacctgttatctctttctattctctgttgttctcggctgtgaatcaagcctatgcttcattagttaatttttcagcaatgcaactgcctgtttgttgcagtcatgccatggaagatgaacaataatatatgtttgcttaatgcctgtggctatagttttctgttagagctcagatgtggaagatagatactacattagacacatcatgatgatttcgtgtcatttatcacaatggtggtctatgtcaaattatgatgatttgatctgctgacttggttttgaacattttgatataagatccaattttatatttcattttcttctccctactcctgataccttagctggttaagttcgatgcatagaagcatatatactttgtgattaaacttaatggcatgattaaaatggcatcccagtttcaaaatagatatattctaagcattatctagttgttgaagcaatgtgttggattcttttgttgatccgtaatgctgctgtctgagttggtcaaatgtgagaattcagtgtcaaatcttatgaaaacagttgtgatagcagtgttttcaaatatcattttattctttagttatatgtttccctgtttatgattttttttaattatcagtgtggattttcaactttagctgtatgcaaattatttggtctttggttttatataaaattaatttcatatggaactgaactgattttagttcaagttgcatgctgcaacctgtcctgtttctggttaactaactttgtagtttgcacttgtagatatttgctgac

SEQ ID NO: 42271 - DNA, 730 bp, Manihot esculenta
  Intron number 1 from transcript cassava4.1_013871m (locus cassava4.1_013862m.g) derived from phytozome v7.0 (chr-ID scaffold03307; pos 773 to 1502)
tgtgtttctctctctccagcagacgaaacaggtcagtcccttgttcttttcttttttcgttttgcttcttcttctctcgcgatgccctaactcagcctattttttttcctgattttctctctcaactccatcagtaaacaggttagttcctccccttctttattctgttcttctctttcctgcatcttttgattcaatcttgtttcatttttccttgctcatttctctttcttcttcttctgttatgcttctttttttttttttgtagttggattctgcttttgtatctttaaacctagacctgcatgtaatctgtatttctatggcaatctccttttttaaaaatgcttgatttgaacgcttgattgaggactgtaattgaatatcattacgttttatccgatgaatgcctcttgaagattttcttgttcaattgagattggcatggaaacaagcaaattctagggtatttaagcttcattttgagaaacatacccttgtttactctgttgctaacctctctctccatttggaacttgtcatgccttatttgaaagaagagtatttaactctctactgttgattcttatcttccctcaattggcatttatttcctgtgaatttgtttaagcgttacgctcgcatttgttgatggtatggttcgtgaattgtttcattcttcttgttattttaattacttgggatttaaccctttttttttatagccacc

SEQ ID NO: 42272 - DNA, 739 bp, Manihot esculenta
  Intron number 1 from transcript cassava4.1_002975m (locus cassava4.1_002975m.g) derived from phytozome v7.0 (chr-ID scaffold06697; pos 251797 to 252535 reverse strand)
ctgctgctgccagaggtcaggttgaggtgaggctccaactaatatgttgattcttcactttcttatatgtgaaaaaaaagttttttttttaacttttaatcagcttaaatgataaatagaaacctggttaagttgttttctcctgctttgaagtgataacagaggcactggacaaatcaaaaccaagagttccagttttcactgaatttatagatatatggagtgtctgcccccccaccctccttttctctaagttctctgaaattttagtgagaatgaaaagatgtgagatctaagaagcagcacagataattcccattttagtacactttctgttaattctttttgtctaagaactaagattcttttctcacttgtcgacaatgcactgaactaaaatgaagtttgtgatccatggtttctggaaaagattgaaacttagtgtctcaagatgaggtgctgtatatccttaatgatgaatatgaaacaacttcattcattggttcagcacaagacatgcatttttgtttcaagggaactattgaatccatggattaatgccgcttgtttccattgttttacttctgaataagggaaaacgttcaaatttctagattcatcacatttgttcgcattctgaaaatactgtgttacggataatgtcatgatgtttaagcttatgaattctgccatgtgttatgcaggtagttaaagatcttatagcctcctttgatatcat

SEQ ID NO: 42273 - DNA, 987 bp, Manihot esculenta
  Intron number 1 from transcript cassava4.1_029364m (locus cassava4.1_029364m.g) derived from phytozome v7.0 (chr-ID scaffold07012; pos 88195 to 89181)
ctagaggtgaaattttgaaaatctaatttaactgatgcatatcattgggtctatagctctttattgatctcccgtgtatcaatttaaattcactgttcctcatttgtttccatctataaatcttgaggatgatctcccccatgtttaaattatgttccttgcaaagtttgcatctgagttaattactacaagtggaatttctgttagagtggagggagagtaaaaacttttctcttttagtaaattttcagttttgggttttttggaaggaagaaaagtatattgagtgtttttccagattttgaagagaaaacctcaatttaccattttgttggggaaaatgcagaattttgaaggttttttaacagcctgtaaaacaccgtaccttataagatcatgggttatccaaacaaaatccatagctttaaaagcttgaaaaacacaattaccttattgaaacctcgttctgaacagagtaacctttggaaatgaaacaaatttccattagtttttagcaagccgacagtttatcagctttcaaatagcttgctaaatggatcaaccatttggggttacctcagttatctggacaagctgcaatcttgatactcgttaaaaacacttgttatatactgttttgttcgagattctgcatggtgcaatattaattggatataaccatatgctttttgcttttcttgtccttgcatttactatttggcctgctacacctttattttcatagcattcaaactatttatcatatagtaccttgcccttgtttctttaaaattgtttagttagtaggcctctagaattactttgctcagttataatttggaacttgcgatggaaaataaaattatgttaatcttatctaaaatgtcttgggctttattttaatactgtgctgagtgcagttctagcagctttctctgaaagtcaatgaattttacagttgaactgaagcatacaattagacaagag

SEQ ID NO: 42274 - DNA, 1058 bp, Manihot esculenta
  Intron number 1 from transcript cassava4.1_005790m (locus cassava4.1_005790m.g) derived from phytozome v7.0 (chr-ID scaffold09501; pos 577243 to 578300)
tttgttcctctctctctaaccgtcccttgattcaggtatttctttctactttcatcttttctcttgattcttaatctgcgtaggaggttctgatttattatagattctttccctctcctgtttgttgattgaatctgtgggaatttggtgaagattttcttgcgttatagtttgctgttgagtgtttctggattttattttgatttcggagctcattcgaacacgatatttgctgcttacagacatatgcttaatgggtactaaaattttctgtagtttttggtcttgcaatcgtaatttgatgggggacagatctgggttatcttttttacttgctgataagaaaataaaaggaaggtgacgaacaatgaaattttgggcccttcacttggagttaaaaatttagctcagctgagccacatgggttccgtctgttaatgaatattgagagatttagggtctttgcttgtcgattccttacttctttcttacacatactctcactcggcatggaaataggttctcttaatttgggtcctagttctaagttggtgttggagagagcttgtgtttgaagatagtttatttatgttccattctttggataattctgcataattgttatatccacagtttgtgtactgcttaaactaaaccactgcagtttccaaacgctatctataaacttgcatgagaattgagagcaccatgaatatgtcctctgcaaagtgtgtttgtgtgttttttttcctttgcaagttcagcatttttgtaaaacaaaagtctcacttgtaatgatttaaagtgaatcatgtgggatgttattagataccgtataaggttgaattggattgggatttaatgttcaattattcaaaaccttgtatttgaattaatgatttgtatgttgcatctactacaattttatatatcaaatctgtaggaatggagttttttcttcttctatctcacttacttgagtactattgacttttgtgctaggttattttgagatggttatttctttataccaggttaccatttgagggctggtctat

SEQ ID NO: 42275 - DNA, 804 bp, Manihot esculenta
  Intron number 1 from transcript cassava4.1_029853m (locus cassava4.1_029853m.g) derived from phytozome v7.0 (chr-ID scaffold05162; pos 334519 to 335322 reverse strand)
agacttgcgtcttgtttggttgcatagaattactggtatgttcactctttttcttttacaagtgtggttaatattatcttaaaagaaaaatcattaataatgaaataaatgtttatgtattaattcctaaaattgaaaaaaaatatgtaataagagttaatagatcagttttgaagatttagagggaaaatgcttttaagacaaggcaattttttttaataccaacgtcaatgaagaaaaattttataatataactgttatatgtataataattttattgtagccaatgatacacacgacagatgtcaaccaccaagaacatgaccatcacacatggctgacgtggaattagtgaaaatgtctccgttgacttcacaatatgattcgtttggtggattgaagcaatgatacaatgacaacatcgaaaaaattatatataatttctacatgtattttaagaagattttttaaggtaatatttcttaaaataaggaatttttatggctttttaaaaaatgaaaattatatatttaaaaataaaaaaaaataactttttaatcaatcaaattctaggattgatgaaggttataaaaaccttcagaattttttacttttatgaacgatgtgttctcttaaattaaacttaaatttctaaactttaaaaaccttcaattacttgaaaaacatatcctaaacaaaagctaagtatcaatataatagtaagcttgagaaatgatacaagttggccaatttgatggtgcattttcagggatacgcagtcctaacagttcaagcacacttcca

SEQ ID NO: 42276 - DNA, 681 bp, Manihot esculenta
  Intron number 2 from transcript cassava4.1_022467m (locus cassava4.1_022467m.g) derived from phytozome v7.0 (chr-ID scaffold01551; pos 2736899 to 2737579 reverse strand)
ttggtctatcaagatttactcaccggtaattttttctattatttgtttaattcgctttgtcttttaggatttgtctcttaaatagtgatttttattgggttcttcttcatgaaaatttgtgtcggattttcctttgtttctcaatgaatttgcttttttctttcaaccatttatattttggtgtttggggatggcaagactgtgggttatctcatcttagagataggaaaaagtagtagcaaagttctatttgtaagaatctgttaccaatcgatgggatttactatctttttagatttgttgctagctgatacgaattactgtttgctgaagctttagttcatgccgtaggaatttgcctattcttgttttatctgatttcatctatacgtcatgcaatcatttaggtttgcgcttgtgtggtctttgtgtaatcttcctttgcatgccttagcactctagttattcctttttatgttacagtacggttcttgcactggtttgagtcattgtctgcacgaaacttagatgcaactaaaatggacgttctatttcaaaaccaatatctgacgtgatattactgaaattctcctatgggtagtttatgtaatttactttgaaaggaaatgactcttttttaatatgtttacccacttcaattttatcaatggagctcaggtg

SEQ ID NO: 42277 - DNA, 624 bp, Manihot esculenta
  Intron number 2 from transcript cassava4.1_021675m (locus cassava4.1_021675m.g) derived from phytozome v7.0 (chr-ID scaffold04175; pos 158918 to 159541)
ctttggtaagtttctttcccctgatttcaattttttttattaatttttttaaaaacaaaattcttatgaaggaggaatgacatgtgtaacgacagctcgggaaaccccaacacgcgtggtcttcttgtttaagtcagctatgtctttcctttttgcttgtgtaaagaaaagaaaaagtctgctaaggtttgttaagaaaaaagaacatgaaattagaaaatttcggaaaaaaaaaaacctgcatagaaaattacaatgtgcttataaaatccacctcaaaaactcggattgtttaagaataaattttgaattcttaactgatttaatagttattaattatttagaagctgataaatgataatggttaattaaatattgtaaaaaataatttttaaaatttttttttaatttttaaatattagtgtctgattgtcgttggcaaatagagattaagagagagaaaagaaaaagaaaagtattcattaattaattaagttatggttaattattacataatagttattggttttggcaattggttaagctttataattaatttaaacagaagttttgataattaattatgataaaaactgtgtgtgcagcttagaagtttggtattat

SEQ ID NO: 42278 - DNA, 770 bp, Manihot esculenta
  Intron number 2 from transcript cassava4.1_008866m (locus cassava4.1_008866m.g) derived from phytozome v7.0 (chr-ID scaffold02906; pos 294774 to 295543)
tttctggtaataagagcttgcttctgatctatgtatctgtctatatcactgtttaaagttgttgatacattagagtgctgtggacgagactctctgtttgataaattaggaaaggaattacaaattacaattaactaggtaaaacttgcagcataacgaacaatcttacagaaactagaggtcgagttaatagttttacgagcagtgcaatacatgtttgggcgaaaattttagcttgtttaagtaaaatccctgaagtcgagatgctttgtggtgcataattaccttgtttgcaattaatcatactaaatgaacgttgcatttcttcacatggtctagcgcgtgtgtgtataaggcaaaagaatggagacgagtttcttgattttttccatcagaaagtatatttattgatatgaaaatgcttacaagcgtgctaaggttcaagtaaaatatatcaactcaaattcttaaaagcaatttgtcttgaatctgcaaaaagctgcactgctttttctagccttttgatgtctggtgcttgtggtgccacatttgttacttgggttgaatataattatttacaccgtactatcacagattttattgattggaactgttatatgtatgatgacatcttagaaataatatctgtcatataactgctacaaagtcatgcattcattttatagttttttcttgcaccaatttatctctgcactttctataagttgatcataatcaatgccatgtctggatttggaacattgtaggta

SEQ ID NO: 42279 - DNA, 335 bp, Manihot esculenta
  Intron number 5 from transcript cassava4.1_005424m (locus cassava4.1_005426m.g) derived from phytozome v7.0 (chr-ID scaffold07591; pos 10946 to 11280 reverse strand)
aagatttggagactctgaggctgctctccaagcttgtatcctcctttgcactttgatgttaactaactatgttcttaaaatgtggttttcatgatcttttggcaacatctttgagtggttactagtggtgttggcatcttgctgctccctttatcttcatctgtttgtgttcttgctggctcacagttttatctagtgcttgcagcatttttttccttttctggggcccaactctaaacatttgaagcataacttattatgtagaaatgatgatgcaggcacaatttgttgattccttaagtgtttctaggtgcctgaatactctttatctcttg

SEQ ID NO: 42280 - DNA, 738 bp, Manihot esculenta
  Intron number 2 from transcript cassava4.1_005424m (locus cassava4.1_005426m.g) derived from phytozome v7.0 (chr-ID scaffold07591; pos 12058 to 12795 reverse strand)
tttcacttgatcttccagtcctctttgtggtagtggtagggttcttgatgaacaatgaataccttccccaattctcaacagattattgagtgaatttcgcttatattacatttatttgttttctgaactgtagatattgaaactatttagataatagagttcatgtttctctctctctctcttgtgtgttttggaatgttctgttctcatctttttctgggttgctgctatacatgtctgtaatctcagagaatgatgtccttactgatgaagcaatctaaaacttacagttaagcataggctaaatacctttatttgtgtgaaggcagtaaaagtaggaatggggaaatagatgtacgaacaactgattatttttgtcgtaagacttgtgtagatagaatgcgcattggtcattgcaatcctgatctcagattcttttttcgtttcttttcatttccttactttcttagtaatcaaactgacctgttaactgttgcttatgtctgtttgattggtgatagattatgtatagatccgagatgggggtttcctcaagattttagatcactttgtcttgtttaatatttaactaactagttgtttgtttaattggaaataacagcttgaaattaaaattaattgaagttgaactgctcttaacttttttttttcctggtgatgttaactgaatttcttttttcaggggctgttaaatacaaacttttctgtggtctattt

SEQ ID NO: 42281 - DNA, 729 bp, Manihot esculenta
  Intron number 3 from transcript cassava4.1_006369m (locus cassava4.1_006355m.g) derived from phytozome v7.0 (chr-ID scaffold06512; pos 2048425 to 2049153 reverse strand)
atcgaagggtaagatcatttatattatgaagcttagtttagtattagtttagcctcctactgttgagcatgtgtctttttttttttcttttttgggaatatggcacattttaagcttcttaaagttaatagcgttggcattagctgttggtcgatgaaatacaagtaaattatatgctttctggtgtatattaatgtactcttgacatcttgtgattaagttagcatgttgatatggcagtatctattcaagttattaatttctgttattagggtgataccatttctcaacattttttgtcatcttctataattttgtgtcttcctatgttgtatagttatcacgctttctttatttcattcaaccattccataggtagaaaacaatattcctcgcttgtggaatttgtattccacgaggtttggaaatataaataaatatgcacattcaaaatttctgcctaaatgtgaaaccagggagtaggatttcacaaaccaaaccgagcttccatgtaatattgtgcattgttggtttgcttcattcttgtatatctgttcaaaatttatggagactcattgtcaattgactttgaattatggagagatctgtgcacagactgttctagtttgcttcagatgataattattaccttaacccaccatgttttatgtgtagattctgacaccttttttgactgttgcataatgcaggccagagctggtatagatt

SEQ ID NO: 42282 - DNA, 1017 bp, Manihot esculenta
  Intron number 1 from transcript cassava4.1_030114m (locus cassava4.1_030114m.g) derived from phytozome v7.0 (chr-ID scaffold05162; pos 629007 to 630023)
ttcatttgcagccccttccaatcgcatcccttctggtgttcttttttatctatatatatatccgctagttaattaaattatgccctttcagttgtttgttattcgattatgacttgcttggtggtgattctattttttccccttttttccctccttaatcgatttgttctatatccaattcctttatcaaaatttagggttttttcttcttagattaatactccctccgtcacctaacacgttaataaatacaattttttaaattaattttttaattacatccatttatatttaaatttaattaaatattaaaaagtaatttaagtgaattcttaaaaaataatcttaaaataaaattaagtaagattataataggtaatttatatattaatataatttaaaaataaataatgattttgagacagtaaataaaaaattcaaaaattagggacggctagtatctgttggcatagttttcaaagagctttactggatttcattatgtccgctgtagtaaactcctgttaaagagagttttatgcatttaatgtctttcaggtgtatgctggattcacaacatttcgctggcgtagaagctctaatagcttaagtatgctatattgctatggctatggtttggttgcttcccagtgatcacttgcttttcatttgttttgatgattttgtcatttcctgaaattaatggattaacatccatatattaacatttgaggaaacaggccttcaccaaattattgtgggtttttacttttctctaccagaatgagatcctggtttcacaaggggtccctgattctgtggtcttgctgtctgaatgctgtgatgtgtgttcaaatatattgtgcttgtattgaatacaccttgtaactttatactaaaatctaatgttctgcagtgaattagtttcatctgatactacctttctaatagtaattgtcatgttgtgaatttgttcttatggggcaacccctagtagacttcagatcttctcttgct

SEQ ID NO: 42283 - DNA, 468 bp, Manihot esculenta
  Intron number 1 from transcript cassava4.1_022052m (locus cassava4.1_022052m.g) derived from phytozome v7.0 (chr-ID scaffold08003; pos 260267 to 260734 reverse strand)
cttttcctcttcatttctgagttcagtatgtctctctctttttcttttttttcttttcttgattgcttattaccattgcatatcaattcttgaaggttatataggagatgtttaaggttttaaattagttaaaatttaggtttttcaattctgcatgagggttccttacatgaatgcttcatatttgtagtttaaataagcttgcatttagttttttattctaaaaaatttaagaaaacttatataaattttaaaattttctaaccgattttgattctattcgaaattagccgatcaacttgagtaggtttggatcagatctaattctaatttccaataataaatagtattggtatggttcataaatccaaaccatttgactggacattgagcaaatctctctttcatattggatatgatgatcacagtgattctcattgtttttttttttgccttgaaggattatat

SEQ ID NO: 42284 - DNA, 575 bp, Manihot esculenta
  Intron number 2 from transcript cassava4.1_015341m (locus cassava4.1_015341m.g) derived from phytozome v7.0 (chr-ID scaffold01127; pos 574549 to 575123 reverse strand)
cagaggcttacccctctccttgcatttacactcaggtatttcttcagatgatttcctctgatgtttttaagcactcttgatagatgtgttagtatatgatattgtcaatgctaataatcgaatgactcgtgtattgggcatgcaattattcgctcttcgtttatttgctattgcagttcaatttgtgggtaatttttcaattaattatatcacattttagcgctgtttgaatcggtttatgtaatttccaagactcccattttcttatacatcgaaagccatagtttaagtttgaaatttttggaatttgttaacagcagaagtatcgctactctccaaatcaaacttatgtgtgcatgcttgttaattggttgcttcacttatggtctcgagatacaatgatatgagcaattttagtttgcattttacattagtcatgcggtttcttagtttagacagcttctgatttctcttctattttcctgttcaattaagttacatgttttcacctaataatactgttcaaacacggttcttctgattaacattgttttgttttaagatcgagatagaag

SEQ ID NO: 42285 - DNA, 147 bp, Manihot esculenta
  Intron number 1 from transcript cassava4.1_020714m (locus cassava4.1_020714m.g) derived from phytozome v7.0 (chr-ID scaffold08167; pos 308747 to 308893 reverse strand)
gaagttccgtctctttcttctccagtgattcttctcctccttttcatgtgtatattggactaattatttgttttgggtttttgggtttgtcttgttttgtcttgatttgaattttgaaacttgcagcagtgtttggcttccgagaaa

SEQ ID NO: 42286 - DNA, 501 bp, Manihot esculenta
  Intron number 1 from transcript cassava4.1_031502m (locus cassava4.1_031502m.g) derived from phytozome v7.0 (chr-ID scaffold03049; pos 101974 to 102474 reverse strand)
cttgtagttggggcagagcttcctttcttaatctggtaagttttctgtgaattttgagttctcacctggtataagtgtagactaaagcttttatcttgagttttcattgccagttctggtaaaaatattttcttgttcagacagttccatgtctagttctctgctttcctgagcttgacaaactacagatcattcatattgaccagagcaaattcacaagaatatgcacagatatcaatcacccatatgtttttttacttttctttttttggtattttatctgatatttgataaatgttcacatgttctcataaaattgagctaacataagttatctgagttccaagttcaaagctataagcatacctgagaagggtcaatattgaaaaataacatgcatcttatagtatgttgtattttttttttttatgcatctaatccctttcttttcaatatttttaaaaattgttttgcaggatcttacaaacccaatactgctaa

SEQ ID NO: 42287 - DNA, 432 bp, Manihot esculenta
  Intron number 1 from transcript cassava4.1_007711m (locus cassava4.1_007711m.g) derived from phytozome v7.0 (chr-ID scaffold02165; pos 485250 to 485681)
tgggtttcaagtgcaaaggattcaaattttccaaggtgagaattttatgaaactttctatctcctgggattttattcattgtttttggattatctgttgtttccttttgaaaatgggacgagcaagtgatgggcattgattagatgtagtcacaatcctttgtttcttcttggctttttcttgattttgatattattgtttcttgaagctataactgaaaaaaaaatgtataaagcaattatgaacatatctaatccattttaagcagtcgactgtttataaacacaaacttgtagtgaccattcataaatctgtgcctaatgcaatttagattaggtgcatgtttgttaactggtcatataattctggtttttgtgctgtttaattctgttgaatatttccctattttggtcttgcagattttcatctctg

SEQ ID NO: 42288 - DNA, 914 bp, Manihot esculenta
  Intron number 1 from transcript cassava4.1_021026m (locus cassava4.1_021026m.g) derived from phytozome v7.0 (chr-ID scaffold03614; pos 375483 to 376396)
tggcttctcttccttctagtgctcaacaggttttgctttaaattgtttactatgcaaaccctttctttctttaatttttatttccacaattagtttcatcaccatgtgtacatttgtgctcttttcctgttcattgcaatgattgattcatttgtgatactggttgctgaggtgttttaaactttaaagagggcttttaaagtttgacgaaagtgatgcttgagcagcattttgaaattctggtgttacttgggagacatcagtagaccaggcaactggacactaccccacaatttgacaagaatattctttgttttatctgatcatgttactatttttaactcttcttttgattatctgtttttggatttcaaggtattatggtcccttaacttttttaaattttgttgctgctagattttggagacatgcaaggcaattgtattaatctacataacaatcaagaagtcttctgcttttccacaatcttaaagaatttaatttgttatttgttctgtttccaaaatgttttgattatagttgttcgttttggtgataataatgcactaatactgatccaaggaacaaatattcaatatgtgaacttgttcctagggatgattactgagtagtacttcttcatgatgtgattgaacttgatctttggtccttcctcaataactcagggattctgcagatttatttctgtgagttttgtttcagaatcccaagtcaagtgatgaatgtgatgggagacacacaaatcatggagatcttctaagacataggggtctgctttttgctccctctgagatataataaatttcctttagaatttcacttaaattgacatgattctttctgatcctatttgaacagatcaacccactgaccactgtgcaaagtaaagacag

SEQ ID NO: 42289 - DNA, 561 bp, Manihot esculenta
  Intron number 2 from transcript cassava4.1_009732m (locus cassava4.1_009732m.g) derived from phytozome v7.0 (chr-ID scaffold03049; pos 813899 to 814459 reverse strand)
ccaccaaattggaaaaggtagttctgttaccatttatgtactataaggcattggttgaacaattagttttcagtatggtagcttcacattgtattgagttaggatatggactatggagaggaaaaatgcaacagaaagctgtatgtctactgtttcagttgttattgctgtattctatttgtagccttacaaatttatttgcttctttattcctgaagaaatgggatttgttgatgaatgcaataaagaaaagttctctgtatgaaatatcaagttgcgctgtatatgtgtattactttttatatgataatattagtttatgtcattcatgcaaaagttaaaaccctcattatgacagcacaagtgcctcctttttgttatttgtttgtagttcatgggtaccattatattattgtggtgctgtagtcaatctaatttgtggtccttaattataacataactaaagtaggataacatactaattaccttaaaaaagttttttcagatatctaaatttgatttttatgcttaattggaagaatcagacatttgaaaagacaa

SEQ ID NO: 42290 - DNA, 489 bp, Manihot esculenta
  Intron number 1 from transcript cassava4.1_009732m (locus cassava4.1_009732m.g) derived from phytozome v7.0 (chr-ID scaffold03049; pos 814499 to 814987 reverse strand)
ttcctcttcgtcttcaggtggcgatttcacttcaggtataacggtcatatttatgtgtcctttagcatttttgacaatgaacaaataaattgtttgttaattttctctgtttaaaatttctgtcaaattaatattcaattgaatgcagaagtggagtccttgctagttgtttcttatgtaattacagcattagcacttttagtatcgataaatttcccctcagaggctgctttgatcttttacttggtgaattgtttcctgaatagatatagcgatctgtctttcctggtccttgttgttcaaataaaagctgtacgttagagcagtatcagagagtcagttggctgaattttgatgtatgtaaaagagtcgttattttttttgtatattgtctgttttttggttatgccactgtgaaaaggtagaatgaaagctggcctacttctcgtggtcttaccagatggtttcttcatttcaattttgcagagg

SEQ ID NO: 42291 - DNA, 594 bp, Manihot esculenta
  Intron number 3 from transcript cassava4.1_027337m (locus cassava4.1_027337m.g) derived from phytozome v7.0 (chr-ID scaffold03614; pos 2628774 to 2629367 reverse strand)
ataaaccttcctctgcccttgagtaagtcttccttttcttatcatatctgaagtgatgggtaggaatcgttgccacattgtttggttagactacttctgctactttggaaattctttaacggattatgagcagacatttgatcactggattgaaccaagccaattgtgattcattatctttccttttggcctcatgttctcttcttcatgtcagtttttgggtcaagaagttgagtcttaatttgctttatcaatatgtatatagtagatagggtgtctaatcaaatttcagaaagaaataaaataaattacatctcaaattggaggataaaactaacacaactagaactcattttgcttattttgggcttcaatgtggtttcttcaaccattttagcttttgagtaggcttatgaagttttaatttggcttgggaagctgtgtgataagtggtctgtttaagaaacgcatttatgcttttttcattattaatgacaattaaacaaaaatgattgtgatgcatgtttttgtgtagctaaacatatatttgttttgacagatttattcaacaaaaactcggtggcccaagtttgt

SEQ ID NO: 42292 - DNA, 723 bp, Manihot esculenta
  Intron number 1 from transcript cassava4.1_002028m (locus cassava4.1_002028m.g) derived from phytozome v7.0 (chr-ID scaffold04175; pos 724015 to 724737 reverse strand)
agtctccctggctattccgattccgccggtgcgtgtttcttttgttctgagcaaaaacccgtagctatttttagctggttttgtttgttattttgggtaaaaaatgatgggaggtattgtaattgtatatttgctttctgttttttttttgttctttttttgcggttcaacgaatcgaaattcagtggggaattcgtgtttcgaattgttataattttggggtttatattttatccggttctaaaatatctagaggtaacggagatttctggtcggtcttgtcttggtgaaaagatcttaactaggaaggtcattttcgaaggaaaaaaaaaacttttgatgctgatttttggaatcttttaagcttgtgtttgatgaaatgtctaaatcattttatatgttcattctaaattttttttcttttgttttataaaatttgttcgttattgggtattcgagtttcggcggttggataacatgtcttaatcaaaaccttgttaattcttgtttacatgtcagttgcgtctcgcgaatgcttttatcgaatagaagttgcagattctacgttaattagcttgtttcttgggttaatttttcacgaattcagaattcttcatttggtgcctggaagaggagtttcttttcgcttttaactatatttttaaaattctccttttgtgtgtttcagttgttatagatttgcaacataattttcattggaaa

SEQ ID NO: 42293 - DNA, 499 bp, Manihot esculenta
  Intron number 1 from transcript cassava4.1_002044m (locus cassava4.1_002044m.g) derived from phytozome v7.0 (chr-ID scaffold06868; pos 60165 to 60663)
ttcgacctgggattcgtgctctgttaaagaagcttgtacgttgctttgatcttttctcgggtttttgttactgggtttgttctgttttgcttgtttggtgtctggattattcggaagtatagtcttttttgaatgattatgatctcttgttggtgttttttgtttcagggtatgcatttcttagattttcaattttattatttccactatttgaacatattcgtctttgaatcgttgaatttgtttgattgaatgttgtgatacgtgggcatgagcagttcttatcgattatttgatgtttcttcattttccatttaaaacgtgtcccctgattttttgttttcctcttcatttgagctctggggaaggagcttgtactgtttttatattttggttttggaatttaaaaatggtttctttttgtctttgatatttatgttgtgtatatacatggtgctttacaggagactgatttggaagaattggagagaacagtgga

SEQ ID NO: 42294 - DNA, 507 bp, Manihot esculenta
  Intron number 2 from transcript cassava4.1_004335m (locus cassava4.1_004335m.g) derived from phytozome v7.0 (chr-ID scaffold01551; pos 1391155 to 1391661)
tttgtggaggttggcctttttcttttgggatttgttagaatcaaaggctcaaattttatttctatgtgatacacctaaagatttctgaacgcctggttggttgctgaaaaaatagagtaaagaagaggaatatgcttttgaacttggtgctcaatgatcttgtgattctcaagtatcaatcacttatcttttttgcgaagtagtagagctagcctgagttaactgcaggcatgaagcatccaaccagtaaaagaaaataagattttccataaatctggtttcttgatccccacatattcttaacaatgggcttattttattttactcaattttattttctcttgtaacaaattagcgaatgccatctctcttgctgttttgtttctttattttttagtactaatttagtttcccatgttcatatttttgagtctcagtagattgacgcttagcgttgattctctttcttcaggcgttgaagtggaatacaggactagcttctctgaa

SEQ ID NO: 42295 - DNA, 679 bp, Manihot esculenta
  Intron number 4 from transcript cassava4.1_014510m (locus cassava4.1_014524m.g) derived from phytozome v7.0 (chr-ID scaffold07519; pos 364291 to 364969)
aagaaaggtatgtacacagaacgtcagatatgccaattttgggacttgttctggagcaaattattataagatttaagatttgttgtacaggagcatgttccgtgtctatgttgacaccagccaaaacactttttcatgaattaatttgccagattcctattgtttatgttcaactctttgaagcctcaagcataatttaattgacatcctccatgtgaaatatatatatatatatatatatatatatttcacgtttacctagtttaaagctacaattataagaaggtttgatactgctgaataaacaacttctcaccagttagcccaaatcatcttatggcctgtgtatatctcatcttcttcatgtctgtaacttggatattcttaactttctctacctatacttgtctctgtatgtgcttttttgcttaagaaaatttaagaagttactgggtcactcatccttttattgcccttgtgtgttattctcctctgcaagtccattgactggatacagtaatagattgttagagaatctttgaaggtagtgtgattctctgtgtagtgtattgaactttcttcttttgaatgttgaaccctcaaccttttcccactctcctctctcctctatatctctaacataattactcatgcattgacaagtcctccatttttaggg

SEQ ID NO: 42296 - DNA, 752 bp, Manihot esculenta
  Intron number 2 from transcript cassava4.1_019883m (locus cassava4.1_018827m.g) derived from phytozome v7.0 (chr-ID scaffold03614; pos 3096058 to 3096809)
caaagaagtacgagcccaagtacagacttatcagggtaagttttgcatattttagtttttcttccgatagaaactttcatcattaattgcttaggttctgtttggttaacttgcttccatttttatagcagaaggcaagagaaagctagctaactaatcagtgaccaatattttttatattggcacaaactctaagaggccaaaaatggcactgtgagagctaactaatcactgctgaaccagcttattgtgtgtggaaagtttatttatagattatggaatgttcacacttccatgtgatgatgttttctgattggtcctgttgattcacttccccttcttttaaatcagaatatttagttgttggttaatatggagtaatatggagtgttttatataaatgtgtatttgtatgaaaagtgaaaataattacccaatttgtatcatggtcttcactaactagtgaaattcttttatatcaattgggttattgatttttaaagaaattgtgtttctaggttatgtaatctttcaatatatgcaatgcataccttgttctctgatggttaaagtaacttcaatatatccaatgcataccttgttctctgatggttaaagtaacttcaatatatccaatgcataacttgttcttagttttcttgggtttgattgatatccaattgcggtatagtagttgttcttgtccttgttgtttgtttgctttctttaagtttgtgtcctgtttgtacaga

SEQ ID NO: 42297 - DNA, 418 bp, Manihot esculenta
  Intron number 1 from transcript cassava4.1_021227m (locus cassava4.1_021227m.g) derived from phytozome v7.0 (chr-ID scaffold03614; pos 3387179 to 3387596 reverse strand)
aagctcgtgagtttcaccagaatcattggtttgtttttcgtcttcctctttttgatttttaatttagatgatccagagagtttaaattttcagggagtatccttgcatacatggtgcttatgcttttgctatcaatcttatagattgcaaagcactgaaattgaaaatttaatgtgaattgtagaatacatgaagcacattttatggattcagtatgcaaaatttgagctcaatcacaattatactttataagcagatgtcaaaatctgaaattgcactgtagtaaggcttttatgttcttgcatccatgatatatcctctgttgcactttgatacgcagaagttctcaggatgttacctgcaatattgttttgattttgtagactttatccagaggcttattagcaagaataagata

SEQ ID NO: 42298 - DNA, 511 bp, Manihot esculenta
  Intron number 2 from transcript cassava4.1_024435m (locus cassava4.1_024435m.g) derived from phytozome v7.0 (chr-ID scaffold03614; pos 2960890 to 2961400)
agactgataggtcacgccgttctgcgcatcaagaggttagtgtctcctgtcttgatggccaggccatttatcatcttatcaaagaatatgtgacaatatctctgtccatatttatgtcttcgtgtgtttctgttctgctgaaattctgctatgcttaattcacggttcacacaaaaaatagttttcaataatctctaaggaaaaaaaaaggcatttgctgttggcattgttgttcctttggaaaaaagaaaaagtcacagtgctaatagagggcctgaattcagtaatttatggttgatacgcctaatgcatcttaacatcattgaacatggatttggaatctcattacaataaattctattttgattggatttgatctgttttaatgaattcctgcactgctagttgtgatatggctgaaaccttttagctgataatcagatccacttgctcaacatttttcgtgtttcatgcagaaggagcttatttctagaattcgaaatccatttat

SEQ ID NO: 42299 - DNA, 562 bp, Manihot esculenta
  Intron number 3 from transcript cassava4.1_024435m (locus cassava4.1_024435m.g) derived from phytozome v7.0 (chr-ID scaffold03614; pos 2961397 to 2961958)
ttattgtagagtacaaagattcctgggtagagaaggtacttactgcttctaactatttgttaattacgtacctcattttgttatgtcgtcttgctgccttcatttactttttccttgtcaatggtctgtgtgagtggatgctgagtttgattgtggtgttcttggcattttaatgtttcatttgagctgaaaggtgtccaattcatctccctacttaagtccttagattttccttttaaatttacatatccaaactagtttctatgtgttcaggggcattgcataatcctttgacataacatttttttctctgagagccatcattaaaaatgtttactatggaactaataacttatggaggtgctttgttgaatgcccttggcacagtgtgatatgtttttccgatattcattgtcatgaactccttggagatccataatttgttatttatggcttcttgcttattaggctagtttttgaagcattattatggttcagaactctttgagtgaattgcctaacaatcattcaacgattttgatacttttgactcagggttgct

SEQ ID NO: 42300 - DNA, 1015 bp, Manihot esculenta
  Intron number 1 from transcript cassava4.1_011849m (locus cassava4.1_011526m.g) derived from phytozome v7.0 (chr-ID scaffold01551; pos 724301 to 725315 reverse strand)
tcttttggagctcgaagctcctatcaaaatctgtggtattttgccttcaaaacctatatgtcatgtctatctatttccaactgatagaattcaattgcctattaggggctacgagtattggttaagatattagttcggttttgttttattgcaaattcaatgatcagcatagaaaatcaattattagaagtgggtcttaatctgtcttcagtttgtatgatttctgcatcggttatgtttcgtatttataggtggattgtcttctattctcgactttgccggtagaatatgccaaggatattttatgaattttgtctataaaagattcctggattggaagtctgttcttgcatctaatggatgttttgaaatacaagctgttctttcactgatattgattccagaaaccgttcttctaatttggttcaaaatcagtttaactaaactgggattttaggttctctcaacgaaggacctttactgccttacctttattatgctcaccaagtgtttgcaccaaaaacatcaagaatagcaatgcaatttaaaaataaaaagggccactcattgacataattaagggcaagaaattctaatgatctcattggtggatgtatcctaacttcaacataattgataaatcctagctattcttgtctattatagcttgatatcttttgtgtattcatcattctgctacatctcttaaatgaaatatctggcatgtgaaccagcttggctaatctgttttctcaaattcattctcttcactaccttgttttctaatatatcatcccctgttcccctctgattttgggttgcaaactttgagaattgagatttgcatgaattcctttccccagtaacttgcatgaagtcatacaatattattctaagctgtttataatagtatcatttatttgttttctttttttgcttttaatgttattcatctgcagtagttttatcattctcacatgtgttacttgtttctttataccaccaggagatatac

SEQ ID NO: 42301 - DNA, 960 bp, Manihot esculenta
  Intron number 3 from transcript cassava4.1_010309m (locus cassava4.1_010309m.g) derived from phytozome v7.0 (chr-ID scaffold07762; pos 268803 to 269762 reverse strand)
acacttgacgaattgcgcactgaggtttggtatgctgcttttcgttttatcaagtttgtccattatgctagacaaatggcgtgtttggcattgggtttggcactcaaaatgtttattttagatgcggttgaaaaaaagcattttggaaaaatgttttattattttgttgttcttatgacttaaattatataaaaaataattttaaatgattttttgatattttctaaatattatttttaaggaaatgcttctctcagctccaataacaatgccaaacagaccctaaatttttattccctttttctgttcagtagtcagttaaataatggggatgaccgcttccccatgaagtatagggacgtcaatttattaaaatctcaaaacatcatgaatatggacatgcattgttattaagtaggtgctgcattgattttccaatgtactagtggaatttatagcatgtggtgtttgttaagttgtttgttttgcatgccatgtaattgcgtggttgtcatctctgtttctgtgtttattggtctggatggagcaaaatgacataaaaatattcatgtagttaatcctgtttatttgagattatgacttccgggttaattatattaatttttggttgtttccgtttactccaatattatttgcattgtagttctttctataatatatttagaggtaattttgtcgattttttttgttagtttttttttgtttttaacttaaccgaactatttgagaactttcagattagtgattggctgattgcatgatgcagttcatcattttatgggaattatgctttttgggatctgtggaagcacataatataatgatattaatctactttttttttcttgaattatgaatttagaagatgcatttcacttttcttaaccaatcctaaagcaagattctgttttgcactattactttgtaggttagttgcat

SEQ ID NO: 42302 - DNA, 891 bp, Manihot esculenta
  Intron number 1 from transcript cassava4.1_026032m (locus cassava4.1_026032m.g) derived from phytozome v7.0 (chr-ID scaffold01701; pos 675333 to 676223)
aagcaactgtggagttccgagggactgtggcggaggtattgacgacattacaggcgtgataagagctcttctcaagcttgccatttttcttgatccgagttttatttggacgttaaaaagttaaccttccccgccgtgaacgaaaaagaaaatgatggactaaagaggcagtgtcgtggtgggcttcaacagattgggtggcatccaacaggcccgcatactacgccacatttgatccaaaagggagttgggctccggttcagttattgtccactgccaaagacaacgtgtttctctgactaatttctaatctttctctcttttttttttcttttccaattgaaaaaagaaaataaataaaataaaaaaaggcatcgcggtgggcaaatatcaaatttgtccatgtcaatttgccatttgcaaaaaattactctattgtggcattttatgttttattaaagtttttcgcacattgtaaattctgcatagagttttttgtcacagggcgcacttgagcattgcgcctgtgcggcacttggacaggtcccaacgaggttacagctcgccaagttcaatctatcgaggagttttgccatgctgaccggtctcgccctgccttgggctcatcagaggagcggctccaacccctgaccagggtgtgtaggtacggcgatcccacacacaacggcccttcgaacaactccccacccaatctttacggcaacattttccctagcatggtgtcacggcatccccaagaattatgcatgtgacaatctccccactcaatccatgcttgccctcgagcatgtctgcaattaagcactttgatcccagcatcgtttctccgaagtgacgctttttcacccaagctacgagcgcaacgagcca

SEQ ID NO: 42303 - DNA, 393 bp, Manihot esculenta
  Intron number 1 from transcript cassava4.1_007525m (locus cassava4.1_007525m.g) derived from phytozome v7.0 (chr-ID scaffold07708; pos 33907 to 34299 reverse strand)
gcatccaggtatttatctttcttcaattcggtgcttggatctgtgtttgttagcttcgtttgcatttgttttgcattggatctgtatatgtttgcggatttgtagttatttttagcaatttttgtgttaatttctagtagatttgtgtttaatcggtctgaaattttttatattgtgtgttcgatgttgtcaatttctttattccttcttcggatctgtaatttttggggattttagcaattttgctttaatttttcttagatctgtgtgtatttgttgtctgcttctaggtatagaatcagatctgcaaggttttattcaaattttggttgtgttctgtcattaatgggttattgatctgtttttgaatttgtgttttctttgttcagcctg

SEQ ID NO: 42304 - DNA, 1010 bp, Manihot esculenta
  Intron number 1 from transcript cassava4.1_004819m (locus cassava4.1_004819m.g) derived from phytozome v7.0 (chr-ID scaffold06550; pos 120731 to 121740 reverse strand)
gctcgcttgggacacgcaaaaatctgtaatttttctctcatttatgcacaaagctctttatatttatttattttcggttttctgttagttttggagatcgatcttgtggcaaatttattttatttttgtgatttcgtactttaacctgcatttagtggctaagatttttatttgagaaggtgggagactaagttcagatacaagttggttttgtagtttcaattacgtacatgtcaatacacattggtttggcagaatctccgttttgcttgctggcctgttagctccctgttacataatttatttttagcgagaagattaggcttatggtactattcccaatcgtcgtgtatataatgtagttgacaccgaaaaacttgtggtgaatgcttttgttttatgttgattcaaattttatggagatagtgctgatattgtagaattctggtggtgtaattcatctcaattatgaccaaagttctacgagcatggtgttagtgacatgatgtcctgatagtgtacgtggtgtcatgacaaccatcttgtgtttaaatgaagtcctttaattttggtatggagctttgtgattctactgctatttgatcattctagtatttgcttgtactgcatttggtttcttggagaacgtgacaaagaagttagatcatctgccccccaaatttttgaattttattggaccttcatagatctaaaagaattgatccaattgacttggttgacttcataagtttatctttggaaagggaataaacttaacaaaaatgatatgagatgtatcttttcctttgcattttgcattttatcccagtaactggatgaggattcagatgagcttttcacattttcatttgtagtgtagttaatcagtaaaaagtgcagcagcatgtagttatggactttatgcctactgcttttttcaggcaggcctaataaagatgttattcttgtctgataaaatttttattcactttcctaaaacatgcagcatt

SEQ ID NO: 42305 - DNA, 618 bp, Manihot esculenta
  Intron number 2 from transcript cassava4.1_015708m (locus cassava4.1_015708m.g) derived from phytozome v7.0 (chr-ID scaffold01127; pos 14643 to 15260)
ggagctgtgcaaggtatctctctctcgctttctatatatgtatttatgcttgtgtatttaactcttcttaattttattgagctagtggtgcgcgagtctctacttcatgttttagcttcctggaataaaccgagatagagtcgcaggcattcggttgtatgtgtagttatcagtttgttaatttcaggtgataacagattcaaattggaaaaacaaattaatttaaatgttttggttgactagcaaaaggttgccagctagtccctaaccagcaaattaagcttaattctggaatctggactcttgagctatgctactaatgcttccattgcgatttttttattttgataaacatccatttccatatgatgctgttttgactaagttttgggttatttattaacttcgcagttcacacacacacacggggacatgtttcaatgcatgtaaaagaatattttctgtgttgaactgctatattacaatacttttgcaatttaatgtatgtatttggttgtttctaaaataattcagttcaattcttatcacccatatgatttttcccctttgtacttgtttgaagattccccaagtggttctgcaactcaagctgaaaag

SEQ ID NO: 42306 - DNA, 1045 bp, Manihot esculenta
  Intron number 1 from transcript cassava4.1_005098m (locus cassava4.1_005098m.g) derived from phytozome v7.0 (chr-ID scaffold01551; pos 1743214 to 1744258)
tttttttcctcctcaaaccaaacagaatcacacaggtactctcactccccccactctcaaatgctccatttctgaaatatctagggttttggtcggctcttggtccccttgtgctttttgttttcctttagctaacagttacgatatttggaatgtatgactttacttttagatctgtttcctttggggatctttttacgataataacaccacatttcttagttccttgggtcttccttcacattctctctctttagctagggtttcttggtttgtattgttttcctttcgtttcttgtgttgtatttctggtgcaaatttttcgtacgctgtttgttaatagttgcagttgagattcgataatttgtttctacgcatgtattggtgttccgacattttgttgataggagcatcagattttaatggaactaaatctctgggacaaacagttgtccgcgcatgaagtaaaatcaatagtggtacataactcgcactcacagaaataccgagtcttccattatttctacctgtttagtatagggcacaattattagcatccctttccttggaccaatggtttaatgttggtggaattcaacctatagcaacccttacatttgattaattatgtttttcaaatattttcataacttcctgttgcatttttcttattgctttagcaaccattttgagccctattgagtttctggcggtcttcagttcaggcggctctcatttggatactggtactggctgccttcactctctctctctctctctctctctctctctccttatggaggacttattttcacacaaccgcagttcaggaccaggatccaaatagctgaagctgacccaactgttaggattaaggctgactttggttatttgtctagggtatccttagctatttttatcctttatttactttcccttatttccttgggtttgttgaatatatatatatatattttaaaaagactcaactgaagagcaaagtgctgatgttttgcagccccatctgtaggttctttattttgcg

SEQ ID NO: 42307 - DNA, 1027 bp, Manihot esculenta
  Intron number 2 from transcript cassava4.1_020145m (locus cassava4.1_020145m.g) derived from phytozome v7.0 (chr-ID scaffold06853; pos 203741 to 204767)
caagctaagcaccttgaggactgctcggttgccaagtcagtttcttttttcccctttgtttctgtagaattttgtgaattgagttcgcctctgctatgatcttactgtaatcttttaggcatttgaaaccttaattgccatgttatggcgatcacaggaatgttggaataagattattcttggatgtacaagcaaaacttgtttgtgccgacatatctgccaaatcctgatagcttttctagttctttttaatgcttggttgatcttgtggtttgtattagatgatggtgtcactttacaatcattttatatttgcttgtattttaggtcatataatcttgattagcatctccatttttaaagttttgcgagcaatagttgttaccaatagccaagcctttagctgaacggctcaactttgctagttttgcaactgctgaattgatattacaaggttttcagagtagttgcagtaactttgttgcttgccagtggaaatttttgggctttttggttatttcaaaccattttagtagaatttttcagcttatctaaaaaataacgagctcaagttaagagcaagcatgtgttcgtagctgacaaacaggagagaaatgacagaggaggggagaagaatctcagagaaagagataagagagaatacaagaagaaaagtgagagataatactacttagctacaaactgctaacttcttctccatgcaattcctatgttctctaataacccgatcctctgtcttactgtataaaatcattgtactcatgcatagaagtgtatctggtttctaattatgctgggtaccttttaatttaacacatctcaattgtaaataagtttactgcgttgtcttttcagaaagtctcatccctcaaatcgtacttgggcatgaaaccaattgtcagcattacagtttttttcctccttgcattcctattccacacttgatgtattttgatattagatgtgagagctgatcaatgttgatgctttgcagtgcattaggcac

SEQ ID NO: 42308 - DNA, 875 bp, Manihot esculenta
  Intron number 1 from transcript cassava4.1_007269m (locus cassava4.1_007269m.g) derived from phytozome v7.0 (chr-ID scaffold03614; pos 2193096 to 2193970 reverse strand)
gctgaccctgtcgttttggctactgggcaggttagagattgcatgtgtcattcaaatttcttttttctcagagtttcttttcaagttttgttcagccgaattatttttgtcgaggttatgtttcaatattcatacatgtataaatttcgctttcttggggacggtttatgtgaaaagtttatttttgttcttaggaattctgcttgcttgtattttggttcttcttcgtgatttctggttctgggtttctataattttgatactggagttaatcataccttctccctcgcctaattatccaagaatcaagattatttagagaatattatttgtcttggaaattaaaaatcattgaactgtgaaaatgagaaactgtcaattcctttcccctctccatcttttactctctttcttggtgtttgtttgaaattccttcatctgtatgtaatcccagactgggtatcaagaacaggaatttaattccaatgagtttgattttctggagaaagtggggaatctcttcaatgaggaaactgtttagaatattatgtttgaaactttcaccattgttttacatattggagataatatagtcacatgggaaatttgcattttggatagcgtccatataaagaggataaggaattgactctcttgattttgaggcattattaaatctgtcaccaataaactgcctatgttcttgtgatttaactgatgctagtctcatctgttttgccaagttacataaactaggatgaagaatcaatgttggggcatttagggacatgtccatttctcagcccacctactgatgctttgtgattgaattcctttgatatgatagcttggtttggttcttttcttgcagactt

SEQ ID NO: 42309 - DNA, 620 bp, Manihot esculenta
  Intron number 1 from transcript cassava4.1_009686m (locus cassava4.1_009686m.g) derived from phytozome v7.0 (chr-ID scaffold06005; pos 246253 to 246872)
aatatcgagacctggctaagcttaaaacgaagaaggtatttctgcccttccgttggttgacgccttgtttaaaatggagtttcaaaatttttctttttggtgtttttgattgcgctaaaacttagtgtgtctgacatctgttgattttgattatatgggttccggtgttctccatgtgtcgactgctatgctttgtctgtggtagaaatttagcttgcttggtgttatattgtgaagggaataagattgaaaatgctaaattagcaacagtaaaataactttaatgacaaggctctactaatttagatgtttatggaaagcaaaaatgaatttcggggtgatttgatttgtttgaatgtgtgcagtgttgcttcaagaactctaaatggtgcccttcaagcaaaggaaaaaactttcagtatctggaagctttgtgtttatcatatgttatgagttttcgtaatttcttctttaatttaatgctgcggtttcattgtttctttctttttccttttttcagttgatgtcttgccattgagctattcatggcaagattttacatttaggttacgctccacattttgacatatttttgcaatgttaacagattgtgtttgagg

SEQ ID NO: 42310 - DNA, 973 bp, Manihot esculenta
  Intron number 1 from transcript cassava4.1_030988m (locus cassava4.1_030988m.g) derived from phytozome v7.0 (chr-ID scaffold09120; pos 257258 to 258230 reverse strand)
gcaaatcaaaacacagtatgaaagtagtttcaccatttctttttctcgaagataccagttgaaaatggaaaacattaattaacttatatgctcaataaatatttatttgtctaatgttacgtattttaataaaacaaaagagagaaaaaaatcttattaaggaaataacttgttaaaagagaaaattttatctccaaaattaaacaagtgtagaaatgagttctagtgaaactcattaagccacattaaatatccttaatttcaacaaaaaccattactgtctaattaatttagtaagtgttattgtttagagttttagtgcttttaatgtcagaataattttaattattttaattttaaataaatacatttaaaaaaataaaacttttttttttatttttaagaaaaagagaagtaagaagagagagattaatagctagagttttagtgagacgttgaaatatttcagaatatttcaagcaagaaaaaaaatgtaagtgtaataattcataattaagaagaagaaaatattaaatatcagtaataaaattgtgatgatccaaaacttaaggaatgatgtggaaataaacttctagaaagatttggtttgagtttttttaatcaaaatataaaaatataaaacaaaataaatcccaaaaatagattatacaaaaacccaactgtacatcgtatttcacacaaagactatatatacaaaggccacatttgttcttacgttataataatttttatcttctgaggaatttaatttcctctgtgaatattattattatttggctttggattttgtcgatttttcatcaaaattgagccaaaggaatcagttgatctgagtggagattggcatggaaagagatgaagaaacagcgacgaccagccaaagtggtggtgcaacagaatcgaaaggggaggatcagaaggtgccactgtacaagctgttcagttttgcaga

SEQ ID NO: 42311 - DNA, 868 bp, Manihot esculenta
  Intron number 3 from transcript cassava4.1_013658m (locus cassava4.1_013666m.g) derived from phytozome v7.0 (chr-ID scaffold00668; pos 120861 to 121728 reverse strand)
ctgaacttgatttggtacgtatgcatagttgttcacttttcagttatacagagaagtgagctcctcaaacttggtatgtttttggttgctttacgtgcttataccacatgatatggagttccggtgttgtatcaatcaatatacacgaagcagcttgctcttgctttcacctttgcactaggcattagtgaatccataaaattacaaatagcattttctttttttagtttttacttgagtaaacttttgtgacagtcatccgcaaataattgaaaaaaaaagattttgatgttgtttatcctctcaacatatgtttacatccaggggcatttagtattgtactatcttcaataaagtcaccaattacaattttaaagctatctaccttattaattgtatacacccaattaatccctcacaatacactgctcatagtaaatatattgggtagtctctctcattctcctctacgaataactggatatatttattataactatgttatacaccataactatgttatacaccataaagggtgtgttcaactacatagtaatagctccctccttaatggacaaaaattaattctgtgttcctatctccactttatatggaagcctctctttgcaatggtcaaaagccactctactcaataggcaaaagcccctcttttcaattgccaaagctgtaatctttccataattctcttatttatgatgttaggctcttcaatttcatctaattgagaatgttaaagttagaataatagaagagagaagagaaaataacattagaagacttatgtgtttcggctatgagagcctataacatttcattctgttatttttgcaggtgatattatcaccag

SEQ ID NO: 42312 - DNA, 511 bp, Manihot esculenta
  Intron number 1 from transcript cassava4.1_019717m (locus cassava4.1_019721m.g) derived from phytozome v7.0 (chr-ID scaffold04151; pos 512230 to 512740)
aaggctttccactggtaactctactctcgctctctctctctctcttctcttgatttgattctcagctcaggaacttttagctataactaataaaatggatgaccccattttgacatctcgaacaatttgttggacaatgggcaatttcttgctttttagtgttgatagtagttttagaaacaagttcagtggaaagataaaacggaaattttgttagaaatttatctactttggactcttgaaagtagggaaagggagaaaatgtattgatatttaatattttgacatgtaattctagctgaaataatcccttgattagctcttaatatggatgttacaaactacaatgaatccatttagatgctgaaagctacttatcaagtaatcccatggacttacagcattgggccctgaataataatggtgaatttgctgtatgaaacatttctatggttgcaacttcaaatatctaacattctctaccatttaatatgacatgacaggggtacag

SEQ ID NO: 42313 - DNA, 889 bp, Manihot esculenta
  Intron number 1 from transcript cassava4.1_003739m (locus cassava4.1_003561m.g) derived from phytozome v7.0 (chr-ID scaffold07571; pos 601839 to 602727)
gtaactgggttccagccgagaagcaggtacgccggtgtagctaatatggggctttctggcccctcgcgggcttgttttatttgtaaatgagatgcgtatcgtggtattgttttcagtgttgcatgtgtaaacagcgttgtactattgttttttttgtttaatgcaaaagtgacgcgatgatttgttaatcaaagttttctcttttaagtaattttgattcgcatccacaaacctgatatggtgtttataatctaaagtgcttttattgctttgtttcaagttttctctctatcctaatttacccatcatagttggcttctagcgctgcctcttacattactgtctggacttagctctaagacgactgcgcaagtccttgtatatttgccaaattctttgtccctctactcgatttcagcttgtctagctagttgcagttaattatttcagctattcgtatcttgaattgccttatagtgaactgaatgatattatttccctttgtcacatgtagtacccacttaatgctttatttatactgaatgatattattccctgaatggctgaatcacatgtagtacccacttaatgctttctttataccacagcctggcctatcctgaatgaagttatttagatttcacaatagtgacttccaattgaagtatagttgtttacagaatcatgtgcacttttttaatattcattcaactatattcatcttctttgatgtttgtcatgccatcactggctgtaattttacagtattctttctatatcatagacagttaaagaaatataatagctggcttgtgccttatgaataatttagttttacaatttgatttttaaagcaaaaggcagggtctgctttcagctccggcacagc

SEQ ID NO: 42314 - DNA, 921 bp, Manihot esculenta
  Intron number 4 from transcript cassava4.1_001085m (locus cassava4.1_001085m.g) derived from phytozome v7.0 (chr-ID scaffold00345; pos 83404 to 84324 reverse strand)
agcctgataatatattagggcgggcttctcagcaggcaatttttcttgtctccgattgtttacttccttattttttccctaataacttcagtgaaattgttgaattctgtttctaaatatcctacatagtttatggagcagtgcagtgtagtgtggtggatgcacagatattgatgatatgggtgcatattgccatagggttctggttcatttctataatttgcttttgtgataattatggatttattctatcacttaactgttctcccacttgcactctaggtttattatgttgttgatactagtgatatattcaatttcatacttgacagaggactggtatttagattggaattttatgttaagcaactggatttacattaaaaagaaaaaattaaccttgaaaatgctgaatttgggtggatgggatctgcaattatttgcaggatttcagattttgttgtggataaagtaaaagggggaaaatctaaaattcatatatgtagaagtccttaggcattacaataaagttcattttctcagacatgcctaaatttgaatcactttataaaatctgaaatatcatacttgctgaaattttgtgcagtgacaaaaccgtttaaaaagcattttgagttttaggtatttatggtgctccaaaccttataatatttgacttctagagctagtcttaattgtccaagtgtttggactatcagaaaaatctaaactaactaaacctatgaggacttgaaacgaaagtgtgttgaacatatatgattcgcatggccctagttagaatctgcctatcattagtcatataggaaatgtttttgatgtgaaatatttattcttatctatcagtttagtggtaactattacatgcaatttatttacaggctctctttccagataatacct

SEQ ID NO: 42315 - DNA, 802 bp, Manihot esculenta
  Intron number 1 from transcript cassava4.1_007294m (locus cassava4.1_007294m.g) derived from phytozome v7.0 (chr-ID scaffold05749; pos 122635 to 123436 reverse strand)
ctggtctcttctcacattgatactgtattctcaacgtatgctttctttcacttacaatctaatagtatcttgacctaacctttccttcccttttctattaattttggatgattctacatatataagcaagagcttttctttgaatagtgtagtatgatgattatttctcttgttctatctcatggtccaagcctgtatgaatttatgcaaccgctacaaatagtagcatcagacgctgggttataccatcaaataacaaactctaagagttcagttttgagactaaacactaataattcttttatgaaattcttgattagatttggaggaggtaagaaaaatctatggtcttactagaggcttccaaattataaccaagtttgagttatgtatagtccttgtaactgttgtcaagaagcagaatactgcatgattgattttaaaaccttatttaggtcttaattcaatggattgaaacaaattaatattctatcatcatttgtaataaagattcaggaagaacttgccttttctatattagggatggagaaaatttctcccagaaaaaagttgtaggaaagctttcatgctttctcccttacaatgtgcattcaagacatccagaagttggcttttatgtagcatccttgaatatctttgttatgctttggttacatgatgtttcaagtttgttttcacagacatttttttttcttttttctttttccattgccttcttactcaaataggtactatgcatgtttcagggaaggggctggagattgcagttcttgcgtgggtg

SEQ ID NO: 42316 - DNA, 836 bp, Manihot esculenta
  Intron number 2 from transcript cassava4.1_015513m (locus cassava4.1_013161m.g) derived from phytozome v7.0 (chr-ID scaffold09876; pos 143369 to 144204)
gtggcttgaattggaaagaccgctactgggtcaaggcaagcattttgctccctttcaccatcctagtttctacattttccatttattaactattcaatcatattgtgatttcatttgcaatcttttgtgaatattacgttttcttttgatgaatgatcttgtaatcttgcttagtgatctgttaatttctattgaagttcttcaattaccttatgtttatgtttttatccggggatgtttgtagcagttacaaatttctcaccctatttttctaaattgcgaagtagtgtgaattaaattatttaggaaaaaaaatattgagaattcaaactccactttttgtcttagtaaacctgttcaatactttgtgaccataaccaaaatggccctggatgtattggttagtcatagtgtaactgtgtaaaaatagaggttttagagcatactagtagttgaatactggcaagataatattttgtttaacagttgtataaaactttaataaggagaaatgctacaagtgttggcaggagtggagggacatttgtagttacgtttttactttcttcagtggtgcctattttagcaaagtttgttctcatgttttaactggttgaataccttttagtgaatgtgaacttgaaaaataaaaattatacttgggcttagcttcttaggccataattttcttaaaatctcaaatttctttttcataatgtcaacttagttcagttgcatgttcatgtgaagaaagtccaactctaacaaaaggctattggcctcaattgtgaacttattgttgtggcaggctagtctgtggataatcattttcagct

SEQ ID NO: 42317 - DNA, 261 bp, Manihot esculenta
  Intron number 1 from transcript cassava4.1_029937m (locus cassava4.1_029937m.g) derived from phytozome v7.0 (chr-ID scaffold00396; pos 93119 to 93379)
actacacggcttccatcgaggtgatcagtgtgttttttctttcgtttgattataattaaaacttaattttcagatcttataatacagacatttgcaaactgagacattaatattttaatttattctttcttcatgaataacatttataattcacaaaattaaaagtatttttaatttttaatttctgggttctaattattcatttaatttttctaacaaatgattattagtgtttggcaagtcctcacaaacctcaatacc

SEQ ID NO: 42318 - DNA, 567 bp, Manihot esculenta
  Intron number 1 from transcript cassava4.1_030812m (locus cassava4.1_030812m.g) derived from phytozome v7.0 (chr-ID scaffold07519; pos 658639 to 659205 reverse strand)
aaaaggtaatttagcagtgtctgcaagtttttagcttgtgcctgatcatatattttcctttgcatgtatgcgtagtacgtaggacagtagtaggagatgctttctatgccttttcttttatagttcataagattacaattacctctgcatattgcatgtcaaaatgtcatatgcttttttcttctacagaatgacttgttccttttattgtggcatcacataccagtttagggcctgtcatggatacaaaaatgaggacatcaatttttttatggtatcattactttacaaatcaaaagctatacaacttgtgctaccttattgtcttgttttaaaaagtatatattatgaaaattttagtttctttgtggctcgtagttctaggtttttttagcaatttgatgagcagtcgatctatgaggggcttgattcaggaagtttatcctgttcaattgtccacagcttctatctttgtggttggttttgtgttttcttcctactgatcatgattctttcttgtaatggtcttcagaaaaaacttatttctgggttggtaaagatccaaaa

SEQ ID NO: 42319 - DNA, 238 bp, Manihot esculenta
  Intron number 1 from transcript cassava4.1_005971m (locus cassava4.1_005971m.g) derived from phytozome v7.0 (chr-ID scaffold01551; pos 3095546 to 3095783 reverse strand)
actactgcagaatcgctgatagtctccttagacaggttggctgtcctcttctcatttcctcggttggattttgtgtcgtttctaatcacgcagcttttcggtatttaaattggtcaagttcttagttttcattaacgtaaggtatcataatttgcttatgaaatgttcgtcgttactgcatttgataaatgtggaattttttgtttttctttgattctttcaatttttttataggcga

SEQ ID NO: 42320 - DNA, 864 bp, Manihot esculenta
  Intron number 1 from transcript cassava4.1_020420m (locus cassava4.1_020420m.g) derived from phytozome v7.0 (chr-ID scaffold01551; pos 2679345 to 2680208)
gctaatgtaggatagaagacaagaatcttagtgctaagatctaaaaattttcatcagttgatataggcattctaatctaggttgagtttggtaagtgattatttaactcaatgtgattttagatttttctattaagctgtttgccctttcattattagttgacgcaatagcttgctttaatgttaattggaatcttttaactaggcgagattagtttcctaggtgttagcagtcttttacctgagttaggctctcttgtctcccgccaacaacaaaaaaaaactttgtactcgaaagtatctgaagtaaatttcttcggctgaacatggctgtatctcaggttggattttatttaaagaatttaaatattaaaaacttgcctgggtgtttgagattcctggaattcttagcttagacaatttggtaaaaatttctatgtcaatgtgcaccaaatttcttgatgtgcaacaggcaaaatagggtgggataaactccaatatgcaccaattttcttggtaatgaccgaatcataataatttcgtgggttcaaagcatacagtttcaccctttgttttcttgtgttcccctttctttcagtgtagcgttacaaacttgacggctcgatgaatcaatagtttttagtatatttagttattatgtagctttttaatattagaaactgattccagcaaaaatgaacgtcatgcatttctttaattatggactagtaatacctgactatgtatgtttcatctcattaggtagaacttgtgattgaggcttactatttttggattgagtgccgctgaaccttttttttttatttgttcattcaggaattgtcagaactgaaaaaatcattga

SEQ ID NO: 42321 - DNA, 1009 bp, Manihot esculenta
  Intron number 1 from transcript cassava4.1_011488m (locus cassava4.1_011500m.g) derived from phytozome v7.0 (chr-ID scaffold09876; pos 700525 to 701533)
tccgaagtcgcgaacttgaaagctcggcgtcttaggtaatccgtttcgcattacagtattttgcgctaggttttagcgagccctttcttcttccttctctgaattggattgttggctttagttgattctggtgggactggtcttaaaggtgaatcttttatgttagggctgacctctgtttgattaggcagacaatgaactatttctctcattaaggttccatttgtttcacgataatatctttcgtattttctccgaatatcagaaaatttattcgatagaaaatatttttcaatcaaaagaaaattgttaataaattttattttctaaattaaaattaagcaacgaaaatattttttacatcgcagaaaatattttccaactaggagttactaattttttttctttaattttattttggggatgattaattcaaagggtagcctttcttaatactcttttggagtgttctttatgacattgcatatatttgagagtgaaattgaaacaaagaaccagcattgatatgttctcattttttcaagtgataattaaggaatgctcgtcattttctatatagggtgtttggttggtttcattgttataattctggaacacaaggatgcttgtaccttatgtagggttccttctcttttttcctctgcttcagtgtattagggtgaataatgtttctattaggatggctatctgctttgcaaacgttttttttttcacccttcttgttttgtctacttgtgcaacagattgagagtgtagccttctcccaaacaattttcatgttctttttacgtagtactactaaccatgttaagtggccatggggatttgtgattctatttatttgttcgttgaaattattcccaatctttcctggttgttattttgacttcttgtccactatatcaatctggaaaattagttttcggatgacctgagtgattcctggttttcagaatattttcagttttgtttgtggtaagggaagaga

SEQ ID NO: 42322 - DNA, 425 bp, Manihot esculenta
  Intron number 4 from transcript cassava4.1_014178m (locus cassava4.1_014178m.g) derived from phytozome v7.0 (chr-ID scaffold01551; pos 913533 to 913957 reverse strand)
gccataaacgagttagtctgttttttaatgctttcaattgccatgacgtcagtgtttataactttaactcgtgaaagctaaagtctttgattttgatctgttctatgatttggacttctgccaataattcgaatttttggctaattggttttataatacgtacgtatttatagatacaaaatgaggcatccgaattagacctagtaaaatagtttcatattcaatttcctttctttattttgttaatcgatgcaatccaagattttccgtctcttttaaatgtaagcatatcgtttcttttcctcttgaaatcccatgaattatgaacaaggtaggttgattccagaagtgagagtaaggtttttctttatctggtacctatgtttgtagttgtcgtggacatttgaaaaggaaggcactaagct

SEQ ID NO: 42323 - DNA, 629 bp, Manihot esculenta
  Intron number 1 from transcript cassava4.1_012144m (locus cassava4.1_012144m.g) derived from phytozome v7.0 (chr-ID scaffold06697; pos 203528 to 204156)
ttgaggctgcactgggtttgggccgttgaaacaattgcaaaaagcctccaaatcgaaagaccaagaagcaaaggaagctttatcaggtaatgtgactaacgaataaatttttgctactagtttatattggattggcggacttagacactaaaaaaccaagaaacaaacgattggatcagtaatagagggtttgattggtgtgagaaatggagttgagatttttaggaatctttagagttggattaatcttgatttttaagtatagtagtcactctcattggcttagacgagggaaatggcgatttggaagaaaacgttagctagctaatcgacaaggaggacaggtggacaaactataaacttttgatacaactaattaaaagcttctcacacatatatccgactgaaaaacatgtcacttaagctgtccaattcaaccaacacaaactaaaaccccacatacacaaacatacaatcaatatataaatcgaattccttttaaaacattttcagattaataagggaaaaaaagtacatatataactagatcaacgtagaattagaactcacattgttttctgcttcttttggcaggtaaattaagtgggaggaaattcagttggctcact

SEQ ID NO: 42324 - DNA, 679 bp, Manihot esculenta
  Intron number 1 from transcript cassava4.1_011983m (locus cassava4.1_011983m.g) derived from phytozome v7.0 (chr-ID scaffold00853; pos 28358 to 29036)
ctgggtgcactaagtgccttggcgccctccaaaaggtcagtttttgaggctttacccgcatttattatgttggtgttggcttcaatttaaaaaggaattgcatttattgtgttggtgattttgtgagaattccttttgattccattaaatggattacttatctatgtgtcaattttatgctacgctactagatttagaaaactgggttttgtagccattgaatttaatagttcagattgctgttgggtagcttcctttttcctttgcttgaaaccaagaaaaaggcaaaatgggtttctggaaataacaatcttgagctaattttagtgggagactgaagagatataattcaagacatggtgttttcattacaagtattggctgacagtaggacatgagtaatgtgaaagtgaaagtgaaagtccgcttgaggaggtgtttttcttttgctgttttctgaaacaaccaaagtcgttcttgccgtagaccattaccaaacagaaaacgacccatgcccatgagctgctttagctttagcttttagcatacaattttcttcttccactttaatcgtccccttttcatatgaacacgttatttttttaggaactaaaacacccttgaatgtgtgttgctaattgcagctgaaggccagcaacaagaaccaaacagaggagga

SEQ ID NO: 42325 - DNA, 594 bp, Manihot esculenta
  Intron number 2 from transcript cassava4.1_002285m (locus cassava4.1_002285m.g) derived from phytozome v7.0 (chr-ID scaffold09761; pos 805753 to 806346 reverse strand)
ttaaaggtttgacttctttggtttattaattatttgtctctttgtgaaaggattcggagaatctgcttaatttctatcacattatattgataatgctagtaattcaaccagctgtatatgtggggtgtcaaagagaggaaggctgttttaagaaccttttagttacttgtattgccagatgcagaacgaaattggacttgtcatatgtgcaaactgagcggagaaatgtggactgattagttatgttgcaaatctgctaactgttgctgatatttattactaagggaatggacttatttttctgcaaaattgttaacttcagttttctgcttaaaatagttgaacatgctccttatttatttcagtaacaatggtgtatcctaagttataaagcatcatttgatcttcgtgagaagcttatgttttttggaaatgaatatgtacgtgggattctcataatgttgacttcaaacaaagttctcgttatatttggtagttttatggttatgattatgttagagttcagttggtatcttcctatctaatgtttttcactaaaatggtctcattttcttgagcaggtgtcaagcacaa

SEQ ID NO: 42326 - DNA, 860 bp, Manihot esculenta
  Intron number 1 from transcript cassava4.1_032773m (locus cassava4.1_032773m.g) derived from phytozome v7.0 (chr-ID scaffold03364; pos 15684 to 16543)
ctttgcctcaccttagcatcaaagacacacctattgtaaatgtctttctctcttaatgctagaatttttgtttcttttttttttttttgaacctgtggtgtttttcaagcgcttgattagagtaagaagaacttgggttttcttcaatttttgtaaactaccttttgttttatctcattgtcaattgttgttttccttaatctatgttttactcgcatacattaatttctctggcgagtttgggctgggtttgatttatcaaaagtagtagtatttggacttttttcctgttttctgtttatggtgtttgtataaaaatggaatgttgatgcatgagttttttggttgtttggatatccaacactttattattattttttttggaggggtatatgttcaaagccgtgattttggtgtatttgaataatcttagatccatggaattatttacctttcttttctgttctctctgtgttaattttctgtttgattggcaagaaaatagagggcaaaggaaacgaaatcaaaagtcagagaattaagtaaaaatgttgttttgttctccgtatttgagattaatgcattgcttaacaagcatatcgaaagtgcacataataaaactactgatttttttgttgcttaatactaatctgaaatgagttgttgctttctggcagaattgttgtttggcttttatacagatatggacagaaggcctcattttgtttgttctgtaactttcattgtggaaagaaactgcttaaaattcatgcaggaaataagtttcataaaatgttttgtcttatgagagatgtactattgcaggaaacttcctctgctcaatacatattgcagcagta

SEQ ID NO: 42327 - DNA, 561 bp, Manihot esculenta
  Intron number 2 from transcript cassava4.1_011198m (locus cassava4.1_010118m.g) derived from phytozome v7.0 (chr-ID scaffold03614; pos 3740333 to 3740893)
gcatataggtgagaatgtgaaacagctcttgtttttttttatatttaagtttgttgattttcctccaactcagctcagaactcgagaaccagagggattttaatgcagctgttgtttacccagagggattttttttaattgggaaacataccgcagatgaattgaataagaacagcatgtaaaaattagcgttcactttttcatgagacgttaaagtttcttagcgattgtctttagttctttcatttgttaagtgtagagtatttacttctgtaatgcacttcagtaaatgatcatatgaagcatggcaatttctttctgagcgattcttgaatcaaatttgcatgacaagctggtgaaattattcaaaatatattaattttatcaaatctgatgagtcgttcttaatgtgtgtcttaaaaatctagagacaagaaattgtagttatttctcatgtgttttttcagggtggtttagcttttgcatgaaaaaaatttcctgaacattcatttcatgcttgttccttgtataaccgaataattgtgctctgggccagcataa

SEQ ID NO: 42328 - DNA, 799 bp, Manihot esculenta
  Intron number 2 from transcript cassava4.1_011985m (locus cassava4.1_008313m.g) derived from phytozome v7.0 (chr-ID scaffold03614; pos 4051044 to 4051842)
agcagttaccatacctggttggcaacattgttgaggtaaatttagtaaataattgctactctttttgaatgttaatgataaaaataaatatctaagtaaatgaacaaaaatttaaatctgatcgtggttgagtttttttttatttactttggatgttcttttttgtttgtcgttgttggaaacacaagctaagatgagctgcattgctaatggtccaaaagtgaatggtgtgaacaatccctgtagtttgtttctgtactacataggtcgctcttcaaacttgatacgaaacttttactaagggagagaacctttgtatttgtactatataaatgcatgtagaagaatggcatgtaaccttttgaaagtaattaaatacaaaatgtattcgcatcattgaatgatcacaatagaagacagacctcaaacttgaattgtttttgaatcaaaagaacttgtctttttattcccttatatctttctatttgtagaggagaatggcttttgactctcgcgagagtataaattatgtttaactgatggccatgtgtgatacaactgtttatctgcaacaacctttttttctacttctgaaatagtcatatacatgaaccttactgtaatgttttgttatgtcatgtgtgcttcgttctctattcaggccacctgaaaatttttatattgaactcctaacctattaggatgttaggttggccatgaaattggttgtttcaagttgaagttctagcagcatttggctctaactacatgtgttgtggtctgtgtgaagattttggaa

SEQ ID NO: 42329 - DNA, 992 bp, Manihot esculenta
  Intron number 1 from transcript cassava4.1_007661m (locus cassava4.1_007661m.g) derived from phytozome v7.0 (chr-ID scaffold06853; pos 188994 to 189985 reverse strand)
gccagtcgacgcagaagactcagcagccattgcaagtaaacccagtttttgttttctcgcttttttcccccctcccctaatttttaagctaattttgcgtggaaattggatttttttttcttccgatatgggtataggttgatttgcctaactggtagtgcatattgtttagctcgagatcctttgtgttattattattaggggaatacgtttttgctgaaacgagtttgtgattctatcttatttgtataattatgggtcctggcttaaatcttaggtataattggtttgtttagcttcaaattccaatcccattacccacctgaatgatgattgtttgtttgacgcataagcaagtgaacgagatatttacttgattgttaagtgagaaaataactggtgctgattatatgaaacgtttgtcataagtgaaagtttggactagattatgagctgctttttttttattagcaggatatgccattttgattattgtgattgtttgaaggaaaaatataggcttttcaatgtcaacgtgtctctgctgtagacgaagttctaattgtttaggttataatgaatgatgcatcctaaaacagatggcaagttgtttgcatgtccgccatgcttcctcttaattggattgagttttaagaattttaattagggataataagttttctctttttgttaagttatttatgtttgtatcagtttcttaatcgttggttgagtgcaaagatgaaagcaataatattcaaggagttttaatgtcttgttcctgtttcagcatcagtgtttagtcaagcaccaactttcagctcagcttgttcaaatattgatgctatgacttcattctctgccatcttgaatacttttcccaagtgaaatgacaaaattgcatcttttggttctcttgcattcctttattcacatacgttgtccttattttgtcaggtggcaaaacgtctggagaagttcaaaactacaat

SEQ ID NO: 42330 - DNA, 660 bp, Manihot esculenta
  Intron number 1 from transcript cassava4.1_018862m (locus cassava4.1_018862m.g) derived from phytozome v7.0 (chr-ID scaffold03614; pos 3403778 to 3404437)
gctcttcggtctctgtgcaggctcgtcctagcttggtaatttacattttggagcttcgtttctcctctcagagtgtagcttctttcatcctgtctcttgtgttttagtgttccgctatagatatgttaatgcttctattggagcctgatttgcttcttttttttatgatgtgatgtggatattgcgatttttacgtgagattcctcgattgaagctctatcgaggattggatctaggaaatgggaaacctgtgattctctttgcatgagattagatgtctccagttaatagtcataaatacacaaggaatttctcttttgttggtctagttagtataagatgttcatgcatattaatttttacaaaaaaaaagtgaagatttgtctagcggacttgtttattttgaatttagaagtagaaatcgaagtgttttagactcttaattcttgttagaaacacattacaattgccatgatcttcaaattcttggtagaagcacattacaatctcccttttctggagagggttgggttaattggggtttgatagtgttctttttgtttttgttttgtgcattaccattaatattagactgaagttcttgtgtttgaatgtgttaaaacaggctgcaaacagaatctctagtctgaaatcattttc

SEQ ID NO: 42331 - DNA, 617 bp, Manihot esculenta
  Intron number 2 from transcript cassava4.1_013778m (locus cassava4.1_013778m.g) derived from phytozome v7.0 (chr-ID scaffold12725; pos 84487 to 85103)
tcaaaggtatgcatcctataacctaatcatagccattttgtttgttaatgcttactcatgcatgtgatgttgcaagtacaattatgtccatcttcctacctcttttgaatttaaaccttgtgtgacgcatctgctgtaactaagaactaaaatttttttgtttcttctgttaacttgaagacaattccagatattgcctcagatggttcaaaaatggtatttctttactgaaattcaactgagtagtggttctagttgttgaaccatttttataggtttgaaaatttcttaatgctggaaaaacagcatttgaagtgcctgatagcattaaggtttctatctggtttttgtgatgaacacaatttttttttaattccatgttctgattggagtcagctaaatgcttttcaatgcctaatctctgtataatagatcagttttctattatttgtattattcaaaggcttattggagagattctcatagaataagctttagctattgtaattcagcaactaccaatgttgcttttcaaggtgataaattgtggcatgggtcttgaaatttttgtaaatgtcaattttgtgccaggtattttcagatttggagcgttctgc

SEQ ID NO: 42332 - DNA, 968 bp, Manihot esculenta
  Intron number 1 from transcript cassava4.1_013234m (locus cassava4.1_013234m.g) derived from phytozome v7.0 (chr-ID scaffold10173; pos 416712 to 417679 reverse strand)
tctgctcgtcatcggaattgctcttggatccttaggtttaactatatccattttctccttattccttcattttcttaattattttgaaatactaattttaacgaaatgatttggtttaatagcttaattcttttccctttttttttgccattctctaaatatttcgttgttgaagttaaaaactgtactaacttatgctgatcatacttcctatagagtttttgttttaaaatatgaatcaaattaacttgtgatcaatcaagtgtagagacgagtgctttcttggttttctcctttgaattttgcatttcctgatttataatttgtactttccctctttctccaatagaatgctagccaatatgatgtttttattgctgaagcaattcttctgtctttttattcataatgtcttgtaacttatttgctttgaaaatgatgatcatgagtcatttgaatggaataaaactccaaggaaaaagctaccgaaggaaataaagaaggatcaacaaaataaacaactttggcaatttgacagtatcggaatgtactttccaacagcctagatgctaatattcaactagaagttttaggcaacaagaacaattacagagtatggaaaagcaatccttgattccttgtagaaataagaaaatttttataatgaacctattaccagaaaacatttcttgttttctttaatttaaaatctcaaaataaaatcctttagtagtaacatatacaagaacgttccaagtgatagtgatagttagatagaattgactgctcgcgtgtgggtttgagtgtgtttgtgtcatttttcaagttagatggaaatctccgtctgaccaaattttatttgtctttgtaatttcatccgctgtttgtcttgagcgcttattaatatgtttgccatcaataataacttggtagaccataaatctcatggaaggatttatgtgcagaat

SEQ ID NO: 42333 - DNA, 911 bp, Manihot esculenta
  Intron number 4 from transcript cassava4.1_008720m (locus cassava4.1_008720m.g) derived from phytozome v7.0 (chr-ID scaffold09549; pos 48726 to 49636 reverse strand)
tggggggttcaggtactcggtagattcctttttatatttaaggtttatgaatcagttattattgacacaaatgcacataacagcataaactggctacatttggttgtgatggttttaaagattgaatttttttttccctcaagaaagaaggcagttagtagagagattgaagtaatgaatctctcaactatcttattctggagatagaatgagttacctagagtattggcatttgcctctagttagagtggagctcaactaatttgttcgtgttttcatgaattgaccttgagcatgatattatgcctgatataggtgaacatattttttctaattttatattaatctgatgcaagttagaaataagatcattgagatggtcctcttataacttgatgcaaaataatatgttgtatgtttttacattagtttttcttcaaatataaaccatctttttttatgatattattttaaagtttgtggaattacattgatattggagcatactgcctaattcagatggtgctgtttctaggcttgtgctactccacattgattgttgaatgcacgtttactcaattgtttgcttttccattgttttgatctagatgcaattcataggcttcaaataacatggccattaattgaaatcaatcatttagctaatttactacatgtcttcagccaacaaatttagtaagttgtttttgaattgcaagaacatttgtctcatctatttttctgatggttttgatgttttttatgctgagcttccctaacattctgcaattatgattaaaatctttccatttgcattaggtttcctatttttcctgttcagcttatgtaattttgccttcttatttgagattgatgcaattctaatgtaatttttttaataacagcatatt

SEQ ID NO: 42334 - DNA, 539 bp, Manihot esculenta
  Intron number 1 from transcript cassava4.1_008720m (locus cassava4.1_008720m.g) derived from phytozome v7.0 (chr-ID scaffold09549; pos 50050 to 50588 reverse strand)
gattcgactttggtcttttgaggttctaacaactggtaatagatttttttttttttttaattattgaatttggttgactttgtgagttttagttgttcatttgcatgctaattttaattgttatacatttagttttatatttcattagtcgaattaagcttttattttgtttgttttcgattaagtgatatgctttcaagtctgcagtttaaacccttttttttagatgcatgaccgtaacttcctttatgaaatctatagttgatatcttgagttactaatttgaagttgtggaattattgtactctgcaaatagtacactggtctatgcataagtgatcgtgcaattttgcttgtttgctcgggaactatttaacttattagattcttctttttcatgggttgccaatgtttgctgcaaattttggtattgatgattgtttttgttagcaagttctatgtggtgtctagtttgagtagattacctttgtataacgggtaagaagtccctgttgtgataatggtggttgtattgtagg

SEQ ID NO: 42335 - DNA, 450 bp, Manihot esculenta
  Intron number 1 from transcript cassava4.1_016910m (locus cassava4.1_016910m.g) derived from phytozome v7.0 (chr-ID scaffold01895; pos 40843 to 41292 reverse strand)
gctagattgaaggaaagagaagacagtgccaataggttcttgccctagctttcttaccccctcctttgatagttaagatgtttctctattagtccaggaatctaaatatgatcaacagcaacaaattagaaaaggaagattgaagcatggaatgagtagaaaatttcagtgtactctgatttaatttagcttacgtatctatgtttgtattagtgttggtataaataccatgaaaaagcattactcaaatagaaaggtcataaatgatgatgatggtctgttcaattaatgttggttttgaaattaattaccctttttagctgtgataatgatagtgattactgattactaattaaggtgtaatttggatttgggagtcatctttctaaccaaatttctttgctgtgggtgctaggtgctgagattgagccctttttgtgctcaagaaga

SEQ ID NO: 42336 - DNA, 962 bp, Manihot esculenta
  Intron number 1 from transcript cassava4.1_021586m (locus cassava4.1_021586m.g) derived from phytozome v7.0 (chr-ID scaffold04121; pos 1021 to 1982)
agccacctacttctgtttcttcaacggtacactgctttcttaatcttggtttccttctctcttattttaaataattttcctatttgtggaattttaaattttttgttattgtcaattctcagcataggataactttatcttgcgactggattttgcttactggagtttctgaagttgaaaaatgaaatacaagtaaacttttggccgtgtttggttgcactttttttttttcaactgaatatgccattagttctgtttgttaacgatgtacacttttcataaacgggtatatgggccacgtataaattttggtatgagttagtaattatatatggaactaggtttgaattttgtgataacagataaaatttgagagagtggtgttaaagactttataatactagaattgacagtgtaggttgctttcaacaggtggttggacactggagtgggattactctgcaatttaaattctctaagcatttcttcataatcaagaattttcgttccatgcatttttttggtgtctaatgacattgaaaatctcacctgtttgcggtatacttaaggtttctctctgtaaaactggaagcattttcactttagattatgaaagcaaatctaactttctacattgcaaggttttaggtcagatgcaatgttaatctttttgaacagttcaatataagaaagccttgagcctttaactttttttttaaccccttctctattgttaacatttgaagaagacctagaatgcaccaaatctgaaccaatgctgagtctgtttttgtgtttttaggtgcagcaaagctgattcttgacaatgggatggacatatgtatatacctaaatacttgcattcataccaaatccaaatatagtatgtgatgacttggattttgacatcagttttttccttttcagccaccaactattaccccagttggacaagcatacaa

SEQ ID NO: 42337 - DNA, 853 bp, Manihot esculenta
  Intron number 3 from transcript cassava4.1_012209m (locus cassava4.1_011914m.g) derived from phytozome v7.0 (chr-ID scaffold06512; pos 1638771 to 1639623 reverse strand)
gcaagcactacttctgtgagcattgtgctttgaaggtgagcactttttctgtgaatactgttctttgaaggaggtgttgtttgcatgaatttatgcttgtttttgagatagagagaacatataattcaaaaataaacggctggaagagatagtttcattaaaaaaggaatataaattgcacaattgtttagtggcaatgtggaatccatgttgtttctggttattgttgtccagtgatcatagaaatcaatatatttagaacgtatttatttttgttaattgatgtctttgagggagaacaagttgtaaaaatacaaggaatttatgcttgtttttgagatagagagaacatataattcaaaaataaacagctggaagagatagtttcattaaaaaaggaatataaattgcacaattgtttagtggcaatgtggaatccatgttgtttctggttattgttgtccaatgatcatagaaatcaatatttttagaatgtatttatttttgttaattgatgtctttgagggagaacaagttgtaaaaatacaagttcctcgatttcaagatgcaatgttatagtattggacaagaatcatcaaaaaagagataccagttatatcctcaggatattaccattgatatgtaacgaataacaactaacaattaggaattgttgtagacgtttgcttcccttgttctgacatttgcctaatttttaatatttggtagccttttctatcttttgtggctggtcataatctgttccttgctattttgtattgtgcttctatgtgttaaattcttttccgtgattgtaaactgatatatttcctccattctgatttgcagcacc

SEQ ID NO: 42338 - DNA, 848 bp, Manihot esculenta
  Intron number 1 from transcript cassava4.1_003971m (locus cassava4.1_003984m.g) derived from phytozome v7.0 (chr-ID scaffold05848; pos 169490 to 170337)
ccattagagagcagcaaatcggtggcattgttcaggtttgctgtcagatttatattttggctcatcaaatgtgtaaagttagtctttttatacaagaaaaagctgttgcactgcacatttattagttgattctgacccttatcttataattttggttttggagagggaagtgtttttttttggctccctaaagtttaggaatttgaatggatctcacattcatagcatctgaattattttcctgtgttggattatagagagtgaggttcctgatcctcgtaatgttttatgattcctacttgaaattgcttgcgggttttacaatgatcctcacttttggtttaggaggctcaactagttggcttaaaagatactgaaatgttaatttgcaagaataataatagtaatgctcgtttcagtctttcagattagtttgctttgatgcatatcttttatgcccacttgttgcatcgttcagcagctggagctttttgtcatataagatccggcagtagaaagacatacctgaacaatatttgattatttcagaaatgaagtgtagttccaaacaacgcaaatagattagcttttgcacagtccttgataagcacagtcccaggaagaagctgtgtagtcattgaatttagctccccatttagaaatggcttttctctctgcttcttaatgtgatacttaaaagggtatgaacaaccatagtaataagagaaattctgaatatctaattgcgcaaggactatcaggattaaattggtataaaagtatgcctttttgcttattagtttgaatctgaactcttcttgtatttgcttctctttaggttggtgcac

SEQ ID NO: 42339 - DNA, 636 bp, Manihot esculenta
  Intron number 5 from transcript cassava4.1_010304m (locus cassava4.1_010304m.g) derived from phytozome v7.0 (chr-ID scaffold01495; pos 24874 to 25509 reverse strand)
ctttcattcggtttttgtactcatcctggtaattgcaaatatctttttcttttatttatcattactaaaaatcaaaagaattggtactttcactggtttgaaattgatactcatcgcatttatgtatgtttctcattatgttatttgaaggatataatgaatcagcacatgttcgaggggtcaataattttattggagtgcgtccatagtatagaagtttgttcacctctacattttgttgattactaagtctatcaccagctcatatttattgtttcctctacaatcgtttaacacatgcagaagatttagtcaggaattagtttaggcagcagtattgtttgatcaaacagactatagctgtgtaaaggtgatcccattttatagtatgatgaataaattgttgagcaggcattactatgctagtttttatcgatttaatgtacttaaagatggaaatttattttgtagactggcattatatagatgataagtgatagacttatagtataacaggttggccaaagttttcctttaggttttctctttcttttcccccttgtacttgtatgctatttcttatttaaacagctaaagtatttgtctgtttaataacctaatgcagctttgaagagg

SEQ ID NO: 42340 - DNA, 599 bp, Manihot esculenta
  Intron number 3 from transcript cassava4.1_010304m (locus cassava4.1_010304m.g) derived from phytozome v7.0 (chr-ID scaffold01495; pos 26270 to 26868 reverse strand)
aacataaaagaatttgaagttttgacatctggtatgcctttcgtttaagtattggtttgttagtctgaccttatctagttaatatttgcttcacctaattttggtgattcagaaggaattaaaaatggtcgttgggattaatgaacgttccctcataatagatttcaataaaaaataggaaatatatatctcaactcaaagcaaggaatttctaatgtttcaatccaagaaaatttgttaatgatcttcaagttgttgggaggagttatgctgctgattcttttcctgtttgataatgtttgcacctttcctcctcttgtttattttgtagtttgacgttccttctaggaaaacctttaagtagaaagctatctatataactttcgacaatgtatgcactttgatttttttctgatagatctgctgtgcctgtgcatttgtgttctgtggtagatactagatactgatgcccttttcttattatttatttttctctctcatttaatatgttttgcagttcatttgcaactagccattcattttttgttccatttttccatgcagatattctttccaagacttctttttttgtcattatt

SEQ ID NO: 42341 - DNA, 544 bp, Manihot esculenta
  Intron number 1 from transcript cassava4.1_010304m (locus cassava4.1_010304m.g) derived from phytozome v7.0 (chr-ID scaffold01495; pos 27428 to 27971 reverse strand)
agttttttacacagaagtaatctaggtaactttgcttcttctcttttcttcttcctgtttacttttatctaattttatctgaatttgatgttttggctatttttgaaatggaaatttcgtagatttttttttttatcgattttggttcagttttcttcttcttctttctttgttttttttttttttttttcttgaagtttaaattctgattttccttttttgaatggggattctggtaatttcttcaacttgaagaacgactcttttacctaagcttattatgtttctctttcttgggaaagtaaagtttccctggaaacaaacaggtgcggagcgttactgacacttaacgcggttggcaactctgtttttctttttctttttaatcagatacaaacaagtctgagattttacaatattttatttccagaaaaatcattaccacaatttttttacaacaattatttaggggttgttgacagatatttagcttcttttttcttttccaggttacttgtcagtgtagtttcagtttgtatacaat

SEQ ID NO: 42342 - DNA, 989 bp, Manihot esculenta
  Intron number 1 from transcript cassava4.1_028839m (locus cassava4.1_028839m.g) derived from phytozome v7.0 (chr-ID scaffold08020; pos 44021 to 45009)
tcaagcttataatcatctttttggtggacaaactagtgatctcatctagctattatttcctggagaaaagaatcagaacatgatcaggatttaacaacaaaaaattggagtttgattgacacaaattttgatgctaatgagggtatgtcatgcatatagtttcttttcttttccccttatctcctcactcattacaggctaaacagttcccatattatgaattaaatatagatttacctgcttttaaaccatccagtccatattcaattttatcatccatttttccatgcagtatttttgtaatgttgttgctttcctaaacattggatttgctggtttctttgttgaaaaagagaaatttgttgtttcacttcatttttatgtggtctcagtttgcactatttcatttaggttttttttcattatgttgatgacaagggaggcatgatttacattgtcatctactatattttctttttctttttctttttttgtgcttttctcatatgtggataacctttgtccgaaaactctcaaaatattttggtactgtgatttacaatgtcttgctgttaataaaaaaaattgcacagttgtggggatttaacctcaatcgtttgtaggaactttaccgagttttacgttgaatttgttggtgaggaaattgatgtcctgttgtctattgatatcaatgttacttattgcatttatcatttcattgatatgcaaaaccattttggagctttacaaatagtttgagatgccaactatagaaagtaacaaactcaagtttagactgtattttgatttattttgtggacttgaccttgttcatataataattcccctgtgcttactataaatgttttatgtttttcttgtattttttttctcaaatgtcttgtccatttataattgattttcatggttaaaattttgtccaactgaaccaagtagttggagtttttggcattgtcttcttccttgga

SEQ ID NO: 42343 - DNA, 590 bp, Manihot esculenta
  Intron number 2 from transcript cassava4.1_026009m (locus cassava4.1_026009m.g) derived from phytozome v7.0 (chr-ID scaffold03874; pos 44386 to 44975 reverse strand)
tacaggactctcttcctcctcgtcccgtgcaagaggtcgtattctttatttagcaaatactgaaagtgttcttatgattcagattttcattctattgtataggatgataagtgtaataagatttagagttgcatgtttactacaagagatttggcctttgaatagagtgaaatgggaagactgtaatcattgacagaaaaagaaataaatgtaaaattggccagcatgtgcggaagagtacctgtggaagggcttgtttaaattaagcagaagaagtaatgtggtgaagatcaagttccacatcttcatttaattagcttagtaatttccagaaagcaatatcaagtttttgaagtggctgaccacatgaagaaggatgaagcggaaacttctaaaagttcccttttttttttcctacaccttttaagagtagaactttgaagcatgtgtgtttgcatttatataggttttttttttgcttttttattctttttttttttgcatccgaagaaaatttaggtgcccgtttactaagttgaaattccatttccacaggtttgtcatactatagagaaagaattgggaaaatc

SEQ ID NO: 42344 - DNA, 840 bp, Manihot esculenta
  Intron number 1 from transcript cassava4.1_008950m (locus cassava4.1_008950m.g) derived from phytozome v7.0 (chr-ID scaffold09347; pos 27504 to 28343)
gttggtccaagcccaagtaagtccattctcattcatggactctaaaatgtctacactctgagaagtaatccaacttcatatgatcaatcttcaatacaaagattcatgtaggtctaaggtatacgaggcttgaaataattttcaacttctaaattcttaaccagtgccgacacttctagcaagtgtcacttagagcgcgttaagcagttaccattggcatagacagtaagaactaaaaaaacaaaaaattataaaataaaataattattttaaaatttaaaaatcattaacatatattttattaacgtcaatagcaaaaacagtgaatttataattttaaaaaaataattaaaaaaaatctcatattttacatttcttacaatcacatcataaactttttacaattttaataattatactctattgtctttaattttaatgtacaatataatataatttaatagttataatttgaggtataattattgaaaaaataaataatacaattacaagtgtttaaacacttggaaagtttgaattttttttttctattataaagaaaaaggaaaacgagaaaccaagtcgactatgatggaacattgggcaaattccattacagtaaaatcggttgtcgttgtttgcaggcaacaaaaatacgagtcttaagccaatttcagaaaagtcgccaaaggtttatctttataatttgtctcaattggacaggtgagattagcccccaagcaatggatatcactgaacaatcacaaccttatatctgtagttgctattctactcgcttccgcagccacatcgtgctcgctctataataacaaaccacca

SEQ ID NO: 42345 - DNA, 692 bp, Manihot esculenta
  Intron number 1 from transcript cassava4.1_033481m (locus cassava4.1_033481m.g) derived from phytozome v7.0 (chr-ID scaffold05496; pos 25977 to 26668)
gatatctaataattgattatattggtaagtaataattttacattgatttggtagatttttattagaaaattgattagaggatttttatttgatttgttgattagtttaattaactaaatcaaaaagctgtcttgattgttattaatatttatctttatttttcctccaaatctttacaatcttgtggaaattgcttaccttttcaatcataatttaattgaaatttagtagccaaattgcattaaaaagaaataccgaatgataaataagtttctaaatgatatatttatcctattgaagatattcaatattttggcttatgtagtttctaacctttccaccatatgacatttatttatgctttgttattttactttattttatttaatattctttaggttgatttagcgggtttaatataattttttcactttaatattcatgtttatacctagaaaaaaaataaaataaaataaaaataatattatattatattaatttaaaatccatacataaattttgtaccatgggtcaatattatatatttaaattcattatttttctaaatgataattttcatgtatatattgctaacttgtttctattaaaaaaacattaaaacttcaaatgtgattacttttttcaaaaaaattatagctcaatcagctggtcttcccctactagagccatac

SEQ ID NO: 42346 - DNA, 942 bp, Manihot esculenta
  Intron number 1 from transcript cassava4.1_020691m (locus cassava4.1_020691m.g) derived from phytozome v7.0 (chr-ID scaffold01610; pos 6961 to 7902)
cagagcttggacataacccatttctcaaagctcaggtttgtatatccattcgatctacatgttgtcgttttaaattctccttctgtctgtgtctttttttttttatattttttttacttctgtttttcttttgccggtattttagggtttggttttgatcggggttttgggttttttttttgttcgatcttaagttactcgtcccaaattgttgaagggttttaattagcgtgcgtttaatgcaatagggtatatgcgatggctttgttttgttcgttttgtttatttttccccaatctgttttatttatttaagcttatttttttgtataattatattgacaaattagggtttattgcaaattgattttgggatgtgggtttttgaatttgaggattgtgtttgttgggtttgtttgatggccggaaaatcgttggattgagaattaaatagtttatatgaatgcacttgacgttgtttccgcgtttgggaattaaaactctgaagccgaatggttgtttgaagtttggtgaagtggatttttattgtttcatgagttcttaattgatggaagattgaaaaatgcaaattttatcatccttttcagttccctaaatttctgcagccaaacagacgactactcaaaatatggtttatgctggatttacacatttacttattttagtaaaatatgtttcgtttggggatttattcatgctttaaaatgaacaagagaagtaatcctttaaaaccagtgtttattgtaactggaaactcatgttctacagctaatttttacttaatggttatgtttgtaaaattgagctgtgttttgctgccaaacaaattaatacacgggggctaattttattcattttgtttctcatgagggcttcctgttatgcagtgagtggagttgaaggattgtggttgtggggaaag

SEQ ID NO: 42347 - DNA, 746 bp, Manihot esculenta
  Intron number 1 from transcript cassava4.1_002356m (locus cassava4.1_002356m.g) derived from phytozome v7.0 (chr-ID scaffold12270; pos 55841 to 56586)
cctgctcttcctggttagggttctgtttttatgcctcattttttgggtttttgaattagtttgttagtatgtgactgggttgattttgcaatttggtccttagatatcagtacttgaatttgggtaagcattttgattgatccttttttactttctactgcttaatgacatttaatatttagcactaggcatgtgcctgattccattgttgtttggtttcatttgattatgattacattccttgttcttggtttagggtttaagaattgatactgtcacctcttagttactttttgcttgaattccaatacaacgactacaacaacaactaagccttgttcaatgctatattttacttatgccatatgtttcgtgaagttcttctctttttttttctcccctttatctcttgtatttataatttttacatggcgttaaactttgaatattgttatttgtattgcattttaatttgcttttgcagtcattacaaattatgaattcttatctgaattgctatatgtcatttatgccatataacccccctcaactcatcctccccttttctcctcgtttctgttcttttatatgtttcaataatttggtgtttgagtcttgcagggatttttaattcttattttgttgagttatatttcaatattttccaatctgaaagcgtgtatgtccttttgattatgatttatttttaattgggcttgatttattagacattttgtgttttaggg

SEQ ID NO: 42348 - DNA, 705 bp, Manihot esculenta
  Intron number 1 from transcript cassava4.1_026924m (locus cassava4.1_026924m.g) derived from phytozome v7.0 (chr-ID scaffold09151; pos 54880 to 55584)
ttggtacttcatcatttggaagtgaatataaagaagtatgtatctcttttctatcccttcttttgaaattcaccttttgcagaaatgaatgatgccgatgtgcgggtttaaattttttggattgacatgataatttttcattcatattaagaggatcttgatgtattcaatagtcaattagcttaagcggtttattcattgccaaagatgtttgaagaactttgtctcattgaaatttcctaaaccttgaactttgcctaaatatgtgcagaaagcaaacacatgcccctggtacttgaccgtgactaggcatggctgttatcctattccaagtcaaaactggaactagactggaggttctggtcctaaaaagctagggacacaggactggaccaaaagtttcccttctctcgtttgattaaattcaacaatcaagaattttttaaaagtgaaaaaaatcctgtattttttgctttgaacctggctgaactggtcgaagtccgtcagtccagtttcagtttggttcaagatgttctagtcaaacctgagttggaccgcttctagtccagactcatactgtgccaaatctagcagtgactgatgtactgactgggcctaattttagagcaacaagctattatagacataattttatgttgaaaatcatctatgcagggactaactaggtggcaagtcattgagaca

SEQ ID NO: 42349 - DNA, 572 bp, Manihot esculenta
  Intron number 1 from transcript cassava4.1_013634m (locus cassava4.1_013629m.g) derived from phytozome v7.0 (chr-ID scaffold00926; pos 200806 to 201377 reverse strand)
ctattgtaattacccatctctcttccttcattcccttttgatttctctaattcttagtaggatcaaagttgcttgatatgggattgcgagttttcatttcttgattacctcagcttattcatgatgcagttgctgctttcgtggtaattgtagtccgtggttgctatatgacgaaatgcgttttattagtcctgacatttatcgggcttcggtaatcaacccactaactatactgattaattaggtgcatgaatgaatagcttcaaatttttgcaatttcgttgatgaactctatcacgtttgagatgggagagttcatagattcctacaagctacaacagcgtcggtttggtgatgaattctttttcctattggtttattagaaattttggatctttcacgtattgtgcagtggagatttttttttttttttcaatgaatacaaaattttctgtattacgttgagagcacctgattgaacaaagtgaaattgaacgttttccacttgaatattggatagatggcatactacttattaagtgttattcttcttctgcaggttaatccagcaa

SEQ ID NO: 42350 - DNA, 540 bp, Manihot esculenta
  Intron number 2 from transcript cassava4.1_011267m (locus cassava4.1_011267m.g) derived from phytozome v7.0 (chr-ID scaffold04285; pos 273737 to 274276)
tttagaaatccagcccagggaactacaatttatatgtatggccccatattaatgatttttttattattgatttttgatgtctttatttactcgtatctgtaattatgattgctgctaaaggataattattgctttgcttgatcggtgagaattgggcagggaaaagagagtaagcagatttatgaaatttgatatttttaacttttcttgttgtgtttgcattttggaaaacaaaaagccaagaaaaaaaggtgggttggccttaggatacaaatctcagttcttctaacttttgaaagtttgaacgcacaaaggttactttcttttatttttacagcgctgaagactatgaaaagtatgtttctttttcccctaatgttttttctagattaatcttagagacaatctgggaataatttaagttaccgtgggtatataaatgaaatagttgttctttttttttaatatataaatgagttcaaaagttatgatgtatatgtctttttttccctctgtagttgaattaaagaagcagagctc

SEQ ID NO: 42351 - DNA, 1018 bp, Manihot esculenta
  Intron number 1 from transcript cassava4.1_017694m (locus cassava4.1_017694m.g) derived from phytozome v7.0 (chr-ID scaffold11670; pos 115772 to 116789)
atattaacgtacgtttcctttccctttctctcctatttggatcttcttctcagtaatcaacttgccaatttgttttataacttcgatctcattataatctctttcgtttccttttctgtgcatagttgtttacatattagcgattttccctcttcagctacgtaaatgaaaaggatttttcattatgagattaataattgctatattagtaaagggattactgtaattttgcaaaatcttatgtctctgctgattagattctaatttatcttactggcatggacaaaatattggggattatttggaaacatattgaaatgcgttttgtttttccgtaaaactaatataaaatgagcttttaatccaaattgaagctgttttgatttcattgaaccactcattagttgcgaatcggtacttaggaatacgatagttaattaaatagttggaaatgtggtaatgctggaggttgatgataaataattgctcagaatactttaaactaatgttgaggaaatgatcagtgagacattttaatgtgtaaaatgcttgatgatagtagagcagaagtttacatttacgcataaaccaagaagccaatggaatctcttgacctatttcactaaccgaagtactaaactttctgcagctataattgtgatgattaatattgggatcatttttgtgtaataagaaatttaaggactaaaatttgactagatattatgattagaggttggaaaatgtatgacgtgttaattcgatatttgttttggaattgtttttaatgttatgaaaaaccaatttgaattatgaaccaatatgaattatattatcttttcattttaaattattcttgataatgttagtgctcatgcacgtaaatatattgccttcttgtatctctgctcatcctctgtgctctgtttttgttgcatcagtcgttagttcaattttcagatgacattttttctgctgtttcacagtcactatcgagcagtattgagggaggaaccaa

SEQ ID NO: 42352 - DNA, 837 bp, Manihot esculenta
  Intron number 1 from transcript cassava4.1_003755m (locus cassava4.1_003755m.g) derived from phytozome v7.0 (chr-ID scaffold04151; pos 564397 to 565233)
tgatttctgtgctcttctggggatttgccaatcaggtatattatgatttcacgctgattctgtttgggatttaagtttgtttgattgattttctattatcatggtttcagatgttgattttgattctggtatcagaacctgttagtttttttttttttttaaatttcgatgtaacttataattatcttctgttacagattactaaaatctgtattcgaatttttatgcgttattttctgtcttgtaggttagagagtgacgccttattttttttgtccaaattatcatttaaagttggctggcttgttggctaatgcgattcatctaattgatttggctctctattatcttcccacaaggcccaacgctaatactctcacaacacacacacacacaaaatggaactttgaacacattagaagtctcttgtaccgttcatatgtcaattttttttcacctttaagaaaataatgttatttctgaataatatttgaggatgaatataacggattctgtgaatttcaaaaggcaaatattagaatgatcttaccattgtcagtgctggagtgttcatgaataggttctctgttttatcatacttaacaattggttttttgtcttcgagtttccaggatgtgacagatagtttcacatctcacaatttccaaagtttaggattcatggaaaaaaaaaacttcctttgttgcttgattaaatggctattattttctaatcaatatttcttatttaacctttgttccacctctggttattggtgattgaagctgcaactaagtatatgcatatattatgtatttgtgcagatcactactgtag

SEQ ID NO: 42353 - DNA, 685 bp, Manihot esculenta
  Intron number 5 from transcript cassava4.1_004010m (locus cassava4.1_004010m.g) derived from phytozome v7.0 (chr-ID scaffold06512; pos 1479865 to 1480549)
ctttatttctcatatcacaccaatttaacgctgaggtgataattagcccaaatatttttgtttgtgtattttaattatggtaaatgtgccccgttgtttttaatttgttgtggaaaccttgcacaaacagttaattatttgtgcactgccagttgaaatgagatcgaatgtgctaaaccttcctttggtttatatactccagattatggagtaaaaaatggaataaaataaaaagatgttgcaagtaaatttggatgtaagctactaggatcaattgggataactatgtggacttaatgaaagaagaacttaattttaaaagtaataaaatatagaaattctctagttgaaatataattgggaaaatcatggttgtctatatatgaaagcataaacagaggtacctatcaggcaaatggctggacttctaacaagatggtgttaagcaaagattaagactcaaaactattgatggctcaactttgtcaaagttcatctaaagcgggctgttggtttgctcctatacaatccaaagaagaagcacctattttatgatggatgtataacattaaagccaaaaagttgggctaactttattcatcgatgtcttaatgtggtgtgttgaaggtgaaactataacttctatacaatctcctttttttttgctacagtgcacaacggttgc

SEQ ID NO: 42354 - DNA, 546 bp, Manihot esculenta
  Intron number 1 from transcript cassava4.1_003393m (locus cassava4.1_003214m.g) derived from phytozome v7.0 (chr-ID scaffold07708; pos 433570 to 434115 reverse strand)
attcctctctctggttccgcaattctaaatttcaggtttttctctcttagttcttgatctctttctttataatacatggacaccccttcgctggataaccatctttgatttttttgcctcttgatttatttggattccgggtattaccttttctaattatctggatttttagtttatctcgtggaaattcatttcattgttgagaaaaaaggaacttttttaagggatattggtaaatttacatgacagaatttgttccgttctctatgtttatatgtacaagccaagaaatcgaggcttcagagaataatactgtttactttctattaaaacttcttgaagcttcttttcttgtttaattattattgttgtttttgttttttaaattaaaagtgctcccatttaagttgcaaatgagtagttttaagctcttttgctgatacccttttggtgacattttgtttgttttatctgggttcctgtcttttgctgtgcttggcccactttaccatccttttagtcataactcgatctctcttttcagac

SEQ ID NO: 42355 - DNA, 1012 bp, Manihot esculenta
  Intron number 1 from transcript cassava4.1_007436m (locus cassava4.1_007436m.g) derived from phytozome v7.0 (chr-ID scaffold01551; pos 1877183 to 1878194 reverse strand)
gcaacccaagcactgcaacttgcccaggtttttatttttcccctattccttgttgaagttgtttctagctatgcagcgtgggaaaaatgaaagggaaatcaaagatttttttaatggtcattaaacacgagaaacaagggaaaaattttcattttcaaaaaggcacaattactattttaatctagcgtttcaataagccttgtttcttctgtttcttatacgcgttctacatttccaattctgagcaaccaaatagaaatttcagtttcaaaatactcaagttttagtaattcttgcatggccacgaaatcctcttttatttatttattttcatattagtttatttgccaacttggaaatttccttagtttcttccgggatctatggaaaataacattcagggctcttttccctgatttgctgaaagttttgtcttctactcaagatgacaagtctctcaaacaaacccgtgagcttgcatactgataaagatggattttaacagtgaagaaactgactatttctatcttgatgtgtgaccattcgctgttcttttttaggttatgttgggaggataaggtaacggcagcttttttcaaaattttaaattcatgttttagatgactaatgattttataagttacgtttttctttgacacctctaaaatttttcattctcgattcaccgatttgggttgaggaggttttttcttctaccctttcaatacacatttcttccttccagataataaaaattttttacactcataaaatcttacttaaaaaaccttgtttttagaaagacaatctaaaacaaatgtaaattttacttctagttggctgtttgatttcatgacgaaaatttttcttgtgggcttattattctgagcgatactggtatattgatctgtgattgagatgaactttttttcgaatgaactgcattgctctgaaatctttccaagtaataaggaaaaaaacctcatttctcccatccatacaaacagatttg

SEQ ID NO: 42356 - DNA, 432 bp, Manihot esculenta
  Intron number 2 from transcript cassava4.1_019703m (locus cassava4.1_018344m.g) derived from phytozome v7.0 (chr-ID scaffold01551; pos 1622953 to 1623384 reverse strand)
gtatacccatcactgtatccttaccgaaaccccagactcttatttgctgttttagaaatctagcatttctgtaacttaggtctactgagtttaagattcagtttttagttttctgtatgtcgcaattgcttagtttgtttcatattttgaccttttatgtttgaatcttaatgtgcatcagggcatctttgcttttcttttgggtttatttttcctctctatgtaatgtatgcttgagaggctctggctattggaggccattttgttctgtagctatgagctaagaaactagagcgtattgtttgcttcatacatgactaacaacaaaattgataaatttccacttggataattgtattgtgttcttggaattttttcctttaacttctgttaaaaggcagagaagattgcacagttggtcaaagcagctaa

SEQ ID NO: 42357 - DNA, 831 bp, Manihot esculenta
  Intron number 3 from transcript cassava4.1_016614m (locus cassava4.1_016631m.g) derived from phytozome v7.0 (chr-ID scaffold05335; pos 669390 to 670220 reverse strand)
tatttgttgaagaggtcaggaagcttttctgcttatttttcactttggctgtgttattaggtggcttacgagttgaaagcaagtctgattagacagtttgatagagactagaccagtatggatggtttgaagtgggaattggaacacaatcaccttgctgatgcctgtctcaggctctgagcaagctgaaactaagaagcatggaaattttgaagcgaaaaattatgtatttttatatagctagtaacctaaccctaatatagttagaaaattgaagtttccagtcatacattcttcatgtgttataagacccagagataaatatatgtgatagtttatcctactataagatctctgtcatctctattctggatggtttttgtgaattacaagacacgaaaaatatttagtatttgatatctgtataattaatgtagaagtatgatagagtaataggctagatgataattatattataggctcttgcagtaagaacaagtggattaagatttttatctattgaatacttgtgttattctgcgaatggatgtaataggggtttttttgagcattgagcttgaaaaacaaactaggtgctccttattcttgctcatactgcagctctattgcatttactacctagtgcattatgactagttcaagtattctatgctcaactctcactctatggtaatgatttgttattgtgtccatattgagagagaaaggaggggggggggggagttatctgatcaaatttctaatgcacaaggttattacttgaaatgctcttgatcttgagttttaaatttgcagttgtgtcatcaatct

SEQ ID NO: 42358 - DNA, 663 bp, Manihot esculenta
  Intron number 2 from transcript cassava4.1_005271m (locus cassava4.1_005271m.g) derived from phytozome v7.0 (chr-ID scaffold01127; pos 697741 to 698403 reverse strand)
gactgatagagttgaaagtggtaaggcggagtaatcttttcaattctgatttatgcttgcggttataagtttagctgcttgttctgccaatcctgtattcgctagccttttgctccaatgagcgaggttgattaattgattttgttgtttgaggagaactcgaagttcttgctgccactataacgtggattccaggttaattgaagtcatctggtcgttgataatcctgttttttgttggttaatctaaagagcatattattggcatcaaatttcgtcagttgaaaataaaacttcagtgccaatatcagtgtttgtagaggtgtgttttgctatttgcttctagagactattcagtaggtgtgttaattgatatagggaactgggttattagtttttgggtattgtcttgtcttaatagtttgtgtaccactggtggtgaaaataaatttattctttcgcaatctcttcacttggcttgagaatcctaggttctttgattttgaacttttccgtgtgatttttgtttgtttatcattttaaactgcagtaaattgccttattatgaatgttgttgctatgcacataaacctggttgatagaaatatgtttatgctgttgttttttcaatgatttgttgtatacattctggattttgcaggct

SEQ ID NO: 42359 - DNA, 406 bp, Manihot esculenta
  Intron number 1 from transcript cassava4.1_028687m (locus cassava4.1_028687m.g) derived from phytozome v7.0 (chr-ID scaffold01778; pos 2175 to 2580)
gaactaccaggtaatattgcttgaacctttaatgtttgttttggcatttcttttagttcttttaattgcgcttttagttcagtaacgttaaggatgaactatatattggtttgagctttttgaatttttgtggaacataaattatcttccaagtttgatctccattaatttcaaagaatattatcttgttattgctatttcattttttgttgctgatttaagctttttactttagatatataggtcagatattagttttaagatccatctcctctttttcttcaaggtacttatgagatgtgcaagtttttattggatctgaaattgttgcattttcttgtattcagaataatttgagcatcctggattagatctccaaaagcaggcgactgtgttaatatcttag

SEQ ID NO: 42360 - DNA, 344 bp, Manihot esculenta
  Intron number 1 from transcript cassava4.1_001166m (locus cassava4.1_001166m.g) derived from phytozome v7.0 (chr-ID scaffold05375; pos 65692 to 66035 reverse strand)
cagaagattgtgtacggtgtgctgcagttggcgtggtaagaatatgatgctgaactatccatcatttatttgttttttaccagtttttctaattgttgtttgacttactctggtaatttattaaaatgcgaatttagggagctttggatgtttcatgagattgtagttcatgcttgtatatcaaaataattaattttcctgtaaattagttttctatgtatactgggtttacccctgttttggcacccaaagaaaaaaaaggttacttggactcaatgtaagcatgttagagttaacttctgcttattgattttgttcttctcatcgtgaatccaggtcaataa

SEQ ID NO: 42361 - DNA, 1003 bp, Manihot esculenta
  Intron number 2 from transcript cassava4.1_002778m (locus cassava4.1_002778m.g) derived from phytozome v7.0 (chr-ID scaffold08613; pos 9634 to 10636)
ctgaagacttctatattgaggtactgaccatgttaaacatatgtcaagtatttccattaataatctagttgattaaggaaacacattagtatgcatcaaaacatatgaaatcttattaatgcataagaagctcactattcagaataacatatggcagaaaatgccaaaaaaaaaatctggcagcagaaccagcaaaaacacataggaccgcaaaaacggaaaactgtctgaactagaccgggcctttatgaatttacagtgtaaatacatggggttccatgtgagttctactctcattttacactatatatccacatcgaaggataggaatgagctgtattcggttcaaacaggaaaaatagatcgaaccgaattaatttgaaaattcagtttttttatttttgtcagttcagtttggtttttattttaaaaaatttcggttatttcgattcggttcgattatcaaaaaaaccaaaccaattaatggcaatagtatattattcttttataatatagagagattagactataatcaatattgaaatacttcaattaaattttagaatactaaaaataaaatgtaacaaaataaaaaggccaaccaatcaaatcaaaccgaactagatcagttcaattcgagtcgatttctgtccaaaattggttcggtttgatttttacaaatactaaaattttaattttcggttaatttaattcgattcgattttaaaccaaactggccgaatactcagttgtatagactcagtcgaaggaagaatttcccttatatataaccttctgtttagtagatacgtttatgtagaaacagtaactgttgtacacagttcatgctgttgcctctaagtctgcaattttttgcaatttacaatatcatttgtgctcaaagtcattgtttcttggtttcataaatttttgattcagtgtgtttatctagtaacttcagccttttccactgggttggttaatgtttttgtatgaatcagaa

SEQ ID NO: 42362 - DNA, 689 bp, Manihot esculenta
  Intron number 1 from transcript cassava4.1_018645m (locus cassava4.1_017066m.g) derived from phytozome v7.0 (chr-ID scaffold02019; pos 164388 to 165076 reverse strand)
gcaagtggtctttaaaatcagggacaaggtagatccatgaatttgatataaaatctgcatgttttggctttcaacgtatttctgctatttaatctattctgaagtatctatttagccatgccaatagggtttaaattccttttgattcgcttttagttcacgcttttgcttaaaaatcttttcttctttttatataatatagaacaaactgaattttagtttttttattacagtggaaaagaggatgctaactaaagaaggcaggcagtttctgtatgtataaatataaaggttgcatgggaaattgggaattaagtaattttacctgaactaaaagcttctttacaacccttgacaattctattgatgtggttggcattttctgaaacatccaattatgtgtttttctctccttgtctatggggtgaatgaaattccattctcaaagaaatttaaaaggatgctataagttaagctttatcacttactagtgatagtcttctgccaggagcagtcctttactctttttctttttttttttttaagtattttcttaaatttttctgttgctttttccccttttattttatcgtatgatttattacatttcctttcctttagacactgcaaatggtctttaactgattttaatatttatttctctaggtctggaacaacacaattatcat

SEQ ID NO: 42363 - DNA, 815 bp, Manihot esculenta
  Intron number 2 from transcript cassava4.1_014874m (locus cassava4.1_014874m.g) derived from phytozome v7.0 (chr-ID scaffold00341; pos 540703 to 541517 reverse strand)
ctttgctggtttttggtccaaaaggtcttgctgaggttagttgtgcatggaggagactgatggtgtactttttagctgtttctttccttttaagtatggatgattgttctactgtttgtaatctgtgcacataaataatgtatcggtttttatttgaataatgtattgacctcacgccaactcttctgaagcaaaggtaaataaaacagagaaaaagaaaaggagggacccaaatgatttatgatctaatatattggcataagattgattttcctcttgtaacaccaaccattttattttagaggcagtagtgtgaagaatggaggatttaactgtttgaacgtactgtaggatccagagtgcctatatgtatgcatttgttagcaactattcatgcaaagtagctgaacagtcttctgattattgaggattaagtttcaatttcttaactgccttgaatttgaaataatttgaaaagggtaccttaaacgaggttggaatatcagagtgccttgtaatgcagggtgcacccttatctttataagaagatcacatacagatggattgcatttgaacttgtagatacagatttaacaatgaatggggaggtgtagtctttgttgggaggacaatacggtgaagttaacaaagacctgcccagccatctcaatgccttcgtatttttggtggttcagttgcattgcttttgagaatgcatgtcttctttcattttccagaatttttatttggtgtagctctcctgagttatcttaaatgcaggttgcacgcaatctagggaaaactctgcgtgcatt

SEQ ID NO: 42364 - DNA, 604 bp, Manihot esculenta
  Intron number 2 from transcript cassava4.1_029514m (locus cassava4.1_029514m.g) derived from phytozome v7.0 (chr-ID scaffold06711; pos 522723 to 523326)
gcttggattcttcatctttgttgtcattggatcatgtaagtctcattaaaattaatgtcttcatcatttatttatgtttccactggtttgttttatatatacacacaatcggattccaaatctctctggtgtcttatctcaagcttagactagagttgattgtggttagaactaagaggagaataactagcattttaaatcttttgatataattctgaagtaatataaataattgctaatgttgaccttattcatattatgtaggacatatcctattcaaagattgaaaaataatcctaactaataaactctcaatggacaataatcctagataaagaacaaatcctaaatggagaaaagaaaactaaataaattcagaactgaataggacattagatgctcttgcattacgttggatttaatattcctgtagtttatctgcgttgacatgtgggtccttaaagattaccattggaaatcacatgtatagaaaatgctagttggtttattgtaagactacatctctttgttcttactaaacttgttggtttttttgttgtttgtaacagctctattccagataatcaggacagcaacaagcggg

SEQ ID NO: 42365 - DNA, 559 bp, Manihot esculenta
  Intron number 2 from transcript cassava4.1_011507m (locus cassava4.1_011507m.g) derived from phytozome v7.0 (chr-ID scaffold07991; pos 671933 to 672491)
gcaagcttaatatccttgtaagctcctcctccattatccacttttcttatttagatgtttatgtcttgcacttacaactttctcgatgtgtaaaagtatcttttgttttgcgtgcgatatgtttgttcatttgcctatcagagaaatgggcatcttctggctgcatttcggtacatttgctcttcaattttgggagcaagcaatcattgataggcgaaaattttaaaatttctgtgaccaaggtcagggaggcatatgcaagtataaagatttctatttcaaaagccattgatcagttgaaaattaataataacaactgaataatgtgctatcttgtactcacacttctaaatactacaccagtcccactacaagggttggaggctaattggctaaagtactcagtccttgatgtgcccaaactttagttgtccaacttccattattttgatcttcatctctgttagaatcactcacaaacaatgggaataaactaaaacgcatgccttgtttttgtttttattattattattattattatttaatttttaggttaaca

SEQ ID NO: 42366 - DNA, 348 bp, Manihot esculenta
  Intron number 1 from transcript cassava4.1_009952m (locus cassava4.1_009952m.g) derived from phytozome v7.0 (chr-ID scaffold06512; pos 1411551 to 1411898 reverse strand)
aggttgttcctggagtcgttgaaagccttaaggtactcttaccaataatttgtttgtttcttttgctggatcgatttaaagtgaatttgatatggattgcgattaattgctgtgtttttgtgttgtacttctgtctatgttcttcgttcttagactgaattaacttttttttttttgggtttttgaaaattgtttaatttattttttttaaaaatattctcaaagtgtcggtactgaaaacttttagactacttgtgcaatggctttgatttttcttttgttttttaaaatctcattactactaatttggtaggtgataacaaagttctgctccgagcgtattgcaaa

SEQ ID NO: 42367 - DNA, 586 bp, Manihot esculenta
  Intron number 2 from transcript cassava4.1_030318m (locus cassava4.1_030318m.g) derived from phytozome v7.0 (chr-ID scaffold04151; pos 254435 to 255020)
tctgctgctcaattacagtgttcttaacttcacaggtgcgtcctcttttctgctttttcatgcctttttggttgaatttggagcaatattgatgaagatgttgaacatatattgaaccaaaagttatttggaataattttttttgtaaaaaaagaactgaaatgaaattgggagaatgcaatttatgattcagaaaagtttaggagcttcctatgagaaactattcttagttggagaatttgaaaggattttaagttgttgcaacttttgtagatcaattggatagcaagaaatctaatagaatgagtttttgctattgttaaatattaacttttttgggtaaatatttaatttcatgttcaatttcaactttcaaattaacctagagatctcaattttgctcaaatataatttctaaactgaatttcttgatttttaaacttagattaaagagtaagaaaatcaatttcttacatttgattaatactcaaattaaaaagtaggaaatcatcttttaatagtttgattttcttgttaatgctcaaaaacaggactgatcaagattgttaagaagcacaacaagagg

SEQ ID NO: 42368 - DNA, 834 bp, Manihot esculenta
  Intron number 2 from transcript cassava4.1_019173m (locus cassava4.1_019173m.g) derived from phytozome v7.0 (chr-ID scaffold03687; pos 142225 to 143058 reverse strand)
ttaccttataaagcttctcttgatcggcgatagcggtatgattttatgtttctaccctctggtactgggagttgtttcaatctatttgaattaaaatgtgatctcctgttttttctttttccttttcaatttgaggtttggtcaatcatgtacaggggaatgagaatatgcttccaagcatatggtctgcatcctagccagcatttcaaacgattgattgtgtaatgcatgttttaaacttactttgactcgattcttagttcaataatgaacctaaatttaatcccaacttttaataccaaaaaaaaaaaaggagcagcatattaatgctcctttttttccccttatgtatgcgactttatatagtgcaatacctattggctaacaactatacacgcatgtttgcacctcttagtcaaaactaaagtgaattgggtaggatccttagtgtaagctggtgcatttgatttcgtgatgataattctcccttttggtccttgattaattattaaatttatcaaattacatgggttggatgaagtggctgctggaatggaatcaaccatgtcgggtttttcaatgccaagaggatgcatatggcaccacatgagcttgccctgttgtttgaatgttatatcttagatgaattaaaactcctttcttttgttttattttacttttaaatgtttatgtttgtattgacaccattttatgtattaactcaggaccataacatttcattctctctttttcttttctttttccctctctctttttcttttgatatgtaccttggcaggtgtgggtaagagttgccttcttttgcgtttctca

SEQ ID NO: 42369 - DNA, 832 bp, Manihot esculenta
  Intron number 1 from transcript cassava4.1_009911m (locus cassava4.1_009911m.g) derived from phytozome v7.0 (chr-ID scaffold10795; pos 89863 to 90694)
acaaggctaactttgcttttctatttcctggtcaggtcagtacttgctaatgccaattttcatgtatatactgatatttttcttctaatctacttgtttcacttttttttagaagttaatgaaattgaagtggcatgggttgaattatgttgatattgcttgtgaagcaatttttttcagttgttggaatagaagatatcattgggtttgcttaatttggttaaattgaaaaatcatgcttgcgaatttctattattagttttgcataccttcagatggggttggatattcgaattctttgtttgaaacttgaaacgtttataagcaatcaaagattctcttttgttttcagaatgcatgctagctaaggaacttcattgtaaggcactggatgataggttatacaaggagtaacaaaatgggggggggggtgtttcctgcctgttcccgacctcatttgcgactggaaatgaaagagataagaagaacatttcatattttagtgcacgggtagaatttgaaacgtccctcggaattgaaagggacaagggtcttgcgtcttaaattcatatcagttgccttgcaagcaatcaagcttgtacccctgcttgggtttatccttgggggagttatttgtttgatgaataatagctttatttacgtacaactcaaaggaacttaaaaaactttactcgtgcaattgaaatttagcacaattatgctttatgcaatgctgctttgtcattgaaatcatgctattgtatgtttattgtatttatttttaaattttcatttttgctctcaattctgttagggtgcacaagcggttgga

SEQ ID NO: 42370 - DNA, 960 bp, Manihot esculenta
  Intron number 1 from transcript cassava4.1_017397m (locus cassava4.1_017397m.g) derived from phytozome v7.0 (chr-ID scaffold01551; pos 960898 to 961857)
atagcccaagagggggcttgtagcggtacttgatctttccctttttcatttttggagaagattcttgcttttctttaataggattttgacaaaaacaattgctgtgtatgtgaacgtctttgggattcccagctttgcttatttctgcttcccaatttcttgataaaagatggtgaatcagtagtcgaacgaaatcatagagaaatcaatgaatggcaaggaattgatactatagttttctaatattagaaatttgcgttgatactggaatttgcatcttcctaatatcattcatcaaaatttgtcttcttttttgttaattgttcttgttttttggttagttgttttagatgtcaagagctcactatcaagaagctgactaagaattgaattttgattagcaactataggaaatggcatcagtttaagtagaggaacctttttattctttcaactgaaatctaatagcctattttttgtgataggaaagtagtatccgtactatttgttccttgttttgtaacggtagttcccaatgtttgtttaatgaccatcaagcattatccttttacattttgtttacccaggatgtgtagtcaaatatagaatgtcattgtagctgttgattttccatcttttctacaactccctttatgctgaaatgttatatgctgcttgtggtgaaccttcttttgcgtgaaaatgtctagccataaattcattcctagccataaattcattcctgaagtgatggtaccagagatatcatgctatttgtacaactgaagtaattctgctgattaaaagccaattttttccctaatatgggatttttttttctgttgtattttcttatgtatttgctgaagaattggggagttcaaatagttagtacttcttgggtgttttggctatgtgccaggtcattgtagacttatcaaacctcttttttacctgcag

SEQ ID NO: 42371 - DNA, 751 bp, Manihot esculenta
  Intron number 1 from transcript cassava4.1_010801m (locus cassava4.1_010801m.g) derived from phytozome v7.0 (chr-ID scaffold06512; pos 1419197 to 1419947)
ccgtgagagaagaggccaagttggaggtacccgtttcgtttttttcttttttccttctttactttttatttctggttgttgtataactgatgtttccatcataaaagaatttgtgtgcagtgagtttaagggttagaggtgtgattatgtaaaattctttgcatcataccctataaaggttgtttgctttgagtttcaattcaatcaagatagactgcgtttgttcctggactcggataccttgaattgcttggaaaaatatgcgactttgcaatcgttacaaccaacttgcgaattcaaagttctttcaacgtgagcggtagtggttcgagcattgatgtataaactcgtttctgattcccaagtctaaaacttttagtttcaactcgggatttaataaagaaagccgttttgatcaattttagtaattatctatgtttcaagctgtattcacattgtttctcaagccgaatggagcctacagcatgatttattgattcaagcttttgcttatgttatttgtggcactatttgctacttttgaagtattgtttgtgttaaatgactgaagtttgagattcctacaagcgggagcgaaaaagagaaggggggggactggggtggctattaaagacaatacatgtagtattttatgctggggccttgcaatttttttttttccactaaattcttatacatctgtatttgtcatgtaggcagaaaaagaaccgattctaagtagcttcttgta

SEQ ID NO: 42372 - DNA, 985 bp, Manihot esculenta
  Intron number 1 from transcript cassava4.1_000332m (locus cassava4.1_000332m.g) derived from phytozome v7.0 (chr-ID scaffold01551; pos 2051226 to 2052210 reverse strand)
gttcttgctctgctttctgaaaggttttttttttctttggcgtttttcctctgttgccttagcttttgttctttgataggtctgtgtttctggatttttcatgattattaatactgtttagctggccttgcatctgaaaagtgaaacttttagctaatccagattgttgttttaagctctaatgagcagcttacagtcaaagttcagttattcacctttacctttctaaaaatggaaaaaagagtgtgttttgtgtaggttgtcaaatacatatcagtactgggtcatgtagctttctccaatgacgattgcattgttttcctgcttttaaacttatttacagtttgacattggctcgtcttgtcaattctctttttctttgtgctcacaagtcacaacaagaggaggaaaaaaaaaaagggaaaaagttggaattgaaaactgaaagatgtagtttttgtcaatgtatgttcagcagaattcaatcggacttagtcaagcaactcattaagcttagtcctgtggactcttaaaatctgtgattcttcttcttcttccccccccccccccttttctctgggtttggttctgttatggagctcataaaagtgaaagattttgatttgttaattgttatcctgcattccctatgctaaatcgtggtgttagtttcttgcacagtaatccgtggtatatggcaattttgtttcatctatataccacttgacatgttattcctcattttgatttgattctaacacaaaaattttccaatctttctttaagaatttcactgttcatgtagtaattgcaggtttgattttggaatcgcttagatcccatttgactactgagttgtttatgcgattccaggattgtattcgcagctcaggaatatttctagtctgcaacctcatttctggcattcctgatattatttgtttccacagggttattccgtgtcgacgttcccaaccagtcgcat

SEQ ID NO: 42373 - DNA, 782 bp, Manihot esculenta
  Intron number 3 from transcript cassava4.1_008915m (locus cassava4.1_008915m.g) derived from phytozome v7.0 (chr-ID scaffold00341; pos 77437 to 78218)
gctacacttggtatgcactttgtgtcagcttgcattttcttgctccaagttgcattttgtttcataaattaatattatgttgagaagaatccagaagaaaaaggaaaaagatcatgagttcttttctgatccctgtgattttctgggaaattttatccatagcaggacctaactgattatagttttatctatattaccttatacaaccaactcttagaattacattctcttatatgcacaataatatcaggaaagtaatgcttttatattttgttaattgcttttctgtttagcaaatgtcaaatgctagtaactttctatgataggtggaagaaggataatgaatttttgtttcctttacataaattgttctgcttcatgcaaatcgtaaacttaaaggaacaacctattcagcgttcgtttcagaataacatcaatttaactaaattacatcacagggaagtagatatttgtgtctgcggtgggtgtaaattgtggatttccttacactagaaattccctccaggtccgtggaaaatagaaatcagattatccttaggtaccctctgctgctggctccataaagtgttctcactttccgctaaaaagttgtgcatgaattgcatttgattttaggtatcagatccctccaataaggttatggagaaaggttcgagtacattccactttctggatttggtatgcactcctaaagaataaacttactgtagactttcatctgtacaggctttcaaatattagtccaggctgttgaagaacta

SEQ ID NO: 42374 - DNA, 620 bp, Manihot esculenta
  Intron number 2 from transcript cassava4.1_024946m (locus cassava4.1_024946m.g) derived from phytozome v7.0 (chr-ID scaffold05948; pos 19737 to 20356)
gtgcaaaaaccataaacataagaaggcgaaagaaggtatgtcttgaaaatggcctcgacattggatactttacatcgtttgagtggcttttttatgctttgaagtggtgctatttctttgtccacttttagttggtcctacccagaagataatgaacaaaagggtgatgatctaagttaatatatacctatatgattatggataactatggttttaggctatcctgatttagtgtgcaaaagtagagcatgtttctgaataatcagtttttgcttagtaactttgactgatccagggaaaggtggaatacttcttgatgtatcttttctatatcatattcacatttatttgatattgttggatgctttctgattttaatggtttaaaatttggttaactactgtgatttcaagtgcttgctctccctcaggcattgcattatgtggctgtgttactgtatggcattaactaatctatgttcataatggattgaactccttttggcaagaattcactggaaaactatttttttgatacaacattttgcctgactgttattatattagcttttgatttttaccccagtttaacggcacatctacaaaaccaaggctgtcagt

SEQ ID NO: 42375 - DNA, 1016 bp, Manihot esculenta
  Intron number 2 from transcript cassava4.1_010603m (locus cassava4.1_010603m.g) derived from phytozome v7.0 (chr-ID scaffold10173; pos 330234 to 331249)
tccattcttgacaaggtctgtctcactgttcttgcgtctgggatttgaacttttccttccaatgattgtgaacttgtgatgatattatgtttcactttttgtgtgatggcgcatacgtgcttgttttgggaggtatccaattttgagaccagggttcaagctatttatcaaataccatcacagaagtgtattttgtcttaagggaaagtgtagttgatgatcattaagttattcatatctatttggccttctttatctctgcttttatatctcatcgggacaaaggttttttgttgtgctttctcctttctttttttttttttttgagggggatgcctaggattatcaggacttataggaatgcatgatgcatccatctacttcaagaattcttagactttgttattatactagtttcccattatttgcatatgatactgataccatacaattcttgtttggtggcttgtgtaagtatccaagtttccagtgcaccatgtttattgaaaagttatcaggagcttttcaaggttgaaatcaacctgtctgatagtggtctcacttctttggtagaatgaagatatgacttatctaggttttcctccagaaggcaatcctgagtatttgattttacaaaggtgctgataactttaatgaacttccagaatctgtcagtcttctgctttctcatttcaaaactgattatttgaaaagatatctttatcattttatagaagctgcagtttaacattttcgtccacataaatttggaatttggactgacttcataggaaaagatgttggtatatttttaacttgattagaggaggaaggcctccctgggcattttgctcgacaaattatggaggacttgagtacacctttcaagctattctgttcgagtttcatctatgatataacttgaacttaagagtgtcacatattcaaaatatatttttctgtcatactaatagttcgattttgaattctcttgtagtatattggttcctataatt

SEQ ID NO: 42376 - DNA, 699 bp, Manihot esculenta
  Intron number 2 from transcript cassava4.1_002564m (locus cassava4.1_002564m.g) derived from phytozome v7.0 (chr-ID scaffold06550; pos 497200 to 497898 reverse strand)
atatcacatctaaaaccttcctctctctttttgaggtaaatgtttccatagtataacagtgtgctttgcctttgtgctttactctgcaaaattagtcacaattattaatactcaattttgtcatgggaacataaagatagccttaaaccttgaataaaatattgcaaactttgctttcttctactttttttttgaagcaactaggcaagatttatattttcaattgcataataaggttttgtttttcttgtttaacctcttaccaatactttcttcaatttcaaaaagaaagaaatagcagggtggagtggaggaatatgattcatataaagcacttgaggaagttttccccattccatttatggattacttgtattgagtaaattaccattccccccttttttatttaattagtttgttgaataaatttttataccaataaagacttaaagaggatgagttgcttttttgcatgaactgcataaaattatctgctttttttttttgaaaaaaattattacataatcttcttttgcattttgtaatattacattgctttatccttgaagtttgtacttaagcagttctgtatttgtttctcaaataacttggaaaacttttacataatgcttatgcttctaaaattcttgaatttcatttccaggcagcactttattttggagtagaatcacttctatt

SEQ ID NO: 42377 - DNA, 594 bp, Manihot esculenta
  Intron number 1 from transcript cassava4.1_028128m (locus cassava4.1_028128m.g) derived from phytozome v7.0 (chr-ID scaffold07991; pos 415853 to 416446)
aaggaaaatccccttcttgttccttcctcttccacgcgagtgccttttctcttgcttgctatttcatgttttcatttggaagctgcttgacgctttaaagattttgagttgtgggatttgaatattatgaatctgaatatctgaatttcatttcatgttctcataatgtttagtgtgtgaatatttggggattttgattattcctttgctgggctggaagcgttattgcaattattgtgaacttaggtgcattagttactgtgaacttcaactgggttttcctttttatttggctggaatgctaaaactagatgaagcattttccaactattgagctcgtacttttgttaacataacacaaatatcttggaatctttgcaggaactttcaggtggttatccaattatgcctttaaagatgtgccgtttagagtttttcatggtttactgtactgtttatcgacaacagatggagctatattctgttttatttgatttgggtctgggaaagcagagactttatttttttttctcttctattcttttttcgggtcgaatgtgttattgtgttgttcgtttcttcagattagagaag

SEQ ID NO: 42378 - DNA, 702 bp, Manihot esculenta
  Intron number 2 from transcript cassava4.1_028128m (locus cassava4.1_028128m.g) derived from phytozome v7.0 (chr-ID scaffold07991; pos 416566 to 417267)
tattggaattcgccttgagcaagaatttgggttcagtatgcatccactttcttattttctcctttgctattatctttgtcatgcttttatgtgaaacctgcttcatttaagattatattgatttcaactttgggaaaaggtaaatgtggctgtctggtatatgacagtacaaataagtgatacttaatagtagttctttgcagtgaatgcaagaattaatgattgtttgttcggtcatttaaattatgggtcttaaattaataacataaagattgctgggctcattgggttcattgatctgataattgaaaaaaaagttatgtattctacccaatttaaatgctgaaactatatctgaatattgtgtgttgtctactttgagttggaagtttttgaagaaatgaatgatatttaaaggtctgtgaatatctggatatatatcaattgaccctgtgatgctaactatgtacttgcatctaaggaatttcatggatgaatactctatccaatcacaatgcagaaatttgaaaccagaaaacttacacaaacacactagaaaagctacaatctaaggcttggctggttcagactgccctcatatataaaaaaaatctccatagtagatctgcaggttcatgaatatgtttatggatgatgaattgaaaagggattgagtggagagtggaagtctctgaacttgtg

SEQ ID NO: 42379 - DNA, 442 bp, Manihot esculenta
  Intron number 1 from transcript cassava4.1_003516m (locus cassava4.1_003516m.g) derived from phytozome v7.0 (chr-ID scaffold05948; pos 26769 to 27210 reverse strand)
ttgcccatctcctactccagaaaagaataagaaaggtagagatgcatactacatctttatgttcttgatgaaatatgtttgtagtttggttttatatctctacacgtgtttcagtatatgctcatgcttttggtttgtatcttcaaaaaagttattacttatgacccattgataacaagtggaataggttttccaagcccaattatatatctccctttggttagtgtttcttttttatttatttaatattcttttgtttttgaagtctttgatccattagattataaattagcaatacataccagtaccttctctttttttttttcttttttctttttttttttcattttgtaaaattttctttgcttctatgtgcttattttcattttcattgttcactctgataagcagtgatgaccctaataattttttatgccagtgg

SEQ ID NO: 42380 - DNA, 551 bp, Manihot esculenta
  Intron number 1 from transcript cassava4.1_031316m (locus cassava4.1_031316m.g) derived from phytozome v7.0 (chr-ID scaffold06675; pos 39354 to 39904 reverse strand)
tggtagtcaaagaaataaatctgaagaccaagcatgtgaagagcagagaagagggagaacctggacaggattattaaggttgtttcacttggtttaatcgtaaacagttcttatactttcattatttttcattatataagagggatgcttagtaattgagaatgttacttgtaaaacaaagaaaaaaaaatcttgttataaatttatctaaaaaatttctgttctgaaactgcattttgtaacaactcagtccaaactgatctaaataactttttgatccattttctacgtgatccaaaatggttaaaccaagttatttaatagtttttttaccggctattatatattcttataatatttgttaaccagccgatgtgtgactgattcccacaattttgtttatttattcaactttttctagcaaaggataccatcaccgaaaagtttagatatttcagctctgtttttaatagattattactatgtattagtttgatctcatttagcctgctctacggtattgcagattgaagcacctattcacagttcaa

SEQ ID NO: 42381 - DNA, 628 bp, Manihot esculenta
  Intron number 2 from transcript cassava4.1_001023m (locus cassava4.1_001023m.g) derived from phytozome v7.0 (chr-ID scaffold07778; pos 291872 to 292499 reverse strand)
aattcagattccaattatcaaaagcgtctcttcaggtactgtttttaacaattcttcttaacttttctactgatttttcatttgattgatgggatcatcatcatcatcatcatcataatcatgaagacattctgagttgggatttgagtgtttttaaggtatttcaacttctaaaaagctactttctgttaaaaagtgatatcaagatgtgcttttgattagtcctggaattattcataattaaacaattgatttctttcaattttaaaggaatatttagatgattattattcacttttttacttactaaacaaattaaacccataataatttaataaaaaataaaaatacacagctgattgatccttaatgagtgacttcaaagcataatctcttttttctttcttataataataataatccacagctaaagacaaagttgacgttccaccgtcatcagtggtttcgttcttagtctctgttgtttcttttcttctctttctcgggaaaaaaaaaaagagaaaagaaaaaaccttttcttttcattttgtgtttttttttttatgaattatttctaaaaattttgaagttgattaatatacatattaaattactgcttgtttgcagg

SEQ ID NO: 42382 - DNA, 417 bp, Manihot esculenta
  Intron number 2 from transcript cassava4.1_012921m (locus cassava4.1_012921m.g) derived from phytozome v7.0 (chr-ID scaffold08420; pos 164647 to 165063 reverse strand)
tggagcctacgctgtaaaaatttgagcatacaaaagtgagagttaattttgtgggcctgttgttctgttaaaactgttcttatcgagtagggcacacagttaatttgtttttttgttgcaattagaaattacatttagagtactattattcattgtaggtttctgggtttttcttctttggttggtttctgcattgtctctttcatatctcactatccaaaaccctaattaccattcactgttcaattcaccgtcgcattaatttctgtgcattcattttttttattccctttaagctcccatttattgcatctttgatttaattgttttcagatatttctcatggtctaactgaactttgttgcttttcattcaacgataggtcggcaattcacaagagtccaattttttgaattg

SEQ ID NO: 42383 - DNA, 890 bp, Manihot esculenta
  Intron number 1 from transcript cassava4.1_001252m (locus cassava4.1_001252m.g) derived from phytozome v7.0 (chr-ID scaffold04260; pos 355971 to 356860)
gcaacacgaaaccagaggtacaagtttgatcagcgtttggcttctcctcttcttcttcttcatcatctttttttttctctctctttttctgtaattttcatgcgttgggtttgcttttgttgaaattttgatgcttatattcttttcttgtagcttgtaggtgtctcttttgtgttgccctttagagtgcttgtgctgattatagaatctcattttgggttttagtcaattgaaccacccagtgtttgacattttatgatttcatgttctgacaagtgcttgtccaacgctaatgttgaattgcaaataaattaaaatgaacaaaaaaaatattctttcttcctttttctttttcccttttgacatggcaaataaatttgtttagatttgaattaatggtgggagttatgaccaagtgtttgctctttggactgagattttgttttattttgtttatattcttatctttctgcttccttaaaaaattctcagtctgggagttgaaatgtcaaattccaaagtgagaaggaatgcaagtatggttgtgtgaagccaattattaatgcatatatgccttgaattggtttcttgaagaacctgattgtcaattatcaacttactcaaatgcagaattttcacgccttcttggtcttgtaaatctttttgaacctgcctctaacggtgattatccttgtcaattaattttaatgcaagagtttgatcttataacctgagcttgtgtagtttgtgtgctgatgttatatgagcatttttgtgagagattgcagttttagacgtgtttttagttattttagtaattttctttgattagctatttcattgtccaagttttaccaacttccttttgtttgcagattgtaaaccaaggc

SEQ ID NO: 42384 - DNA, 671 bp, Manihot esculenta
  Intron number 1 from transcript cassava4.1_019466m (locus cassava4.1_019466m.g) derived from phytozome v7.0 (chr-ID scaffold02591; pos 745 to 1415 reverse strand)
gagtcatagactatatttggtctagtgtgagaaaggtaatcaaccttgtaatcaatctttggtatcaaccaatatcaatgggtttctcaatgccaactactatttaggaattttagctaaacaataatacaatatgaaatctagctagaataggaatatagctaatcctaattaaagtaggaaactttgataaatagtccttattaaaataggaaagctaatcttatttgaattaggaaaacatctagaatccaatctctgctagcttttttttttctttttttttgtttgaaaaaataatatattccaaagggaatgaggactgtttggaagcaagactgccaaaaaaaaaaaactcctgacatgttgggtagaggggcacgacctaagactgctctgtgctatcttgctatccctgctggaatgccctgcttccttcctatgctgcttccctgctgtttctcctgtcttagtccatcaagcaccactttaccccccatttttgcgtcctgtattcttgccaatttttttatatcttccttcatcatcatgtccatcttaatgaatgtcccatcatttagataccttcatcaaggaagtaagacgcattttgtagaatattgtagtattaagggtatctttttttttttaatccgcttgcaggaaattgc

SEQ ID NO: 42385 - DNA, 689 bp, Manihot esculenta
  Intron number 1 from transcript cassava4.1_027237m (locus cassava4.1_027237m.g) derived from phytozome v7.0 (chr-ID scaffold03975; pos 170601 to 171289 reverse strand)
aagtgcaggtcagtttcctttttttcttttctttttttttttcttccagtttttcccctgttctctcaaatgggtatcatatataattcatgtttttactacttgatactcttgtgcctcagtgacctgatgtgtcatggtcccaaaaactattcggataattttgttttgattagagtgccttctataaaaggccacaggcttttgcatatttgctcatcctgagtcatagtattttcatgtttgttaagtcttgtgatatgaacacatttagtaacaagttgtttagggagagagggatagtggacctctgctagggtgggtgggccaatgcggccttcaaattttgtcccggttctcatcggggtagcgacttctgttaatggcttgtatttttcacttatattcatagaccgaattgtgacctaaaaaattgttcgctgcaatatgaaagtaaattatatgaaaactgtttttagttttgaaagttttgtatcacactcttttttattgtactgaaactttatctctattttaattgtaaacatatctattctttatttcttctcttttatattgtgatcgcttctaaatttgtgtacttgttatgacaatatccttatgtgattccatttattaatttttcttcctctacgaggtcaaaggtgtggacatgctttctgttatag

SEQ ID NO: 42386 - DNA, 602 bp, Manihot esculenta
  Intron number 3 from transcript cassava4.1_033749m (locus cassava4.1_033749m.g) derived from phytozome v7.0 (chr-ID scaffold05335; pos 161084 to 161685)
gtacaaaggtacgtaatctttatttaattatactcatgctgtgtcgtggtgttgcatactagttgtggctatgctatccttaatcatcaaccttaacaagttctatgcaagaacaacctaaaccctcattctgtttgttaactgaccagagttcacctcagtagtagagtagctgaattgctgcaaattaagtcatcagctcctatttcttttcagtctgctgttttcaactgagagtttgagatacctttgttcaagtactttcattccctaaccattttgtggagttgaaattcttgctagtcctcttcttaatttgatttctgcactatttttttaattgtttagacttatcaagcaagcagagaagggtttttttttttttcttcacatccttcagaaatacgacctcttgcttttttgaacctctggtatcaaaattagtgtcaaatcccagtacctgttacagttgcctttgtaccaaaaatacatgatattctagtgttggtgtcatcttatctgattactgaatatattggcagctttatccacagaatttctctgttagtactgattattaatcctttgattctgactcagat

SEQ ID NO: 42387 - DNA, 679 bp, Manihot esculenta
  Intron number 5 from transcript cassava4.1_014113m (locus cassava4.1_014113m.g) derived from phytozome v7.0 (chr-ID scaffold01701; pos 669461 to 670139 reverse strand)
ttgaggtgagcttattataataacttatttgcgctgcattgtaaatcaagtacaaactacgcattatctctttccctcatattgttaaggggcaatcttaggggattaaatatggccctaatataattagtgctattagtataactactattcctattctcaataccatttgcaattatttacaccaaagttcttttttactttgatcatgccgtcttcataatgtttgtttgaagccccttgaactcctatttactagtagttgattttcatcaagtagatctataaagtagtagtagtagtagtattaatgaacgatggccaagaatatacctccataaattatgctctgaaacatgactctgagacttatgcgaaaacatgccatggtttcttcgtaataatagaactgtcatgcgtgtgcttcattataaaactttttgccctgttttcttactgcaactgtattttttttttacctggctagttagtaatatcatcttgtgaagtagatcattttccccatccattaccacagttaaaatagttttgctgttcctaattctttttgaggttttgtgagagatttcacataaacaccttacacaactaataaatcatttcattcttccattaattgacaggtgagctcatctgccatcagagacgcagaggagta

SEQ ID NO: 42388 - DNA, 587 bp, Manihot esculenta
  Intron number 2 from transcript cassava4.1_008956m (locus cassava4.1_008956m.g) derived from phytozome v7.0 (chr-ID scaffold03332; pos 87328 to 87914)
agacggtgagaaaagggtacacgaaacagctcaatgtgcgtttacttcttgctttttatttcgccttttaattttgctttctttatttcattattttttttttatttttgatttctggagtcctgccacttttggcagggagaatgggaagaaaaaaaaattgtgaatataattggaagaatttgtgaaatttgtgaatgaagccactagtggccactgttgttaatccttttgctgctgatgtttgttgcttcttcttcattctttctttttttcctgtttgggtgtgttattttcctgaatcctgaccacaaaatcaataaattgaagggacagtcatactttggtggtcactcataaatggaaaaacgacaaagaacaattctgtaaatgaaaatcattgttgaaacaattattctccttgaaaagagaaataaaaacagggaatatggcaaaaactaccatttcttgtttccaatttactattgagttacaaattgtaggtgatgaagggcaattaacaggtcaatcatgtttctaattttgatgcagaggtcattgaaaattctgtcgatcttcgttgtccc

SEQ ID NO: 42389 - DNA, 882 bp, Manihot esculenta
  Intron number 1 from transcript cassava4.1_007721m (locus cassava4.1_007721m.g) derived from phytozome v7.0 (chr-ID scaffold09501; pos 393051 to 393932 reverse strand)
tttgtagtcctttagctgttttctttcagatccaggtttgttcattatcttgtttgtttttctttttgttacttattcagatccaagtctgtttggttcctggtaattttcacggcaaattgaattctacatttcatttcttttttgaattttttgttcggtgtatttgttgcctagaataaattgaattgttttttacaagctcaactgaattcaagtattcaaactttctcttcagctcttttctttcattttcttttctatatcttttggttgtgtgaggatgaaatgataattttgtagcatactggaggtcagattggaattggaatttttgtcacatacatgagtttctttcttaaaatttcatctgggattatacaattgcattttacaagatacttcgactgatcaactaccatgtgtatacttccaagatttctaaggacatctttctttccttttgatatttcactttaccttcctagttatttatattggttatgtgtcaaaaatcacaggttattatgaaaataatttcttcctcaaggtttggttgtgacaaattttccattgattctctttcaatttaaaataattacatccctcaaattttattttgttaataaaacgttcttttacctaattatttatttttcaaatgattcctttttaatcatggctcttacaccgaatcttttaaggtcatccagaggtgcttagtgtattattatttttaattgcttcattagtcctgtttaatttcaccttattgcccttttcttcttttttgaacttgtatcctcatttctccatctcgtgctggatgctttaggaggatattgtagttgtaactgggaaccttttattcatgctgcaggg

SEQ ID NO: 42390 - DNA, 916 bp, Manihot esculenta
  Intron number 2 from transcript cassava4.1_023701m (locus cassava4.1_023701m.g) derived from phytozome v7.0 (chr-ID scaffold09151; pos 527425 to 528340 reverse strand)
ctgttctgctttgaacggattctttttccaaactggtataatatttttaaaatagatataattaaaaataaattaaagtaattttttgtcacttagagcttagatttcaacttttgcatgtaggtccactgattttaaatacaagtgattactctgggggcttgccacagttgctttacaatgaattcacatggacaaaggtacaaaaatattcaattatattatattattcttaatttatatatatatcgatatatatcgatcgtggaaagagaatgtgcttctaaatgagttataggtactcctcccttaaaattagcttttagggtgagttaagtctgattcaaacttaatatgtattagagttttggtttgatattgagtctatgagttataggcacttctgtttatgagctaattttttggtgaattagttctgactcaaatttaacaatatatttaaataagatatatttattttttatttcttctggtgattgcatggctctacgtagacttccagtattatatttgtagatgctccagttggctctggttattcctacgcaaacagcgcccaaggttactatgtttcagacacaatatcagtggcacaaatccatgtctttttaagaaaggcaagtgaaattataaattctaaaaatttagaatatttttaaaaaattaaattttatttatttcaatatttacagtggctggctgatcaccaagaatacatagaaaatccgttcttcattgccagtgattcattttctggtataataacaccagtccttgctcaggaaataatattcggtaatcttttacgtaatatttttcctcatatatatattataaaaaaataattattttacttttaaatattattaattaatgtcgaaaattgatgcaggaa

SEQ ID NO: 42391 - DNA, 891 bp, Manihot esculenta
  Intron number 1 from transcript cassava4.1_015888m (locus cassava4.1_015611m.g) derived from phytozome v7.0 (chr-ID scaffold09876; pos 90389 to 91279 reverse strand)
ctccactaaacctgataagcgcctcattctcatcggtctctctctctctctctctctgcatatacaataaatttatgcgtttataacatgagcttcaatgtcaagttcattctgtttccctttgaattagttctgtgaaattaaacggtgcattcagatcctttaattggctgtcctttttgttccgagtaatttgcttacatattttgcttggtagctgggataaattgaggatattggaagggattgtgctatagtcaagtacgagctttttgtccccttggtggattttatttccctaatatgttagtattcacaaatgtatgtaatttttttttgtattcatgatgaattaggctttgtaataagatttaataatgaacgaaaacaaagaaggcctctttttattcaggccatgttattttatggtaagcatgggcaagattatgctcttcggatatttctgtaaaacgatggaatttccagagggacgttctataaagcagaaattacaacaaagcaaagcgtaaaacagctgtctttcttcgttaaactccctttactgattgccttataattggacaaagaatactgtttttttttcttttagatttacatggacaacgcaatatactatttctactattgcagtttttattttttaatcttagggtgacttttgtcgactttattctttttgtcttaggttcttatccagcacatgtatcttatggaaatagttaatatgttgcattattgcatatgattcttgcaactgagcaataccagtaaatgcatattttcgtattgtaacctttagtagtttgattggcaggtccacctgggtctggtaaaggtactcaatcaccaattattaaggacgagtactgc

SEQ ID NO: 42392 - DNA, 416 bp, Manihot esculenta
  Intron number 1 from transcript cassava4.1_022131m (locus cassava4.1_022131m.g) derived from phytozome v7.0 (chr-ID scaffold07125; pos 4582 to 4997 reverse strand)
gccgctgacattctaggttcttattatatattccctccaatgaaaaatttataattatttaattcaatcgaattttttaataatttttttattaaaaattaaaaaatttaatttttttaatttgaaaattttttgtttttgaaaaaaattaaaatcttcctgaactctttatttacaaaatgaattagtgagaatcttacttctttctcccattttcaaaaagttaaatttctttgttttatgatttagctacaaatcaagaagcgctttttttttttttatctttgtaaaattgaagcttttgaactaatttatataaaaagttaaagatgggctgaatagaaattcaacattaatccatagaaacattagtaaaaaatctgcttgaaatgtggaatatgcatggcaggacaagg

SEQ ID NO: 42393 - DNA, 356 bp, Manihot esculenta
  Intron number 1 from transcript cassava4.1_031019m (locus cassava4.1_031019m.g) derived from phytozome v7.0 (chr-ID scaffold03049; pos 561602 to 561957)
atttctccaaaattcgcagagagattcaggttgttgttatattattgtttttaacttattttgttctactgcttggcttttgtgtatcattatagttcccagatgtagtttgtgagcttctggttggagaagagtgacttctgcgctgagttgttttttaggatgatttttcaatttagcttatcatgcaagtgtgaatggatgataaatgtagcaaattaattgattgtaggttgtgaagattgaattactatgatttaaagcagcaagtactgtttattttatttatttatttattttgacttgtttctattactccaggctgagacagaaagagtagcaggttttaacaaggg

SEQ ID NO: 42394 - DNA, 785 bp, Manihot esculenta
  Intron number 1 from transcript cassava4.1_005666m (locus cassava4.1_005666m.g) derived from phytozome v7.0 (chr-ID scaffold06711; pos 658296 to 659080 reverse strand)
gtgcctgttctgtgggtaaagattctttctgcacataattttttaagttcttttcattttggcccttaaaaggatagatacttcatagcttttatttaaaaaaaaaaaatgtttaattcttgtggtacataaatttattagtttatttttttaattttaaaaaatatatcaaaattttaaaaagtatattactacgtgattccattaattttaacagttaaattttttattatttatttttttaatataataaaacttattaattgattttttaattttataaaaatatctattatttatttattccatattaaaaatattttaatttttttataaaatttaacagttaaaattaataaaaaaaattaattagtaaatttttaaaattttaaaaatattttaaatattttttaaaattaaatgattaatgagtaaatattctcatgtgacattaacaaaacagtaattttctctttaaaaacacatatttaaatagatctttgtgtgtttatatcatggaccatcatacaaaacgaacccacaaatttagcttggccccgaattgacccacgacttcctgttaagtatttaaagaggctccatttttaaatgtcaaattcaagagtcaagactattgattaaaggacgagaaattcatatcatattatctcactctttggtgttattttaatgatatattgatcattaattatgaatatatacatttacttataaagaaaaaatctcactacatgaattaatatctcgtggctcttcaccaggaa

SEQ ID NO: 42395 - DNA, 269 bp, Manihot esculenta
  Intron number 3 from transcript cassava4.1_003462m (locus cassava4.1_003462m.g) derived from phytozome v7.0 (chr-ID scaffold05335; pos 484327 to 484595)
ttgaaatcttggaagctgtagcttggaaggaggtactttttcctgttatcctctttttattttttatttaattctatttttttccaccattgtaaattttaatcatcctattcttcttctcttttctttttttaattttcacactcctgaataattttatctgtttgcacactaatttattttggatgtaactgaacctattttgatattgcatttttgtttgtctgtttatgtaaaaattgtgcagggtggagattctgtttgtgcgg

SEQ ID NO: 42396 - DNA, 1010 bp, Manihot esculenta
  Intron number 1 from transcript cassava4.1_033698m (locus cassava4.1_033698m.g) derived from phytozome v7.0 (chr-ID scaffold05335; pos 398582 to 399591)
accgtgcctttggcaatctgcaggtgagattctctttgtcttcttggtgttatgataaattgtttttttttttttctttttaggatattggatgcaaacatttggaaaacattcaaataattcactctcgcaatttagggctccagcaaataataacttttggatatgcaaccccaacgtgaagggagaacttgaacaattaattttttggcttcaaagctgtatattgaacaattccagttgtggaaaattaaagagtttaatttaatttagtctctaaccttaatttaacaccaataacaacttaaaacttgggtggcatttaacaaaactgcaaaagcatgaattttggccggtggccacacctagccctctgcagaggtaattgtttgcaagttaattctgtatatggacattgctgggtattttaattattcatttgaacaactatttaaatttctttctctccctccctattcctcatgggtcaacaataaagcctgatatggtgttgatgtggagatgttatttaacaacccggatgattgatgcaaataaagatagtatggtttaaactttaaacactgcttccttcttttccattgaactgaaaaataaagggttacattttgtgaactttgaaatttctgtgtatatttctttgaggatgatacaatatttatatacaaaatatcctataatcatatattctaacaaggagagtattcctataataatgctaatacttaattgacctactataccgcttcctctcaagttggagcatatatattaatcatgcgtaacttgttacagatgtagtcaaccttgccctattcctataataatgtaaatatgctaaccgttgcatgttgctaagctaaactgagtttcctcttctctgagcttttctgggatactcatactattgctatattcccctgatttaattctaatttatttattgacatataggcggttttacttccaataaggttctctgagttcaa

SEQ ID NO: 42397 - DNA, 752 bp, Manihot esculenta
  Intron number 2 from transcript cassava4.1_019454m (locus cassava4.1_019454m.g) derived from phytozome v7.0 (chr-ID scaffold03827; pos 34650 to 35401 reverse strand)
agaagttggaacttttctcgtttgagaacaatcaggcatgaaattgctttcttttatattgcagatctgtgtaatagaattaaacataatttactaaaaaactagtttctcttctactcgctactgagttcaagagagagagaaaaaaaaagcttgggacttttgggtccatattttcagaaaattttctgatttaccaaaaattccttctttggattttgtttttttataacaaaaatgagacggtctaaaacctgacaaaagattacttgcattttgtctgctataagtaacaacttcaaatccttttatggatagtaagactcatttcatattctgtctaaagaaacaattatttgaggttaaaacaaaatgctttccacatatgaaaacgagaaagaaattattgcagaaccactatatctttgtgagtattcctctgagggtagaaagtgtgctggcttttctctgtccttaattttaattttttctttacggtgcagactaaactgaaagatctataataacttgacatttgcatagtttgcaattgcaaagttgtttttataaatgaaatttttaagctgtagcatggccaaaatgttttaagtattagatacacaaagaagattaagtcatgttatttgaaagaaagaaaattttcttgctacatagagtaatgtgtatatttttttcttcgtctaccttcgtaattttctgtggacataatgtgttttctccctcgtaatagt

SEQ ID NO: 42398 - DNA, 614 bp, Manihot esculenta
  Intron number 1 from transcript cassava4.1_006468m (locus cassava4.1_006468m.g) derived from phytozome v7.0 (chr-ID scaffold04882; pos 42219 to 42832 reverse strand)
gaaaagaccgttcagtctgaggccgttgactctaggtccgcttacccattaactcaaatatattatgtatctcatttcaaatattcgtctttgtattcgtgagtgtccttctatgcattgcgtgtttctttgaacttgtacttggtgggtgtcttttgatgtgttgcggatatttttctgaactgcttaagcggcatgaacctaaacgcgtgtctgtctctttgtatattttttgtttcgggtaatgtttggtgatctagtaattgcgcggttggtgttatttgtgctggaaactgaaaggaacttatggtagttgaattttatggggctattcaacattgggaaatgtaagggaaaaagggtgaattgcatgctgaagaatgcggttgagactttaatgtgtgtttgtggttgtagggatcttagattgggtttcttgtttacaagttcttcaaggtgttttgatttgtatataaaagcaaatcttccatgctcaatttaaccttctagacgtgtattcacgacatccttacgctagtgtcatagctttaatcttctttttttttttttttccattagttcacaagattggaaggccaggctgaagatacctc

SEQ ID NO: 42399 - DNA, 495 bp, Manihot esculenta
  Intron number 1 from transcript cassava4.1_007321m (locus cassava4.1_007321m.g) derived from phytozome v7.0 (chr-ID scaffold06656; pos 905014 to 905508 reverse strand)
ggtatgcttcgaatctcattctgaacattttgatataccttcatataattaaattatttcccgttttattattttcattgaaagtactgttgcatgtaaacaacatatggcacttgctctctcaatctaattcttatctttttattattatagatgctgcagaaaatttgttgtttcctttctttgatgtctttctatgtactttatgaaattgttgttttaccttttcttgtaatgaaatcttctggaaactgttatttgtatagatgctagaatttggtttgtgggtatcctattaagttgagaatctgaatattttctcgtcttttttcttttcccttgacaatattctcttttcttgtctcgttcctctcatgctttacatagatgctatctgtcacttcctttgccctagccagctaatccttcaatttcctttttttttatacctctaataaatgctttaacaatggaatttatttttgttatcaggaa

SEQ ID NO: 42400 - DNA, 846 bp, Manihot esculenta
  Intron number 1 from transcript cassava4.1_004777m (locus cassava4.1_004777m.g) derived from phytozome v7.0 (chr-ID scaffold05162; pos 74612 to 75457 reverse strand)
aagacgcccaccacaggttcgtacttcaacgatttcttcttcttcttcttctttatgtttcaaaattgctgcaaaattttttccagttttatcaggaattgattgattggatgctgagaaagtttaaggagaacgcaaacacttgctgaacttttcaacttactgtttttatttcaatgacgctttattaaacttgctacgaaattggaaatcattttcaattctcttttcgttttagtccagttacaagactatgcacgcggttaactcgcttcattacgttttctctgtggagaaaaaagaaagagagaatttgattttttgttgcatagactagattacgaagaatttgtttttcttgttaggaaaagaaagaatcgatttgtgttgtatggactagtttgcgaagaatttgattttcttgttagtatttacgtgtgattattcattttttaaagtcagaactctttctgttagtaaggattgttttctgttcccagaacttattctggaagtgaaaagatggagaagaagacaaaagaaacaaaaatgcaaatgactttatttgagtcaagtactcctactgttttaagaacaatgagaatgctctacttttgtcatgggaacctttgtggttgcaatcctccagactttctgattcatacctggttttggagtattagatagccttttgtaacttttttggtgtttatgttggtccatggccctagatttgccttctggcctttaatattttatcgtcattgttgcctcactcctttcttctctcatccccttgttttttgagtaggtcaaagagaaaaaagacaggttccggtctagaga

SEQ ID NO: 42401 - DNA, 746 bp, Manihot esculenta
  Intron number 1 from transcript cassava4.1_004645m (locus cassava4.1_004645m.g) derived from phytozome v7.0 (chr-ID scaffold06512; pos 2074694 to 2075439)
gaaagagaggagttggagcaaaggtaactcgaggtggaggagctttgacaaagagctttaaaacggtggtggatcttgagtgacggttgtacaagagcttttgaaatggacttttacggttgaatgtatttagccttttgttttttataaaagaaaatagagtgcaaaataatatttacaatgatactaattacaatacaaaaataggatttataaccatcttactacaaatctaactaaagatttacttgcatggggctgaacctgtttgttgctttaaatataatcaacttatctttaaaaaaaaaaaaaaaacctaatttgcgggtaatttttttgttcttttaatatgtggatcaaagttggaaagtcgacgttgacgacaatcctccatccacgtgacaagcattaactaggcatcaattttccaaatcaaagaacctgtgttttatcatctatgggggcattctcgtaaatttgcaactcgtttcacacacgtgtatgatcctgacagcgagtttcgatctaaagtactcgtctgaatagattatagatattccaacctgcaaacacacacacgctctcttctccactatacacaaactccaatgatttcactgaatctagcggtaacctgctcaccggtgaacgcaacataccttcgcaagtgactggtgactgatgactgatacccattttccggtacaccaggaagaagaagaagaagaagcaacagggccaccgga

SEQ ID NO: 42402 - DNA, 514 bp, Manihot esculenta
  Intron number 2 from transcript cassava4.1_025080m (locus cassava4.1_025080m.g) derived from phytozome v7.0 (chr-ID scaffold08316; pos 163399 to 163912)
gtccctattcctgtaagtgcactgaagtgtcaaagtcgaggcacttttggtttttatctcataatgattctcttatatttgtaatatgtttgtacccctttggtgtctttcaaagctgtcactttgagaaaaagtaaagtcacattctcattcttggcatctcatgccatatgaagttctttcaaactcttgatttatagatttatttcagggtgccttatgcatgtttgttttgtatgtttggggatgatacttctctgtggtggtctctaaaactgttgactaccagtatgttgggagttaatattttatccatggtgcttctttaagaggtctgatcccttctgtccattctattgttctgtatctgaaacttctatagagttggcttgactaccaattattgcctcaatcattgtaaaatactgaaaatgaaatgcacacttaacaattgccataccctaaaaatgggttataatttatatcccaactttttatgctggttttttgcagc

SEQ ID NO: 42403 - DNA, 926 bp, Manihot esculenta
  Intron number 1 from transcript cassava4.1_013709m (locus cassava4.1_013518m.g) derived from phytozome v7.0 (chr-ID scaffold00447; pos 74298 to 75223)
tccccggtatttctcttttattagcagtttcttttatggttgtattttgatttttttgttaatgtttgtttgttgcatatttaatctcgatgaagagctttatgtttatcattcttttttccaaatttttgttctcgaaattttgatgataaaaaaaatattttttggggtaaatggtttaaattcttgttgttatctgcaacgaataagaattatgataattgctttaattcgaggcaaattatgataatttttgcgcgagcatgttaagttgttaactatcatcattattactccatggaatctagttaagttacatccaggaagtaacccatttgaatcaagcaaggcgtgagaatttatgtgtagtgttgatagtgaagttagattgattgtatagaacaatgacaaatctattagtaaccttttttataatgtttcctcttatcgactgtaaaattgtcaaatatgccctttttttctttctttttttccgaaattctcttattagaattgtcctttgtatgctgttttagtggactggtctctggtttagtcatatgtatggtagggaaaaagctttgcctgacattcctgcttataacttattaaagatgtcttcatttgaactgccatttgacaaagcaatgaactctggaagaaaagacttctgtataaaatacctaatgcatgccatgactgggatttgcaatgttgttggtcagttgtctttggaaagaatagtattacatttggatacatcttcttttccttttttctatgtttgttatttttctttctttctttctttctttctttcaatcttggtcttttagttattaatttcagcagctcgtattggctgttggctgatttcaatattttttatattgcagaggaatctaagacagatagtgaagagtcag

SEQ ID NO: 42404 - DNA, 862 bp, Manihot esculenta
  Intron number 3 from transcript cassava4.1_026111m (locus cassava4.1_026111m.g) derived from phytozome v7.0 (chr-ID scaffold01551; pos 1281318 to 1282179)
gctgaagaggcagataataaagccattgcttccaggttaacctgtgcttttctattttggctcttaactttttttctttttgtcgtttttgcttctattatgttagccggattagttaatgacgaatataagcaactcactgatttatatcaattgatgtagatggaccttgcaatatggctcccagtttaatgcttttatttagctgcactttaatactctaagaaatggttattcaattctgggttaggtttgattcttcatgaattaaattgcttcatgggttttactataggctgcataactcttgatattggtatgtgtagtttagtaaaaacgtggctcttagtctctcctttaaatttagggattagctgatttggtattttttggtcaggttttctttttacttcttatttaaactccataatctgcttgtaggtttttttttttttttgtgaaagtatgttttagagatgatgctatatcctttattctttttattctgtggcccaaatgattggaactcgatactggaaatgaagagaagaatgttctggtgaagtataatgggtagcttgggagcacctattaattgagaatggttcgtgaacagtacaactttgaaatgcgttacttcaagcttgctatattttgtttctgattgcatatgcagtcctgtttacatagcacttttttttttttgaaatatggtctgaaatgtaaattggcacaaatagaacacacgatcaaagctaggccttaggcaatcctattaatcctggctagctatagttatctccaacttgaccattttaatgaattattttaaaatgcggccacagaagtcctggtgcaacag

SEQ ID NO: 42405 - DNA, 583 bp, Manihot esculenta
  Intron number 1 from transcript cassava4.1_010955m (locus cassava4.1_010955m.g) derived from phytozome v7.0 (chr-ID scaffold03614; pos 1935959 to 1936541)
agctttgaatccatcaaatacgttcaggtttatgtacttattgaacttgtgtttttaaatgagaatttgtttggattcaggaactcagattcacgcaatatatatcaatgaatttggacttcttatattggctttagttacatctaattaataatggggaagcagggagcacgcttgggtactgcaaatttcctctccctcactccctctgaagaatttagaaaatgcacctctgtttctgaaatactgttaaatggtagactttaggaatcttgcatttcctgtgtttcattataatgttttcctggaaaattgaaaatttgtaccaagcacaccttgtaatttcagcactcactgtgttcttggcaactccatgaaatattttactgtttcttcattcaaatgtttccaacttctcttaaacccatgagatattctctgcttgtgcaaacttgcatgtgtcagtggcgtggtgctttcctgtcattttcatatcaatgtgcaatttgatcttgtgtttccatcaattagcaattcaaactgactttgtacttagttttgtgctttaaggtgttcaagaatc

SEQ ID NO: 42406 - DNA, 866 bp, Manihot esculenta
  Intron number 1 from transcript cassava4.1_026877m (locus cassava4.1_026877m.g) derived from phytozome v7.0 (chr-ID scaffold09631; pos 16190 to 17055 reverse strand)
ctaattcttaggtaatctagccttacatttcatctatattctttaaatatatcatctttattctacttaattaataattcacattgttttttttttaatttttttcttttttttcaactttaaaattatataatctctataataacaaaaacccagaaaaatatgaaatgattttttgcaagaataaatatgtggtagctggtgatcatataactcaaagggaaattctatcaatttttttttaaaaaaaaaatttcaccaattatttttattgaatatttaaaagagttgtacttgatgataataataataataattttttattcttgtaagtgttaaatcaaaatcttaattttaattctttttttaagtcattcatgaactatttaattcaaatttattgatgttcaagtggatttgaatataaattttcaaaggggaatagatttcagttgcacctttttccttttataattgtgtaatatatacttttcatgtaaacttttacttggtttatacactgagaatctattcttccaaatctaacccataaatcaaactgtacttactgtacttatgtctactttgccctaactcttggtcctacacaatcaccagccagcaatcatggtgagatctgctattgtaaaataaaaaaaaaaaaatttaattaggttaacatccatttcttgattttattatcgttgtcactatttaattttcaatttattaatttagttgtaattgattttattcaaaaccctttcaagttggctaattaatccggataatatcaaaaatttttaagctaatgcatgctagatcttgcagggaagctagacgaatcaataaccaatttgttaatc

SEQ ID NO: 42407 - DNA, 734 bp, Manihot esculenta
  Intron number 1 from transcript cassava4.1_016412m (locus cassava4.1_016386m.g) derived from phytozome v7.0 (chr-ID scaffold03827; pos 134830 to 135563)
tctgctttcttcatcctcagccgaaagtgcaaatctttctgttccttctccttctcttcttcgtctaggtgagctttgatacatcacttttacttcttcttcatcattttttttatggtgatgattatcagaaattagtgggtttattgctttattgtgataggtagatagatggctttctcttgcttttttacttttgcttttatatgtaaggttgatagatctttggtgctgtattttctttctctttacctctgtttggattgagattgatagaaaaggagagtaagaaaagaaaagaaaaggaatagttttttctactatttgtcttgtttggatagaagataacaaagggggaaggaggaaaaagaagtatgaaatttgatttctgaaattcttttcctttgaccaaaacatttataggaaggaaaatgtgcagaaataaatagtatttatatttaaactactcatgcatctttaacacagaataactcatgcaattaagtaattctattaagagatgaaatgaaagatctctgggcccaacttcagctattgactgaggagcatttattatttttaggatttgattaaataactttttcaatatttcagcagactgctgagactcatttgggttctgaatccaaagtcaatatttgtacatttggtcaccctggagatgcagcattcacccatattgaatatgaccaatttcttgttctacaggaaaa

SEQ ID NO: 42408 - DNA, 308 bp, Manihot esculenta
  Intron number 2 from transcript cassava4.1_023174m (locus cassava4.1_023174m.g) derived from phytozome v7.0 (chr-ID scaffold04374; pos 58457 to 58764 reverse strand)
cctttgccacctgcaagagatttccctgtaaagaggtaaaaccaaactaaaactataccttgttgaaaataacgtaaactacacatacccaggtgggaaaccttgagtttcccgaaattgtttcaaaaaaaaaaaacaaaaagagatcaatacaatcaagctgttgatcaattgagcttagacagaaaatctttgaagtgttgatattctttttaatccctcttttcttatctggtaatgtagtaatccctcttttcttatctggtaatgtaggtgcctgcttatatagcaagtcaagtcgttggtgc

SEQ ID NO: 42409 - DNA, 388 bp, Manihot esculenta
  Intron number 3 from transcript cassava4.1_005814m (locus cassava4.1_005814m.g) derived from phytozome v7.0 (chr-ID scaffold06868; pos 48249 to 48636)
gaaggtatatacgctctgtatgcatctatgatgacttagtttcgagaattgtcgtattgtgtgaaacgacctttcttaagtaccgttttacatgtttattcactgttgtatgctgtgtccatggaaaaaaaaaaagtaggtgtaaataattaattaaaattttctcacttttactttgatttggaacctcttttttctcctcttctcctgattttttggtttcatctttttatttatctatataaatgttgctcacaattatgtttggaactgtagatttcttcaagtttgcagttttaagacgcttttcagtttacaatttgatatctaaccgaaaaaaatttcgcatgtaggggcttgaactcataccctcagagaacttcacttc

SEQ ID NO: 42410 - DNA, 687 bp, Manihot esculenta
  Intron number 1 from transcript cassava4.1_001300m (locus cassava4.1_001300m.g) derived from phytozome v7.0 (chr-ID scaffold06656; pos 1232855 to 1233541 reverse strand)
gtttcaagtcgttttgtttttgatacaaagctgaggttagaactcaatccatctgtctttctttttgctttactagttttttggattctattatgtgttttggtctctgaatctttctcttttgtgagttttctctaagttcacgagtgatcggctttgttggtttatgttgggtagtatacttcattggtgtttgctgagtttctactggctgtgttaatggttctctgttcatctgccatttgcgttgttgttttaccttcttgtatgtgctctgtttctgttttaggcgctgtccagaggaatgggttgttgattttttaatattgtctattttactattctggtatttcataacatttgtgattgtcacgcactgtttggcacacttgaggaaaagaaaacgaaagaaatttagtaagggataagaaaagagatgactagaaatttgaattttccttttattttttggattttttacctgtacatggaaaaaatcataagctggaaactggtattgactttgaaaaatggttagtggagtatctcccccttagttcctttctttttctttctctttacctttctcatctaagtgctcgaacaaaagaaatgcttttgagtatgtggtgtcttattaatgatttctgtaacagatatttgttaggtagtgaaaactcttaagaa

SEQ ID NO: 42411 - DNA, 585 bp, Manihot esculenta
  Intron number 4 from transcript cassava4.1_011860m (locus cassava4.1_011860m.g) derived from phytozome v7.0 (chr-ID scaffold03049; pos 691889 to 692473)
gcttctcttcaggaaaaggaaaacctacagcgcaggtttggtaccattttttgaattaattcataattacactattgcagtctgtttatactttagaattctgttctgctgctgttatatcatatgcttttaatgctcttgaatttgatttcaaaatgagattttaataattaatgcatattgatttatttagtttatcagtctttaaaaaaaaaaatagttgatcagtaattcagttggttcattcatatgcttttttatgattcacattcagtttggacatctagtgcgtttgataaatatttcaccaccactcattcttattctctataatattggtactaacctcctgggcccaaaactacaccactgataataagtgtgaaaggattgaatgaacagaatgttgttggtaaaatgcaaatttgatattttatcatgcttgatcttataaccatttcattaaatccttgaagaagcattttcttcaatagtgatctcgaatatatagtattcctttaaactatgatatgtttctgtcctatttcaggtgacactttctgtactattgactgctgctggggt

SEQ ID NO: 42412 - DNA, 602 bp, Manihot esculenta
  Intron number 1 from transcript cassava4.1_006553m (locus cassava4.1_006553m.g) derived from phytozome v7.0 (chr-ID scaffold06711; pos 175170 to 175771)
ggtcagtttctatataaatatattctttcgtcttctgtgattaaatccggctgtaatttttttggtttcttttaataagtgaggtggttatgtttgatattaattgctgggaggttactttttggcacatatatataattgcaattggttctagctccagtcgtcattgttatcctagatttatttttgctgttctctgtgcttggaattgatattgcagcgaattgggtttactgggaaggaatcaataatgtctttgttgttgctatattgctttttatttgatatttttcatgttcattactttctttgtttttgtatccagtactcctttaatttggatttgttgattttttttttaatttttgttaaatatgctgtaattatcttctccctgacataaattccactattctgtttcattgttgagatggaggaaaatgaaagaaacaatatctagaaacttgcaaaatttgatggaataatcccctcccccccacaaactcatggttgttttgcgtaactcatattggctgcttatatgatttctttcatttatttctttagcctttactttgctaaaattgggcttgggaatccac

SEQ ID NO: 42413 - DNA, 981 bp, Manihot esculenta
  Intron number 1 from transcript cassava4.1_024890m (locus cassava4.1_024890m.g) derived from phytozome v7.0 (chr-ID scaffold03614; pos 3634349 to 3635329)
agggaaccgtggtgtgagacgcaacgcgatttggtggcttggcgtggtgtgaggctaaaattatgtatatcatattatcctataaataataaaacctaattagattaaccagcaatttttttcccattcatttgtttgcaaaggtgtagttttaattaaagttaaataattttagccttttaatttatacaatgttgcaaccttaccctctagaaacaactcgctttaacctctccctaaccaatatacattgccaaatccctgaaccctgaaatctccaaactgaattgtcccaaatttttgggacaatatgagacagtttttatattatgatatggttctgaaggtttcactgtgaaaatctccaatttttgggatggttttgcagattttcaaatccctggattggaccgaactgtgctcagccctagctatgattttgtgtgcttgctttggattaactatgaattagaatgtgaggcttattagtcttttatttttatgcctcttctaattaaagaaataagctaaagaaatttattctggtgtttatttcttatttttctttttttgttctccatcttttggtaggtagtaattgcatatattgtagatttgtagtaataaaacctatatgatgtaatgaaaagaaattttatgtctttacttgccattatatcctaccaaatatgcgctggaagtagtaataaaacttatatgatgtaatgaaaggcaagttttattctatggagttttcatttgattaaattgcattactccccagtatatcctgccaaatatgcaccagaatcctgcactaggtaaagaataggatttaattaaatccatgaaatatctgcccaagggatcccttggcaagatgtgggaatcacatagtttttcctccactattgttatgaactaatataacgaagaatgaacatgaaaaatctgtgcctttgatgcaggttatattaagtg

SEQ ID NO: 42414 - DNA, 755 bp, Manihot esculenta
  Intron number 2 from transcript cassava4.1_013767m (locus cassava4.1_013767m.g) derived from phytozome v7.0 (chr-ID scaffold07012; pos 1174205 to 1174959 reverse strand)
tgttttgagaggtaaggtttgtttgactcgttctttcatacattatatcattcatttaattttttgtttattattagaaatggttttaatctcaaatattgtttatcacttccattccttgaattgtaatcaatatgtgaagaagctttcttgttaagcttttcaacataaacgctcttatccaaaatcaagtacatcaataatggtctctcacttgcacgtctgagtatatgcagattattctcttgcctccattaaaggtctccttattattcttcttcttctctactaaattatactaacaaaaataagagtgtttggctaaactgtcaaaaatggtgcggctagaccaggattgaagtttagttaagttgaattgacttgatgaaaacaagtaactataacctatcttgaagccattgaggctatgtttcctttttcttatattgtgctcttgaattttttttcttgtcaagactacagagtaactaggatacctgcctttggatcatttttattgcgtgataagtcttaaaagattctaaatcatattaatctcggcatttcgttttgagtctttggttttatattagggttgtcctttgctagggctctatgtgtagtatgagaaagaaattccattgtaagttttgtgttttcagcttgatgcgagttgtgagttttagaatgaaaatcacatggttgtctttgttgattctgtttacagttgtgtaaattttcttggtgaataggtg

SEQ ID NO: 42415 - DNA, 315 bp, Manihot esculenta
  Intron number 2 from transcript cassava4.1_014703m (locus cassava4.1_014703m.g) derived from phytozome v7.0 (chr-ID scaffold06512; pos 1690388 to 1690702 reverse strand)
ggtatgtaatttctttcctttttttcaagctcagacgttgaattagccctctgctcgctatcaatactgtcaatcatccaatcccccaaggaaaataagaaaattattccaagtcaataggacttgtgggacaattttttgttttctttcttaattcagaataacaagtgtttcagctcttgcatcttctgagtccggtttatttaaacatctgtactgtttgacaggatttcttgcccgttgctcctcacagtgtaatatctccgtttttattttttttatctcaggaaattcaaaattttctctattgcaggt

SEQ ID NO: 42416 - DNA, 178 bp, Manihot esculenta
  Intron number 1 from transcript cassava4.1_023798m (locus cassava4.1_023798m.g) derived from phytozome v7.0 (chr-ID scaffold01551; pos 976001 to 976178 reverse strand)
ttggacgagagggggctattgttttgaacttggaggttaatcatgcatctcggatttcttttgcttcaattatttttctctgttcttttatattttgttttttgctcttcttttttttttttctgataattgtttttctgcagcacatcaaggcaattattacttctgaagaggttag

SEQ ID NO: 42417 - DNA, 595 bp, Manihot esculenta
  Intron number 2 from transcript cassava4.1_008048m (locus cassava4.1_008048m.g) derived from phytozome v7.0 (chr-ID scaffold04175; pos 713010 to 713604)
cagtgcattcttttactggtttgaactggtaagtcagtttctctcatttgcatgtacacagttaaaaacttggagaattacgtgtttgagaaatatgcattaaacaagtataaaatcaaatcagagctaaatactaataacatctgataaattgagtggtaaaaaatctgcaagtttaagttcatcagaatattttaggcatagtaccttcaataactgaagtagacatctggcagtttgccattcattgacaacaataattattcagtttagctgggcagcctcatactggtggatctgccacaatgaataggcaggttttatttttcttttgaagattaccttttctatagcaaaatggtttaagcagtaaaaaatgaaaagtacatatataatcttcttgtagatctgtttggatgtgatcttataaaggtgcttctaggtgtgcatttaagataacacataattcagtggcttcttggtgctcacaacttataaaattcaatgatatgtgatataatatgagataactttagttttttttttttttccaatttcaggtgggcttgcataattttaactactcttttaatta

SEQ ID NO: 42418 - DNA, 426 bp, Manihot esculenta
  Intron number 2 from transcript cassava4.1_002467m (locus cassava4.1_002467m.g) derived from phytozome v7.0 (chr-ID scaffold04650; pos 15765 to 16190 reverse strand)
acagtattcttattggtaagtcttcgatttacctttcgtttctgggttttgaatttcgttcttcaattatatgtatgtatacaaaaaatttgtcaattgtttacctccaaagaaggtttgtcgtgaaaattgtgaattttgattcgagttcatataagactattgctaggtgagaacaaaggctagattgatttcagagaaggaattgggggatgcggaaaaacgtatagaaaggactctttcctattgatttatgggatcttttatattgaatgacctattcattctagtagcgaaagtggattaagatttgagtttattgctttcgtttttttttttctccagtccttttgctatggctcttaattgttgattcttttcttaatttttctctccgcagtgggttttgtagagtttaagaagcat

SEQ ID NO: 42419 - DNA, 718 bp, Manihot esculenta
  Intron number 3 from transcript cassava4.1_015680m (locus cassava4.1_015680m.g) derived from phytozome v7.0 (chr-ID scaffold04882; pos 483226 to 483943)
agtaaaccttgcaaaaggagaacaattttctccaggtgagaaccaaaatgatttttgcccttgtcttactcagatttggagaaattataggaaaagtttataatgaatatgtttgaagaaaaattaaattaatggattctaatccatgatcatgtatgaactccaggataccatatatttgcatcatcagtctaccgtgtaatcaaatgtttataatggattattcagattaatacatggtcttaatgtatgcctttaattgcataatataaattgctccacaaattgtagaaatgtgagagcttgtaaagagcaaaggccaagcacatgcattgcacttatttgtcttgttttcaacatttatttcctattttttagagaaaaagaaagtttcaagagattgacgatttgttttcatttctcgtttttcttgttactgttcacttttttcatggaaagaagagtattttttgttgcaacttcctgtctcttgcatgggacatgtaatataactgcctttaccatcactaatttccttcctttttatttaaataatacaaaggattcgagttgaaccacatcgatatgagctgtttccttcaatatttttgtatatttaaagaagtagataagtattcttttggttagtttggaaatccatggattgatgacaattgtgcatgagtcacagagtttgaacagttaaatcctcttcatt

SEQ ID NO: 42420 - DNA, 1006 bp, Manihot esculenta
  Intron number 1 from transcript cassava4.1_018504m (locus cassava4.1_018504m.g) derived from phytozome v7.0 (chr-ID scaffold03667; pos 172602 to 173607 reverse strand)
tagctctctgctgaatacaagcccatatttatcaggtaagggctcaaagttctctaattttatcctgtttccttcttttcgtttatattgttgtcgattttcggggtagggtggttttttttttttgtctgtctgctttctggttggttgctgagaaactgagggaaaagaggaggaaatgaaatgaacttaggagttctgcaacagaaaagatgggacgaaagcaaattccaaaaaaaaaaaggaaatctaagactgaaattttatgcttattcttaaattgtgtttttaagatttagaagaaaagatacaaaagggtgaaattttgatttgatcctcaattttaaattttggttttaagatttagaaggacagatgaaaaatggtgaaagttttgatttgatcctcaatctgaaacttttgatgtcctgcttcgtctaggaaaagaaaaaaccacttggcacccatagttttaatttattttaaattaaattttttaaattaaaaaaatgaatttttttcatttcgaatataattaactaaacagaaatttattgaattaaattattgcaaaattcttggatataaatattatcaagatggagaggaagcaaagccccaccaaaaaaaaagggcaacatgagatatttgaattttaatttgaatgcttaattcagttgaacagaactagaaatgataatgaatgacgagaaggagaattgatgatatcctccacatcacatatctgaagcaattattgaaggaatcccacctggttttagtaatgctaatttacaaaatttagcaaactcaattgttcttttgataattatttgcttgtgttcttctgattgctggcttatagaagagaatatgcatacatattttgtcttgctttaagagctcaagatgccagcctctcaaatctacccagtgtagttgtctgaacagtatttacattcaactttgatcattttgagcaggtgaacaaacaagtaaatttcat

SEQ ID NO: 42421 - DNA, 827 bp, Manihot esculenta
  Intron number 1 from transcript cassava4.1_005225m (locus cassava4.1_005225m.g) derived from phytozome v7.0 (chr-ID scaffold04175; pos 419512 to 420338 reverse strand)
tgtaatctttgtttcttaattgttatatcacgatctataacgatcataatgtacagattataaagctgttcaagcttgcgtttttctttctttttctctttttttggcttgcctttgggttagattctcttgtgcttgttttggttggcatggtcaagtgtactccttgtagataatctgatgttggttttattttctggatatgctaaaaagtttctttttttttttttttcttgggtataaagttgttgataatcacatcctctgtttctgggttttcagaccatggattctgattttgctgttgtgggttattgttcatcaggtcaacaaagagactttgattaattttttttgggatgttttaatgagtttacgtgaacagaaggttctcttttgattgtggtattctttgctttttgggttctttttgggtgtggaatatcctttcatctaagaatagtactcttctcttccaagtattcgttcagtgtttctatagattgcaatttctctcagattcaattggatgatctaaattgctttggtcaagcttaatattcaatcatcgggtcacccttttgcttatctgggtctcatctcctttgcttgtgcttttgttagattatctacttctgcttaagtgttgtcttttgtttatacatcaatggaaacttttaagcatcctttatctgttcttttagcaattgactcaagtttttggatatttaattttgctttctacttcctgctatttaaggaaattttattagcgtgtgttcttacctgtaggtttgagaattgaagcttgctgattagtgcataat

SEQ ID NO: 42422 - DNA, 434 bp, Manihot esculenta
  Intron number 1 from transcript cassava4.1_028211m (locus cassava4.1_028211m.g) derived from phytozome v7.0 (chr-ID scaffold04882; pos 244642 to 245075)
acggttttctgcttcagagataggaccagaagcaggttttttgtgaaactttggtaacatttggcttcttcttttgagctaagaatttgttagttagggcttttcctttgaaataaaatgatggagatagtgttcaaattaatatttgtagtatatcaaatttcgtgtttgtgttttacttcagttctgatttaataattaaagaaaacatgtgtctgttattgttgaatgtgacttgttttttctcaactccaaagcataagttttttattttgagtgacttgcagtgttacttctccattccatcaaataaccagtccgattttttagttttttttttttccctatcctttgtatcgccttaaattgttgaattgcgcaatttataatcatgtgcagtaactgctatcttgggcgtaatcactgctatcaat

SEQ ID NO: 42423 - DNA, 698 bp, Manihot esculenta
  Intron number 3 from transcript cassava4.1_005824m (locus cassava4.1_005824m.g) derived from phytozome v7.0 (chr-ID scaffold06512; pos 1435077 to 1435774)
taaaaggagagcttgcccaccaaaaacaggagcacgtatgggttaaatatttagactgaataattgagtaccttcatggagtaatatggtccatgaaatttttgatcctctaataaatttactgtaagctgtttgtattgtgaattttcaaaaattttcccaagtcctggtgacttgtgaaattgttttcttgccctgagttaattctagttctttcattctgggtctgttcttgtattgctcctgtgcttcttagagattatgccagtgaagtgaccagcttaaattgtcattggagcttgggctcgtggtgagaactgagaacattagcgggcatagctaatcttaattggaccacctatcacatcacggatatgttccaggctcaaatcgtgtaataacaatctttatctggaagaaaataaaatcattttaactcgttagaaatgattcttttgtcttaagatatcttccgttctttcttgtcaaagtcattattatgctttttctttttgttattccttcagaataccatttgttctttcttgttaatttgttgtcacatgatgtgcgtacatcacccttttttttcttttgtacattagctagcttttgtgcatatattttggattttattcccataaagggtgtttgtggttacaggagaaggaaaaagagagcttggaagctgcctccaa

SEQ ID NO: 42424 - DNA, 390 bp, Manihot esculenta
  Intron number 2 from transcript cassava4.1_002471m (locus cassava4.1_002471m.g) derived from phytozome v7.0 (chr-ID scaffold08847; pos 292130 to 292519 reverse strand)
agttcacctactcgcctcaagccaaccaccgcaaggtttgtaaatgacttaggaatgagaattcagtttgtttgattaatcataaatcatttgcaagaaaagaattcttgcacaataatgcatgaattctatttcgttcgtaataatttttttaaagttaaaagaaattgaattctttcagtccaaacatgacaattggtgtagaaaaaaccaattgaattgaatcctcgcaaatttcttgattccaaatgtgtggtggttgaaattttggatttgaatcctcgctgtttggtttacaatgtttgttattgtgtaattttattatttttcactgtttatgaatgtaatcttgtagggtggattgatagggctagctgctgcaactgtagg

SEQ ID NO: 42425 - DNA, 938 bp, Manihot esculenta
  Intron number 1 from transcript cassava4.1_031337m (locus cassava4.1_031337m.g) derived from phytozome v7.0 (chr-ID scaffold10173; pos 796409 to 797346 reverse strand)
tctctcgcttccttgagaaagcaacactgcaaaaggtattttatattgttcagaaatccatttatagaaactcatttatctagaaaatattataattatacgtttatgaaaatgcaacttgaaagtggatatggctataatcctaaggttggccatggccgtttccagtctagttctgggtcagaactgattttccagtttgtgtaccaactaaactagggcaagatccaggctgattcctcgtgcttcagttcagttttgatttcaattcaagggcttctagttagatctggattaatgcagccaacaattcaaataatttgtttcttgaaattcacttgtttgaaacaaactggaacaccaagctaaacagctggtttcaatctggtttgtttccaaatttaatgggggatggactgtgactagcccctatgcaataacagtcttgttcaggcctgagaacctttcccaagtctgatcgagctagttctatgccaacccagaccatggctaaccatttgcacattaatttcatcttgaaaatgttctatttgtgcttttcaattttacccatctttatccatcatgttcatgtatatatggtcattgatgcttatgtaaagattttacctaaatgtatggtttcaggctattttcttatttgaaaaaaaagggtttttttaattgtttttattattattatttgtagcaagatagggggtggttcggaggggaaagtatactatagtttgctaaacttttgttgttctgttggttgctaaatttgtaaattagggtctcttaggttcttcctttctagatttgcaaagaattattatattaaatatgatctgtgacgttaatctaccatatggcattaattgggtttgaatatggctttgctttgtggtgatgaatacagattgttatagtcacca

SEQ ID NO: 42426 - DNA, 896 bp, Manihot esculenta
  Intron number 1 from transcript cassava4.1_026451m (locus cassava4.1_026451m.g) derived from phytozome v7.0 (chr-ID scaffold04151; pos 411386 to 412281)
ggttctgtctgagcccaatgggctcaagatagaagcgcaatatatatatccatttttcaaatggcaacaacctacggtgttcccgctctccacgaggtttaaaaaaacatgcttgtgaacaatgcgacataagcgggcgaaatcagacacaaagatcctgtcgtcgaaccgttttccttcgacatctccttggtaacacatatcatgttgttagtaaatgataaccctagcgtcgtaggttttctcaaaaatggactctcctgaagataatcgcattcctccctcgacgacatcgtcatcatctcctactgtccaagtgagtttctgttttccacagtctcgtactcggtgatttcacttcattgatagactagatttcttgttatgttctctcttggagcttacttttggtttcttggttgtgtttgattgcggctctgatcagatcagctttatatgtggtgggtggctgagaaaacaggggaaagaaatgaaaatgaatcgaaagttttggggtttcttgggggaaataagtcgatttatagtgttaggaacgtaggaagaaatggaaattgctacaagattgatgaattttttgtactaactcattgaattcagtggttttgtttctttcgattgtaggaatcccctttcttcaattacctcagaaatctctctcctataaggtccggaaagacagcaagatatgtacaaggatttacacaaacaaacttcactgtccctccgccgccggtgttcacatcaccccgtgtagatcttcagcgagagacaagtttcaggtttgagaaattgttgtaattttatattcaagtccataaaatcgatatctgtcaactgaagcgtttgatattgacagagaagaaacagacgcagca

SEQ ID NO: 42427 - DNA, 600 bp, Manihot esculenta
  Intron number 1 from transcript cassava4.1_015578m (locus cassava4.1_015578m.g) derived from phytozome v7.0 (chr-ID scaffold08316; pos 573245 to 573844)
tgaaggcattgtcactttgacccaagaaggtctgttgcatctgttctctgtcacttctctgtcgctctttttgttactctctttgatgttgatttttgcatgggttctctctcgttgcttgtctgatgagaactaaaaaagagtaatctggttatagataagttttgtttcttggaagtggaaaattagaagttagatcagaagctgttgactcgctgagaatgctattcagtattgatttactttcaaaatgctgtattcttttggcaatttggaattatatctgaaggattttgtttagctaatggtctagtttaatggccaaggaagagataatgttgtctctggagtttgttcttctagtttgtgatgtttggtttaataagtaggatcaaaattttttgtataatttctgcaaagatttcccttgcaaatttgttagaagctcaaatattgtttgtgtcttgagccagactactggagagttgaggaaggaaaaggaatattcctgtaatcaaatttgttagcaagcaaattgagtcattatcagtgatttattgatgatttgctgtttgttttcaacaggtcccacaacagtgg

SEQ ID NO: 42428 - DNA, 699 bp, Manihot esculenta
  Intron number 2 from transcript cassava4.1_007532m (locus cassava4.1_007532m.g) derived from phytozome v7.0 (chr-ID scaffold01551; pos 1873157 to 1873855 reverse strand)
gaagtttctaatctcaatcgccagttcctcttcaggttttttaatttctatactcaacctctgtgattaattcggtatgctattgtgcctttttcagttgtgtatctcttgctttatgcctcagtttgacttactggtattttctttatgaaaattagaatgtgctgatgctaccgggcggctcacataaggagttgtagtttatgtgcttaaaccggttttttttttttatctctcactttcaacttggaacatttctagatgaagtagattttgcatttgtatatatgccttgcaagaacttcttgcaaagatgaaaaagttgaggatgctggacaaattttcctccatgtgtcttgtcaagtggattgctagctgaaaagacagttctcacgagatagaaatgaagcatcaagcaatgtgtcgtatagaaatgttttacgtgtttttgaataaagtctacatgtaggctgacatactttagtttttttcttttcattcattgtacctgaactaattagcatttgagtgcatatagtttggtattttcttgtcattgaaagtttactattgctgtatagcaacttacaaaatctgaagattctgctttggcatgtaaaaattgcacatatcggtttctttggcatttacttttattataaaatcttttaaactagtctgcttgttgcaggcttgaag

SEQ ID NO: 42429 - DNA, 895 bp, Manihot esculenta
  Intron number 2 from transcript cassava4.1_006055m (locus cassava4.1_006055m.g) derived from phytozome v7.0 (chr-ID scaffold01551; pos 2020517 to 2021411)
gaggtaattacgtgaaattcccttgattaagttattattatagccatcaagtgcaatttttaaaacatgtttcagagttttgttgaattctactttttttttcccccttcctaaaagaattgtgagattgggatgtgaaaggctaacaattgatgcatgaagcaaaagttagaagagtaatacgagggagatttaagatgttaagtacccctcctgaaagcataaaatcttgagataaatggttatgtaaaactctacaggagactgacactgttgcgttcattgccaccactgttgatgccctacatgctagggcctgtttgttatcgctgactggtgatataatttctgtttatgtggtaaaaaccattaattggagtttcaatgaagctgatttgtttttgtatgaatttagtataaacctatttggggtgaggtttctcctccaaaaagtttaaggactgaaccctacaatttaatatgaggttgaatgaagatacattatcaagtattgcactttgtatggttgtttgatttcttcattgtgagcactttctggagaaatagctttagttctattttaatgagtccaacccaaaagttatgctttttagttaaaggatcataaaatggactaactgaaggaatatggacctgagtgcagtaaaaagaaaagaaaagatggaatctgaagctaagattatttaaaaaagaattgactaacaatatgattatgaaatttgttatcgtaaatgttagtaagaaattatgctgcgaatataaatgttttattctaatacaattgcacaaaattctctaacttgtaaccatagctattgactttgtttttgtaattgcaggctcttcctatatacctcgataagcttttcaatca

SEQ ID NO: 42430 - DNA, 641 bp, Manihot esculenta
  Intron number 1 from transcript cassava4.1_017850m (locus cassava4.1_017850m.g) derived from phytozome v7.0 (chr-ID scaffold02994; pos 126749 to 127389)
cttcctcggcgccgctgccgctctcgtcttctcctgtaaccataactctataatttacctttgtttattcatctctctctcgtttttgaatgacatatttatagttttagatcgcacttgtgattctgttagttttaactttcataggtttggtttcgaagtatctgatggaatatgaagtttaggtttctgattgttagatcgatctgatgcaattatatgcctacgcgatctcatcttgtttatgattgaaattcttaatcttaattccaggtcctgtcatcgattgtgagtgttattgatgttgctgtagatccttggttatattgcttattagtattatcagagatctttgtttttgtgcattgtataagtttgcttactttgggatccattgattgtttctctcgattacttatggaagacgagagacgcatatcatttagattcaaaatgcacaaagtttttttttttttttgcttgtgattagttttattctattggactagagatggacttcacaacctcaattcaccatttgcttgaaacattgtactcaagttctttaaaatggcaaaatactagaagttccagtctctttaatgtgaactttagagtttaagtcaattgggtgttcaggt

SEQ ID NO: 42431 - DNA, 376 bp, Manihot esculenta
  Intron number 1 from transcript cassava4.1_020305m (locus cassava4.1_019714m.g) derived from phytozome v7.0 (chr-ID scaffold06656; pos 1275586 to 1275961)
tttagggttcgaacctctcctttcattttaccattattaatatttattttgtgatcgctgatatgaattgaaatttagttactgtgctgcaactagcaatatgtaaataaagttattgatgacgctcttgggatctcaaaatttttgtgatggatcttgggcttttcttcctatcttgttccttcaaattttataacttgacttgtaatatacaaaatttcttgtttgattaagtttactgttattgggttcaagttgtttttattggatttgattagtgttgctgatgcactctatctttttccttaaccttttactaatatgtaatgttgtatgttttttacttgcaattcttttggcagtacaagctttgctc

SEQ ID NO: 42432 - DNA, 680 bp, Manihot esculenta
  Intron number 1 from transcript cassava4.1_010436m (locus cassava4.1_010436m.g) derived from phytozome v7.0 (chr-ID scaffold04882; pos 420869 to 421548)
gggcatcctctttacttccaggtactatttgcgctatttcaaccaaaaagctccagttgatcttgtgcgtgtttctgctttctatggttggcctatttgaagcttataagttgtttcaaattccgatcttagacagcttaatcgtgcttcttaattgcatgtttgatgtattctgtttgtagtgatttgtataactagggcatccatttcttaaattgaatgcgaccatgtcggaagaatttggtatagaagtcagtaaccagcttatttatcacagagaaactcttaaactttttcacttttttaaaggttgttaaataagacgtattacaaaggaagtatatataaaatatttcatcctctttttctatcagaaagaaaatgttgttaatccttttatcctttgaaaacccacataaagatcaaagttttttgcgattctgaaaaggatgtgagaaattttgttgataacattttactcttgctttccataaactttcttttgatgttgtatttagaaaaaagagagcatgaaaaatattatcgtgctcgatatagtttcagggatgtttggaaaacgtttcctttgtggaagtggactcggacaatctgatctgatttcataatctcttgcttgtttgttaggtggctgaagtagccttgcttgaagaatcttttga

SEQ ID NO: 42433 - DNA, 871 bp, Manihot esculenta
  Intron number 1 from transcript cassava4.1_006604m (locus cassava4.1_006604m.g) derived from phytozome v7.0 (chr-ID scaffold05848; pos 237205 to 238075 reverse strand)
actttggagttgaacagcttgcattactcactcaggtatctcacttctcttcttcttaatcatcatttccattctccttctttttgttttgcttctctctctcactcagcaagcagccttgattagtgcgtggtgtagtcttattgttttgtgggtatggagtagtgatcaatactgggtttttgtttttgggaagtgggaagggattttttgaagtgggttttaataaattctttatttttctttgttgtatttggggaattttattacctcatggtggagtcaagtggagtggcaaggtggtgagcagttgggtcatctcccacctctctctctctctggcatattctgcatatctttttgttcaattagttcttgaactttcttgttcatttgagctcataagtaactatctctcctctagtactaatctgaaacttttgttttgtactagttaatttttccaattattgtttttcaattatccaaaacactgtatccttcttcttcacttctgtcccttctgttcttgattgagatttgaaaaaggtttgtgttttcatgtattaagagttttaaacatcttgatttcatgtatttcttcagttgggattttcaatcttaacatttgcataggcaagactttctacatttagctcttgatctccagtcttatcttccacagtatgcttactaaatctatcccaaatgtaaaaactttcctcatttgggcttataatcgtaaagaattatggaccaataattaggctgaattttttcccattaatgaaatgaatatgcaagcttatcatctgcaactaattcatttgaattttttgttttttctgtacgacagaagcaattggcaacc

SEQ ID NO: 42434 - DNA, 610 bp, Manihot esculenta
  Intron number 3 from transcript cassava4.1_017638m (locus cassava4.1_017638m.g) derived from phytozome v7.0 (chr-ID scaffold06446; pos 137355 to 137964)
ctggggctgagcttcttgacataattctttctaaggttcagctctatttctctctatgcagttctaattacgttgataatgaagatgatgatgttgtaagaacatgaacactgtagtttagtacatactttatccttcatggatttgtaaaacagaacaactcttgtacagtcctatttaagaaccgccctgttctctttcttttttctatgaacaaatgttttcccccttctgtagcatcttcttgttgggctaatgagtagctaacttgaagcatgtaacaattatttatttatttttgtcccatctgattttgcataaatttctttgaaacttgagatttcttgctgttcatctgagcttttttttcctctgattattttgcttcttttggaggcccttttattttcgtggttgtaataaaagctttctcgaaaatataatgaaaatttatgtatgccctgttactcatcaatttgtttattgaattcaaaatctcttgtttaaataagaagaaagtaaggaaaaagcaagggaactatgtactgaatttatattatcagtgacagagggaaatgatttgatttggttcttgattctttcagggagg

SEQ ID NO: 42435 - DNA, 1007 bp, Manihot esculenta
  Intron number 1 from transcript cassava4.1_003022m (locus cassava4.1_002909m.g) derived from phytozome v7.0 (chr-ID scaffold00926; pos 177088 to 178094 reverse strand)
caactgaggtgtgaatttccaacctgcttttttatgtatttctttttcagtgaagtcttagtacaatagtatttttccccttttctttgatgtaatcatcttccatttttttagggttaaccttagaaattttcacttgtttcctttgtggatcttttttgtcaataaattttctattatttttagtgaaagtgttttcatggaaagtttgttttcacaagttctttctgtatcagaaatgaaatcagtttgtgatatgggttccttatcaaggactcacttgaggtgttggagccataagaatgcgaactgctgtagttgatccgtgggcagttattcgatagcttgactaaatatgcctctctgattttttgcttcaggaattcatttagattttagattctaagtgccccacgtttcatttgagtatctccttctcttacctagtttgtgcatattgcctactactcatagtatagctgcttccactttacgtggtaggaaaactctttttttttgccctttcatgtgaaattagggattttagtcactggatgaacttttctactttatggggtgggcggggggaataactaacgtaagcttagctaagcatgtacacgtaccatgtgacgttctgtgataggaagctgaccaagacgccacgtaaaaatgatgatccataggagttcttttttgcgagtatttttttttggccttttggaatttagattaaccttacgtggcattatggtgcttttcaactaacctcattttaattcgagtaccgatcccaatcagttgaacatttattcccgggatctgaggaacgactttgacttttgactgcatttacccataaaggctttgctgaaaagccttgatgttaatttattcaatttgttgaaggggtattattcatcaaccttactttaacttgaagtcgttttccattgtcatgcactttcacaggtcttttcatttggttcggtaccattgaaaaccta

SEQ ID NO: 42436 - DNA, 855 bp, Manihot esculenta
  Intron number 2 from transcript cassava4.1_020070m (locus cassava4.1_019380m.g) derived from phytozome v7.0 (chr-ID scaffold02906; pos 102013 to 102867)
aattccaggaggttagtccaattgttcttttccccccttattataatttaaaattggattgtgtttattcgtgttttttttttaaaaaaaagaaagggaaaattcaatggcgtgcttatctgatccagctggtctaggtatgtagttggaacttcgcctgtttgcaatcaaggatttttcaataattcaattctattgacttctttttttttgctaattctcacatttggaatgacagaattaaattcctttaacttgaaaaattttccattgtaaaagacatagaaaccgtgcatgattgtataaaaaattcatttgaattctttttttgcaaatgattctttctaaacaaagagattttttgccaagggatttgcttctttaagatgatttctggttccaatttgagcattttattttgtgatttgtctgtcctttgcacccctggtctcgcccacattagattcagcttcattgttattgtgtaatattattagttgacatttgcttccttattatgcatatgttttaactattatccatatttgaccgagttcattaagtgtcagctctctctatttcatttaaatatgttttgataccgtaaaagctgcagctaaatctttcttcttatatactacagtgctatataaagctttagctttctgaaatgttacagtaattggaagatctgcattagaatttgtggatttaagaattgattgcattgaaaaaaaatgctagtagttatgtagcatacttattttagccatattatttcaatattaaaaataagctgttgggcctttaagattggaaataagctggtgttgttcttagttacatagatcattt

SEQ ID NO: 42437 - DNA, 563 bp, Manihot esculenta
  Intron number 1 from transcript cassava4.1_012520m (locus cassava4.1_012520m.g) derived from phytozome v7.0 (chr-ID scaffold03614; pos 1028031 to 1028593)
ctgctgtccaaaaccgtttgatttttacccttccttcctcttgcctggatttttattttgccctaattttttgctcatatattcactgtaaaatccttaaattttcccatttcttgttgtttgaatctcactaatgtgttttttaggatgtttttattggtttcccatcatactggctcatcaattttgaactgatggaattagttgacctaatttctacagatggaagaaaataataattaaaaatttgagaggttgtgcaaattgcaagaaaatggcctataatttattctccttgcgtataaacaattcaagatacatgcatgcacttttctatcactaacaaaactatgactttgtctacgtattacatcacaagacaacatgaactgtcttttatacatatcttaaaatttacatgatgtgctaaattgtttacccttgaaaattttattcatttatttatttatttattctttagtatacttattttagcgtatgtgctgttttgggtgcatggatttgcaggtaaattggaatattttgaggagttgtcttcttgc

SEQ ID NO: 42438 - DNA, 984 bp, Manihot esculenta
  Intron number 4 from transcript cassava4.1_029751m (locus cassava4.1_029751m.g) derived from phytozome v7.0 (chr-ID scaffold03614; pos 1087180 to 1088163 reverse strand)
tggtaatttttcaaaactatctacgattttagcttaagaaggtgctattgaatgaccagaatgagaaatttgcatttttactcttgaattatattgttttatctttttgtttcctggtcttcatgggaaatggtctggcacttgcagtttaggtaaaaggtaggtttgaacctatgcccctagcagcatacaaagaaagctttatttcgtggactatgttgccttttctaattgctattacaaaaattgcaaggtttttgtttcccaaaaaagagaggggcaatatgttttgcactttcccttttctcttgaagaaaaaaaggtttagttcttagggtgaggctagataaaacttttccttgaatcatcaaaagaaaatgcagtttttcatagaatcattacgaaatgcccttttacttcctgttatttccagtcgaaaaagtttctgagaggaattttaatatatatatatgaactttagtcttataattgatgaatagtgatctggacccacacaacttagatagagaacattatatggcctggtttagagtccattctatagcccaaggttaaagatattttctatctatctataactgggggtttggactgtgattctttatcaagagccaacccctctctttttctctctactttctcttattcatatgacaccaaagtcaacataaagctaacctaccctactctaaatatttggtggcttcttggagccatctgcaagaggtaaaatacaagggcaaagctggaacgtgaatgcaaaatttttgttgcatgctttacatttgtaccgtagtgaatgttcaatgaggtaggtgaaatccatttgattatcagctgttaataggctgttagtgaagttgattagcaattcttttgtaactaaattttagcttgtataaatagtagctgtgtactcataagctttatgatattgcaggacacagcaactgactgaagcca

SEQ ID NO: 42439 - DNA, 594 bp, Manihot esculenta
  Intron number 2 from transcript cassava4.1_011146m (locus cassava4.1_011146m.g) derived from phytozome v7.0 (chr-ID scaffold03614; pos 3829580 to 3830173)
agagccatagtatgtgccagactgaaatgtaatctctttaatggaatttggaatcactttttgcgcttattaacagtgtgattttcattggaaacttatccattcttatagtctattgtgattaagaaagaagaagtcatccccctcataaaattaaataaagaaagcaagagaaggaaagaagaaaccttgatttttttttgttcgcattgcaatttagtatcagctaagtttctgtcatttttgttcaagaacaggaaccaatggcgttgaaagaataatttttggaaagaagaacaggaaccaatgtaaataaattatgttatgaaatgtctcactttattgttgaaatgtaaatttatgtaaatacttctcgtctcctcttaatgcttcacttcaacccaccaaagcgaaacattcaattttggggtatttcttgctggagaagaaaaatgttgtgcaaatgacaaaatttcaagtgatactttgtctctaaatttgatttcctcctttggttttttgcattttcttgttgttttaatcagttgactctgtacaggttgagctcttaattcctcagttgcagtttctaga

SEQ ID NO: 42440 - DNA, 788 bp, Manihot esculenta
  Intron number 1 from transcript cassava4.1_013355m (locus cassava4.1_013355m.g) derived from phytozome v7.0 (chr-ID scaffold03614; pos 2179553 to 2180340 reverse strand)
aagctttatttctattgtcattcattgcttgcacggtatgaactttttcaatattctcttttgggttttgaggaattcttaggtttatggctctgaatagtgatgtgggtatctatatatctgacgaatttctgtgatcaatcttctattttatttttcattcttcctataagtaatgaatgttattggtgtggtcctgactagcagctgagaagttttcaattctttcttttagagtatgatttcttggaaatttttttgttttgggtttaggaccttagtggcttttgaattttttttgtatcttttaattggttgtgtcctcatcagaaataagctgttccttagatgtgctaatttgggtaacaagtacatttgaagttaatgctggtgatatgaattttcaagaactagaaattgtattcgagtattaggttcttggccattatgagcagcaatttctcttggcattcatctactgagtgctataattttatgggtctgacgtctgagctgtaacttgtagaaattgtgaattacatgatgatattataactaccttggtttccaatcaaaatctactcaagtatgaggcattttatatgtttttcagttggactaatattaataataaacttggatttgaagaaaaatcaataactttgactttaccctatggcttatgaatttgttaattagatttattaacttggctcagtgctgataaacattagttaatttggctgtatgcagacatctatagcttttacaagccttgtcgttgctgc

SEQ ID NO: 42441 - DNA, 469 bp, Manihot esculenta
  Intron number 2 from transcript cassava4.1_030264m (locus cassava4.1_030264m.g) derived from phytozome v7.0 (chr-ID scaffold04175; pos 154388 to 154856)
ctttggtaagtttatttctccaccgatggccggttttagctgaaaacgtaattgggcttcatcctttcatttaaaggaaacctctggtaatggttttttgagggttgtgtttgcccagaattacaagaaggaatatgctcatcctttctgaaattttactgatttccatggctagacgtaagctcaatatgcttcaaaattatactatgaatttatggaattaaatttattaataaatattcttttcccaaaaaaaaaaaaaaagaaaaggttgaaaagttaaatagaactttgatatataatgctaagctgtttaataataataaactaataaattatggttaattatgcaaataattctttttctttttcttgtttatgcaattggttaagcttataattaaatttaaataaaagttttaataattataataaaacctgtgtgtgcagcttagaaatttggtattat

SEQ ID NO: 42442 - DNA, 237 bp, Manihot esculenta
  Intron number 4 from transcript cassava4.1_018289m (locus cassava4.1_018289m.g) derived from phytozome v7.0 (chr-ID scaffold04285; pos 248291 to 248527 reverse strand)
tcactgctggtggtatgtactgttgttttctattaatataattctttattctaaaatacctatgtttctcttgttaacaaggatttcttcttttgattccctttaacttctcctttattggcttctttcatgttattattttttcctagtggcatttgatacattctggatcattaacacttctgtttcttgtgtgctccaggcactgctagtttcacaatcgttgacaaggatatt

SEQ ID NO: 42443 - DNA, 610 bp, Manihot esculenta
  Intron number 1 from transcript cassava4.1_013674m (locus cassava4.1_013674m.g) derived from phytozome v7.0 (chr-ID scaffold01551; pos 1947300 to 1947909 reverse strand)
ttattttcgcttgcttcacccttcccgtcgaaaaggtcacattttactctctgctcttcttcttttgaattctgtagattgattgcggttctttgtgctttgtttaaaggtctttgcttgattccttatctctggtggtttaattattaatttacgcaatgtgattttacttgaagttcacgttcatttaggtatacaattttgaactcagtttcatccttcaatcattgttcgagttacttatgtacatgtttaatttttatgtttttttttttttaattgttgcctgcaaagatatatgaggcggctgctaaaattaaggtctgttctaataaatgacattgtggacgccatatatctattgtcactggcttacagtcatgatgttttattttgatatatagtagtgtgattggattttgcgttgtttgttgcattagttctttagtctatctacagaagcactttctgtttttaattaatttatacaaacattttactttactaaagtctgcagtcatggtaaatggctgtgtttcattattaacgaagacacttgtttattgactgaaagagcagttttcatacagatcttgaaggacttcttatt

SEQ ID NO: 42444 - DNA, 693 bp, Manihot esculenta
  Intron number 2 from transcript cassava4.1_031929m (locus cassava4.1_031929m.g) derived from phytozome v7.0 (chr-ID scaffold10342; pos 3496 to 4188)
attagtacagagtgtggaattcctgattacagaaggtttggtatcttctctgcaaactgtccgttagctttctaatgtttattgttatgaggtccagtttatttgatgctcttttaaactatatcataggtttgaattagtaagatggataattttaacaaaatgatttttgaagttttgctcaagttgctatttaatcacttgctcacagttttacatgcttctagtttatcttttttatgtctactatcatctagaagggtattgttttcctgacactgtcttcagtaacagtaagcgatttttgaaactgtattttattatcttctcagcttgtgcttagtgtgtgccaatgaccagcattttcgtgttatgagggcaactgtggatgtggctaggttttcttggttgtttgattgatctaacgaatccctcattttatatgtttaatttcaccattaccctgttatcccattattgtacctgtcttggatatgagtaaaaaaatttgttcatcttcttctcccttctccctcccagtcctagagttgttattgcagttaaacctttttatgcactcaataatcctcttctgattgtttctcaatgcatacaaagtggaatttaactctgctgaataaaaaatatccatatgcactcaatttatcacattcttattttgttgcagcccaa

SEQ ID NO: 42445 - DNA, 1009 bp, Manihot esculenta
  Intron number 1 from transcript cassava4.1_001570m (locus cassava4.1_001570m.g) derived from phytozome v7.0 (chr-ID scaffold09974; pos 106550 to 107558 reverse strand)
gcgactgctgggtgcagtccttagtttcgctcttggtgagttagctatgttgtaaaatttatctaactgtagtcgagtattagtctatgagtgtcaaacacaatccacttcgggccacttctgccatcaccgtaacgtacattttcccgggttgttcttttatttctactcatgcacttctgaattctgcattttcttgttcatccaagaaattatgaaaaaaaaaatagttttcttgtttagctcgtaacttaggtgcattgacagttttgggaaatggggaattgaaattacatatttctacagcttaatctttcaatttgaagtaatatgcataaggatgagaaggttggagttccaaatttgtcatcttgtatccaaaggacttgcttagattggctgtataatgtggtacatttttttctaagttcttcgtgctggattagaagcttggaaaacacagtttttcctgttgggtgaggagtgttgtagttagattaagtcaatagattagtgtggtttatttgattgtcacacgcaggttactattcttccaacagtggagaacatggaaatgtaatcaaactaacagagcgtttccttgtaaaatttaagccttaccttttttctcttttcttagacgtcgatttcttatttgtttttttcacttctccatcagcttataacactattttcaaattctcacctttttgaagataattctgtagacagccacttgtctcagttgagctgcttgtttctcttccatactccggcagcttcaatttagcacttagtgttgcagcaccttatccctgcttctgcttactactttgttccaagtgaaaaaaaattattgctgcagcttgcttgtgctgcttttttattcgttggacagtgaagagattcactgttcattttcaagagctttaccgttcaagttacagtgtatgctgtttataatataacatcttgcagcatttcaaattctttaggacgctaccacgat

SEQ ID NO: 42446 - DNA, 325 bp, Manihot esculenta
  Intron number 3 from transcript cassava4.1_024592m (locus cassava4.1_024592m.g) derived from phytozome v7.0 (chr-ID scaffold06914; pos 811605 to 811929)
ggttttggacctttcacattttggacggataagaggtattttcttttggctccttaatctttcataaaacccttttcttccatttaatgctatcttttaaatttttcaagtggatagtttcttcaccaacttttttgaagttttgatccctgataaataatttagcaacctgatcaaagagggtaacagtataaagggaatgtggaattactacaataggtatcaggttagacctgcaaaagatatgttggcattatttatgttgctataatgttcttctactcggtgaaaataatggcgtttgtcttttgtgaagttagtggag

SEQ ID NO: 42447 - DNA, 631 bp, Manihot esculenta
  Intron number 2 from transcript cassava4.1_010196m (locus cassava4.1_009942m.g) derived from phytozome v7.0 (chr-ID scaffold02994; pos 435756 to 436386 reverse strand)
aggttggctttttgacccctttcaaatagtttttctttttcgatgtttcttgatttgtctgcgcttcgtatttgtaagttagtgattggttgttgtgcaattatacagcaagtgccaattttacgtgctagtatcttatttagctattgattgatatcccttgtgttgttgttgatgattcgttgttatttctgctattattaacgttgactcactgttgaatgaattcttcctcaacggaagagaataacgtctgatctcaaattactcggttgaccccaatctgatagaggtataacttgaatgttaatctattgaaatgtttgatcgaatgcttggggagttttacctttacccatgagtttattgcttgtctttaattgtcaaagtctgagtgaatatgttactgttatatgtatctggatctgaatggtcttgaatgttgtggcgactcatattagtaaatgctgggaagtggggaatcttcttgtgaaatcatgctaacatcatttgatttcaaatttgttcaatatatgggtaaattgactactaaaaaatgattattccctagattgctttgtctaaattaagcctgtggatttctgcagtgcgatccagaggaggcaggtgc

SEQ ID NO: 42448 - DNA, 712 bp, Manihot esculenta
  Intron number 1 from transcript cassava4.1_024864m (locus cassava4.1_024864m.g) derived from phytozome v7.0 (chr-ID scaffold06711; pos 39930 to 40641 reverse strand)
caaagccaaagccaaagcattcaaggcaaaatcaggtataaaaatatcaaatcccttttcattagccatttatttaggaatgataacaactccataattactttacctttcccattttttcataattttgtaggaatgaaattgagattctaagaatacaaattttagaatatatatataatataggaggcaaaaataaatttgataagcaaagatggtggtggatgataattaaaatcagttttagatttcaaatgcttaagctaaagaaagtgaatttttaaatatgccccactgagattcatacatctttcacttttgaacaataattctactattcttcttagatatttcacttaatttatttatattttgtcaaagttaaacataacccgtcgagataaaaccatcattgaattaattgcgtgtatgcatttaaatacgctaaagacttacctttatatatatatatatatcaactcacgtctatatatacattaatttatttttaaattcataattaatcatcgatttcacctacaaatgagtttagacccaaccatcaatcacaactaatcttacttttccatccgcactcatggattcttggcatgcatatcgttttagcattttttttttataaaaaaaaacaacaaaaaagaaatttctgattatgtcaaagtttttggaaaaagcttgtaacaatacagag

SEQ ID NO: 42449 - DNA, 570 bp, Manihot esculenta
  Intron number 1 from transcript cassava4.1_033796m (locus cassava4.1_033796m.g) derived from phytozome v7.0 (chr-ID scaffold03332; pos 704159 to 704728 reverse strand)
caggttcagcaggatcttatcaaatgaatcctcttctgctttcattttcattattcttttgcttgccattttttaacccatctcttttggtatggtttttaaaggattcctcgtgttagtgaatctcttcattcatggaaataataccctttaggatttcccttgttttttctcattcaaaaattaaaatatatgagaattttccttactgggtttgattatcatggcctgtctttgattcttcacattcttatgatcagcatttcattgtcgagacaattgtttgatatctaaattggcacaatcatttgatttctatggatgatttttctttgatttacatacccaaaatctcttctatgtttctgtttcaattgcttgtataaataattgtaatttcatttctgatagaggagatttagtttaatttggcttccacatgctggtgcttttggacaatttttcttttaaccttttgcataacttggtgtcccttgtttttgaattccttacttttgataatcaaaattatcaggtcgagcattggaagaactcagaagttctctatat

SEQ ID NO: 42450 - DNA, 710 bp, Manihot esculenta
  Intron number 1 from transcript cassava4.1_009111m (locus cassava4.1_009111m.g) derived from phytozome v7.0 (chr-ID scaffold03329; pos 115233 to 115942)
agttagtgcctttcaaaaaccagtcaaatttcaaggtaagctcggaaattgttgtagttagttgaattttagttattgatggatcatttcgttattcttgtcataatagtttgtgagtttaatgtttcaaaggaaacccaactctttgttgggcaagaaaacgtggcctttgacctctcttttttttttttcgaaatttatttcaaagctccactcttgggtgattgtcttgatattttttcattgctagtggccgttgtggtcatgggttttcttcttgtgggggaaactatggtggatttgttgttactggccttgattccttctgttttctttgtgctattcttaagtgattctaacagaaaaaggcagcttctttacaccttcaattgatctgttgaatttgagagttataacttttgatttctgagtgaatttttgttgatttaattcaagtgcaaaaactgttttttgctgagaagtcgaggtggatagatgcaaagtaggatttttgggtaaattattttttttggagcccttgctgtattgtgactttcttattttttgtttatttctttagtattgaatttttagttgtgggatactgttatgaggtgttgtttgagtccttattgtatgcttgctaattttgtttctcatttgttgatgttgtagtgcatactcactgtgttagagaagtatacaattta

SEQ ID NO: 42451 - DNA, 710 bp, Manihot esculenta
  Intron number 1 from transcript cassava4.1_017277m (locus cassava4.1_017277m.g) derived from phytozome v7.0 (chr-ID scaffold07571; pos 549786 to 550495)
gtagatcccgcatttgctcttggctcttttctcaggcaagtgttttcgcgatcccaatttctctcatttgctttccttttttttttaccccttcaatctgatctcctgcattgtacgtctaattctggcttgtttttcttaattctatttgttaattgtttctgttgtcatttcttctgatcttaagatttccagcgggattttgttttctgatgatttcattttgataattgtatacactttttgtggatctctgcgatcctcgctttatcatttgtttccatgatcgaaatcatttcatgataccttagatttacacatctacgattcaatatatgagcttcggtgcttgatctacctataaatgacgcccaatgcaacttcgaagctatcattctgaacgaattaaatagattcccctcggttccttacttgcagacaggatgcatcaggttcattagtgatatgaatcattctgtttataagattttgaatcgtggtctgaacaacaatttcaattgtccctggagacaaattcattaaattggttctgtttgtggatgtaacttcgcgcattctttgacggtctctgtctttttgtatattcttaattattttgccttggtagtcttacctttgttggattgaaattgggtggaggattgatgatttgacatttttaaattgtttggatcagcagacgtgaaaca

SEQ ID NO: 42452 - DNA, 817 bp, Manihot esculenta
  Intron number 3 from transcript cassava4.1_001524m (locus cassava4.1_001526m.g) derived from phytozome v7.0 (chr-ID scaffold09460; pos 161294 to 162110 reverse strand)
ctgtttggtttgacaaacttctattacacattcaggtatagaaactaaaatttatggtgcgtcatactttggttctgtaggttttaaggagtatcttcgctatctcactgggtctttggaaggatatttattttgttgttctaaatttgtttcaagtacccaggttttgtcaatttgttccatagaagttcatacattttatttagctacccaaattgctgtttgtgtgagaattatggaacaaagaatacccataatataaaaactggtaaatataaagaaagtatctatcattcaacaggtgaagtttatgtctttgcttctctatacagtggtcaattgatttttcaatcaatttttttttaaaaatcctcaaacttatgtagcatatgttaaggaagttgctaagaggttggcattccatactttttaagggatggctttgtagaagtatactatcaatgttgtccaaatgaccaaatcttcaattgataggataaatgtgagaccaagtgtctgattcagcaattcatgtgaaataatcattattacatggttttgagatcattaacttgatatagcaaaagtaaatgcatcgtctttgtcttcttttattgtaattttaccaaaaaaaagtggaatattttctcatctttggtattgtaaaacttattgtctgtcttttctatgtttgattattgtttgtttgttagtacttgtatgatatatttgtgttgtttagaattttcacatagaatggtggtatcttgtgtattaaacagtcaccagcagattctcagtttgtgaaggtggcttc

SEQ ID NO: 42453 - DNA, 643 bp, Manihot esculenta
  Intron number 1 from transcript cassava4.1_001524m (locus cassava4.1_001526m.g) derived from phytozome v7.0 (chr-ID scaffold09460; pos 162593 to 163235 reverse strand)
ctcgccactccagtctacgtcctcagtcactgcaggttcgaacgggttttgagattgtggtttcagatgtcttttttaagatttgtgagatttattgatgtgggtttttgaaatttgtgaaagtgctaagatttatgtgaatgtactgatgtttattagtgagattattgaaaaattcttgaagtaaagaccattgtgaatggatttagagtagtttttgtgagattattgaaatgggtttctgaatgtacccgtcccaaaccgtttaataatacagcccctttttttttttatttcaattcaatagcaaaaagttttagaattcgggtgtctgaatccgaattaccagcctgaaattcccaaattatagtgccaattcatcaactcaaaattctcaaattgcaaaacaaatatagatagagatgaataaacaatcgtagtgccaacaagaaaaagaaaagaaatagttcaggagattatgatgctcccacatgcacttataatataagtttctcatctgaataacacattagcgcaggaaattaatcaaaataaacccacatcctccaagtgaatttataatgtaattttctctataattcatagccataactcctttcactcagtttttgcaggtgcgaca

SEQ ID NO: 42454 - DNA, 631 bp, Manihot esculenta
  Intron number 1 from transcript cassava4.1_024595m (locus cassava4.1_024595m.g) derived from phytozome v7.0 (chr-ID scaffold01551; pos 426648 to 427278 reverse strand)
cctgcattgaaggggatactgctcaagttgtatcggtaaaactccacttaatgtttattcctctaggaaataaaatgtttgttttagtgtccgatttcaccttgaatttatctcattttgaatttcttatttcaattaatctaacaaaaaaataaaataaagattagataatatatggttaaaattatagaagcaaaataatataaaaatataaaatggcaaacaatttctttaacagtagactaaataacttaattttaagaaatataaaaattattttaatttagtgtttttaaaatttagatgaattaacgaattttcaaaaaatccggatagtaattatctcttttgtgtttctggataaaagactctgcacatatgttacggcccaagctttccagatgagattaacacatggaattacgaagagtgaaatcccatcactcaagaaagcaaaacaaaatactaacatagcccccacagaaaatgaagttccctggcattgaattgatctatgaaaattttatgtttttcttctcttctctgcaagacgcaactcaagaggcatgatttttatagattgaggtaaataacaatcaaggatactttttttatgacagtgctgaaaagc

SEQ ID NO: 42455 - DNA, 936 bp, Manihot esculenta
  Intron number 1 from transcript cassava4.1_004761m (locus cassava4.1_004761m.g) derived from phytozome v7.0 (chr-ID scaffold06512; pos 2028325 to 2029260 reverse strand)
gttagacactacaagttcaatgtgagtacagttcttcttcttcttctttgtttcataaaacccagcatgcagcaaggcatgcaatcgagcttcacccacaagttacgatataggtgcaaaaaagagttataataatagcatttcttgtttaagtgattagcaaaatccactgatgcaagaaaatttcaattattagctgtctttcatgacaacttaactggcctatatattctcgatttcttgtccatttaatcattttttttcctttttttaaaaaaaatatatctctggctttttattactaataatttctttttcttcacttgttcatttctggatgtttatcacgaaaagctttcaattgaaatgactaagcaacacccctaaattaaacttgtacatcttccctgctttgtttctttcatgcaagctaccaaaattactgatggaaaaaaaaatgggattttttttatctgaaaaataaggaattcaaaaatattttagtcaatgaaaatgaagtctatgcctaaaataagtagatattaaagtctgttgattacagtaacttttcttcaacctgtatggtaatttttgacgtggaagtttcagacttgaagatttttttttaaaaaaaaggacaacacaaaccatattaatttttagttattttgatttactagtcttgcatattacaatatccgttgttcatattaattaattattttttatattatatttttattaattttatatattattaatattgaataatcaattatattaaattttttattattataatataaaattatatatgagtaaaattaaatagaaatattataatgaatatgattaggtggagtcgtctaattattgagattttaattaattaaagttccttttgtggccaatatatatatattaatgcaggtggtg

SEQ ID NO: 42456 - DNA, 940 bp, Manihot esculenta
  Intron number 1 from transcript cassava4.1_017362m (locus cassava4.1_017362m.g) derived from phytozome v7.0 (chr-ID scaffold01616; pos 42918 to 43857)
ggacctgtaggggatcctggaatcgaattctcgaggtattgatttattgtgatttttattttaactaatttctttagcaatttagattaataatttgaatgatacttgtctaatttctattacggtattgattattggataatagttccttctattatgaattctttctgtggaattaggataattttaataatccctagaaatattttggatttgtgttctctttttctgtttctccatgtaattggtattttgtatcctggtatgcgaattaggaatcataccaaagccttaataaaaggaccttttttattgtgtctcttgaaatgatcctgctttactggaatagaataacagctgtttatatgtaaatatttatatgctagagtttttagtctctaatgacaatgtctccttgcctaacatgattggattggacatgtttagatgagaagcttacacgggttgggttggcttggatttgatttggtggagagctaaaggcaaaatgttgtttttctggtgaaatagatggctgcttggttttacacatttttagctgttgacagtcttgtgtgctttgcaatgtcccatctcgttctggtttgacacctcaatgtgcaagactataacaaagtctctattcgacaaaaaaaactctctaacattggcaaagcttatccatttcctgtgaatctatgaattgttgaagtttctttcttctcgcaaatgatcagttttgagtatctccacattccctattctagattgttatatctctataacaggcagtattccaataatagttgtgccaaaatacgatttttttgcatgagattgcgtaccaagagttgatatttgatcagttccactttaatttcttcaattatctcaatacattgcccccttttttgcaatttgcagcttccaacttcggcag

SEQ ID NO: 42457 - DNA, 486 bp, Manihot esculenta
  Intron number 3 from transcript cassava4.1_010050m (locus cassava4.1_010048m.g) derived from phytozome v7.0 (chr-ID scaffold00341; pos 99485 to 99970)
tggcctggttggtgttatgatcctatgtgcacattttgtttgatattgtttttccttgatgtgatgtcttttgcttgatgacccaatcattttgcctttataatctatgtgccttaataatctgtgttttgaaattctgtacttttttcatatagcaaatgtttatttcactatcattttataacctaagttaaaaacactgcatataactttggaggtcctgtcacctgtgtcctgtctgcttcttgttgtttgcgttgctaattttcctccttttcactttctagctaaatattttctttctcctttttcttccctagcacaaaagaaacatgttaatatgctgctgactattgtttacccaactatatgtgtgtctattggttagattaggccgtttgaattgtgaaatagtgactatggctaatgttgctcgagcgtccaattgcaggagaagcccattcattggaagcaaagaacattttg

SEQ ID NO: 42458 - DNA, 856 bp, Manihot esculenta
  Intron number 1 from transcript cassava4.1_007574m (locus cassava4.1_007574m.g) derived from phytozome v7.0 (chr-ID scaffold06631; pos 56303 to 57158 reverse strand)
gagtgagtacttttggattgatttcttttctttttattccttgtgaattttctattgtgaatacaaatgctgaactgggatgatttttgtttctgctggttttgttttattgcttttttgaatggacaactgaaatgggttttagtttatagataagtcatttattcaatgatttaatgctattagagtgacaagtgaaatgggttgattctataatttgattttgggggacgtttattgaatggttgaaattattatttttttacttgataaatatgattctgtaatttggaaaacatagatgttagggttttggatatggttggagaagaagtgtatcttgagatatcttcaagcatgtgtacaatctaactaagtggaattttccaatttttaattcaatttggttttgcttgattctttttttaactcaagaaaatgaaacccttggctggatttatgcctttttaagtacccttggttgtacattttttttggcttgtttccctgtttcaaaaacctagaatagttggcattatatatataaaagactaatcatcgacacaaaaatattcttgagaatttttttgagatggagctgttgctgcttataactatggcttaaagacaaagatgggaagttgaatttgatttataaactgaaaagaggagttataatgatttacagttgggatgacttagatgggttccctctcgagattggttcctttttttggaaatgttggtctttaaatgcatctgccggtgcttcaacaattattacgttcttgtgtttattaagatttaatcagtactctctgttcagaacaggtgaaagttcttgctttgacagatc

SEQ ID NO: 42459 - DNA, 406 bp, Manihot esculenta
  Intron number 3 from transcript cassava4.1_003757m (locus cassava4.1_003757m.g) derived from phytozome v7.0 (chr-ID scaffold04047; pos 201460 to 201865 reverse strand)
ccacaatcctaacagtaatttacttggattcctgggtaagcagtagtcttcatttttagggcgttattgttttgtttaccattgtttacacgagaacatgatcattgttagatgaaaacttttgatttgtcttgtggttcttttgcttttgtttgtacttcaaatacaaatcaatttttgatttttgttttataagagatgttttaagttcctatttgatcattttataagagaaattgtagatgggatttgtggaattattgtgtattgtgtataaaagcgtggatgctagaacaatgttttaaataaaacctaatagcttttctttgaagggagtgttatttatttttcatggctgtatctatgaacaggtggctctgaaggtttatttgcccagaaaactctt

SEQ ID NO: 42460 - DNA, 424 bp, Manihot esculenta
  Intron number 1 from transcript cassava4.1_015629m (locus cassava4.1_015629m.g) derived from phytozome v7.0 (chr-ID scaffold12725; pos 91282 to 91705)
acgagtgagtgctcctctctttctctattcttttttgttagatttgatatgatatagttactattataaataggcttaattacaaaaataatcaaaacaatttttcgcattttagctatttaatttaaatatttaaatcttggtatgattttagtgattcaataaattaatttcaattaatataggagtataagcatttattcatccttaaatccttaaattaaatcgccacatgaaaattttgaatgatattaatgattagattttatatatttattttattttttttattttatttttagtatttatcatcattgataaaagttgaatataatttcttcagttgtttatgagaaaaaggaaaatggtgtgagaatgagaaacatatatttataggatttgcaaaactgcaggcaccataaca

SEQ ID NO: 42461 - DNA, 599 bp, Manihot esculenta
  Intron number 3 from transcript cassava4.1_004736m (locus cassava4.1_004733m.g) derived from phytozome v7.0 (chr-ID scaffold03614; pos 283649 to 284247)
ctcaagggtcaatttctgtaccttttatttcaaatgtcattgaatctaatgcatttcttaagtaaaatataaggactctacacaaagtcaaagtgtgattgctaaactttgatattgtattaaaaagaatgcatgattaggtaatttaaaacttacatgggctagatggtgcaacttgatcaatgtttgagaaatctgaatctcaattcaaattcattctaggtgaatctttctagttcgattcttctgatttcaaatggcatattgaaagcttcttagttgatattttttctataacactgactactctcttttcaccttcttatgttctgaaaatgttgcaggagcatcaggtgctctcataatttttccaatggaaacgcttatttaatctgtccaacttcacatgttggcagctagtcaatttcttagtgttttttttttaataactaattcttaagagtcatgaatcacattagtatccttttaaagacgttctgtcagagtggtaaatttcttcatcagtaagtttcaaggttgaaagttattttcttctgaatgcagtgcaaagcttgttgaccttgctcttgcctctggaa

SEQ ID NO: 42462 - DNA, 796 bp, Manihot esculenta
  Intron number 1 from transcript cassava4.1_011042m (locus cassava4.1_011042m.g) derived from phytozome v7.0 (chr-ID scaffold04285; pos 205683 to 206478 reverse strand)
aaagcaaggtactctcctttttctttctcgtccctcatttttgtttatgcaatcgcttgtttggtgatcaaatatggattcttttgatgggtctgttttaatttaatggggaaatgcataaaagttgaaaatcatcttgttttagttcagaatgatgtcaactatgggttccttgatgggttttatttcgtattttgatgatgaacgtattttgtttgggccagcgtcgtgggattcatctgaaatgtgggatgctaataatccctttaccgcttttttagtttgttcctgtaacttgggtttttggcttttctgcatttggttttgtgaaggggttgaagctttgttgatttcccatggctgtttgattggatttcagatcatgtgatagggtttagttcataatcttctttttggttgtctggtttttctgtttgaaattttgattcggttatttaaaggttgaattagtttcatcttgatcccctttgtggattttgacctggagaatatgattgctacgactgattatattgcctgtttcggtgtattattgttgacttggtactgccttatcgaattacctacttgctcatgttttgatttctgaagattctttcttaactgtgatattcggtgcgcatttaatgcatttaattgctgcaactctaagctaagagctttgtttaacgatgtttgagtatttagtacatgcgattatatttcattagatgaaaattgatccttgctttttttttttctttttaacaaaattcatccttgctattttgcatag

SEQ ID NO: 42463 - DNA, 245 bp, Manihot esculenta
  Intron number 1 from transcript cassava4.1_005500m (locus cassava4.1_005467m.g) derived from phytozome v7.0 (chr-ID scaffold04175; pos 525718 to 525962 reverse strand)
agcctttcttgctctgcttctctttcaaatctcttgtaagtatcaaacattcttgttttttcttcaaatgtaatctgggtttgcttcatttttatcgttttactgtttgtttttgacttttaattcacgtattttctatttactttcccttaattttggtgttgggtttttgtttaataatgctattttgttgtttctgatcgaacccagatcctatccctgtctgattcagctgtgttggctgc

SEQ ID NO: 42464 - DNA, 859 bp, Manihot esculenta
  Intron number 1 from transcript cassava4.1_022626m (locus cassava4.1_022626m.g) derived from phytozome v7.0 (chr-ID scaffold03614; pos 3620559 to 3621417 reverse strand)
gccgactcattgttgattttctaagtaaagctccttctcttactcttacccatttcttcttagatcgactgcattaagcccaatgctttagtcctgctagtaaattcctaaattccatatttgatgcatttttatttattagtactactgcactaaattaataaataaatacgaatgtaaaataattataatgctgttaatcatttatcagaaaaatatcacacactcaaatacatggtgcttattcattaacttatgtaaatatacatctcataatcatggaatttccctttaattttaattatatattactatggaactattaaggttatgctaggtacatccttatgcaatataatcaaattttatattgaaattttatagaattttttttatatataatggatttggtggagttattatactaaaattttttgggcattattatagaaaatttgattcattagatgaattacgacaaaagcataacgacatactgttgagcaagaaacaagtcataaccaaacaaaaagaaagattatgatgttcatgttgctttcttgcttttcctttggctctttcaaataatctaaagcaaaactttgattgtacacaaatgacccaccacctttctcttttctcttgcggttggtaactaacatcccacagaaagcaacttcttctcctcctcttcctttcttgtgaataaaaatttaacctcttactctgcagcactaccctgtccatggcaactcagaagtgtttcctccaaatgttcactttaatatgtgtcttctacttcttgcctctggtacattccatagaattcaatttccctgctgttttcaactttggtgat

SEQ ID NO: 42465 - DNA, 864 bp, Manihot esculenta
  Intron number 1 from transcript cassava4.1_008113m (locus cassava4.1_008113m.g) derived from phytozome v7.0 (chr-ID scaffold09876; pos 59414 to 60277 reverse strand)
taaagaagattcatgtaagtaatagcagttatatatgtatatcgataccatcttccgctgtttgtccttgaatgggctttaaatccatatgaaattattttcttttattttacatatatgattttctaatttaggctcgtttgattatttgcgagaaaaaatattctgaaataaaaatatttaaaataatttacttttcattttgtaattataattttaaaaataaaagatgttaataaaattatatataatactattaatagttagtaatatttaaaaaataaatttctaaataatttttttttgctaaagttgagttcattttatatttgattagaaaaatgcttttaaatattttttacaaattttcctttcctgtatatttcaaaatatttgtaaattatttccttgaatatatatatatatatatatttttttgtgttagcttggtgtaacctttcccaaaggtaaaaaaataagggattctcacttttgatcaaaattatctaataagaaatattcccaaaaggggaaaaaaagaggatccttttcttatttgcttttgatcaaaatgatctaacaagaaatattctctttgtaattgaaaacatgggatgttgctgttttgaattttttgtcattcactttggctgctacataggtaagagcttattcaaatcaaaccatttatatctcaaaatgcctctccttttttgaagatactaatgagtttgatcttaaaacttattccaactgttgtttcccatcattttcatattgtatatatctctctgagaatacatttgatttggtaactctatatgttcaggacttcttcttcttgttggccgtgtgggtgttacc

SEQ ID NO: 42466 - DNA, 1037 bp, Manihot esculenta
  Intron number 1 from transcript cassava4.1_005363m (locus cassava4.1_005363m.g) derived from phytozome v7.0 (chr-ID scaffold01551; pos 2686904 to 2687940 reverse strand)
ttcatctgggtaccttggaggatcaaaaggctgaggtgggtcttgtttttttttttccttattctctgcgtgcctttgtataatttaactgctttatttgttcttctgtaatatgaaattggtatttctgttggactgttttgttctgtatgttggtgtatatctggttgtttctttcgccatttattattggagtactgaattttggataagagttgtaggctttaagcttgctttgttgattctctgctatgcctatgtttgagttgattgccttaattgtatttgtattcgtatttagccttcaatagttttctcctcatgtaaaagtaccaagataaagaacttatttaatccaatcatttcagataattggagaggtctgtctctgtctctgcacttattgacagtcggttctaggacttctaaactttggcatagcgaagagtttctaagaatgcttttgatgttattgatcttttcggttatcgttcatgcaacagtttactttctgaaatctatcgcttaaacctttccttttatgttttaattctcgaatgttttcgcccaccaagagagattgaaggattaaaaaattgaaattcaacaagtgaatagtttcaaaatgaaataaagcttggtctcgtacagatctttgagttgttacctacaaaggtaggtattttaacagaactggcagcctaatacaaggtacgggttgtggttattatatgaaatgcagtttcttaaaagattatggatcgtattagaatcttcctagagtcaaatttcactactctaattactggattttagacagcttggtatatggagatttcagtcaggatatcaaggagtccatttgtgagctctgttgttggttgatatatctgttaacccataggtccttatgaatgtggttttactgcaaattgcaaagatttgatgtcaccaattgaatttacttataaattttttcagcattactattatggatattaatcctgcatatgcttcttttcttttagtaataaaca

SEQ ID NO: 42467 - DNA, 1003 bp, Manihot esculenta
  Intron number 1 from transcript cassava4.1_003988m (locus cassava4.1_003988m.g) derived from phytozome v7.0 (chr-ID scaffold07519; pos 857254 to 858256)
gagtaatcagggaataaggtaactgcatgtatttctcttttctcttaatttatttggaaaaagatcatttgcaaggaaagaattcaattgaattgcatgatttctattcttttaaaatgatttttggtcaagttgaagataattgaattctctcgttccaaatataataattgaaaaaaaaatttcaattgaattgaatatttgcagaattcttgattccaacgaggggtttaagtttgggagttttgcagtagaatgtactaactgctgtttaatttgcacctgcaagtgagagtaaaaagctatgggaaatgtggttcagtatagtgaaatttagtgaataaagcgataagcaaattttcaagttcctttcaggctagttattagtggctagtgctactgaatttggggatgacttatggctttttgtaaactaacacagtttgaaacatttattttattttacttaatttattctttgtgttactaacaacattgagttcatgggaacacaattgtcatgaaattctagagctgctaggcatgtgaaatatgccataacagaaattcttcataatctaatcactgttggccatcacaatctcttcttttatctggaagacatttttttttgtttgatttcatatccggtatatgcctctacttccctgccttaaattgacgagttcaatgttttgccataggctctgtatcttagcatattattattgaaccatgcagttaatgaggatgaaaaaaagctagttttctatgcatcttgttctgttctgggacatgagtctccagttatgaaaccaatgttaaagtcaagagttgacaaagcaccttgatagatttgttttaccatccttgtatgttgtgtaatgtttttatgctgtttttaagatccttattatctttaaaatatcatcatatttaagctgtaaatggctaatatcatgttaaatattcctataggtttagtgctgatccagaaacatct

SEQ ID NO: 42468 - DNA, 672 bp, Manihot esculenta
  Intron number 1 from transcript cassava4.1_008951m (locus cassava4.1_008951m.g) derived from phytozome v7.0 (chr-ID scaffold03213; pos 34476 to 35147)
gtatttgtctctcaattttctgcccatttacgcaggtgtgtacatgggtgccaatctttttcttcttctttttctttttgtgctattcttttaagcgttactttgcgtttttcattggtttcttggttctatcaatggcttgatctgtagattttagctttcttctgattttctttttattatttactcttcttttaatgtttgcatctcttgttagggggctgaatattgcccgtctgcttcttataattgtgtgttgctgttttgttcttttttttttcacacacattttccttcggagatttcagggaaaaacgacataaattttctgttattgcttccattttcttcctctttttctttttggtgatgttggtggggcagtttaactgaatatttctgtttttcatttggaatactaaattggcatctggttttttattttcttggagttcaattttcattttttcttctcatattttggagttttcttatattttctggtatatgacatgtggggtctatttgcattttgctttgtcaagcttgtatatccaatatagtactttgcctgtaatggtagatcaagaaatatggatcttttgatttgatctattctctttccatgtttattgatcagggtgaatcttgtattggaggcatagtttctcc

SEQ ID NO: 42469 - DNA, 792 bp, Manihot esculenta
  Intron number 1 from transcript cassava4.1_007616m (locus cassava4.1_007621m.g) derived from phytozome v7.0 (chr-ID scaffold08316; pos 812362 to 813153 reverse strand)
aggtttatttccttgccttattttttttcctgtaaattttattgattatttataattctggctacttatttgttttttaagcgattaaagaatgcaatttttagtggcacttgtaagtgaatacgcagttactatattggttgacaaaacaaacaggaagaagaagactattacagttaattatcaggcgaagtgctaaatctgcattttttttttttcacttattgaatcgattttcctttattttctcggtattatctcgccttgatgtcaattgacttgatttggttgtaggataatcgacaggattggttgtaggataatcgacaggcaaccaaagaacaattagttatttcacaaatatattttcttctttgattctgtagtagaaattactgtactcgttacagctgcacgattaggatggaagatgtgaggttaaagctagtgccattttcgtatgcattagggaagagtgtagggaattggctttgttttttattctgtagatatacaaggtcaatataacagcagtactaaaaaaaacacagcgatgtggtggtggtggtgtagaaggttctcaacacatgcagacatctttagaatggaatttacagggaaaagtttgaaaattcaatttggttgaagcttttcgttgtttatcaattattcttaaaaattttcagctgcacttggaaacttttcatgcttttctgttgccattactcaacaattggtgttatttcctgcacgaattttgcttccctgtacaggttgtagaagtaaagtcaa

SEQ ID NO: 42470 - DNA, 878 bp, Manihot esculenta
  Intron number 2 from transcript cassava4.1_016457m (locus cassava4.1_016457m.g) derived from phytozome v7.0 (chr-ID scaffold09761; pos 661059 to 661936 reverse strand)
ctatatcatctctttttcctttcctttattttgtaagcttttcattatggaattcctttaattaatatctgcgttattctttcttttttcttttccaatttattttaaggtcatatgtggatgcattgacccttttgttcgggttgaatgaatttcataaaaaaattttgatttcctttataacatccactttatttcataactgatctacttgtgattggaattagtagtttatagcacaattgtatattttcaatggagttcttactttggtaaaactgaaagaggtgaatgactttacctagtgattgtgatattagtgctaaattttctgggaaatgtaccagtagagtgaggaatagtgagagtgatactctttcaaggcagaggacaggacatcacccattgttgttcttagttctaccaaaaacaatgctactttatcatgatagtatgaaatcatacacacaaaaataatatttatatatcctctctctctctttgcccaatccttatcaatgatttgagtccggtttaaatgaaaattatagtctccattgagtgccagggattacatgatgcatttatctgtatattggtagatattgttagcatcatagttatcatcaatgaattacagtttgaggtgctgctttctgtgtttttataaaaaaaattcataattatatttttatcacttcaaaccatatcctaggtattgtaaatcacctaatcatagtcatctttcacaccaattggttgtgaatcaactcagagcgccattgatcaaaggcttgtcaaactgttcttgatatatgttcttaaattttattatgtgtagcccttgaacattcactttctgcagataagggacttcc

SEQ ID NO: 42471 - DNA, 664 bp, Manihot esculenta
  Intron number 3 from transcript cassava4.1_025681m (locus cassava4.1_025681m.g) derived from phytozome v7.0 (chr-ID scaffold06011; pos 297536 to 298199 reverse strand)
tcaggtattcttgccagattgatttgagcaacaactagacagtttatgtcatatgcttctgttaaggttttcaggatagatttcattttctgcatgtctgtattgtatctgcattattttctaatattctcttttgtatggcagaattcaaatgtttattgtcaatatatatgtatatatgtatatatatatatacacacacacacatacacacataccccattttgcaccccttttaggcgtttgattactgtatgtcctaggctgatgagcaaagagtctttggactttatcagaatttttcagggacttttgaggatgctaattgactgtaactggtttggtattttgtgaaaaaggattagggtttccaattgaatggaaatgaagtgaaattaagcaaggaaaataatgttccaggtgtctgacttgttgtacgtctgtttcatgatacagtgtaccagacagcaacttttacagcataacttcgacatttcaaatgcaatgagcatgattttttttttcttcttttgcatttagttctttcattcttttgtttggttgatgcaattttgtattctatggctgtcatataaatgcacgtagtccaatatcaatgtgacctcaaacttttttaaatatttatcagggtgtaactttggag

SEQ ID NO: 42472 - DNA, 1029 bp, Manihot esculenta
  Intron number 1 from transcript cassava4.1_033476m (locus cassava4.1_033476m.g) derived from phytozome v7.0 (chr-ID scaffold01551; pos 484008 to 485036)
tcttccgttccgataccaaaactgagatcattcaggtaaactacacttcatcgtcaagtctccaactcttctttctttatgtttcattcatctctttataatctatcaaaaacaaaacttggtttctcctgtctaccccccccaaaaaaaaaatggtgggttctgctcattttggctttccgggtgattcgtgtctcacatgcacagagaaatcggggtttgtttcggattttgctgtattatttgtcttgtcggctaatagcaagagagcaaagtggcatcatttacaggccaaaaaaaaatataatgcaactatcgtggttgctaagaagggaaaaaacatatatcaggactttccgacatctgaatatatcagccgatatttccctcgcacctttacttttgatgtcctcaagtttcggtgtccggtctgcgcttacgtgcaacatcaacatcttttcgtcataagcatgcgtatatatgaaattaatagctggctaatacattatttaataataataataataacaataatattttttactataaacaatctattagatataaaacataaattgtttgaattttaattagttaaatgaataaatcgctttgaatatgaattttccattatcttctaatctctggcttctctacttctacttccaagacttcaatctctggacataattatatatgatctctctctagaaggaaatggattagaaaggcataataggtttgaaatggaaagattgtcatataccagcaagcattctgctaatactgaaatagatagattttttttttctttttcttaagtgcttaattaattcagagaaggatttcatcatcatcatctatgaaaaaagataaggaaaattgttgtataaggatgtgaaaatcacgaaaataacgcgaataataagaggcagcgtgcatccatgaaaaagacaaaaggagaatatatatgtatgtatgtatgtatgtatgttaatgtttatttggttacaggtgagaagcaaaacc

SEQ ID NO: 42473 - DNA, 848 bp, Manihot esculenta
  Intron number 2 from transcript cassava4.1_010386m (locus cassava4.1_010380m.g) derived from phytozome v7.0 (chr-ID scaffold03049; pos 506542 to 507389 reverse strand)
tgatctctagctccgtacgcagcccagttgggcaggtaaataagcagtgagttttgggaatctattttgagtagcttttcttattaaattatctagtttacaaatttgtctttgttattgctcttttaaaaacctctttacatggaaagtttgtcatttttattgaaatttgtttcttttactgtggattcaattgagcatgtgatgtgggtatcttctattttattttctttatttgatagtcttaactgttagctcttttggatttatacctgttttgatcaggcctatctgatctgaatattgtattattcaatgattgcatttcaaattggttcctatgtgtgtgtttcttctaattacctgattgaattttgatcttagatcttgattagtatttattgtgtttggatgtcggtttggcggattgaggcttggttgatttttcctgtaaccatctgtcatccagattgatatctcctttttttaaaaaataaaaaataaaaataatgatgcctgaatatttatgatttggtcagtaaatgatttaaccctcagttcggttggttgtgaaacctttggaatagaaggattgtttagttttgaagctatggcctttgattttaaaggacatacacaaaaaagaggatgtgggttgtaattgagtttactggaagcgtttgcgtagttgtatgcaataaacactatatattccagtggaacaaactaaacaaataatagcattttatgtttggtgtttctgctggctggaactgttaccttgttggctacctttttgttatatgagttatttgtcactgcaaccttcttttgtatttcagatagag

SEQ ID NO: 42474 - DNA, 794 bp, Manihot esculenta
  Intron number 2 from transcript cassava4.1_008269m (locus cassava4.1_008269m.g) derived from phytozome v7.0 (chr-ID scaffold07778; pos 357077 to 357870 reverse strand)
ttctacaggagattcaggtgtgtttctggttgtaaattcttttccatctaaacttctgaagctgcagtgcttagtgatttagccatgggttgggacagggaagttgttaattttcattatgcaatgcatggctgcattgtctagcttgtgctggatttgctgagaaatattcttataaattccaaattttgaattatatagatgataaagctcaatacacaattttatatgtatttcagtaatcatctttgaactatgttagaaattttactctgtctgtctccccttccccttttccgcctttctcccccttcctgtttgtaattggaagtcttgtcaattttatgtctttgatgtctagtagaatctgcctcagatgtttcatttacttggaagataactatgcctgcatctgttgttgcattctttctcaaacttgaaagcttgtatcacatattggggtttcctgtggttattcatagttattctgacattttttttctagtcaattcattcgagactatcttttacagtcttgattcatcacttttagttttatggcagcattttatttctttttgtgcttctaaatgagatcaagttttaaccaaaccaagatgcctgtatgttctaaataacatgttaaaattctcagtggtggtcacacacaaacttgtgtaacactactaagctggttgaaactgtagaatatgcaaaatattgaagggctattaaattacggtgattgcttgtttgcaggctcttaagagagagatcagtaaagctcgtattag

SEQ ID NO: 42475 - DNA, 730 bp, Manihot esculenta
  Intron number 2 from transcript cassava4.1_013893m (locus cassava4.1_013893m.g) derived from phytozome v7.0 (chr-ID scaffold03614; pos 684318 to 685047 reverse strand)
aagaagttagtgtaagtgcacactttctgctgtaggccatttttgctaagaaaaaaaaaatcagaaatagggattttgattaatgctgataatagtcaatatttaaatattgagctaccctattaaagataaacattcctctaatttgctcctggacaatgttagcttgttttactgctggtaacagggacatcctcctaccttgatgaactaagtccgcataagaatttcttgtattgctgcttctttttctcctgattattgtatccaatcaagtgttgcaatggacaatcttaacatgctgttgttatttctgatagtaactctggtttcttcaagctcaactgtcaattttactttccctgcctcttttctactttttcccacaatagattcctttggaccttataatgcactaattctatgccgttattgtggttcagttctctcttacaagacttgtcaaatttattgtttcagtacgcaaagagtgctactttgttcttgttgggattgttcttctttctctgcttactctccaccttgttctgttgtttttactgtatacttgtagatattcatcccccctttgccaacaacatcctcgataagttaggagagatctgtgtatctatttgttcagttgttattgttaaaggtttggaggtgttgggatatgttttttattcaaacttcttctttgcactccagcctgccaaaaagatcagtg

SEQ ID NO: 42476 - DNA, 352 bp, Manihot esculenta
  Intron number 1 from transcript cassava4.1_013893m (locus cassava4.1_013893m.g) derived from phytozome v7.0 (chr-ID scaffold03614; pos 685096 to 685447 reverse strand)
actcccaaggataccatcgaattgcgagagaaactgttaagtattatgattctttgcttttcttgtacgcggttgtgagttctttcaaatttaatgatctgggagatggaatttgttgtttattagtattgggttcttggttttgaggttttactgctttatcgggttggattttgatagtaacgttattgaactggtttttttgttcttgttctgcaattgtttttacgtttgtttttctcagttttaatatcgctgttagaactacttcttatgcctttgactccgtccttacaccggattcacttcattggcaggcacaagacaagacaacatattggagaactggtga

SEQ ID NO: 42477 - DNA, 640 bp, Manihot esculenta
  Intron number 1 from transcript cassava4.1_000219m (locus cassava4.1_000219m.g) derived from phytozome v7.0 (chr-ID scaffold00341; pos 249192 to 249831)
gaagatttgaagtttcctgcattttcttttttcaggttagtcatcattcactgccatctttttttcttttcctggggttacggggtgggggtgtttaaaaattagaatagatcgtcatttctagtttggttttattcattcttttggtcaagtaatgaaccttaaaagtaaatttatctgtggttgcaaatttcatttctgtaaatatcgtgaaagctctccgacctaaaaaaaattatcgtgaaagctttcttttcttcaactttcgactgccttttgtcttttttttttttttttcttatttttcttttctctgcactcttgtgatcccagggcagtttcttctttgagtttgtaagggtatggctttctcaacaatagcttgttatttcatcaaagcctttttgtgtataatctgatataaggcacttgcatgtggcaggtgttgttattgttgtcatcatcatgatacgttttcctggattttctttttacttgtaatttttggtatttgtgtcagaagtttgagacaatatctgcttgtcgatgctttagagagtaattgatttttcttgtattatggacgattgtattatcttgttcagattttgaagaaaagcaaagagagaagacaaaaaac

SEQ ID NO: 42478 - DNA, 972 bp, Manihot esculenta
  Intron number 2 from transcript cassava4.1_015548m (locus cassava4.1_015548m.g) derived from phytozome v7.0 (chr-ID scaffold06914; pos 529468 to 530439 reverse strand)
tttacactacttcacaatcaattctgcaaacccaggtaagctgaaacatcctgcaagcttgttttactttcatgggtattttgtccctttttctgaggaatggatagaaaactttatttgttcttagtatttgctttgtatttgtcaatcctaaattggtggaaatagaaaaatgcatagactaatttgtataaggattcatttgttcatggaaatatttttatagtctatgatgtttgggtactcagaaaaaatcatcaataacaaaatcctgatcaaaagtggaaattaaattattttttgtactttgaaaatcttagtaacattattgtatataaatttgttaatatccttacttatttttctttgcttgattatattttaaaaaataggtgttaataaattttggaaaaattactatttagtccatgtagtatagaaaaattcactagttagtcccttagtttcgaagaatatattaaaacataccttagattttaaaaattctactcattagtttctctgttaattttaatcataaagtgctgagaaaagtctaaaatgccctcaattagaatgcttaattagttggcattttataaaattaatggatcaactaatgaattttttcatactatatagattaaataatagaacactaaatgcctaaaattaacgaaagaatgagtaataaattttttaatagctcggaaacgtaataaattatccataaatttatatataatagtgcttcattttctctttgactaggaaaatatttaccgttggttaattttaccgagtgcttcaaacataaaaaaatgtaggaaaatattttctgtgaaacaaatgtagcctaagattaatttatttgagttatcttgtattgttttgagattgtttattattcttaagatcataaaataatgttatgtagaggccgaaattcttaagatccataacaaactacca

SEQ ID NO: 42479 - DNA, 870 bp, Manihot esculenta
  Intron number 1 from transcript cassava4.1_012533m (locus cassava4.1_012557m.g) derived from phytozome v7.0 (chr-ID scaffold01701; pos 729061 to 729930)
atatccatatcgaaactccaacacaggtgaacaacgtgagcttgatctttctccctttgcctaaattagttgctttttcagggctgtcaattttgattaaggctataaattattcttatgatggttttcatctgtaactctaaagagagtttagttttacgacgtctatgatttggcaaatttgatcaatgggagatttgtgggttttaaatgggcgtagttgtgctcaaatttgcatagatcgtacatgattccgctgcacttctaggtattttttcaaaaaaactattatttaattgcttattgaagtgaaactgattggattatttgtttttaaatttttatttagcctttaaattttcttaaagtattaataatatagaaattggctcatgcattggctaaattaggtctggttgattcagcagaacttatctttgttgatgaactatctcctgctctgtcttctttccaatcagctgtaattgactctgttatggaataaatttcattttctgtagttttcccttaaaaaataatatacaaatcgattaatatatttatttaaataaaaactaatttattatttttgtttgtggcctgaatcacattcccaagtctgtcaattccagtggaatccgtatccaaccacaactacacaccgtctctctccatctcacaaaaaccgaaaaacaaaagcaacaagatggaatctattttcttagcggggaccatctacctctattagcgtgaaactccatcctaggctcatatcatatctcccttctccccagaaaataaaaaaagaggagaaaaatcttacctctttctgtagactgcaggacactttcgctttcaccgtccttcgcc

SEQ ID NO: 42480 - DNA, 913 bp, Manihot esculenta
  Intron number 1 from transcript cassava4.1_001574m (locus cassava4.1_001574m.g) derived from phytozome v7.0 (chr-ID scaffold03332; pos 134962 to 135874 reverse strand)
ctattaaagagaagattgctcttacaaagaagaaggtaaaagtgttcaaatctgtgtcggattctgtgtgcttctcagtatattggctttctttgtttggtttttggtttaagcggtgttattagtccataaattaacgttttcatttttccttacaatgtcagtttagtgccattagcagagacggtaggatttctttttctgattcaactgctttatcttatttttgtctcctttctgggaagaaccttgccttgtttggtggttagaatgtagtgagctgcattgtactttagaggttaataaaagcaggtggtttttttaatgtgagaccacgagctctaattttgctaattttgtgctttcatttgatgcgtaataaaaaaaaggtaggagtaagattctttttttccctaggaagaagtgacaaaggaaaagtggaacctatatttctgtaataagtgggacctaattaatgtaaatctttcaaacacataatggagtgtgcttatcagccaataagccttctaaatatgaggatgaggagcttggaaatgacaaaagaccagttttctaccaataaaagggaaacatttagtcttcttttagcttttgaggcaattctgagttaccaagtaaaaagtagaattttaagctgctccatagtttgaacaatgcagctgatgaaaagggagaaggctataagccaaaaaaattttaggtccatgatgttatgtatttacagtgtaaatccaaagtatgctatatctttttcatggagagctgtcaactaacttcatatctctgctctggttgagctatttaactaccactttggatttcatttgattgcgtcaaacacttaaaagatgtgctgtgactagacgaagtgaatttgttgacgcttctccag

SEQ ID NO: 42481 - DNA, 1026 bp, Manihot esculenta
  Intron number 3 from transcript cassava4.1_019607m (locus cassava4.1_019099m.g) derived from phytozome v7.0 (chr-ID scaffold03614; pos 4085757 to 4086782)
tgccggctctactcctccggtatctcccttctctggtaaggtttgctttcgatccaatcgaatgataatcatggccctggtctttttacaaaatgcctaaaatgacctctcctaagaaaccggagatgggcgttgctactagaaatatccaaagggcagtaggtttgcaaatttaatagagtgaggctaattttgtcatttagcggtgtgggtctgcccagcaattggataatgataatacacctctctatttaagtgaattattgatcttgccgccttggataatgacattttaggtcgttgtttgacgtactttttatgcatgggtgttggccagctcaggctaaccatacttaaccatgcgtggttacttgacctgttagtttaacccaattgcgatattacctttccttttttgacatgcaattgcgatattatcattattaacaatattgcaatagagtatctttaaaaaaaataaataagggataaagcaccagttgattttgtatgaaattatcttgaacaaattcttatgaagagtgatctagtgtacccaaatttagttatgacaagcaggtgtctgtagtagttgattttgaggcaaaatataaagccaaatgaatgaaaaaatttatagaatacaaattgaaaatttctattgtgtattgggatggcaagtgatgatgctagctcctctattaatcttgactaggtggaactgaactttgctttgtgtttgtctattgtatcgcaaatgggttgtgtacttgctatgcatagacgtacgttttactcatctcatagtaattataaaagaaagaatgaggccagtagaataatagtattgatggtacgctgagccatgtgtgggacaagtagtatatgatcatgagctcattttatgctcataagctgcatgtatttgtatttacttaagatgagacgattgtatataaatgctgatgagctgttttgttatgatatgaaggaggcagagagtcctttcggtttcgaagaagatca

SEQ ID NO: 42482 - DNA, 520 bp, Manihot esculenta
  Intron number 2 from transcript cassava4.1_006480m (locus cassava4.1_006480m.g) derived from phytozome v7.0 (chr-ID scaffold03203; pos 129226 to 129745)
ctgcgtttcctttctcagagcgaagttttgatcgggtaaaatttctttgcttttttttgtttctcacgctagatagatttctctattataatatgtttttcagatattttatcaaacagcttcatttctttttacttttatttttcgtccctttttttcctggagtggttttaattttctgtcgttttccttagaataaagtgggtttaattttctgcagctttaatggcatttcccatcgtttggcatgaatgattttgcaagaaaaagaattcaaatgaattcttttattgcaaacaagaattttgaagacaaaatttttaattccaaacggagtgtttaggaagaaaaaagttttaacttttgattaaacaacttgaaattcaatttataattacgggataaacaatatgtggaaacatattgtttatgccataattatgaatttatttgttcttgttgaatctgttgttgtaatatttgattatttgtatgcaaatttggaaacaggtcttcatcg

SEQ ID NO: 42483 - DNA, 721 bp, Manihot esculenta
  Intron number 1 from transcript cassava4.1_026571m (locus cassava4.1_026571m.g) derived from phytozome v7.0 (chr-ID scaffold09974; pos 373788 to 374508 reverse strand)
atatccctttaagtattgaaggtttgatccaggatatatacaccatgcttcatctttttcttcggcctccgtcgttcactgctttcatgaagagaattgtgcagctcactctcttgctgcaaaatccatgcgtgactcgaattttctttataatccattggctcaaaatatatatatatatatttttgctctatgccaacttgagttgtatgctttcaacctttacaaaaaaaaaaaaaatcaattagatcaagacataaataaaaatgattttgataaaacaaaaacgaattaataataaatctcataaaaaaataataactaccagcatttaaaaaaataaagtactgtatttacaatttttttattaatttttattttatatcgattgcatacatttaaattcagttatatttaaattttcagattcaccctaatattttctatttatttaactgttaccaaacaatttttgaatattaaactaatctctcttaaaaataatttttattgtggttcattttttttattttacaattagtttcattatagcacccgcaattctagttaattactactcttctcaaatgtatatataaatgcacttctatcataattttattatataattcctcgtaataatacggtgaattctatgttaattgattatggaaatttactaattaatttttcatgattgtattcttattatttctcagtt

SEQ ID NO: 42484 - DNA, 729 bp, Manihot esculenta
  Intron number 1 from transcript cassava4.1_006256m (locus cassava4.1_006256m.g) derived from phytozome v7.0 (chr-ID scaffold06550; pos 8591 to 9319)
tcagtccgaggctctcctgatccttatctcatcgggtaattttctcttcttctttgacaatttgcatttatgagtttgtttacaaaggaaaatttagtcccaactttttttcgtggttaatttttatctacatgtatcataaaatgtaatttcatgaaattttacagatgggtttatttagaattcgtaaatttggttgaagcttagcattcatcgaatatgaattttccatttctaaatgtaaatgtgatctttgcacttagtcaaatgagcaagtaaagtagaaaaaaaggaaacgagatttttgtgcatgttggttttagaagcaaatatggattctttgcttatttttacagtgtccttgtaacaaaaatggagcctagagttgatcgagtttggtataatcaaatttactgtttgctctttataatctgaaattgattggttttaatgtgatttatattctacggttaaattgtttggcactaatttagtttttgttcttctttctttggctgcatttccaatcaggatcgatggatcttcaacgcccttgtaatatatccctcttggttctcttcattttctgtgctgattcactctttaagatgagattgatttcttgtgtgtttttgtaacttaattataggcattaactacattcttgaaatcttggtttctttgttctgtttagactctattttacaaaagtgaagctgggctctcctc

SEQ ID NO: 42485 - DNA, 749 bp, Manihot esculenta
  Intron number 3 from transcript cassava4.1_007405m (locus cassava4.1_007405m.g) derived from phytozome v7.0 (chr-ID scaffold05335; pos 612116 to 612864 reverse strand)
aaggttactgtagaaagtgctgaggccactcttaagtaagccctatttatgtttcattaatttgtaggttttccgattctatttattgtaggtaactctttgctgtgtaagtaactttatgctgtgaataacatgtgcacgctataggtaagtaattgagtagtggttgtcccatcttgaaatgtaagttgagcacctagattgccatcttgaataggtggtacagattttataccatattgattgttgcttaagacaattgatgatgctaataaatacagaaggtttaaaagtgtgttctataaagacctgaatagtggttttaattgggagcaatgattttagagctctgttctatatttacatcaccatgtaaacatttgcaaggatggatataaagagtttgggagatgattgatggataggatgtcacgacctagttattgaagttgaatgctggggagagcttttgcattagttaggttttagatagagaggcacatgaaagatttttgttctttgttgtagtgcttagtctttactctgatacaatgtgtgcttttcacattgagggatgctagtgttatctggggcttgcagaattagaggaagagaggaaaaaggaattaggattttaattaagaaagagagaattgtgtctgctaggttctttgatcatgcattgatgcttaaagacatgctgaatatgcttatgttttcattctaatttaatctgttctgcagataca

SEQ ID NO: 42486 - DNA, 342 bp, Manihot esculenta
  Intron number 1 from transcript cassava4.1_029635m (locus cassava4.1_029635m.g) derived from phytozome v7.0 (chr-ID scaffold09709; pos 17717 to 18058)
gtatattaagagtagcttatttttactgtttctttctttaatagacctggtattggctttgttttctctattttgtatgtgtctttgctgtggtttagttttgtaatagaggttttccaagttttttcaattaataagcaaatgcttagatttgagtgttctcatcttgtttttagattttagattctgttgacatgctaagttttttctggattaatgcacaaaattttcttcccttataagaaaaaaaaaaaattccataatattgtttcattgcatttgaaatcaaaagggttgttgatttcagattcactttgttcttctcattagtcgccaaggaaa

SEQ ID NO: 42487 - DNA, 648 bp, Manihot esculenta
  Intron number 3 from transcript cassava4.1_029635m (locus cassava4.1_029635m.g) derived from phytozome v7.0 (chr-ID scaffold09709; pos 18368 to 19015)
gaaaggacttaaagctgtttatagaaggttgtattataagcctttaaacactgtttcccttttctttttattcaattttatgcactcttttttaacaactaaagcaactttattgttacattatagttaccatattagatcaacgttttattaataattaaaattttaatacctttctcctatctctaacgcttcatttatttacagaaaataatttatatttttaaaaatatttttccataaaaattatttactatgaaaaatattttccataaaaaatattttctgataaaataatttgttttttattgcttaattttaatttaaaaaataaaatatattaataaatttatatacaaaactcttagtaagaatctcaaagtatgaaaaatgacttatgttttttaatcaaaaaatatttttcatttactaaatttttcaaatactctaaacatcaaaatatgaaaaatatataaaatgttttctgtaaaacaaactgtatttaaaaatgaaaaattgtcttctaaaatcaagtagcaaattgggttgagaaaagtatttactgtttctttttgataatggaagtaggattacaagtgattgatatgtttttataacaaattgtaaaaattttgatggtgagtaggt

SEQ ID NO: 42488 - DNA, 964 bp, Manihot esculenta
  Intron number 4 from transcript cassava4.1_002987m (locus cassava4.1_002987m.g) derived from phytozome v7.0 (chr-ID scaffold03777; pos 93467 to 94430 reverse strand)
caatcaaattcataacaagtattcaattagaaaaggtatctttgtttattgtatatgcttaaagtgatatattattattgtaattccacttcaaagtcagttatttgtcgcctgtaatttatggcaagggtattatgtaactaaatgtgctacagatgcaataatgtggactcaactttagtttgtaattataatacctgtgaaacacgtgtcagtgtctattgattgtaaccggtgagtgcctaattgttatcgtaataaattattgattgcatcttttgtgatcttattaaggatttatgaatgggagagtttattccgcatacttttggttacatcaccaatgaatagttgattctataatttctgatagagtttcaattatagacttggcactgtttcttttgaggatgtccaaagctgagaataaagctcagagtatatgaagtttgattgtaaaataagctatatttagaagattagattagaaagttggcaacctacatgtgcatatatagattggctttttcgttgttggcccttgggactagccatgaggtccttggttcttaagttcgtccagtatttcaagaatactatttgagtagccacttggtaacttttttatcttaaatggaaagcagaaatagttattatagttcgtgctacagtgtgaaattagcttttttacttaaactgcctcattaagcaaaacatgaaatgttttggttgctctgagctgtcaaatattttggttaacagtgaggaaattttgttaactataaaagtgatgtcaactttctagtttatggtattgaaaacaactctctagtttatagtattaaaaaaaataaagcaatttgttttcgtatttgttaaaaaaaaatcaaggttattggcctggatatttgtaactcacattttattccttaaactaaaactgcagacacacagcatcaattca

SEQ ID NO: 42489 - DNA, 704 bp, Manihot esculenta
  Intron number 1 from transcript cassava4.1_019914m (locus cassava4.1_019914m.g) derived from phytozome v7.0 (chr-ID scaffold03071; pos 2422 to 3125 reverse strand)
ttatttgattctatcctcaagtttctccatatcaggttcttcacctttccctctccccctctctgttttcattgtccctttgcttctatgatctattcctttttctgttcatggccttctattgtttttaattaatttgttatgtttttgttttaacaagactaaaattgggtcttcttttagtttctgttattagtcttaaacaagattttgattgtggttcaaatttattaggttttgtaaattttcatccaatttaaagaatttccgttcggtgattttgtaaattccgttagtattttgtgaatttgttttttgaggttgtatgtagattagggtttcattgttatcggaactctgttgctaattttggttaaagtggttgttatcctctggctgttgcttggcttgcttcacttttaactaataatttggagttctgagtaaaatatcagaaccaataagcagctgttggttttcctccttttattttgaaagaaaaatattactcttttcctactgtggtggttgtttggcagaggagaaagtatcggaaaaaaaaaagagcttaaataatgtttttttaatgcaattgggaagtaaaaaactatcagatggaagagttcaatcatagatttcttgggtttcatttagttttaactaatccattgaatcaaatttacagatccagtttctaaacaaaa

SEQ ID NO: 42490 - DNA, 464 bp, Manihot esculenta
  Intron number 1 from transcript cassava4.1_000487m (locus cassava4.1_000487m.g) derived from phytozome v7.0 (chr-ID scaffold04151; pos 110715 to 111178 reverse strand)
gtttgatttactcagctagagatctgttaattgaggtatgttttattgtctatagtttttattttttttccgattttgtatgcagatcttggaaatattttttgtttgttggtaatttgttccgttttctcgcgattttggtgctgcttgctactctttgatctatcgatttgccgggctgttggtcttctggttgctatgtttcacttagatccccatgttagctttgttcaatttaatattgcagttcagttattattatcctttttattaaggtttttgcaagttattttctgttcatattattaatttaattcgtgtgcttgtttgtctactcgtaaatggcgtacaataactattctgtttctattatttgttattatttgtttctattctcctcaactgttgtattatttgttattcttgctcttttcactgccatatttatcttctgttgtaggatt

SEQ ID NO: 42491 - DNA, 395 bp, Manihot esculenta
  Intron number 1 from transcript cassava4.1_031435m (locus cassava4.1_031435m.g) derived from phytozome v7.0 (chr-ID scaffold04206; pos 567 to 961 reverse strand)
aaaaacctaaatatctatcgtgaccagtaaggcaagaaactcacaaaaattaattaagaagaaaaccataggaaaaaaaaaaggctatccgctgactgacacgtgtatagtctcccatccgttccctccgttctcccaccaataatagagaagatttagctttgaaaataatagttggcttctctgtttgaagaaccaatccacttctcaactgcttactcatcgtcactatcagcgacgctgactcagaaaaacacaacagaaatcaaataaattaaaataaaatataatataacctataattaataataaaaacagaatctgaaattgaaatattttgttgttattattgattataaggagaaaaggtggctgtggtggccgttccacactca

SEQ ID NO: 42492 - DNA, 575 bp, Manihot esculenta
  Intron number 1 from transcript cassava4.1_002716m (locus cassava4.1_002716m.g) derived from phytozome v7.0 (chr-ID scaffold06914; pos 1377442 to 1378016)
gcaagcagtttgctgctgaggagatttctgctcaggtataatcttaaattctgttatattttgtggtctttgatgcatttagattaatactgcccttggaattacttggttgttgatgttgcttttaaaataatgtgaactcttgtgctgagcagctctttatatgtatacaagtttgcattgaggaaagttgtttgtcgttgtactagtacgtagtatttaactttgttttatgtaggaattaacttggaagattgtggaatgaatggattagttatggtgctcaggttcttgaggcacaaggactaaattcttgcaaaagatattcattgtgaaaggtttgaggaggaacttgtattatttattttttctttttgaagattactttacactctcacccctatacatgattatgatatcggagtatgttactgcatgcatgtttctgttcgcgatttcttttgtgcttgagatacagttattggacttcataacttcgggttattaattaccaatgatttgttgccttttcaaatgtaggttttgaggaagcttgtggacgacgcctcaaagtt

SEQ ID NO: 42493 - DNA, 1065 bp, Manihot esculenta
  Intron number 3 from transcript cassava4.1_015171m (locus cassava4.1_015171m.g) derived from phytozome v7.0 (chr-ID scaffold08655; pos 72761 to 73825)
gtgacgcctcttggtgctttgagtatcattgttaggtaatttttatcttattatttttgtatttttcaaatgttcaaaagcattaacagctatttttttgacaactaaaatgtcttcctgatacctacacgagcatttgagtgccattttgtttaattttgtcaccttctgctagtgtacatagaactgatatagattaaacattttattcttctgctaagtacacatggatctacgccaaaatactcattgaagtggggaatgaaacattaccttatagatggattcaatgtgatggacgtgttagaccacccgccttttccctcatcctcactgttagtcagtctgattatcctcttgaaggcaattgcctttggaatagggtagctatctactgctaacctcaagctcaaattaccatcccccccttaagtaatggttattacaccattgccttgttaccctcatgttacaatgctcacctttggcactaattctaagaagaatctaatgcttcaatgggttcaagtgtctcctctaggtcttggaatttcattaccttgacgagcacttggtcctgggttcttgagccttgagatactctcaccccatcacttgattctatatgtttagtttactttctactgatctactcacattaaaattcacttctaaaccatggtttgagcagaaaatgtggcaaagtatgagtgaacaatcattgaatgacaactggcttgattatggatcgataatgaaatatatatttaaggatatcaacttcgccccataggcagcacataagcagattgaatgacattacatgaatcagtaaagtgctaagagagggatttatatggtaccaaccattgacaattacttaacctaaagtggggagcaaaacaaatttgatgtgctgaccatgggccctgatttttgggattttccagtaatccttttatttgttttcaactaccaacctttgagaattacttagtcgtgtttctcattatgcatttaaaatgtgcagtgctgtattagcccatttcttgttgaaggagaaac

SEQ ID NO: 42494 - DNA, 581 bp, Manihot esculenta
  Intron number 2 from transcript cassava4.1_015987m (locus cassava4.1_016019m.g) derived from phytozome v7.0 (chr-ID scaffold07012; pos 893233 to 893813 reverse strand)
gataaaagaaaaagtatgtgaagatattcagtttttgtaatgaaatgaaggatctatgattaaaaattgatgactattggcacattcaaaatggtttgcaaaatgtgcatgttcttatttcaagttatgtgtattgttttatacttctgcaactccttagttatgttatttgcaagtttttcatgcagaatacatatatctgataatatttgcagcagtattgtttaacatgtataaacataaaatttaaataacttctggtggcctttgatattaattttggagaattatgagcttaaaccagatagtttgaaagcattcttggagttgcgaacttgtcacaatttaacattgcccactgtgtttttgtcaaacatttgcagcaatacttgggtaaaacaaatgaactgcatgtttattattattgaaataatggtggctctcctttgttttagtatgctattattctggtagtcttttttatataatataaatcatctgatactctatattttaattgctaaattgagctatgcccttcattatctaatcttacgttttatgttcagggatttttcact

SEQ ID NO: 42495 - DNA, 839 bp, Manihot esculenta
  Intron number 1 from transcript cassava4.1_015987m (locus cassava4.1_016019m.g) derived from phytozome v7.0 (chr-ID scaffold07012; pos 893930 to 894768 reverse strand)
aacaaattgtaagtgtttaccattccatataggtttctgaaattacctgcagtcttataaagctctccgttcgctttgcaatgatgcattttcaagtcgttgacctctctagattgattggcgaaaccctaactttattttatgcttgtgtaattttttgctcgattcagctactacatagcatattttcggttattgctgattaattaatgtatttttaattttttcttaaatgattgtgtgaagaaatcgttgccattggaagtctggtggaacttttttctgcatatagaattcccatcagaacacgattttggagtgggagagagataggaaagacatcagtgctttgtgcttgaggcacaaaatttcagcggtaaacttgtgggtttgcctcattatatggttctcaatatggtcagtttatgtgaatgaagatgatgtttaacgtacaggtattagtgattaggtttttgtctgtaactggggtgtgaaaatatttactggtacaaatggcttgtgattttgtgcaaaatgtgagttagtgcgggatggaaattcaatggtgcttggtttgctaagctatgaaacatctcaatgttagtagaagcatgtatttaattgattttgtatgctgctggcatttagggaatcatgggtttttactgtgggattgattttgctgtcttagatgtgctttctactgtctccgacatttccaactcactgataaggttccataaccaaaaattatatgcattttttgagttgttgttgctatgtcttctgaggttgctttatctctcctttatatatttatttacaggccatcaaagaca

SEQ ID NO: 42496 - DNA, 703 bp, Manihot esculenta
  Intron number 1 from transcript cassava4.1_004278m (locus cassava4.1_004278m.g) derived from phytozome v7.0 (chr-ID scaffold04681; pos 139674 to 140376 reverse strand)
agttctctgctcaagattaccctgtttttactccagtaagtttcagagtccatttcaattgtttcaaatgtaaatcttcctttttgaacaaatatggtttcttggtttttgctccattgcttatattctttcaccagatgaaaatgtaaatgaagtattcaggcgcatgatggaatcaataaaactatggaatttaatttcccctattcggtcgagatgtagaagttattatttgcagtagttatttttctatttaaagtactgcttaataattaaggctggtagctgttacagtatagtttgtgttcattatcatgcttggaaaaaatccaaaatctaagtcttgcatttcactacgattagagcttttctggtcttcagaccctactgcagcctttgattttcagttcaaattcatgcttttgtaactgttttcaagactatattttttcctctatgaaaattttctagtatcagcaagtttctttggatctgcctcgctgactccaacaaaattgttgctttcaatctgtaattgaaatttttaatcgagtattcttttcatctatactaaggatatattacctgtttaattggtaaacgcatcttcttgtcttaattgatgttgcgagtttaaatagaatgctaattatatattatgtagcaatggttaaagagtttatttatttttttctgcagactt

SEQ ID NO: 42497 - DNA, 649 bp, Manihot esculenta
  Intron number 2 from transcript cassava4.1_011282m (locus cassava4.1_011282m.g) derived from phytozome v7.0 (chr-ID scaffold06512; pos 1616125 to 1616773 reverse strand)
ctgattttgacaaatgtaagttcttttatcgcctttaactcaactaactagtatgcaacttggcaacttgactaatatatgcaaaattgatgagtggaaaggaattaaattatcattccaccttcttttctacgcatgtagcgtaccttttggatgggaaatattttgttgctttatactccagacctgccagcatctattaaccagcatgtaaagttacatatcactctttttcttttttcctcccacaggctcactaatatatgcaaaattaacaagtggaaataaactgtattatagtgtacctaactttagaatgacaaagattttgcttagtcgtttatactctctgaggccagtaaccatgtacaatttgtaaatgacacgaaggtcactgcaggggcatttgtagtgatgaaactattccagctggtggattgaaatttgagattatgaattaattaaatctttgaatcttatacacaaaagtagatgcaaacatgacaaggttttaagtaaaattatggtatgattaaattgctatatgaacaatgaaagatatagcaggggggaaagcattttttcaatcaatatttgatttaaattagttgtctcttttggtatgctgtttttacaggtttatcagctg

SEQ ID NO: 42498 - DNA, 356 bp, Manihot esculenta
  Intron number 1 from transcript cassava4.1_015271m (locus cassava4.1_015271m.g) derived from phytozome v7.0 (chr-ID scaffold07762; pos 364207 to 364562)
gcctcgatttggggatttacagggtgcttctacaatccctcccaatgctaaaaacgaaaactgaagatctttgtttctcatagttcttatttggctttttttgtttcattattactattattattcggggttgttttctttttttttcggtggggggggggtaattgatctctggatctatgaagtttttgatgtagtaacttattccgcttgtgtaatttgagtatgtgattgtcacgatttttcaggggctcagatgtgctacgattaatccttgctgcttttagggttttgattggtggattttgtgcatgtttctaggcaatattggtggggcaggtggggcagactccatt

SEQ ID NO: 42499 - DNA, 913 bp, Manihot esculenta
  Intron number 1 from transcript cassava4.1_028306m (locus cassava4.1_028306m.g) derived from phytozome v7.0 (chr-ID scaffold06265; pos 102477 to 103389 reverse strand)
agtggaatctgggaatccaagagttgcttatttatgtaagttcataaaatgatgaaatgggctgcctttttgttacttttagtaattcagttatttccccttatctgcttttgttcaggcttttaatcgctttgtatttcttttaggagtatgtattgaagaactcatttgtaatgttatctctctctctctctcaaacaaaattgattccaaattctagtttttttaatagcagaatgtatgtcgagttgtgacagtacgctaaactaaactagctagtgtgggtttttgcctgttttgagtgtggtgctggatattctttgtgtcttaagtctttaaagcttacggtatcagactttgttgaaaaatttagcttattttttttctcatatctgctgcattctatatgccttaatgtgtcttgggtcgcctgagcttgctttgtgcattttattgcaagcttccatttctcctagaacaaatttatagccgtagttgcttgttgcatgtgtgtccatgagaatgagatttgacatatccctgcaacttcacatatgcaatataaaacatacttgcacatctaaaagtatgctatattgaggaattatattgcatatcatttatgtcttggtcctggttgtttagctgggcaaaataatttccagtgactttgcttaagttctttatcttggaaagtcaactataggttttggagtattttttggttctgaattttctgcagttgattgtaagtttagtttcctacttttgttaaatttaacttgaaaaacaacttcatctatatgaatttgagctcttccttgtgctcctccgagcaaacagccatttgtagtagatattccatttgataactgtctcattttttcctgttctcttaatgtaggccgatttt

SEQ ID NO: 42500 - DNA, 444 bp, Manihot esculenta
  Intron number 1 from transcript cassava4.1_004396m (locus cassava4.1_004396m.g) derived from phytozome v7.0 (chr-ID scaffold00341; pos 265003 to 265446 reverse strand)
aggttattcccgtctcgcctgaggacgtgccgcaggtccatattatctgtaccacttgatccttcgtactgtttgtgttcagcatatgtgtcattaacaacttgagattttgaatttctacgattatctgcttttggcaaccaaggaagcataataagattaactgataaaattgctttcttcgctgtgtacgcggagcaaaataaataattatgttgagcctttagttttatttttagtagtcatttggcaacgagagaatcctctggttcagctgggacctaattaattcatgagtgacagatgctcaatggcgctccttgtgtcatgattgtttcagtgttaggaaatcatgggtatctgcctctcatgaattagcttaccatttttttttctttttttttgtcagagagaagagcaagttctgcatttacagcatttagg

SEQ ID NO: 42501 - DNA, 787 bp, Manihot esculenta
  Intron number 1 from transcript cassava4.1_002299m (locus cassava4.1_002299m.g) derived from phytozome v7.0 (chr-ID scaffold06631; pos 129017 to 129803)
ctgtaaccgacgccatcccttatccttgtaagttgtaaggacagatcaaacacaaatttttgtcatattatgatttttgaatgggaaacttctaaatggaattttgattaattcttcatgtatttctattttctggttttgtatgaattttttggtgtttggtaggattttcttcttctctaattttttttaaaaaaaaaaaaaagctttgtgagattgcttttgtgtgggttttccaatttcttcaatggtttcggaagcgaacttttgggtgtcatcctgatctaagcttggttggaaaaaaaaatgtaactagattttgaagcaattaaatcttcttattgagtgatactcatgatattagtatcactaaaaaaaaagaaaagagaaaagaaacaccacaggcgctgaagtgtaaatgcatacataatattgttatacttctccatgacttcagtagaatgcatacataatattgttatacttttccatgatttcagtaggtcttagtgttatgcatgcataatattgttatactttattcctgatttcagaccatgttaataacatttatttccttaattttgctgctgcttttttggccacaaaacatgtaaaaaggcaccctttttttccaagacttttactgttcatctcttgattcatctgtgtatattttgatcatgtttcttagactttgattgtttatttgcacctttcgtttctttatttgactgctgtatattttacagctactcagctccatcaaatccttggcattcaagtt

SEQ ID NO: 42502 - DNA, 299 bp, Manihot esculenta
  Intron number 1 from transcript cassava4.1_008134m (locus cassava4.1_004106m.g) derived from phytozome v7.0 (chr-ID scaffold04882; pos 160688 to 160986 reverse strand)
gccccagagtttgcataaggtatgtatgtttaatttgatgtttattagttgagagaaaaaaaaagggaaagaaaggttctctttgattttcaactaggagagcgaacgataaatcactgatccgcttgggaacttaaatttgtatcatatttgcttttattctatccatgacaatctgtacttggactactgatcttcttaggcaacttatagctaggtttctcggataataatcatattgtccacttctgttgatggaatcaatcgtgtttgttctgttcattgcccaatatgcagat

SEQ ID NO: 42503 - DNA, 983 bp, Manihot esculenta
  Intron number 1 from transcript cassava4.1_002852m (locus cassava4.1_002852m.g) derived from phytozome v7.0 (chr-ID scaffold10173; pos 590598 to 591580 reverse strand)
ggataagagtctagcacttggtgaggataagaaaggtaagtcgtgggttttacatttaatatatgactagtctaattaatattagaatactgatatttcaggaattagtttattattatccattggagtttgtgattgaaagggatttgattttgatgttcatgttatcatatggatttgccacatatgaatatttcttacagggtatatcaatgaatgaaggaagcttcttactgtgttgatcttgattcaggcatattaaggaggctaataaggaaactgtttcattatatctggaatttcggattgcttctcttaattgggcgtatctatccaattatattttttaacacattctcttcttctatttattttccctttttttaagactaatacagattttcttttctgccacaacttatatcaactataacacgctcctttttttggggtgcgttctgaccatggaggcaatgtaggtgtaataacaaagacgttttacatcttagcagcttgttagatttgtacacttgtactgcctattaatatgttagttgattttcttcctgtttatattgccaaacagttgggcactgtctgtgcagaatgacaagtcctagggtcaggatgcatttctaggaagtgaataactgttaaaactaagaatgttactatgttagatgctatgttttttccccttctctcctatttttctcttcattttgcttgtgaacaagattgacttctaatgtttcccccatgtttgtgaagtgaaaatagtctgtcttttgatttgagatttgattctcttaatcttttttgttttcctgtagaaaaagctatatattttgccttattaacatcatacaaaaatgaaattaagtctaagtttcacaatatgaaagatacaaaatcagccgaagctatacctaataccttgtattgaagacttcttttgacttggatgttcattctgggagcag

SEQ ID NO: 42504 - DNA, 498 bp, Manihot esculenta
  Intron number 1 from transcript cassava4.1_033176m (locus cassava4.1_033176m.g) derived from phytozome v7.0 (chr-ID scaffold11746; pos 319154 to 319651)
gggaagttcgatctttctcacaggtagtattaatgctctccttcttcagactaccattgttttgaacctttttgttactgggttttagtgttttttttttattttttattttttttatgatgaggctttcggtttgtggatttgttgtcttgcactttgtatttgttttcaatatacgatgaacaagtgtttgcgataagtcctagatggactaatattctttttacgggtcagcttttctatttccaccatctgatgtcagaggcaggggcattgttttctcaaagtaaatgcagcccgtctagtagtcgactctttgcttaatgaatttatagaagataatcaaatgttttctctcctgtttttactgctacaaacaatatttatttgctaacttcgttggcttagaaagtttgaagcttgatgatttttgttcatcatttaatcaatatttctctttcagaattgttctagcaccattaaccaggcagagatctt

SEQ ID NO: 42505 - DNA, 304 bp, Manihot esculenta
  Intron number 5 from transcript cassava4.1_022562m (locus cassava4.1_022562m.g) derived from phytozome v7.0 (chr-ID scaffold06914; pos 69319 to 69622)
aaactataaaacaaggtgataattatctctttttttttttcttcaaaggatttaaaatagtgaatataaattttctcattaatatttggaagaaatgttgaaaatgcaaatattgaaggacaatttgcctattgaaaaaacaaatttgtccttaattttcttttttgtcaagggaaagaacgaccttcataattcttctagtcctttaaagaagttataaaattatatcaaacatctaattttttcttttttcattgtaaaaatttcaggcttacaaccttttgttactatttttcattgggat

SEQ ID NO: 42506 - DNA, 1026 bp, Manihot esculenta
  Intron number 2 from transcript cassava4.1_014605m (locus cassava4.1_014605m.g) derived from phytozome v7.0 (chr-ID scaffold00341; pos 1013008 to 1014033 reverse strand)
cagataatcgaggaagagcagcttcaattgaaaaggtatgttctcagcgttttccctctctattctaatttagatctgttacttctggtgttaaataatctgttatagtattgtcaagtgctgtatgtggtccatatgagtcgcctcctataaacttccatgtcaatactcttaacatattcaaataatgtagaatcgctgttcagtactgatttggcatttctttgatgccctttttagctgttgagaacaataaattatggagattagagcttcattgagtttgaattgtgttaacagtttatcatattttatacttagcttactgaatttagtgcacctcttgtcttattcaatagttggctgctcaaagagactaaatctccgtctctttcaatttccctatattctaagcatcaaaacagagcataaatgaatgcttgtgactggttgtagtttagatctagcgaaaatgtaaaagtattggcatcatgttagattgccaaattgaaggcaaggcttccgtttgttaagtacaatatgctaagaggagctgaaatataatcatctagagatgttgaaattctgtgcactaggcaatgatgtttaggtgtctcaagttggctgaaccctggggtctactttaagtgtcttcaaatttccttatctcaatcctgccagattatctatttaagtgagggagcatgctgtaatgtccctccgctttccaaggggtggaacaaaatcccacatcactgtgaaaagaattatgaaagagatttatataatcctagctacaattactaaaataacttcgatcaactattttggatgaagttttaaaaggtctaaaagttatctgagttagttggagctgggttgacaccatattagtaatgtccattatattttttttattgttcttgccggctgtactataattttagtgtgtggatatgtgtgagcttcctttgatactgatattttattgtaggtatattgaggaaaattactcaaaaatacgtg

SEQ ID NO: 42507 - DNA, 703 bp, Manihot esculenta
  Intron number 1 from transcript cassava4.1_002507m (locus cassava4.1_002507m.g) derived from phytozome v7.0 (chr-ID scaffold08271; pos 44574 to 45276)
ctcggctcatcttgttaggtgcctgtttggcaaaggttcagaggctaaaaagcattttcagaaaaaaaaaactatgctgttgataaaagactgaagaaagctgttttgttattttgagatttttatgattaaaacgtgtcaaatttatttttaaatcaaattttaatactcgcaatctaatatatttatagagcttttctcaacaatagttctaacaacagtggcaaatagatcctatctctaactaactattcctgatccataggcataacaaattgttgacaattaagtgaagaacttttggaaattattttgtcattattatagagatatcgtttacgttcctttcaaattgagagttagagaatttgtttctcttaatccccaagcttcctggttctcactgctttgccgcactccattaatggctggagagaattcttgaatcatttgttacttgtgcgcgttggtgacagcccctttgatgacattatccaaatattttgttattatagatgtacttgcgtaatttccttggtatatcttcatcttcaatctgaaaggctcacaataacatatttaaattactcttgtttctcataggagtgactgtcttttagcttcttgtagtgtaatattcgcttaaccttttttttttttcggttttctcttggataacttttgcagccgttggcaagtgctt

SEQ ID NO: 42508 - DNA, 738 bp, Manihot esculenta
  Intron number 1 from transcript cassava4.1_027291m (locus cassava4.1_027291m.g) derived from phytozome v7.0 (chr-ID scaffold10241; pos 283449 to 284186)
tgagccctgggagcttccgggtatgtacgctttgtttttgccctttttactgttttttcttttcatttcattgggacatggcaccatcacaaaataagagtatgcttttttattttatttgtttgtttttcacttggcttgtaacattcaagattctgcagaagtgtctctcttcattttcagttttttcagtttttcgtatgtgaagatgcatagtgttacatttctttgattgttcttgattgagtaaaattgattgatctattgagcttaggcccataggctagacattaactctaatgtaacgcagcaactgcttattttcctcgagatggacgattagctagtaaacataatctgcagccattaatatactctgtcgctctttcacaaatctctttgtaataagacttcatatatacgatcttcatttgatgattgaactactgacattaacggccataaaaaagatcaccttaagtatattacgttggagaaacgaagcaaacgcttgtcttggttaaagtcccaagcttcttgatctattaatttcttgctgatatatatgaatattttacttattaatgtcgctgtcatgaagctgagtatgatacacatatattttggctagaaaacatagctatactctgaaatttgattaacttgtgacgaacacaatacaataaatgtgcatgtgataatggtgagtctgtgtccttggtttttgttgttaatcag

SEQ ID NO: 42509 - DNA, 542 bp, Manihot esculenta
  Intron number 2 from transcript cassava4.1_010501m (locus cassava4.1_006297m.g) derived from phytozome v7.0 (chr-ID scaffold06512; pos 1475277 to 1475818)
ctcgaggttttgctgtcaagttctacaccagagaggtaatcggatttcctcttgtttcgagaaattctttttttcttcctgcttttattttcggtaaaatctttttttttcttcattttaaagcattcgcttttacaattgctttctgatgacttttactgttgaaaaggttgaactctgaaaagaaaaacttgctttctttttccccatcgttttcatcagttaactttcctagaagattagtttttcaatgaatcagagaaattctttctataaatatgctcgatacatgcttgtgttggttattagactttataatttgatgctgcctctctattttccttgactgaaattggtgaagtttttttcatgtgaatttccacaaaggaatcatgtagaacttaaaaccaacaacgtggcctttgtaatctttaagctctgagcttcatgtttctgcgttcctgttcaagcggatatggtttcattaatttgaggttattcactgaaccgttcgttaattatgctttcagggtaactttgac

SEQ ID NO: 42510 - DNA, 868 bp, Manihot esculenta
  Intron number 1 from transcript cassava4.1_019837m (locus cassava4.1_019837m.g) derived from phytozome v7.0 (chr-ID scaffold06914; pos 1478404 to 1479271 reverse strand)
attgttctcttcaatttctctgcaattcatttcaggtttgtcttttagatctctttctttcttataaaatttcttttttttttcttcgtattttcatctatgatccattaattttatgctgttttctttgttttttttaatataatttaaacctttagttttgttaatcttgttattgccttctcagaaatttgagttctcaaaatttttgtacacgctttttgattgttgttgtagctgctgcaatcatattctgttcattctacttgcgattacatgaaattaaaacacttagagggcttttttttccaattttgtttcctaggttggattgaggaaatgaaaaggaaagtcaggttggtcagtttgagcaaatcagaaactacccaatgttctaaatgcaaaaattgatacttagtgttaacagtagtggcataattgcatttggggtgggggttataatgacatattcatcaaatgggttcttttagaagaatcatgataatactttatgggatatgatttgattataatcactggttcaatgaattcttgtgacaaatccgatgggaggaaggatatgtcgcccgacattgacagtcaaatagtattttgttgattcccagatggaactttgttcagttggtaattggaaattgcttttttgttccctatattttgcaacttcgttctggcatgcttagaagggaactctgattctgctaatattagtagctttccagtgttaagttttcacttatatctccattttgagctgttcagatctctctccctacttgcttggtgcctctgaaaactgatctggttctaaagttcctctattcaggcatttctggtgaccccaaaa

SEQ ID NO: 42511 - DNA, 538 bp, Manihot esculenta
  Intron number 1 from transcript cassava4.1_019427m (locus cassava4.1_017796m.g) derived from phytozome v7.0 (chr-ID scaffold00341; pos 348505 to 349042 reverse strand)
atcggttcgtacattttatactctatttctcgtttatgtacattgattctttgctctgctggaggaaaatatcggaaatatttgttttttggggggcaagagaaaactcgcatagtattaaaatgctctaggaaaaattccaatataattttaagtttttcattaaattttaaaattttaattattattacatagaataaaattttctaaattaatgtgaaataaatttaaaacataagtgaagcatagtaatcttattatcatgactagtcattccattcttaacccatgacaagtccttgaactctgatttctagttgttgatcctgtcatcattcattgtgaaaataagaccatgttctgaggaagtgtaatcgttttgaattttgatgctttccacttgagttttcatgttatgtctcttctcattttgacttggagctggttaacagtttgtgagagttccaacaagctttttgtcaaataattacctgcaagtattctgttcatttcttgtcagtcatagcattgggagtag

SEQ ID NO: 42512 - DNA, 262 bp, Manihot esculenta
  Intron number 2 from transcript cassava4.1_006636m (locus cassava4.1_006636m.g) derived from phytozome v7.0 (chr-ID scaffold00341; pos 1079223 to 1079484)
gagtgagtttctcttctctctcacccacaatctcacatgtcaacttattattcatgattagtatttcttcacttgatttgagtttgattagattggaactcgacaacgagacaatttcactgtgcatacttcttttgtttaattttactttttttatgaaaaagctggggatctattaattcggcataccaaaagtagttggtttcacatgcatttcaatgatgcagttatctgaacaccggtgatccaaaagggacagatt

SEQ ID NO: 42513 - DNA, 923 bp, Manihot esculenta
  Intron number 2 from transcript cassava4.1_016572m (locus cassava4.1_016572m.g) derived from phytozome v7.0 (chr-ID scaffold03364; pos 26291 to 27213 reverse strand)
ccttcatttttggggtaatcgcagaaaataagaaggtattcatctcctccttgagtctacccttcttttggattttaattatgtggacgaaataagaagaaattgaataggcatagtatcaaacacaaagctttctttttccagcttttttttttttcatatgttgcttttaagctttgaaaattgttaaaacaaaattttcagtttaaaataatagtttagaagctggtcaatgtataagctaaaagcaaaggaaaattagagatggaaaataaattgaaaaaataggtagtggactcatgaacaactttttcttctaattagtgacaaagtgaatggtaaaaaattaaaattacatttttattcttatcataatttattttaatagtcaaaataaagagcaaaatagatattttgctatttaaaaagcaacttttaacctttattttcctttctatcattcaacaatcattcaaataaaggattttctctcttatttttctcgctttattttctttcctccctaaaaaacttttcaaacatagtgttaatataaataatatcttattttctttcatttcactccaaatataagatacattttttagttaatgaagagaaatagagaaatataattctcatttgttttcattcgaaggcaatttgtaattcacaccactaattctttttcaatacatctcaatctgtttactgtccaaacaaaggaaatttgagaaatcacatttcttctctctctttcttttctcttctctccattccatcaaaacaaacaaaggttcatttcaattagacactttatctatatatttgctttttttttttcatttatattttgtttttcacttgaattgtgttgaggtgttgtagcctatagctggaactcccatcactggtaaaggtgt

SEQ ID NO: 42514 - DNA, 623 bp, Manihot esculenta
  Intron number 1 from transcript cassava4.1_020256m (locus cassava4.1_020256m.g) derived from phytozome v7.0 (chr-ID scaffold02960; pos 33980 to 34602 reverse strand)
cctgacgatctctgcttcttatctaaggtctgctcataatcgcctttgtaaatttgttcctttttctttttgcttgcatactgtcttttgttttatgcatatttttgtctgtgaatattttttttttaatttgtttttggtgataaaatgtaattttgtggtttttttatgatcttgttttttttttttaaatatcatatagtgttcccatatttacgggtttgctttctgtatctattcagaaagaagcaaacccagattttctgttcagattgagatataccaccaacaagatattagatatattggaactcttctatgtgggtaatcttcttttgacagtaacagtagcttgtttagcttgacttcgattaaaatgtacatattggattttacttggttatttccatcaatatcctttactgttttcttttgatttgctcttttactcgtctgggtattagttttggtgctgaatcctagctcataaacattgtaaggcattaactttgggaattttctctcattcagattgcttgttaatttgcttttgtattgtttaacatatgggtaattcatgaattacaggatactttcatcataaaggcccccaagaagtctac

SEQ ID NO: 42515 - DNA, 253 bp, Manihot esculenta
  Intron number 1 from transcript cassava4.1_029046m (locus cassava4.1_029046m.g) derived from phytozome v7.0 (chr-ID scaffold02019; pos 65422 to 65674)
gggaattattgtattatccctttccttttttcttcccataacttatactatgagatggattgtacatgtggtttgtttcaactatatgaaaagttaccatgattaacccttcaagatgttcttttttcattaaaacaaaatctcttttcttttagttttatgcatgatgaattttataaaaagaatttcatatataaaaacctcacatggtttatactggaataacttttgtttcttgtttgtttttataggt

SEQ ID NO: 42516 - DNA, 335 bp, Manihot esculenta
  Intron number 1 from transcript cassava4.1_008247m (locus cassava4.1_008247m.g) derived from phytozome v7.0 (chr-ID scaffold01551; pos 1573857 to 1574191)
ttctaaggaaacaagctccactcacagtgaaacaggtgggttttgtgtttttttccactgttctctgcctctgcatttcccttaactagttttctcttttcgtctctacaattatgagttaccctgttgggctatgcagtgcttctactgtagtggctgtaaatctgcattttcaactaataaattattaatgtcttcaagtttcatcagccaacataaaggctacatatgtgcatgtaattatttgcttatacttgagctgcacttctctctttgagctttaatcagtttgatgtgtgattcctatatattaacacaggagaagttctgcaaca

SEQ ID NO: 42517 - DNA, 369 bp, Manihot esculenta
  Intron number 2 from transcript cassava4.1_008247m (locus cassava4.1_008247m.g) derived from phytozome v7.0 (chr-ID scaffold01551; pos 1574259 to 1574627)
ggcttgcctctcttggagagagagtataggcactggtattggacccttctctttctcctctttcttctattcccttcagaaagcctcgtatcaatttgtctgctcctactcttttttcacaagcatctgcttttctttttgtttcattacgatagaatcttgcttttctttgttttcctttgaatattgagcgttaaagtaaaacaccccgtaatcattgatgccctcaattatcttctaaaaagaataatgttttgatgcccttaattcaaaataaagaacaagttaactaattaaaagcaaatccctcgcttttttaattactgttttatatatatttttttttgaatgcagagcaactgatagcag

SEQ ID NO: 42518 - DNA, 1028 bp, Manihot esculenta
  Intron number 1 from transcript cassava4.1_019840m (locus cassava4.1_019840m.g) derived from phytozome v7.0 (chr-ID scaffold06550; pos 469255 to 470282 reverse strand)
cctttccttcctcttgaagaaggagctgtttcctcgtactctctctctctctctctctctctctctctctctctctctctctctctctattgctatttctttttcattcatgttgtttcttttgcttgatttggctacctcattttcttaatcgcgtttgttttctatctacttgattgactgatttttttttatgaatagaatattcgttctgatcaaagaactggatcagtttggtttagtttagaattgttctaatggagctaaatttttgtacagtgagttgctgttacgagcttgagtattttttttttttttaaagaagagaaaggaattattaataaatatatttatgcctgcctgctgttcactgttgaattttcacttttcaatgatctgtgatttaaagcttgaaaattattggtatgaaggcattgcagttgggttactgatctgtaacattttatttttagtaagagaaaatagctcctccttttgtttctgtgatccgaagcttgagaaattggaatgtagctctggtgaatgtttcttatattaatgctagctcatggagcgttacacagctagaaatgaccgtcttgtacctttgcgcagtctctttgaatatttcgcggcaggggttggctaccttgcctataagtttaaggagatctggggaaattggagactgtttaaatgtggtttggtcacatctctcccgtaccttggaaaaagaatagtcggcatagatgagataccccggtctttgattggtcatattctgcattattgtttagaatgttgctcattggtaactaggattattttgagttccttgcgttatgattacatctccctctccaccgccccaaatggagatgaatgtaatatcttatttactgttatatctgagtatctttagaattttttaactgtcatccctgctctttttgtcagttatttcataatatatctaaaactaatccgattcttctttgtagggaagatctttgctggaaagtcctctt

SEQ ID NO: 42519 - DNA, 650 bp, Manihot esculenta
  Intron number 1 from transcript cassava4.1_005582m (locus cassava4.1_005582m.g) derived from phytozome v7.0 (chr-ID scaffold06914; pos 477076 to 477725 reverse strand)
gccgttcttatatcaggttcctttcaattcctttctgagttatcagataaaatgtgtgatctgaaggatatgttgagggtcttggatttttctagtgaacgtattggatatgatgttgtatcttggattgtgctcaaaattttaattaatagatgatagaaacataagatctgaagttgcctgttgagtttaagtgccatgggagctgaaattcgaagctacccatttcttttctttccaaatgtcttagccaaattatgatattgtaatcttattaaagcgatctacgtctctgtctctactgaaattatagaaacggaagactgatttctgtgacttcgcaaagttgccgcatggcgttttttgctttcgcttagctgcaaaatcaacatgttagggaggaaaatcaagtctggctgagagagtgatatagtttgatattaatggttcgtatactggtgtaaatattcatcagtggatttaatagcgttcttgttcctagtaatatatcattttctcaaagatcatagattttgtccactccagaattctcctgcttgctgaattcatgcatttatcttgatagtttgatttattatataaatgtgatttgaacaggtttagggatatcactttttggaggaccaagg

SEQ ID NO: 42520 - DNA, 899 bp, Manihot esculenta
  Intron number 4 from transcript cassava4.1_014655m (locus cassava4.1_013997m.g) derived from phytozome v7.0 (chr-ID scaffold06638; pos 6050 to 6948)
ggtcttaatccaagtgaataccagtggtgaagaatgtgagaaactcaagtcttgttagctgtaaactcctttaactgttacatcctcaatgattgccttaatcaattatggtaccatgttattactaaagtgtaactgaatgttagtttcagagaatctgcctttgtggagtcttatgtagtgaaggaatgtggaacttgcctgaatgagtttaactggattttgagattatagtaacatttatatttaggatacatttttgtataacatcaaccaatatataaatggtttgaacttgagttcagtgattacttgtaatattttacacttgttgattttatctatgagagcctagctttactaattgctggctatcaatcaggggaaaaagttacgttgattttgtaacagaagagtcagttgatatgtttcatctggttggtttacattgcttgttaagttacacaggacatttccttaggttatgcacttgattaaagatttcaatatctcaaattctgttttggactttgcttctagaatcattgatttactatttggagagttgtctttttccatggaactagcatttgttcacaatgcatattgtctatcaataacttggcactggcagttccatattttctcagaattaaaacccgtacctgccaaacaatctcgtcattttatttgtactagtcagggtttggagcagactctcaccctatttaccaaaaagtttgagctttttctttgggagatttcttttgatctaccaatcttgtatttagtagacaatcccggttaggtggtcattgatttggtggcttcagctattgtttgatctgtgtcattttgccgcagcaaaatctggagttgaaccttcagcgtgtgttgaa

SEQ ID NO: 42521 - DNA, 463 bp, Manihot esculenta
  Intron number 2 from transcript cassava4.1_019740m (locus cassava4.1_019740m.g) derived from phytozome v7.0 (chr-ID scaffold01127; pos 613259 to 613721)
ttttgttagggttttgaaaggtcacagcaacgaaggtatggaactctccctgtttcttcaactctaattgctaattttctgttactcttgaagttatctacttctgattagtgtatccaatagttcgtgtggcttattaatgaattctttctgttttctgctcctatcaatttgaggtttggcatttgtgtttcgggctagatagagcacaatattgaccttataaaatttttcattttgagtgtttagcagattgtcacaaacaagttttgataaactacaattcgtcgtataaatttactcgttttgctttttgttataatcctcattatgtgaatatatttgcttcttgttgactctctctttctcccttttctttttccatttatttttatttttctgggtatattttggttgtaattatgtagaccacctgggtgcatccgtggttatcggagaccac

SEQ ID NO: 42522 - DNA, 866 bp, Manihot esculenta
  Intron number 1 from transcript cassava4.1_018743m (locus cassava4.1_018143m.g) derived from phytozome v7.0 (chr-ID scaffold01551; pos 801970 to 802835 reverse strand)
tctacaagtacaaggtaacaataaataagctaaatttggtcatatatggatgttttccgccaattgcttttcagtctttagaaattgatatatatgaatcttggagggagggctgggaactgataaattagtaatttgagtggatgcacaaaagggttcagaaatagtcaatcaacttgagcagttgagttaatttcaatttttatttttatttttaaatttttttttgtctctggcgtcgaagcgtgcctagttagtttattcacgttcttcattgatgtgcaccagttttctgttgcttatgagaatgattaaaggtgctggtggaagagatctcttttaaattagataagttttacttgtataactgttaattgttaaaatgcttgcaatttttttttctcaataaaattccacaagctgatttccaaaatatatgaactgagatatgtgaatctaaagcctgctaatttaataggaaaatgctgaaagtattggttgctgctagttacttgctcatcttccaaatatttttatttatgattcaattcattttcatgctgttagatttagaaacatgcaaacaaatttggttttaaattcggaccagttgcatacagtctgttcctcttttcatattgctttaccctgtaatgatgatttttatagttcttgatggcatttaaatgctaatgttatgacattctactgctttgcacgtcttttgatcttactcttcatgttcaccaattgcttctcaagcacaaagatgctaataaatgtgtttagttatataactatcagtttattatcctggctgttaatttcatgttggatcatcattgttgctctcgttgataggttca

SEQ ID NO: 42523 - DNA, 636 bp, Manihot esculenta
  Intron number 1 from transcript cassava4.1_000016m (locus cassava4.1_000016m.g) derived from phytozome v7.0 (chr-ID scaffold03874; pos 271485 to 272120)
cttgctgctggccgtaaaaaggtattccatgcatttattttgcatattgatttaatacgagtttggttgttttagactcgatgcaattttctggcttttaattgcccaccgactaaaagagaagtattggattcaaatttgaagtcaatgagagtgtcacctgcatttttagagtgcaatacatgagttggttgatactttgatttttctttttattgttacttttctgaatcagagaaaataatgcttcctcttttctattattttttcctattattttttcgccattatacttgaatagtgtttgaattctgcttttctagaggtacagacaagttgaatgataagtagaaccataaagaaagaaaatgtattattgcattataattgctctcttttaattgggaagtcaagctcagataagttaactggttacaacttacaataggttcacttcaactggatcttgtcttctccctaggattgagaaattttgcttgttttgtttcttctctcccactagctcatcaaccaaacagggcgttaatgtgatttattgggacctaaacgcgttgtttttaattatcttttatgtcatcagcttcaacaatttcgtcagaagaaggacaataaagg

SEQ ID NO: 42524 - DNA, 512 bp, Manihot esculenta
  Intron number 1 from transcript cassava4.1_012779m (locus cassava4.1_012779m.g) derived from phytozome v7.0 (chr-ID scaffold02893; pos 1237 to 1748 reverse strand)
gctttgttagctcttccgtcggaatttttctaaaggtaaatacttttctcttctctatctctctccctctctctctttttttcttttctttttggaatgaaaatttccttttcttttgttgttagtttgagcaaatcaatatatggtgtttattcaattgctttatataaacttttaatgggttctcgtttaggttttccgcgtttgatccttttttctagaaaaaaaattatattgacggttttctttcttgtttccgttcagttggtcttagaacttaattagattaatttaagctttgtttcagttttcttctctggattgatcaacttgtctggtgttattgtgtgagaaattaattatgagtaattgggtttgtgtgagattctacgttaatttcttgatgaaagttggtaatttaagcttaagaattgcgtttaaatttttatttcttgacgagaagtagagtgcatgctgttttgactaatattctcgtgtgcttttccatgaag

SEQ ID NO: 42525 - DNA, 355 bp, Manihot esculenta
  Intron number 1 from transcript cassava4.1_028830m (locus cassava4.1_028830m.g) derived from phytozome v7.0 (chr-ID scaffold02931; pos 25693 to 26047 reverse strand)
aaaagtcaaccaaaagggggaagttctattacctacaaatccttacaaaatttctatccaaatactgccaccaatagccaaacaagccaaacaaaccctgtaaatacatatagcaagccgtactagtcataccaacatccacctagatcattaaataatgataagaaaacaaatttaactactactaaaggtagtaacccttcttctattttcaattctaaaaccatagccacaacaacctccaaaataaccaacccacctattaagaactaaactaaatcctattatagatatggagataaatatttttgagggcatcatggtaaatccaaagcactaaatgcaatatgtatag

SEQ ID NO: 42526 - DNA, 479 bp, Manihot esculenta
  Intron number 1 from transcript cassava4.1_007211m (locus cassava4.1_007211m.g) derived from phytozome v7.0 (chr-ID scaffold06711; pos 106768 to 107246)
atttctctctacctcttcacgcttaccctcttctggtacgtgaatttcatgccagtttcctcttactctctctttactgcctgtctgagaattactaggaccttgtttagtatcatgttagtgctgcgtgtagatgtgttggttgatgggggggtgggggggagagagagagagagaaagagagaggatgggtttcttatgcctgcttcaaattgttgattaattttccttgtggttttactcactcgcaattcatatcccaaattttgagaaaatgtggaaactttagcgttgattgttgtatgaagattcatttctgttctgttagggactgtgcgcttctcgagtaattgttgtttgattgattcgcaagactttttaaacgtatatggttgcctagatgctactactattttagtttgatattcaaacctttattgatttattggcattttattttggctttgacacagttattt

SEQ ID NO: 42527 - DNA, 990 bp, Manihot esculenta
  Intron number 1 from transcript cassava4.1_008028m (locus cassava4.1_008028m.g) derived from phytozome v7.0 (chr-ID scaffold04175; pos 313174 to 314163 reverse strand)
ggtttgcttgggatattcctcaagctcacacgaaggtaatatttgttcttttttttttttaaagcaaattttaaattggatctgtttttgaatcaaactcttgtttaacggtttgtttgtttccctttcaaaaaattgtaggaataattctccctgatggctctgatttttcttttatggattttgtgaaaatttttcatgtgtcttcaatcagctagagggagaaattttatcctttttacataatttttgaataatgaaacaaatggtagcgtacgttgcaagggaatgatgaaagcttggaggatttagggtaatgtaatttagggagagaaggagagatttgaaacaaaaaaaaaaaggaatgatctttcaatttccttctgggaatattttcctagaaaactgaatttactctattgagtttattaaattttgttaagtcagtccagctggcctgatgaaattgacaattggttgattaatgtcaaaacatatagtcaggttctttgcccaattatctggattattgttcaagatggtctttatttggatcttgaagattttccctgattttgtagtttaaattttttattcttagcatcacaaacagggtatggaaggtttgaccctgcatagagcaaattggagaaggaggggttatatagctaactcaaactagtgtacattgagaattgttcagttgagtttcgtcaagttgaatatataaggataggtatttgcttatataataatttcatggacatagaatccaattgctggcattttctgatgttcattttttttctttcttgtgatgttcataatttgattgcttaatactgtaaaaaattatggagttgtatttggtctggtgcaagagaacttaagggaagtgaattattaaggaaagggtaatttttttaatcattgttatgtgttgcaaaaaatgaacaaatgactgtgtgtaggctcagtcaggattgtatt

SEQ ID NO: 42528 - DNA, 833 bp, Manihot esculenta
  Intron number 1 from transcript cassava4.1_001670m (locus cassava4.1_001670m.g) derived from phytozome v7.0 (chr-ID scaffold12594; pos 33469 to 34301)
tctggaaaggtgcaccaaatacatcctggttctttcaattgttccgttttgtgtttctcagctccttcctctctaattagaccaaatagttgtattttagcttttagtccatctgacatctttgatgttcctctactgaattaatgcaaagatggattagagcagacatttggtttgttaatctggtaacttaaaattagaactgtcatctgttggtggttgcaacttagaacaatgcccttttctccactcttatggatctttgtttggaagaaaggaatggagtaatagacaccatttacctgtccataattgcaataaatctttaatctgtaatttgtgaactatgaaactgctatcctgaattttgtaattttcctctgtgtgtgtgtatatatatatatatatatcaagccagttgatttaccaagttggctttaataatcatctggaccatttcactaattttttatatgacctgttgaagattcattatagcttagttttatcattcaatttaaccattggctcttgcttttgccttctaagttaaaaattttttgccctttctttctagcggttttagtgggaagttagaggaatccttttacagcaataccatgtccttatgcggttgtagttctttttttgatgattgcactctattctatcaccacagctcaatatgaatatgagtttactgatagtatttacattcggaaacttttcttctatgtgcacataatgatggccttcaatgagctgatgattctaccatcaacttgtgtatacatataggaagaccgagggaacatcttgcgagcaagggcatc

SEQ ID NO: 42529 - DNA, 862 bp, Manihot esculenta
  Intron number 2 from transcript cassava4.1_025619m (locus cassava4.1_025619m.g) derived from phytozome v7.0 (chr-ID scaffold02853; pos 522061 to 522922 reverse strand)
ctagtgggagacgtcccctgggagtaagtctcttcaacacccaacatcacttttcttttcatttatgccccttcatcaatttccacatgaattaattgttcatatattatctgttacatcatatttttatattcaagaaatttattttatatatttatattttaattttaatttttaaaaatacccatttcaaggatttagattttttattttttttgtagatcttgatgtccattaaaattcagacataattccaattagacagtttattgaagaaattacacatatgtaattatatatgtttttgaatctcaagccatcaaacttgaccattacaacattttggttatgatgatgttctcaactatgtatcctcactaaagcttcacatgatctgtacaatataattttggttttcaaaataatatttataaatttaattattttctttatttttaatacaaacaaggccaaaaattttttttttttttcaaatgaagagaaagtgtcaaatttggcgtcggaagatcctagcttacaggtatacttctcatgttaattataaataagcattgccgacattcacaaattccttgggatagtgtttgggtaaactgcgataatggcctcaaagaccatatctggtcaagacatggcattattacagagaaatattcttcctacatttccaaccataacctttttttttaaagctacattaccaaaaatgggtagctcaagatttttttattgttaatctcaatttttaataaaatagaaatttattaatggtgattgaagagattttaaaatagaaatttattaactgtgattgaagagatttgtttttttttttgacagg

SEQ ID NO: 42530 - DNA, 680 bp, Manihot esculenta
  Intron number 1 from transcript cassava4.1_004399m (locus cassava4.1_004399m.g) derived from phytozome v7.0 (chr-ID scaffold06011; pos 265878 to 266557)
cccgcatcgaaagaccatctctagttcaggtgagtcgatctaaattcacacatatctatatctatgtttatttttaacaagtaactagccaatttaaagcaaatttagacacgggaatttaagtaatgatacttagagatgaagataggaaaaagaaattgattttttttttattgaaaaaaatttcaagttaaaaggaggaacaactaagaaaaagaaacagcagaaatcggttaaatgcttcatcgagaagtatttttggattttactggctattctctcaactattgcgttacagttgttgttttgaaaatataatatcaggaaacgtgtcgttgtgttgataaatgagcggcaaccccttgagcttgtaattgtataaacccaaatctaggcaaactgaacccactttgagcactgcctggtacgtgcagattacaaataaaggaaatttcttgtgattttaaactgatagtaggtgttatttaacattctgtcattccaggcatttatctttctggacttgtcaatgagaaatatgaaatttgtttgagttctaattttgaaattgccaatgatttttgctcttggttgcatcatttttttgggggtagttttataatggataatggtcttgtattccaggctgcctgtataccctcaatactttcaggaaagga

SEQ ID NO: 42531 - DNA, 951 bp, Manihot esculenta
  Intron number 1 from transcript cassava4.1_023663m (locus cassava4.1_023663m.g) derived from phytozome v7.0 (chr-ID scaffold08930; pos 46146 to 47096)
aggtatatatatatatatattatcttcctgctttgtttcctttaatcttggtttggtaattgcttcaatgccctttccccctcttgctgttgcttcctttctgggtatttctggttctgtttttggttgttctgagatgggtttccattttttacggtggtttttgcttttctgttgtgtgttcttgttctggtgattgattcaatacccattttctgattcctagctcctccttgtttgatgattgtttcagattaaaataaaataaaatgttttctgggtattaattatttttaggtctacattaaggggtttgcttgtgttacatcttcatttgttttctttgtgcaaatttaaacttctcattttgtcttctaacttgttgatttgatttgctcttttttttttctccctctctccttatcttctcactcgttctctgtctttgaatatgtcggtgccatcttatctgtgggtcttattgagggaaagacttggtataaccggccaatttgtgatctgagcatttgattttaataatattgccggctttataatcatttcttgttttttttctcattcacttttatgaccttacaattctgaatagaccataatggggaaattttgataaaaatttctttctgatttaaatttgatcactggacaaatatttcctggcgttctcctggtctcttctggaatttgtcggcatcatttgtcactacctgttaattcatattaattaccttttttttagtattaaagtgttaaaaattgtactttatgaattttcccttttcatgttatgaggatatactgaattttgctgcttattgggcatcagagatcttttaaatatttgctgaaaataaatgaagaattagcatgttaagatttagtagacttatgttctttgttacttacttgatatttgtcttcgttgcagct

SEQ ID NO: 42532 - DNA, 642 bp, Manihot esculenta
  Intron number 1 from transcript cassava4.1_023928m (locus cassava4.1_023928m.g) derived from phytozome v7.0 (chr-ID scaffold00853; pos 71371 to 72012 reverse strand)
tattttgctgaaccatattgcgacagaaatttcaggcaagtgacctgagcaattctctataatgttgatgcatttggttgtttgttctgcaaggatattaggaacatgcaagtagatccttagcctgagaatgttataatgaatggggttggacattttgaagtggaagataaattgaaatttgtggaatgtaaatttgaacatggtttgtttggtcctgtagtaaatttgtgatatttctttttctttaacctaatgagtcggttctcaacatccttgtataaatccttaattgcctgccccatgtgagttcatgtacacacttagacatgcacaatggccattaggccaatacttggtaaagtttaccctcaaatagtcaaattaagatgtatgtgttatagactgaactcattgtttcaagtaaaccttagaatatgcaagcggatgtttattttctcttattttcagcaaagcaaatagtactttgagatctctatgtgttcattctttaatggaatgagctaagagtaataaaaggttactcggactgtattgttaacattattgcttaatattattttgattttttgtctgaattgcacaggaagagagagtggcagattaggagtagtgtaggta

SEQ ID NO: 42533 - DNA, 773 bp, Manihot esculenta
  Intron number 1 from transcript cassava4.1_027871m (locus cassava4.1_027871m.g) derived from phytozome v7.0 (chr-ID scaffold10342; pos 9441 to 10213 reverse strand)
tggctgacaagcttattcaagctgaaaagcgtaaggtaagtgtttagttcaacgcgaccaagaaaaatgatgggtatcgtctattcactatattccgtttggcaatcgttgagctcttcttcttctcggttaggagcaataattagctgcattgataggttcccttcccattcatagctctcatcataatggtgaaaactcccacaaggttctttaatgcttttaatgcaggggtaattgttgaactttatgcttttcgtttcattaaaaaaagtgtgcttttcctgttgattttggagatttagattttgttttcttgaagtgaattgattgaacttatgtcttctattggttgatttaggcaactttaaatctacattgtacagtctctgtcttctgtctctatactgacctgcgaacttgttggatggttcaatttgaatcactgtttagggactttaaaagaaaacgaaataaagtttgagatatctttggtgcatgcttgaagaaaatgtaggacttcatcaagtttcatttagtaggtgctaaatcacagaaaataaggtattaactgtttgagacaatattaccttcaaattttagataaagcttcttcactataaattatgcatttctccacttccttgtcgtttaacttcaaactcagtattcaatattaagttgacaagaaatattgatgaattagttcaaaatcagtgatcttatgacagtttacctggttctcacctcagatatttgagccattacactag

SEQ ID NO: 42534 - DNA, 449 bp, Manihot esculenta
  Intron number 1 from transcript cassava4.1_011273m (locus cassava4.1_011273m.g) derived from phytozome v7.0 (chr-ID scaffold09460; pos 556818 to 557266)
aaaaacaatcacttcatcgccttgcacttgaggtatggtccttgcaatactagactttttttaaaaaaacaaaaataaaaattatagaaatttaactattttaaaccttcttgtcgctcgggttgttgagttatcctatctaatttcttgagctcatttaatttattaatgcatgtttaataagaagaacaagaggaaaggaaaggaaagagaggaagggaaagaacaaagaggttgcatctttaactctctagcacatctataaaatagaatattacatatttatgcacagaggttgcatgtcatcaatttcaacaaaagtgaaatgatattttgatatttaattgcacaagacattttcttctattaaatataagtttaggatattagacacataaaggagcttattgatgtagcttaacacattattctctaggtttgaagcagat

SEQ ID NO: 42535 - DNA, 928 bp, Manihot esculenta
  Intron number 1 from transcript cassava4.1_007348m (locus cassava4.1_007348m.g) derived from phytozome v7.0 (chr-ID scaffold05162; pos 235559 to 236486 reverse strand)
aaatgtataatgtggaaaccatattaaagggcaaagtggcatgatccatgcatgccctttatgtttgacatcaagcctttactcctcaattagctattctatcttgaattattctcaactcgtttaaatatgaattgaattttctgcaccccatcatcatttgttttttcttgataaaacatgttaagaataacttttaggttttgcgacattgtatcatcatgttcctgccatttctttagtgattggcacttgagaaatccataatctataagttgtttggaatgcaaaaattgctgggtttttttgttctgctatttgatgtaatgatgattttgctatggtcttcttgaatccacttctagtatcagtgcataacaagtcaatagcagtctgttctgataggataagttggacattagattttttagtgggcagatgagcctactagatctgttcccagctattatattatggaactggatgatgtgaacctcgtatatattttctatgaactgtcatcatcttgcttggtagcactgttaggtgactgtcatatcattctgttaaagtattgtgagatgtagatatctatttcaagtggctatgttagaaaattaagtgaatatgagtgttaattaaattattgagatatagttcttacactgtggagcatatttgacattcttctgatatctagattaatctttataccatatgtgtgtatatgcatggatggcatggccaatgccagaatttgccatactttggtatgcttcatgcttaattttttgaaatttgttgttgagagtgggtgtataaattgactagatttcacttttacatgtgaaaatttgtaaatcaaataaccaattatggatccttctctccagataacagtaattgctgggtttttttctttcatctt

SEQ ID NO: 42536 - DNA, 880 bp, Manihot esculenta
  Intron number 1 from transcript cassava4.1_015032m (locus cassava4.1_015032m.g) derived from phytozome v7.0 (chr-ID scaffold06215; pos 86943 to 87822 reverse strand)
gccgctgctgtgacttctccatcggttcctcgcaggtattttttcacgatttcatttgggcttgtgtggatgagtttttgttggaagtttctgtggatgagatttgtatggatgggtttacatttggttgcggttgggtttgtgtgagtggatttgtttcatttctggtttaattttctatgtggaggggttttcattttctggtttgtttgatttgtgtggatgagatatgaattgctgagatttgaagtattgagatttatatttatgcttttctgtgggtttgtgtttatgggtgactaatgggaagtttttgcggaacatgaaatgttagttttgttttatgtgggtaatttgttggtttctctttgaatatcgagatttttgggttgcttttttgaatatgtcccatgaatatgcatatgttactgttggtgatttttgaatgggtttttattgctctgaaactgctgaaattttgaactgtggttgggtttcagttgcaatgaatatgctcttccaataacgataaaatttgtgatttttgtatctgatgtgctgcgaatctgtgattttatgtgctgtatagttcgtttgtgttgatattttttttattatatttttaaatttggtatttagtgcatcttgatatgtcaacattcaactcttttgaatgtagcattgtgtcaaatttcattgcttatgtagttatctgaattgaattgtgttgaaataaaactatttctctttgatactgattttgattttttagtgaaattttctttaaagtcaagttgtgtgtaaaacatgttaatgttatttattgattttttttttgcatgtatgattacacagaaggaatattagtgtgtcttattaa

SEQ ID NO: 42537 - DNA, 776 bp, Manihot esculenta
  Intron number 1 from transcript cassava4.1_018837m (locus cassava4.1_018827m.g) derived from phytozome v7.0 (chr-ID scaffold03614; pos 3090698 to 3091473)
actaaccgtctgttatccaggaagcaattcgtaagccctctccctttttctcatacatttttcaggcttatttcattcaatttctttcttgccaaacatcttcttaccacgcttttttcagttttatggttcccaccgtgtcactgatcttctattaataataatggaagaagcgaaaatgtttttagattttgtcttttatcaatatcatttagcttgcatatttgtttctgttagatttctctgtagagagattgctaattgatgttagagctcaaatgaatgtcagctcttagatgaaaagatcaaatgcctgtgtatgtgatttgaaatgatgatgtataattgttttgaagtcattctctcttcaagtagacggaccatggactggggcttttagtggggctcaggtgtatttgtttatttctttccctctgttttagtattagattttttcctactttccaaaaagagtagggtctaatacatgtgccagtgatgtgagaaaatatttgctactcttgatggctttacgaatccacatgatgattcctatccaccaagatctctgaggcaatctttgaatttttattccttcaatttgttaatcagtgactattaacttttctcattggaaattttcattctatgcgcactgttgctatgtttcttgctttttgttccagttgagctgcttgtggcctagtgctatgcttaatattattcagctgacgagattgattctttttttgtcttttgactgatgcagataattg

SEQ ID NO: 42538 - DNA, 899 bp, Manihot esculenta
  Intron number 1 from transcript cassava4.1_013529m (locus cassava4.1_013529m.g) derived from phytozome v7.0 (chr-ID scaffold10173; pos 507952 to 508850 reverse strand)
ggcaaaaccctaaagagccgtttacacccccacaagtaagttttctctttcctctctctttctaaaatttgaatatatgggtcctgtacttattataaacttgccttatttacacatacatgtctatgcatctgcattttttttgtttgtttaatttaaattgctaatgtctattcctgatttcgctccagatcgctgagatctgctgttcttttcaaaattaatttttttggaaccctaagtcattgaaatgctttctattttcaaaatttcagtattctagatctgataatggatttctggtttggtgccggtcaaaatgctggatgttgcttggagctttgaatatcaaaaaattattattattattattattttgtcattgggtacttagggatttaacttctgttgatgagaatcttagagttcctctatttagatctgaaaataattgagttcttattacagtcagtattggtttggatatgaatgtgaaattagaaaatgtgattcaggttgtacttcctctctttttttatagcggataacaagcccatgatttggcatttttgcttctttatatgcagatgccctcttcccggatctatttgcatttgaatttgttctgctgaaaatttggatggatctgtcttggttctagcactatttcgttgcacaatgtttattatgtttattttagttttgaagttattgctttatttataattttatagctttttagtgctctttgatagctgcagtcattaggattgcaatgtacatattgttccaagatttgatgaaaatttaagtttcagatagcaactatacaatgagtcgatctaaaacacagaaaaagtctaatccctcctgttgtgttttcataactgtgtagtttc

SEQ ID NO: 42539 - DNA, 609 bp, Manihot esculenta
  Intron number 1 from transcript cassava4.1_008547m (locus cassava4.1_008547m.g) derived from phytozome v7.0 (chr-ID scaffold07688; pos 23500 to 24108 reverse strand)
ttgtcggctccgctggctcttttgtcatcaagcaggttagttctgaagcttgggaactgggtttttagcattatgtgagaatttttctttgattctatttggctgctgggaaatagatattgtacgaaattccagaatttggaaagctttttttttttcttgtgagtttttttaattggaagagtaattttgtgattggattggctgtggagttgcagtattcaggctgacctcaaactgttggctctagttttctttttcccttatttggatatgatttatgcataaggaaacagccaaatacttttttaagagttggaaaatcatgaactttttatatctatagctttgcttttgaggtctgtgaaccactgcaagcctgcaatgaagacggaggaggtaatttctagatatatttaactgttgtttacatttgacagattcttacagttgaaccaattgctggttgagctaaatattctagtgtttaagattgacatgttactcctttatgaagtgggcaaccaatatttgaaaggtttatttgtttgtttatgtttgtgttctaatgtaggcgcttccttacatacgttgtattggagaatcgtg

SEQ ID NO: 42540 - DNA, 608 bp, Manihot esculenta
  Intron number 2 from transcript cassava4.1_002924m (locus cassava4.1_002924m.g) derived from phytozome v7.0 (chr-ID scaffold03614; pos 1280097 to 1280704)
aacgaaacaggttctctctgtctcttcattttctgtttggttgctgagaaaaggaaaatttaaattcgtgttatgtcgatatggatttgtaaaaaaaaaaatttaactagtaagattttacttatgaccaataaatatggtgaagatgttggaaactgctaattggcaacctgtttgtggtgtaggcactgcgtattatctgaatgggatatacgcttaatatgtgggtttaattggatttagttgaattatctggttgaggattaaaactatgtctcctcagtttaattgctgtggtattgttgctaattgtttgatttttctcttcactgctagtgcttgatgggaaattggaaaatttaatagttgcaacctttggtttatgtttcttctttgattccaaagagagaaggaagcaatttcctcctccactttgaaatgtgtatattacttttgttattaggtgcatgcaatgcattgtttctcagtagcatgtaccacggtaccagagacataggttttggttttccaatagcatgagatagccctgttgtagttcagcattccaaaagctgatattgttgttgcatttggttttgttcataggt

SEQ ID NO: 42541 - DNA, 518 bp, Manihot esculenta
  Intron number 1 from transcript cassava4.1_007080m (locus cassava4.1_007080m.g) derived from phytozome v7.0 (chr-ID scaffold01701; pos 247393 to 247910)
aactctcccaggtttttcatttctctctcaaatgtcaattattagtaatcactggtttttctttatcccccttcctttcttggacacaacttataacttttgacaactcataggagatctaaataggccttgcttgatgttttcttttgccttattgtttgtctcttctgctctttttctgtatcatctttatagcttgccggcatttttggaggttttgcattatatccttgaaagatatcatctttgattacatcttgttttagttgtttaccattatcggtccctgttctgttttacacagctacttgcagtgaagcttggtcatttagtaattggtttaaccagttaatctttattaattgtttctatgatttgccatgtcaaggcgctgtgttcttattagcacaagttgtatgacaaaatttctctacgaagtaccttgtttttgctgtttctttaaattcatttctcgttgaatgaaatatgcttttgtggttgcagagttgtgattgaca

SEQ ID NO: 42542 - DNA, 428 bp, Manihot esculenta
  Intron number 2 from transcript cassava4.1_005338m (locus cassava4.1_005338m.g) derived from phytozome v7.0 (chr-ID scaffold02305; pos 27915 to 28342 reverse strand)
ggaagacaattcaggtgtgtcttcatattttttctttgatgcctatggtcgtggattatcacaactatttgcattaactgttacgccaagtataacgaatttgagctttacttatctcttgtcgcgcatcataaacgttcttattcatgtctgtttgtaatgtaactcattttagtttttccacggataaatataacttctcaaaggagaataaaaagagaagcattcagtctttcatgaaggggaaaaaggaagagctgaagcaacaactatttaaaaatatattccctctccctgcagcatgcttgtgaagaatagtatttcatgataatgctcttttatctgttgttttatatatttgccttcctcttgtaattttggttctcatgacaggttcgcaatccagcaactggtgaagttatagcaga

SEQ ID NO: 42543 - DNA, 512 bp, Manihot esculenta
  Intron number 1 from transcript cassava4.1_005338m (locus cassava4.1_005338m.g) derived from phytozome v7.0 (chr-ID scaffold02305; pos 28437 to 28948 reverse strand)
cacatctccggtcctcttctctctcgccaagtaatctgacttttctctgtaccttctctatatctactcagtttctattgctctctcacacgccaaaacacaaaaacttgatattagtgagtgatcgccatcttcccttctctttctcgttctatgcacatacacataattgcaatttctgttcttgtttgaattttgattttgatttttgatttttttatatgttgattgatagaaacaagggatgagaaagtgactgtgatctcgacctatttctgatttttgctttgatagtctagaaattaagtttttgggattttcttttataaacttttttatgacagtgccttcattgaatgctttgatttatttattgttgggatttttcttttataaaattcgtgattgcaacattagcagtattaattaatcattgctttcttctattaattactcaggatgtaatttttataatgtcaatgctttgtacatgatttgggtgtcagataagc

SEQ ID NO: 42544 - DNA, 611 bp, Manihot esculenta
  Intron number 1 from transcript cassava4.1_018629m (locus cassava4.1_018629m.g) derived from phytozome v7.0 (chr-ID scaffold00341; pos 852496 to 853106)
gggttagtttgatctgtgtgtgtgtgtgtgtgtgtgtgtttctgtgtgcgttgcactcgtagacgtccatgctcgataccacagacgagtttagggtttatcttttaagtttttaagataatcttatattttgtgacattcttctgatttgctgagaaaattaatttaatggaacgatacagtgggaaattttaagtttttgcttctcaacaactgataaggcctacacatctaacaagtttatttgatatttcaagcatatggtttatttcgtaatcaaaatcaaaagctctgaattggaaatttccttaaaggtgtcctagtttcctgagataaaacattaggttctggaagtatacattccctcactgatgtggatcatagatcttgtagattctgtaaatcactcgaatgtatattccataatgataccgtgttgttgtcatacttggtctgaatttttttcataaacggtaccaggtatgggtgtgcctttgtgtaagtaggtttcagtttctgcattataaatttattttacttcgtttatttatttatttttgttgctcagtaacctatctaagattccctagattattgccacagatacgagg

SEQ ID NO: 42545 - DNA, 898 bp, Manihot esculenta
  Intron number 1 from transcript cassava4.1_026867m (locus cassava4.1_026867m.g) derived from phytozome v7.0 (chr-ID scaffold04151; pos 282444 to 283341)
ctatcctagggccttccctcatcacgtaagcttaatttctcatccctctcctctttctgcaagtttgttttttcgttcattaattttgtttccaatcggtgattgttctgtttctgcccttttctttttctttgtatgattactggaatttcttttgttctttgttctctcttttttctggttcatcaattgcaaattttgttgtttaatggagatgtaagggttcattatatatttcagaggatatttaaataactaattgttatttaaatattttttttttttgaaaaagctcaaataaaataatattttaatcaaaagactaaaatattatgaaatttagaagttgaggatcatttagttaatttgattttgtaaaattcataatgtaattatagatattgacaaatatgagtttctaataatttcccctaaaacaaaagggcttttttttaaaaaaaataaaaaaagctcttattaattagcaatgaatttcatgagttttatgaaatattaatctacccatcatattttagactaatagagctagaactttcaatttaatgtcaatatattgtaaatcaacagaagaatattaattttagttttttttttgtctatttttaattaatgtgagtaaaccctaaaatataatttagtgagatttatatttaaaaaagattattgctcaaatggttgggattaattcccaaatagttagcgtaggaaaaatgtgaagagaattgataaaactagctcaaaattattaaataatttgtgttaacaaatttgaaaaataggagaaaaataagtacttagcctaactttaacctgactgttactattgtttctaatcttcacaggctggaacgtttgggagcacttgatccaatagcag

SEQ ID NO: 42546 - DNA, 896 bp, Manihot esculenta
  Intron number 1 from transcript cassava4.1_033332m (locus cassava4.1_033332m.g) derived from phytozome v7.0 (chr-ID scaffold07571; pos 83524 to 84419)
cagttacagaggtcagtagtccatcttttagtgtttcttattttccttttcaaattaacttttcatagttttgtagggaactttgttttgtatggttgtgcatttatgtttttggtttggatttttagttcatttgtggcaatttttcttctttttcaatttactctttgattttatttttgtatttacaaaatttaatttctttagtgatatgtttatgtatcgaaatttgaactaagggatttgaatttaattttaatataaattaataaggaattatgaatgttaaaaaatactattttacttattaaaaattcatttaaatagattttaaatgatataattttataaaacattttaatatattcatgcaaaatatccatgtttaggagcctataacaatttatgactttaatccattgaagaaatttgtgcttctatcaaattaaaatcccaaattttaaatttcccatccaaaaagttctccttcgtatttacatttgtaatattgtctatgtaaaacaatatcaaaaagtaaggatatcaaatcatggtctagaactgaacatgtgccgttgtaaagatcttttaatttaaattttcaaatgtaaataaaaaggaaatttaaatgtaaagaatatcaaatcatttggaaaaaaaatttcctttaaaactttaaatttcccagccaaattagaggatatcaaaaccatttgtaaatttcatagaaagttttccttttaaactcttcataaaataaaaaaggaaaactttttcttaatgtgaaatttcccatccaatgattttaccttttgttattttgttgcttttagtcatggccttgaattgaacatacttaattatcttatatctccaagcagttgctgctgttcctg

SEQ ID NO: 42547 - DNA, 549 bp, Manihot esculenta
  Intron number 1 from transcript cassava4.1_000949m (locus cassava4.1_000951m.g) derived from phytozome v7.0 (chr-ID scaffold09876; pos 813568 to 814116 reverse strand)
tttctctccagggataacgcaattgagagatccaggtaagtgtcaattttttccttgcagatctattcctgttatgtgtttttacatgaagatttgttagctgtgtgattcagttgtcgttttcagattcaacgcttatttttttttggttatctttctgaactaatgattttcctgatcgaataatagatcgagctgtttgatcattcttctgttgattttcttgtctggtttagtgattttgtttctttagtttcgatgaattcgatgttttggatctcaagcttttaggggtgtaaattttgatatttctctatgtttcattttgtttatcggtttctgtgaatcgcgatggatattgatattacctacacttctacttttcatttttcttcccagcttgtgacgattgtggatcaacaatggttcacactttgtttgcgaattatgaacaccttttaacgttgttgaatttctttctcaatctcgtctgtgaatgtattaacctgaattgttttgatatgtccgtagatcgttttagttgttgag

SEQ ID NO: 42548 - DNA, 243 bp, Manihot esculenta
  Intron number 2 from transcript cassava4.1_003529m (locus cassava4.1_003529m.g) derived from phytozome v7.0 (chr-ID scaffold03049; pos 159203 to 159445 reverse strand)
tggaattcagtttctggataggctcttgaggactggtactctctctcttctgtatttgtttgtttgccgtgaaagtcaaggaaaaaggaaccagttagaaaatacaatatctgtgaatacggtgtttatctagaaggttatgtaggcattttaattcgtttattatcattattattatttgaaaagtttgattactctcacattctgactcgtttatgtatgtgtttttctgggtggctagga

SEQ ID NO: 42549 - DNA, 808 bp, Manihot esculenta
  Intron number 1 from transcript cassava4.1_003529m (locus cassava4.1_003529m.g) derived from phytozome v7.0 (chr-ID scaffold03049; pos 159557 to 160364 reverse strand)
ggcttggtaaatttatttccttgtgtacttgggcatagtttagactgtaactttgattgcaactcttaggtctgtttagccaatttaatggatatttacagttgacaaaaaaaaggccaacaccaaaacggtccaaaaaaaatttaagcccaacatcaaactggtccattgcctagaattgtctcgactctcgagtaaagtcttgcttcctcgccgcccagctcctcctcggtgacgccgcccattctcagtcacgccgccactgcttctcgccgctcattctcagtccttgctgcaacagctcctttcgctgctgacccgctgctcgacctccatcgcaggcttcgagctgctgttctatcgacagaactgctgctatttggtgttccgtactctctcactgacaaactaagtcctcttgaggtattttctttctaatgctcttgatttttatttttcttcggaaggctttgaaggaacactatatagccttgaaatgctggaggaagaagattatatccttgagctccttcttcttgttatttgtggtagcattttgaatgattttctttcttcatgtatttgcgtggaaggttgaaaggattctctctctggaagcctccaaaaccatcatttgaaaatctcatcgctgcacaagcacagctcggctctcatggtttattgttactcttctctgtctctcttctgttcttcttcgttttagtttcctcaaatcttattttatccctgtctccttgcaggattcacaacaggaacacgcgcagtcgccgtcacttgacgattgctt

SEQ ID NO: 42550 - DNA, 772 bp, Manihot esculenta
  Intron number 1 from transcript cassava4.1_018892m (locus cassava4.1_018892m.g) derived from phytozome v7.0 (chr-ID scaffold03025; pos 38134 to 38905)
aagctgaagttggatctgctgcaaaagtactatctcttttcttatatcttctactttctgctacatattgcttgtttgattgaaaattcgaattttctaggtggtttatggattttttttttaggggggaaatgttagagatctctttgcttttcattatgattgctaatgtagattaaataggatgataatggaggaagcccaagcaatataatttcttaacatagttcccacttaagtgtaatataagtacagttctacttccaatctgaaacttggaaatccggggatgaggcatattgggctggttcagtagggacgttaggaagtttgtatgtttggtttgtgtttggaaataaacttgaatatagtattatacagatttgaaataattgttgcaccaacactccagtattttatttttaatacattattgatctaatccttggaggctgcataagcttaagcttgcaaacatggtgctaaaattaatgtatgctgttcttttcctatataatgtaaagagcatttacagcagaataccagtaaaaggaaatgaaaaagaaatttttatttttgcattgttgtagtcaagttgattatatgtgtggaggtgattgtctttgccagcttctgcttttgcattccccttccactttggttgttggcttccacttccttttacttttttacatctactcatgctttgatggttcatgaataagctggttgcattaacccttacttcgcatcgtatggtgacagagagaag

SEQ ID NO: 42551 - DNA, 772 bp, Manihot esculenta
  Intron number 1 from transcript cassava4.1_023808m (locus cassava4.1_023808m.g) derived from phytozome v7.0 (chr-ID scaffold09120; pos 245370 to 246141)
gcaagctaagagaacaagtagccaagcaacagcaagtaaattatatttcttacccttttcttttcactctttgatttgcttgttttggcctgtgctttttggattatgttttggttcctgggaaaatgtgaggaaaacgagagaaattagtggaaaattttatttttcgcatgctttggtttttgctattttgggttttccagtaattggattcaacttacatgtgttacaaaatggttaaaacttttaaaggagagtagtttaattgtgattttgtacgcttttggccaaatatggtagctctacgtggatcgaattatcgaaacatgaacgtgggctgatgttcttttaaagtgctgatacttgtaattttttttctatctcagaggtatcaaatgtgagatccatttcagtggcctcactcactctgtctctgttggaaatggaattttactgattttatcttattgaccgtattcatttcatgaattaatactgattccatgttacttggattcagcatgcagcatgtgaatccacaagtcaaaacacatacattgcaagtttatcatttagaagcttaatataatatgtttaagagtttaaaatatgttttgagagtgttgaatgaattggtaacatcagataccataatttctatattatttttgcatacttttatatattttcattgtaaaaaatactagcctttatttaatttaatagtttggtttcaggctgtgataaaacagttcagtgggactggttacga

SEQ ID NO: 42552 - DNA, 730 bp, Manihot esculenta
  Intron number 2 from transcript cassava4.1_023808m (locus cassava4.1_023808m.g) derived from phytozome v7.0 (chr-ID scaffold09120; pos 246195 to 246924)
tggagaaactgtataggttgactcgtgcagggaaggtaggatagttttgctttgttgaaattaaagttatttgccgttatcaattcccaaactagcagctgtttctgcttcagactttattatttcacatgctttaatcacgtgttattagaaataaagctgatatttcattagtaaaaattaatataaggggaaatacttagcttttgataatttttcttaaaagaatggaaacgcgggtgacatttgatgttaatcataagtcataatctttaaacatgcagctgataaatcaatgcatataggaaatgcttatctttgatagttttgctcagaagaatgggaacacagatgagaggatgctttgagaaggctaactgaccccattcctaaacttaacaattgaggttgatgttactattaagatggagggtgcattgtgttgcttttgttgattgaattagcttttacaaaaaaaaaagtatcttagagaaaggggtaatcagctctacatttacaagaatgataccttattctgcagaattttgtccagttgtcctatccttggttcgccatttccatgaagttcttttcttcgctttctaggatattgaatgcgtgttaagttatttcctttttttgcaaattcttacacttgtgaccactttctaattttatgatattctttatttcaggattttcagaaggatattgttaaagcagcggaaac

SEQ ID NO: 42553 - DNA, 252 bp, Manihot esculenta
  Intron number 1 from transcript cassava4.1_031054m (locus cassava4.1_031054m.g) derived from phytozome v7.0 (chr-ID scaffold07415; pos 6756 to 7007)
agtccttactaagagaagtagactcaccagttgacaggtcttcaacagaaaagctgtaccatcaactgtgcaccggagttttcttgaaccaaaagaaacgggtaaaaagaaaacaaaaagaagaaaatacctcaataccctctcgctaattgtatgattgaataataataattattattattttttgcttttatcactctgatcatcatcataatcattcttacttcactgcagaaatattggattgaaagg

SEQ ID NO: 42554 - DNA, 755 bp, Manihot esculenta
  Intron number 1 from transcript cassava4.1_006971m (locus cassava4.1_006971m.g) derived from phytozome v7.0 (chr-ID scaffold08379; pos 147300 to 148054 reverse strand)
tttaacaagtctccatacaatctcacaattcactggtaaatccttagataataagctacgccattagaaaaatgccaattcaatgtcactgttacaaactcattaatttgtcaaattgctttgacttttataattattaaaaacaaaaaactcattcaatcacaagatttctcgttattcccattacaaacaagcaaatagcaataatgtgcataacttgattattctttgaatcagtcttttactaaatttttttatttactcattttttcctaatatccaagtcatctttgatttgcatttgtttttatttttataaaattttttaagtgatacatagaatataattaagaagcatgtaagtgatttttgaaaaaaaatggattaaataattctatttgacttttttttttccttcaaaggcaactgctactggcttactttttcattctaactctttttcttccttttacatcacaaataaacttttttaaaataaatagtcttgaaacacgcatgctctaatctaatcatcagaaaattatatgtacacttttctccaaccacaacagagggaactcattaattatgatgtgaaaagaatagctaatcttaatcattaaacatcatcctttgatcaatgatcattctgtgggaggcagcttgcctcggctggttttggcttcagccttcagctttttatttatttatttttttttcatgttataattaacaagtaattgtaattttcaggc

SEQ ID NO: 42555 - DNA, 966 bp, Manihot esculenta
  Intron number 2 from transcript cassava4.1_014341m (locus cassava4.1_014341m.g) derived from phytozome v7.0 (chr-ID scaffold09570; pos 7488 to 8453)
attaccttcagttgcagacatcataattgagcaaggtatatgttaccaaaacttgttaatattgcattaatttttggattattttgttgatctatgtgtttgatttgctatgatatcattatgttggaaaaaggaattaacaagcaagggataaacagagaaaaactaggaggtgagagtattaacactcaatattcatataatacttggctccattctactccactctacatcattatatatatatatatatatatatatagtagttatgattagtgcttcagagatatatctaagtatactacacacatctctatgcactcgttacacattcttaagcacactccgcatttatctaaagaatacttatcttaagcttatgctagtacatattagtcacattaatcctatgcacacatatcaaagcttattaatatttaaatttatacttacaaaactatgttgcttattccccaaccccacccccaaacccaaaaagaaaaaaggagagagagagagagagagagagagagagagagagagagacagagttctcagcataaatggcagtatttttcacaagtccaatttagatgctaaatatatttgttggcattgagtttgtcacaatttggttgcacaataaatggttcccttctatgcatttacactgtgaaagcctcatacaattcatgatggctttgaagatacacttttctttaataattctggttgagttttaaatttttataacctcaactgcaatgaataaatgtatacttgacaattttagatcttccaagctaaaagaaaacaaggctgttacttcccggcatttctatgagataattcttccttatgatagagggttcatttctaggttttgccattgtttagataaagtttattaagtctgtgcaattactttcaggatatttgcagtctctttttggtgtctattctctg

SEQ ID NO: 42556 - DNA, 836 bp, Manihot esculenta
  Intron number 2 from transcript cassava4.1_017767m (locus cassava4.1_017767m.g) derived from phytozome v7.0 (chr-ID scaffold04882; pos 301857 to 302692)
agatctgtccgttattgcttcgcgttttcaccaaggtatgttcactactcttcaattatttgtcctgaattgtttctgctaaactttatccttttcagtttgtcgaaatttactagttgttaaaccagtatgtgagaaccgagaaattatccttgagaaatggatatgggactgggaaaacaatctgcttccgtagtgaatagtagtatagtgtggaagaactcgttgatgagtagtaaaactttgggctttttctctgagcagggctcagttagcagcatatgttacctgtatcctataattaaggcattcactctagactatgaagtgttaaacgcctctatcagaggaagtcattctggttgcccgccatgtcccttctccctcctctaaaagaaatcattatgttattttaagtgacttgttaagctgtcccatttatgtggttattccttgagtctaattgtttgttgcatatgaagtggttgtaatgcatctctttcgtcatgtttaccatcatattttgattctgttgaatgttatacatgtggtagttcttgtctacatgtcattttgtgaataccaattttcttgattgtgattttgttgatgtaagtataactttctggcatgtctttgttgtgatgtatcattttcaattttagctgagaagggggaagttcaaagtttttattgttctactgattctttaagaagcgatcatgccctaattgaatggaagaaattgtagggtaatgataaattgttgtcgaactctttagcgtggtctgtatagaaaatacacctgaagttttgacttatttaatgtgttgaag

SEQ ID NO: 42557 - DNA, 814 bp, Manihot esculenta
  Intron number 1 from transcript cassava4.1_015125m (locus cassava4.1_015125m.g) derived from phytozome v7.0 (chr-ID scaffold12303; pos 24762 to 25575 reverse strand)
ataagctcaggaatctacttccttgcaactctaaggtaaattatggatgatttgtctttgtgtttgatagagttcaatttcaggctgtttgatgattttttaagcttgtttggagcttttggttgggttttaatggtggagattgtgaattttttttttgtgctttgttcttgtatagtgttttcatatgtggtaattgttgaaggtttgatcaatgtgttctttccctttatcaattattgtgtttgttcactgtttgttagctgagaaactgggaaaaagaaagtaaaactttgaattttagactcctactttttgacccacaaagccaaaatccctgctgactgacttgacatttgccaaactcaatcatttaccgaatcaaatccgtttttgtgaggtaaatttttgtgggttcacatgatagattttcataaatattttgttttacttgttttttcactttccctcattttcttggcaaccaaacgcgagaatacaggacctgcggagctaacatagttaaatccagattctggaatcttggatccataccaggctttagaagtgttttttgaatgttcaaactgaaccttatctgcaaaagcaaaagcaagaattaaagcttttcttttctatttttctaaattttctttaccttttttctccaaatttctctagggtttagtctagtctacctctgaaagctgctaagcttttttacgtttagggtttctttctcacagttctttttttttttcctgtttgaattttcacagacagacaaagcttcacttcttgcaaaagtagttca

SEQ ID NO: 42558 - DNA, 878 bp, Manihot esculenta
  Intron number 1 from transcript cassava4.1_012652m (locus cassava4.1_011230m.g) derived from phytozome v7.0 (chr-ID scaffold08154; pos 128332 to 129209)
tctgcaccgaagcattttctcgtcgggacagtaaggtattttcttttctttctttcttttttttttttcgagttctcttgattttccatttcgccaattttctcccaatttcggtcatcgttctggtattcttacagtactctttaatctttatggtaggtagggtttgaaattattgaagaatttaccatgcactaatagatactatttttgttgattttcttgaaattttgtttgggttatgaagtccaaattagctgtatttttactatataagtggtgattaattatagtatggcaaattatggcattggtagttgcccttttggatcataccagaatttttattttctctctttctttttctctccatatggcttcaaggtcatatgaaaatcgatgattcccgagggtagtggttcagcgttctttatatgaacgtatgtgactagtattttctgtgttatatgtgctttatcctcttgattctgtaagatcagggtagggtttttggtgctaggaatttgggttctaagtttaaagtatcgttcgggtgtttaagagtttagattttgagcttggttgatgttcatgtaatggactttctaatcagattgttgcttgtggaaacgctgatgttaattgagaaactatggaagggttctgctgcagttaattactaattctctttttccttgtagaataaggtcgatgtcctttttttatttcgttttttccttggctgtggttttggactatgatctgttttaagttctttttgtagtttttctggaattgcgaaaggtaatgagatgatatgttaaataattttgttttgggtatgtctgctgtttttcaggggttatacttgtctaaaa

SEQ ID NO: 42559 - DNA, 298 bp, Manihot esculenta
  Intron number 1 from transcript cassava4.1_033865m (locus cassava4.1_033865m.g) derived from phytozome v7.0 (chr-ID scaffold07012; pos 1381130 to 1381427)
gaacagcttgaaaattctgcaggttcctcagaacagtatgttcttcaatgtttccatcattctattattgattttttctatgcgtcttttgatgcttggcttagaaatatgaattattaattacattgcagcacttgtgtgaaggaaggtcttttctttttgtttatttttagcccaaaaggcactgatgaacatgacatgcctggatctaacaacagaattctgagcgcttacattaatttttctgcttaaattgacttcaggaagagatctgccggcaaaacactgaagctaatct

SEQ ID NO: 42560 - DNA, 754 bp, Manihot esculenta
  Intron number 2 from transcript cassava4.1_033865m (locus cassava4.1_033865m.g) derived from phytozome v7.0 (chr-ID scaffold07012; pos 1381716 to 1382469)
aggtatggcgttttcttgatatccttttctttcagtatctattgaatcattcactgccagtttgtgatgatgaatagcatttggttacaactgtgagtttgtgactttatcatctcatattaggtatggtgaagagtatgcagtatattcattgtctgtttgaaaaattccttcatttggatctattaatttattaaatctctaattgtagtcaggcacgatggttgttgagccccattattaatcttgtcctactctgcatgataagatgctccttcaattttgtttttatcctcatctgccaagttttactataattattgattataatagtggaatatccttatcatgactagatttgttggaactgcaatttcagttgatatcatctatttaagaattcaattgttttgtattttcatagctatctgtgcctaagattcaccgtaactattatggcttggttaacttcaaggagaacttgtgtacttctcatgttgttgatacatggcattatctaacttaaatttgtctttttgggttgtgtttaacttccaatttgtacttgtctatttatgaaactgccaatttactgccacttcactcttccacatagtaaggtttttgatattagcaaaaaaatgggtggatttatctgacatagcaaggtttttgggtggatttattgattattagccaaaaatgttgatattttttagggcctccacgctatcaatttaggagatagtgggtt

SEQ ID NO: 42561 - DNA, 480 bp, Manihot esculenta
  Intron number 2 from transcript cassava4.1_001163m (locus cassava4.1_001163m.g) derived from phytozome v7.0 (chr-ID scaffold03521; pos 4503 to 4982)
cggtcccagcgcgagcgtcaggttggcctttgtttttccctgtttgctcattggaatgagtcaaggaaaaatggtggataaatgtttgattaatgagagtcttcttgttggcatatcgctaaaataatcgacctcaatagagatagcaagcccatatgattgcggaaattctttaggaaatacatgttcttttgtaggaatttatgtaggagattccaaaacttgcatttttatggttttggaactacaagtgatttttataaatcttccttttctggtacatgttcttcttccatgggctctagaacattgcaatgctaattttggaaacgttttagttgctgatgtataaagttcgtatatatgaatgaaaaaagtggagtgcttattctctctctatctctctcttgttgatttcatttatcttttgtttcatttttcatagttgaaattaagcaagaagagcaagtataacttatc

SEQ ID NO: 42562 - DNA, 708 bp, Manihot esculenta
  Intron number 1 from transcript cassava4.1_009562m (locus cassava4.1_009562m.g) derived from phytozome v7.0 (chr-ID scaffold11915; pos 45406 to 46113 reverse strand)
cgagaagtcacttgatcagatcaaacccacttcaggtttctatttattcacaaacagttttcacacttttcacggaatcgctttaggactaaggatctttgctgtttccttatctgggtttgttgtgaatagttttctatgatcctttttaagaaatatttaggcattgaattgctttattcctagtttatttgagaattgtagtatttctatctcaaaaaattacatgattttagctcgttgtgatggataatatacttgttttagtaatcggaatcttgttttatgtttcaatggatgatgcttaatcgttatttttttttttttgcttatgttaattagttttgagcaaaatcctttatagcacctcatatggaggtgattctgaaacatgataatagatcatatgtaagatgtcaattcctaatatgagaaattggttattcttaagcatgtttgctggacatggatggtagtgcttaaaggttctgttttctttgcttcatcacaaaaatcaaactcagttattggttgttatttgcttgttagatgtcaataattgaggtttgtttctctatgggagcttcatttacaaaaaaaaaaaaacagctctagaactctggcaaatatttttcatcatcaataaacttttcccccatatatttgtgtgcagagaacttggagggaaattccgttttaagtgttaaa

SEQ ID NO: 42563 - DNA, 915 bp, Manihot esculenta
  Intron number 2 from transcript cassava4.1_026833m (locus cassava4.1_026833m.g) derived from phytozome v7.0 (chr-ID scaffold03055; pos 136801 to 137715)
ttcttgtgcgtgatcagcatttcattttggaagcagtaagtgccacgccttttctcatgtgtgatcggtgatcataggcgtcatgggtaaatcacatccatagcatagaatctctattttgtcttcttgtattttatacaaacatgtgccctgcatgctcattgcttctttttttttttgaagcaccttacttctagtacttgatttttggttttttttttttttttttcattcaaggaagtgaaaagaaagagggaaaatttttgctcttacagtagtatgatgctgatgattgaattttgagattattgttgaaccagtttttggtttttccccaattctattatatatatatattttttaatttgtttgtaaatttaagtctctgtggtgtggattttttcatttttattttttgctttagtgatttctgcttagttaaaccttgaagttgttattggaaaatcttccatttgtgcagaaaatgggtcttcctgcaatgaatttgtttggacttgttatgggttttcactttttttacaaatacattttttaatcgtggacactagttttttttctgcagaaattatttcacttgtttacagttttatctaatctgctgtaatcaatgaaatttttatactttttgaattgaacttgtagttggattgagtatagaagtttttttctcggattccaaataaagcattaaagaaaaattcagaatttatattattgatggaacaagtttaaataattcgttgagtttcataacaggatcctcaaagcatacttggtagcctgccatgtctccagatacaaccactttaagttactggttgaactggaggttctccatctgtgcattatttatctcacttgctatgatatttgctgcaattctaatatggaagt

SEQ ID NO: 42564 - DNA, 676 bp, Manihot esculenta
  Intron number 5 from transcript cassava4.1_009053m (locus cassava4.1_009053m.g) derived from phytozome v7.0 (chr-ID scaffold08847; pos 363515 to 364190)
gagggtaatttacaatacattttcttcccctcaattgttcttattttcttcttattgtacaaataatttaatagaaaccagaaatttattcggataatgatcgactctttgtttttgagcattctgaatcaacatccctgtattagactattagtttccatgtcatattggaaaatgatatttttgggacaaacctgtatatatggtcaagcagattggtcaagaaaacttcagttttggatcttggaaaattaattattatttggaattgatgatttatgcaacagaaaattgatgggagaaagtgtgaaagaaactcaattttactttttcaacttaagaattctttccacagatgaccaaggaatacaagatacttgcaggaagcctttaatgttgtaatatcgcatgattacatgcagttattctggacctggaaattgttatatagttgagatataagtttctattttagttggttttttgtgctatcaacctgattggagggtgttactcttttagcttgttttcatgttcttgtctgtaattgtttctggagttttgaaggaggatcctttgtcttccaccgttggtactctccttcattttcttaataaaatttctccttttatcaaaataaaaataactttcaggcgccctggcggtgatagaatat

SEQ ID NO: 42565 - DNA, 585 bp, Manihot esculenta
  Intron number 1 from transcript cassava4.1_011552m (locus cassava4.1_011552m.g) derived from phytozome v7.0 (chr-ID scaffold04882; pos 214745 to 215329)
ccgactccgcttcaccaaacgcaaattgtttcccggtaagcaaacaattgcttctatgttttgatttgctcggcattttacgattgttggggagaactaggatgtgattttgcagggaactctcctcagtacttcgtggtcttgtgggcgttagtatttgtacagtcaactgggtagtttactttgtttctgctaagtggtgtctttctaattttgttgtggctcacttgtagcccgtgttggcttgattatacatgggtgtatttcatgctgcctaaagaaaacagctttgccgattataatgccagtttgattggattgagctgtaatgatttcaatgtgcatctttatcggaaatgagaaattactcgccatggatttgacagttgcttctttttatatctatgtatttctttttcttttcgaatatttatctctatatattttcattgttgttataattgagacctttaaaagctgttctgctttacggtctgcttgtgtttatgctgtaagctcttattgtagggtgattaaaatttattgataattcccaagtattttttgtttctatcagttgctgca

SEQ ID NO: 42566 - DNA, 988 bp, Manihot esculenta
  Intron number 1 from transcript cassava4.1_019152m (locus cassava4.1_019152m.g) derived from phytozome v7.0 (chr-ID scaffold09120; pos 85235 to 86222 reverse strand)
agctctacaaagaactgcagttgcccgaattggtgtgttatttgttctttccttcgtcaattttcattcctttctctttaagattttgctcattgctgttggtttattttgctaattttgagcttcaatcattttgatttctgagaattttgggctttatttgaccaaattgcttctgttctctacttcagtgaatccatatggtattatcgaggcttttgattttgggttatttctcaaggaagctacgtttgttgtttttctatcattttagagtcatgtgtacccattattaagcgataggcatgttaatatggttttatatatatattttttaaatgagcatcgacagctaattttggtgtatttgtgaatttgagctcagggagagcaccagtttaaactgagaaggttgtgttttttaacactttttgttgttactactaggtgtatgtgtttgatggagatgttctttatatagaccgttgcaggaaatcaattttctagttttattaattacttgaaactgatgtgcccatttaagttttctgctcttttagcagctttcacatctgttgttgaacttttaaacattgaattaccagagctatgcaaatgacacttcaaagttgtgtactctacttgcgtataataactttagtgtatctcttaattttgttctatatcaagcgttttttcatgacttaagtgtgtaggcatctgcaagcacttatggcatgggctgtgagcacacatatatggactaccaattgggatatcatatttgcaacctaacattttgtagaattggaatagctataatttaacttctatttctttcatttattttagctttcttcatttatgctttgggatgcttagttttgatgtctttcagttgatcagtttggaacttgttaaccgattttcttcttgtacataataacatttaggctgatcctgagttggaagctatccgccagagaag

SEQ ID NO: 42567 - DNA, 376 bp, Manihot esculenta
  Intron number 1 from transcript cassava4.1_028074m (locus cassava4.1_028074m.g) derived from phytozome v7.0 (chr-ID scaffold01551; pos 2250951 to 2251326 reverse strand)
ttttgactctcagatttttctctcttcctcgcctggtaaccacttttatttcttcaatttctgttgtattataccttaaagcttttgttttttttttttttatcataatttttgtttgacttcagatcagtttgattgaggtcaatctaatccattttgtattttattagtgtgatgcactgatattaggtctccgcttttttttttcttttttttgttaatagaaagtggtaagctttcattaagttgatgtggacatgcaaattgtccctcgttagagagaatatgaagtgtgcaggtggttatgtttcactcctatatatttaatacaattttgttgttctttaaaaattataaataggtgataaaggtggca

SEQ ID NO: 42568 - DNA, 800 bp, Manihot esculenta
  Intron number 1 from transcript cassava4.1_005237m (locus cassava4.1_005237m.g) derived from phytozome v7.0 (chr-ID scaffold03333; pos 243142 to 243941)
taactattcctggagttgggcttgcacgtaagtttgttgtctgaagttacagcatttcttatcagttcctttgttcctgatgacgtgatgaatttgagtctcttgatcaaaggtgaaaatataaggtggttaaacaactcgaaatagaaggtgaaaccaggaggttgaaaagagtgatcataaccttataaatactccaaataaattaagagccatcacttggtacccattaaaatttgaatcttgcatgtgaaggagtaacaagaacgatcgcatgccagaataatcatacaaggaaaacatattaagaatttttgctttcgtgttgaaagcaaaagtagtactggagttctgaatgtcgagacatgcacatgattgatttgacgaaaagtgaagatgcatcaaaacaatctcatcctgtgcattatgttcaatgaataggcaaagaaaataaacaaatactatgttttaaaattattggtattctgcttgtgtaggtttctttcctttttttgatgcattcaaatataagagtcttagttattgaccatgaattggtagttttgttttaccaaccagatatgcagcgtctatttggatgtacattatagactttagtatagtttaaaccttatgatttatcatgctttcatgtacagattatagaagacccattacccaacatgtacttatcattgttccttacatatatcaagctatttatcagtctagtcctaatagttgtgtacttagcattgtaaggagatagactaacatttgcttttcagcgggtacgaata

SEQ ID NO: 42569 - DNA, 495 bp, Manihot esculenta
  Intron number 3 from transcript cassava4.1_027491m (locus cassava4.1_027491m.g) derived from phytozome v7.0 (chr-ID scaffold04314; pos 152542 to 153036)
gacttgtggaagaggtgatatgcaatagcttaactttctgacatcattcttgattaagaaaaaaattgcaaatataatagtgttaaattaatattcataattgctatgcctcagcagtcagcccatctcatgcaaataagttcagatggctggcaggcaacccaacatttaatttatactgaatcacttttttctagtgaaatctttttctgtcatgaatagcttgcaggaactccatgccattttttggttctattttcttgtatattgcttgtggaaacctttatttgaagtgacaagaaggacactaaagcctatttgaattagtgaaacacctttaccatgtagatgtgtttttcctttcttataacaggacaatcatacccaaaatgaaaaactggtgatatatatattcatgcatctcaagcataatatatttaattgcaatgcagatttaatttaggcagtgtctcatacaggtagcaaaggctcggg

SEQ ID NO: 42570 - DNA, 301 bp, Manihot esculenta
  Intron number 2 from transcript cassava4.1_019300m (locus cassava4.1_019300m.g) derived from phytozome v7.0 (chr-ID scaffold01127; pos 570292 to 570592)
tcaaaaaccttgagaaaggtttcttcttttctcttgtcatatgtttattatatctttggcaatatatcaaaaccattttgattgcctttctttggttttatgttattttgttgttcacataagtccctgtttcttgtagttcaagtttctatttgcaattacatagtaatttgttcgctctagtggttaaaaattggtggaattttataatttgtaagtggcttggcatgtgttaccgattaatatgatgtctgtttaatttatagtctgtgccgacttggttcgtggtgcaaaggacaag

SEQ ID NO: 42571 - DNA, 687 bp, Manihot esculenta
  Intron number 2 from transcript cassava4.1_002280m (locus cassava4.1_002280m.g) derived from phytozome v7.0 (chr-ID scaffold03975; pos 149445 to 150131)
tgtttgaattatttggtcccacattgcctgccacggtgagtgattcttttcagattttaaagttgtgtttctggcttgtttatggcaatgacaagaactttattgctggttctatatgatatagtggaatcaccaatgaagtgctaaattcatgtactagagtttgagtgggatgtttacttatgtgttctgcctatgacattttagacgaataaattgtaggaaataattggttttttttttctttctttttttttttgtttttttgaaataatttgatttcaacttcttattctgaaccttaattttgtattttaattagaatttatgcatggggcttgaacaaattcatgatgcttgacaacaaataggaagcgggaaaaatggaagactgaatattaaggggcttattgattgtttgcgtgattgttgttttgacaaggttgatttgatagattatgctgtgttaaataattggaggtagcgtacatgtttagtcttatttgattttttattaactgacaatttcttatgattaatatttgctaatagttaattctccttttaccccaaggatatgcttgctggatgctgattacatcaaagattatttgtagcatctgaacctatttattgtcaaatgtgtgtacaggtttatttagagattccaaatagtgaagaattggc

SEQ ID NO: 42572 - DNA, 580 bp, Manihot esculenta
  Intron number 2 from transcript cassava4.1_018034m (locus cassava4.1_018034m.g) derived from phytozome v7.0 (chr-ID scaffold06512; pos 1028274 to 1028853 reverse strand)
caagtaagtgacctcttatttttcattgcctgccctgcctacacaaatggtattcattatatccttattggtactaacacggcatatcaagaatgttagtgccgcgagggggtgggtgggtgggtggggggggggggggacgggaggaggatgggcgggaatcccctttctttctcctttataaaacttagtgaaatgataaggatttgttctctttttttacaattaaatttcattttcctcctacctatacaatcaaacttccttctcatcttcttattttatttataatttcctaaacaagacagagcaatgattattttattttttctatatatctcctcccatctcctcctcccccacccacctttcctccaacagccatgatattatggtatcaatagagaatcatttcatgataaaactgcataaaaacatgtcctaactttcttggtcttcatgacacatttttattgacctgggtttgtactgaaaataagcccttttttaataaatttcttggtgtggctaatgtgtatgtcaagatattataccgggtatcctaaagatttggaccctt

SEQ ID NO: 42573 - DNA, 919 bp, Manihot esculenta
  Intron number 3 from transcript cassava4.1_016145m (locus cassava4.1_016145m.g) derived from phytozome v7.0 (chr-ID scaffold03332; pos 844532 to 845450 reverse strand)
cttacttgaaaccaggaacaagtagcaagaaaaaggtctttgcagaaaaattccctaagctaatgatgtgcttgttgcttggccttgctgtttttacctcttaatttgttgtcatttcatgacatatcttctctataggctacttcctgatggtttgaaatctcaaattatttcagttattgattgctccactgccttttcctccagtgagatatttgtctaattgacttcccttggtctttcattataaaacacagatggaatatcagttatttaagctttgacattttcatccttgacacagggattgagtaatttaataatattattggttatcactagtctgtttctttttgtcttaaactagttggtgatacttttttcctttattgtttgctgcttggcatttcatttctctgttcttaagttgcttaattggttctggctttagcaaccatgtaactgctattgtttttcacaacctgttatacgacatccatttattcaaattttgttaaattaactctggagtcattcatatgaggagcttggttttctgtctattattgtccccccaaccccctccttttttcatacttgttcttttgaacttccttccctgctggctaaaaggttcatttttactgattctttggttaccacaaatttgttgaataatttgacttttgtttgagccttgtgaggaatattttattcttatacacttttttataaactgatagtactctgctttttggggggctttgaagttctactttcatatttcaagctttgagacaaagcagtcaagtcccctcttttgggcatggtgactgagtgtagctattttcatattcttaagaagcttttattttgtttcactgttgaactcttatgaactttgtttggcaggcaacta

SEQ ID NO: 42574 - DNA, 964 bp, Manihot esculenta
  Intron number 2 from transcript cassava4.1_017317m (locus cassava4.1_017317m.g) derived from phytozome v7.0 (chr-ID scaffold03049; pos 541377 to 542340 reverse strand)
ctgaagctaattggaaagttcaggtctctcttcttatttgattttgttttttcgttcttgaattgttttcttgtagtttctagatagaaagttgctgggttgtttttttttgttttttcctaaaaaaaaactggaaattgattactagtccttctccagacctactatcatgggatggatttttggtgattgaaacaactttaatgatttgaagagtctcttatgaataggttatgtttattataatcttgaagcaggcagaaacgtttaaaattgtttacaatcgccttgttttcaatggtggaaggatttggttaatttccaatcaaatctcaaattggatagttattaggccaaaatttaatttactattattctttcttatatttgtattgtctttatcttttcaatgtccaaattggataattttaaaacttggtgatgtaaatttcctgaaaaataataacttgaatgttaatgggtttctggagctaagcaatttgtttaggatgtggtttaattttttattcttatgtggttattggttcctgagaaatgatgcttaagcagcttggttattgagggggatatatagagcaaattttggtggagagagagtattatcggtcactattattcgtaggtgttatattagaagactttttattgaatcctaatgcttgaagcagatcaaagaaattttttaagtttgtctggtctgttcaaagaagaaacacattgaaaggaaagagaaatcttctggttttatgcatgttattatgattctcccagatctttatattgctttctgaacacgcattgcctcagtttcaatgtttctgatatttctgtggagttatcaaagctttaccaaattgatgctcattattttgttgattaatgctatagtctttgtattgcgtgaatagaaagcttgggaagtggcacaagcacctttcaagaa

SEQ ID NO: 42575 - DNA, 875 bp, Manihot esculenta
  Intron number 3 from transcript cassava4.1_009969m (locus cassava4.1_007295m.g) derived from phytozome v7.0 (chr-ID scaffold02906; pos 193714 to 194588 reverse strand)
ggatttctgtaccaagaagatttgcattgtatctggtaacttcagaacttggtcagttgatgtctcaccagacattgttaagctgctcaataattgacatttgacagtaatattatccaaaattactaaaagaaatctcaaactaccagtattttctttagcaagctcaaactaacagttcagctgtttaaaatttagccaaatgaaaatatttgttgatcaatttacatgattgacatgtgacacattaacttaacagcaattagattctgttttgaaaattatcttcacctggtgactggtgttattttttctatctgtcttgcatgcacactctctcgcaagcacattggcacaaatgaatttgttgcaccagttagggcatcgttccccttaccagcctgtggaaaccacctctcaagttcagaacctgtcattaacttaatattggagttgttatttttgcatcaactaatgtagtttagggattagcaatttttttctttatttaattttcttgatgtgttgttttagaaattatatgtgtatatatcagtttgtgtgccaacattttgatgatatattttggtgtgggattaatcatctagctaatgtaccaaaaaaatggatattgatgctttattctgtagttgctgtttgataaagagacttttatgggagttcagaaaaataatttagtcctattactttttattgtgggtttatttaaaattttttgtgcagtgttgcataagatgctagattttagttgtatgtcctttattgaattcttccacttgatcttactatgtgtcaagtatgagaattgttcaggaatttttggatttaccattttctgctcttttttaaaggtc

SEQ ID NO: 42576 - DNA, 801 bp, Manihot esculenta
  Intron number 3 from transcript cassava4.1_020287m (locus cassava4.1_019085m.g) derived from phytozome v7.0 (chr-ID scaffold10015; pos 373972 to 374772 reverse strand)
aaggttggactgctagattgcttccttcaagacaggtgagtcttaaaaacatagttttcagagaacaataatttacaacttggtggaaattgattatagattttttttctccaaatgagattccttggagttttgtgttaattctgttttcactttttttaaaaaaattttttattgggaggtaaatttattttttaggatcttatatgttcatgtttgattgcattagtgatgtataacaaggatgagcaaaggaaaacaaggaacaaatctgtgaagaaaaagagaacttgtcctcattagtattattatcagcaattaccataatccaaagctatcaaaagaatgtaaaattagccctatttatagagcttataaacctaaacaaatgaggaatagaaaccctaactaattaggagtagacaaaaaaatcccaacccaaatcaaattaggagtagaagtcctaactgattagaaatactaaatgcttaaactaggaaataaggctaaaaataattaacttcctaaataatcaaatattagatttcctaattctacaataaacaaaattcctaaactgcattagggttcttatcttcccatactctaattagtgtatcattttatttattcaaaatgtatttatctgtagactaggttctgctgttacatatatgattgtactggtatggggtcatgggataagatattagacttttgcattccttcccccaccttatctgatttttataatgaatatatgcagtttggctatattgtgctgacaacatctgctggcat

SEQ ID NO: 42577 - DNA, 716 bp, Manihot esculenta
  Intron number 1 from transcript cassava4.1_020287m (locus cassava4.1_019085m.g) derived from phytozome v7.0 (chr-ID scaffold10015; pos 375131 to 375846 reverse strand)
tcctgctacaaggcgcagcctccatttttgctctggtaaatctttccctctctctctctgtgaattgttggagatttcgttccttaatcattttgtttcgatagagatcttttacgtaacctcaagcatggttttctaagaggttcactgattgtgatcagtacccttttgttagattcaggataatgcttttgcaatctgttgtaaatatttctccttgggtctcactcttgttaagtttttaataatctatttatgctcttctttaaatgcctatacttaagtttttgctttggtgagaaaaggaattttgactaatggaatgttgggtttagtgcagagtgtttgtgccaattttgggttagttctgtctttgaaaattcgattttttaattggtttggcctatttgaggaatgctttctgtgtagtagcagtatgaaatattgttgttagatttaattttatggattttatgtgacgtgaagaaccattgaaattaagacactggcaaaattcaagtgcaattcttatttattcagagctgatgaaatcctcttcctagatgcaatttttattttttcttccggaatatgttcttgtgtttcttacttttagttgaaatgtaattaacatgctcttttctcttgctttacatattgttaatgttaatttgattttttttgtttgacattctcagtagcttgcatttggaaga

SEQ ID NO: 42578 - DNA, 859 bp, Manihot esculenta
  Intron number 2 from transcript cassava4.1_004365m (locus cassava4.1_004365m.g) derived from phytozome v7.0 (chr-ID scaffold06697; pos 357870 to 358728 reverse strand)
cttcattgggcttctgcttctgggtattattaaaggttagtgctaatatcaattttgattccattttttttgggtttgtgatggagttaggagcaattgtaatctaaaatggttgattgtgaaagaactgtaacttgtacttctacaatttgtgtttatcaatcacaggatgtaattcttctatctcacttcactgctcacaaattccagaacgaaaagaaaataaaaagaaacaaaacactcaacaatggctgcaatcatcccccagggaagaatcctgtttggaaaattatgcttctctgtgtgagagaaaatgccagatttaacagatgtctttcctcatctttttcatcttttatttattctcttcctttgctgcacgtgcaagccaggctgtccccctacatggttcaggctcttcttctccttcctctaactgctgcttacttctagaatcttccatccatcttctagaatattcctggctcaactccacgttcctatcagtttgttctttttctttcttcttttggtgattgttcctttctgatcagttcagtcataaggctaatatgttgaatgtgactaataacttacggtacctatcatgtttacattttgaaaaatgtgaatgttgattctctgcaagttagtatttttagtattagtaaatagaaatgataattaattaattattgggttcatgcttataatgtttttgaaggggtgtacttttagaaaacagacagggtttgctttttggcattccactgtaaatgcatttgattgaaaatgttttctaatttgaacttattgggtgccaaattttatgcacaggtatcattttctgcccattggt

SEQ ID NO: 42579 - DNA, 818 bp, Manihot esculenta
  Intron number 2 from transcript cassava4.1_011695m (locus cassava4.1_011154m.g) derived from phytozome v7.0 (chr-ID scaffold08380; pos 40324 to 41141 reverse strand)
gggtttagcgctagtgccgataatactgtgcgacggtcagttcatttttacctctattttgcccttatgttctgtttggttttacaaaatgttagtatactccactttccattataattgctgtatcttagcttagtttttgttgtgaagtatgcaatgtcgtaaaacaacagtttaagaatttcttcatactataatatgctgatcctagattacaagctctctaaattatataaagaggtaaaaatggttttgaagctttgataataatctaatatcagtgttatgcgttatctatttagcaagaatgtggaaaagaatttggaagaattgagatctaccatacatcttatgcatctagatttagtaattactgacttcccatgaattagctatctagttcaaccatttaacattcttaggattttgtaatgattagctagtcaaacagtggtgcaaaacatttgtttgttcccctcggttccttttttaattgcattaatgattactccagtacttctttttctggtagtaaactaactgtctttcatttcctctcttaaaatcaacacacacgcacacgcacacacacacacacacacacatatcctatgaggtctcagaatgcaatttttgttggataattcatgccccacattttgtctttttcttttttcactaaagctgctccaaaagtatagatgataacaatggactcttcaagaattctccatatttataaagccagtaatatttttggagaaattatctataaaacttgagattttagaattgatgtttcaggctggtttttagct

SEQ ID NO: 42580 - DNA, 914 bp, Manihot esculenta
  Intron number 2 from transcript cassava4.1_010278m (locus cassava4.1_010304m.g) derived from phytozome v7.0 (chr-ID scaffold01495; pos 26270 to 27183 reverse strand)
ccctttttctaaaaatttcttttgggagttgggtataaagtaaatttttggatccaggtttcctctttcatttcatgcctggaacgtgtctctttgcggttgtttaatcaggcttattggaaaagttattaaattttctttcaattggattaattaattgtatcagattatgatatttcttcctcaatttgaaccagagtatgatatgttccttctgcaatttgttattactaatatttggaacatgtttgcatttttctatcgattctttagtttcaaggccctcggcttctcagcatgtgaagttctgtaatgaacataaaagaatttgaagttttgacatctggtatgcctttcgtttaagtattggtttgttagtctgaccttatctagttaatatttgcttcacctaattttggtgattcagaaggaattaaaaatggtcgttgggattaatgaacgttccctcataatagatttcaataaaaaataggaaatatatatctcaactcaaagcaaggaatttctaatgtttcaatccaagaaaatttgttaatgatcttcaagttgttgggaggagttatgctgctgattcttttcctgtttgataatgtttgcacctttcctcctcttgtttattttgtagtttgacgttccttctaggaaaacctttaagtagaaagctatctatataactttcgacaatgtatgcactttgatttttttctgatagatctgctgtgcctgtgcatttgtgttctgtggtagatactagatactgatgcccttttcttattatttatttttctctctcatttaatatgttttgcagttcatttgcaactagccattcattttttgttccatttttccatgcagatattctttccaagacttctttttttgtcattatt

SEQ ID NO: 42581 - DNA, 961 bp, Manihot esculenta
  Intron number 3 from transcript cassava4.1_016905m (locus cassava4.1_016905m.g) derived from phytozome v7.0 (chr-ID scaffold03333; pos 395382 to 396342 reverse strand)
aggcaagtttgttttttcatgaacataaagtagtgatggacatgagctgtaacctagtagctattaagatttaggggatgatctttcattactgtcttgtcagttattgttcaatcttttgctaccatatcatatattcatcattttcagttggatcacattattgttcttgtcagtcactatatgtatttaacttctattgctcagtaacaagacttatttgtaaaaacgctagaaacctaagaagcttgatttgagtcttatttgtcatggaactcctccaaattaagattaactggtgaaccatcttactttaactttgctgagaaccttagttattctgacattatttgctacatgctatcactatgattaatttttaaatgagcattcatgacaatttttctttaactggcaagtgaaacatttagcccttttccttgcaattttgattgtcaatttgaactatgataatggtgttatataaataaactgcaattctgttgaaggaggtcctatacgtgcaaaagcaaccacttatgacttatgagactatgacctgtataaactttagtcacctaaagaagtaagagcaactaagctaaacagaatcataattgactgttaaatgatcttgttgacacgatttggactaccaatcagtagtgtccaagttcatctgaccttgtgcattacgatgaatgcattaaacttgtttgcatctgcttcagttggtttctaatgatttaaaaggatatatcaattgaaacctcaatatgataaatataaccacatattgattggaatgtattgacttttactggacatatatgggcagtgccttttttttaaaccattttagtcaactcatgctcaataagttcttcagcttgaattgaaatacttttgtgcaagcatttacataggctgctactaaaatcttagcacgtcaacttgttcg

SEQ ID NO: 42582 - DNA, 844 bp, Manihot esculenta
  Intron number 1 from transcript cassava4.1_016905m (locus cassava4.1_016905m.g) derived from phytozome v7.0 (chr-ID scaffold03333; pos 396471 to 397314 reverse strand)
gctgttgccaccagaggtacgtgtgcttttattattatcttcacaaattaaattctcgtctaatgttgctaaagggggaaaataatattgctttctaggaaatttttggttcaacaaatttaaacgaaagttttatcaagatacaagttgaaagtcaagttcttgcaaataagggtcatgtccgtgaaattctcagattaaagaacttgaaggaaacatgttttttttaaaatattttttaaaagaaaaaaaaaccttgaagtataataggatcctagcaaaacctataatatgactttcttataggaaattgtgtttatgcatttaaaaataactcttagccacgaagcttgcctgtggatattttggtttgtcaagctatagataacaaccaattctgatgaagtttaggctaaaaactcatgctacatttgaacaaggaagaaaaaaagactaataaagtgtgtgtgcgtgtgtgtgtgtgtgtgtgtgtgtatgtgtattaccagctaccagctatcagctatcctcctctgtgcttgaattttgttcaagttgctcatggctaactggtcccaattgccaaaattatctacataaaacttgaatgatcaatgttgtttcttaaatgccttactcatacatgctctttttaaatattaaacttttgcttttaaataggctctagaatcaatttttgaagcgctaagaaatatcatgaaaagaaacacttctaacacacaaataagcctttcctatagatattgcttataacaatcatgcaattctttttcccttgtcttttctaggtattgaacgtgaaattgcatctcttcaattagag

SEQ ID NO: 42583 - DNA, 845 bp, Manihot esculenta
  Intron number 1 from transcript cassava4.1_034072m (locus cassava4.1_034072m.g) derived from phytozome v7.0 (chr-ID scaffold10173; pos 725849 to 726693 reverse strand)
cacttttggttgagacacatatcgactgtatcaaggtaattacatatgtacatatatattcgttttcttcctttgtctctttatgttgctatatatgcttggtctaactctgcaaatctaggaggaatcatacatgatgatgagggaccaagcagcaatccatgggacccttataagaaatggagaaatctaagtctataacttgatcgtactcaactttaccacctttagaatgctatttattacaaaaaagtttaaaaactaacacttaaaaagtaaagtaaatctgttcgaccatcgatgacatatataaatagattaagtacacgtatttttatacataattaaatattagaaaaataataatactagtatgaaaataccttgctcgtaaaaaaatacttatattagctccattattgatgagtgcataaaatacaatagtctaaatgtcttattgatatcaggtagctttaggtgaaattcaagataacgataaggcgaatggcaaagaagaagcaaaattaaagcttgaaactctcaattgtgctgatatttcagagtttgatctcttcatggtaagctaactcgttctctaccttatagatatacactaaaataattttttatttaattatattataacataatttatcatgtcattagtaataaataaatatatttaataataacgaatgaaactttgcatcagttaaaaaattgatagtttgtttaataactataatttctttattaatatatctactttgacttattatttttttaaaaaaagttcaaaatcactaaaagaatttcgttgccgcatgcaggaagcgtactgcatt

SEQ ID NO: 42584 - DNA, 455 bp, Manihot esculenta
  Intron number 2 from transcript cassava4.1_005911m (locus cassava4.1_005911m.g) derived from phytozome v7.0 (chr-ID scaffold03614; pos 3696278 to 3696732)
gaagaaaataaagaaacttctgcagaaagttggtatgctgcttatccatggacaattctcttcttcaagattttctttttttgctgttgtctaaacttgttaattattttgtcagtattaattacatttaaactgttatctggtaaaatctctggaccacaggtccacatctctgagaaaagaaaatgatttgagttgtagcctcccaattgggtagacaaaaacattatttctaatttctttgttttgctgttaaagattttattgctacccatatctttgaagcagagtaattgttgggctcaaaattctagatgcaagtgtcacaggatatcatatgcatcataaatatccctttttttcaaaataaataaataaataaaatttaagtggttttttgaattttcctcatggatgggttttgttttggccaggagtgtataacaccacagtaa

SEQ ID NO: 42585 - DNA, 513 bp, Manihot esculenta
  Intron number 1 from transcript cassava4.1_000500m (locus cassava4.1_000500m.g) derived from phytozome v7.0 (chr-ID scaffold07519; pos 467533 to 468045)
ctagtaattccactacaccagtaccaggtaccttgtcttcttttcttcttctcctttttttgtttgtttaaatttatttttaattatcagcttcttaccctgattctatttttctgggttcttggattttttagttcaaagttgttggtttttttttcttatgggtataatttttgcttgcttttttttttaaattaaattaaatcctaaaatttcatgatttattttacccttaatttaccagctgaaaatggttacctgaaagccattcttactatgatgtttctttgttatgtttgaatcaatggctcttctgattctttgtgggtttccattttttataaaatttttgtctcattttctctaattttttcttcagatacctgattttctgagcctaatttgattataactctgtatttgctttaattttttctcagaatctgatcgtataagtctaatttaattttaattttaatttcttgttgcagagcagttgaatccaatagtaag

SEQ ID NO: 42586 - DNA, 544 bp, Manihot esculenta
  Intron number 2 from transcript cassava4.1_002431m (locus cassava4.1_002431m.g) derived from phytozome v7.0 (chr-ID scaffold06902; pos 51351 to 51894 reverse strand)
ttctgtaaccactgacaggaagtctacgaagaaaggtgcagtcgcaatttttcttaacatttcaatgtcgttgacgttttattccatttttctaattttctattatgtttagccttttaatcgtagaagttgtatatgtttattagtgtgtttattgatatctgaatttagagggaagagcaaggctttggagtcctcgttttagaattttcgatgttcatattgtggttaatcgtatccttatgatttggcatcttttgtacaaaattttcccctttcaaagttctgttttgggtttgaaggttttcactaacatacattcaagtttgcttggggaaaaatgagaagtggaaaaataatacaaaaaatggatctaacttcaatattatgcctccatgactgctctgcatttgcgttgctcctatcatgttatgtgatgggttccatattttttttcctggacaccattgtctaattgttttcttggattttggaattttgattcgtaggtaagagagaagctgaagaagctgtagagaaactt

SEQ ID NO: 42587 - DNA, 608 bp, Manihot esculenta
  Intron number 1 from transcript cassava4.1_002389m (locus cassava4.1_002389m.g) derived from phytozome v7.0 (chr-ID scaffold03203; pos 179559 to 180166)
gtttgctgccttatttcaggtaatatatgctaacaaaaatggcaattggtttaatcattattaatgcctgctgattttggaaacttatccattttatttgactctctatgtttctttcttttttcttctcttataaatgtatttaatgtacctatgcatgtttggatgaattgatttggttggaaaaatgatgagttgggttgagtatgttgtctatggaatttgtgttcctttttgtgcattgatgaaatcattggatggataatcttaagggcaaagttgttgctttattcctaaatctccttcaggtgcctgaaaatattctacttgaaattcattgttcatgttttgttttccatcgatcccaaactcacctctgctaagaccaaaagttccatgggagttcagtggaagttctggttttttttagcctgtataaaacaataattcatatcaaacataaccttcctttttcctttatttttctatatctacttttcaactataaaatttgtaaactgaagagtgttttcttatctgaatcatgtactctttttgatgtaaacctttcaggaattcgacgatagccaacatcttgactgcaggct

SEQ ID NO: 42588 - DNA, 535 bp, Manihot esculenta
  Intron number 2 from transcript cassava4.1_002389m (locus cassava4.1_002389m.g) derived from phytozome v7.0 (chr-ID scaffold03203; pos 180615 to 181149)
tgttagattctccggtatttctttcaaattctttggtaagtttagaatcttgaaaatacttaggcatcatattgtttatccctttaaagttggaagtattattcattaatgaattgaatgcgagagatcgtcaagcttaaagcgttgcagtaaaatataatccattatcagatatgtctatgattttcttagttaagttctgtactgattacctgaatagaattatgatattggtggtacaaaaaggtttttgtggctttacatgcttggtatggagaaacagatgaaattttgaagtaaaattattcttatatttcaactaatcaaatgatgttctcctttgtcataagcatctgttcaacttatcagcttcttgaatctataaactctcttgatttttctgagttgaatgttatgtgttacttaaatgttactctgaaagaagaaattggtagtttttctgcaatgtgctaaagattgctactgtatctatcgctcaggcacaaccgtctccaacaactggaaaattctcatt

SEQ ID NO: 42589 - DNA, 512 bp, Manihot esculenta
  Intron number 1 from transcript cassava4.1_008971m (locus cassava4.1_007513m.g) derived from phytozome v7.0 (chr-ID scaffold04465; pos 138497 to 139008)
cccaggttaattctatacccttttcttcaaaattttattttttcccttttcggttcttttaggtttaattatggtttaaattgtttattgaacttctaagatcaagcgtctcattgttctatttttattctatttttttccctttacatttgtgtctgtgtttttgtgatctatatgtgattctttgggggctctctctctctctctctctctattgatttgtatgtgtcctttttgcctttaagccttaaattggaagtcttattggatcataggattttctaaaaaattaagcttttaaagttcagtttttataatgcaattgtatctgtaggttttagagttgatctactgaatgaatttcagaaacttgtattttctgtctattcattggatctatttgtgtttccaaatagtcaatgcgttttctgcttgttatttgattggatttttgttgggtactgatgaatgtaaaattgatttatacagtgacacttcagtaggcgttgcgc

SEQ ID NO: 42590 - DNA, 735 bp, Manihot esculenta
  Intron number 1 from transcript cassava4.1_016792m (locus cassava4.1_016792m.g) derived from phytozome v7.0 (chr-ID scaffold07012; pos 989373 to 990107 reverse strand)
taaagaaggattggcagttacccgttgcaccctaacatgacatttcttttcctatttctgagtactatatgtttagaatgactaatgtttatttgttgaggaaaaaaacttggtgcataatgtaagcatcctttatatcaaacttgcagatgagatgatgtgtttgttctttattgttattaaatgatttctttacaacactcatacacacataaaaagagagatagagagagcttcctctgtggtattttgcatgtcaaagtaggaagatattagggttcttgatccctaacagagaaattagacagtagaaaaggatcggaatatagcagagagagaactagaatttagagagaaaagaatagagaaagatagagagaactgagttatatcctagatatttctggttagtttttgtagttacaatagctgttatttctacagatttagatctatctagtaacaattcctgctactttctaactaactcaacaacttcagttcgattcctaacacctgctaagtacttgcagttcccactacccatctaattcccttctatgcacaatctcatctctgcttcaatattgaaggttttgtttgtgaatatgtactgcttcttatgtattctttttattcatttcaactgaattaaggtttgcagttgtttgtgaatatattggtttgattattttattgtttttcattattgacagttgtgaaaatttgcagaaa

SEQ ID NO: 42591 - DNA, 729 bp, Manihot esculenta
  Intron number 2 from transcript cassava4.1_007214m (locus cassava4.1_007214m.g) derived from phytozome v7.0 (chr-ID scaffold01551; pos 1297073 to 1297801 reverse strand)
ctcctgtctctccgtccgagatagacgacgttaaggtacataaattttgtgtgtatcctcttgttgtttaagcactttttggcttctacaaagcacgattactgagctacactgagtactgactcgttcatgcccaagaagacaaatctcaggctttctctataaccaatgttccctttaatctcctccggaagcaatagttttgtttccttttcttaaaatatgctttccttcggtggaaagaatatctggcccagttctagttatatatatatttttaattttagcgaaaattcggaggacgttatttgtttgattttgatgaagcatataattacctaattgaccttgcggtttttgacacaagtccaaaggatggaagaaaatagaaactgcctataagaaatctgttgtggacctttgattctgtcaaaacgtggttatgtttagttccctatccgaatttgttaaaacaattacagagctttccatttatggcttatgtaccttccccatcaaacatacctgcttgggacgattaattattggttaattaatttttgttgttgcccgtgaattttgtttttcgattcttcaatggtttatcatgatgcacaagagaaacaaatcggaaattttgcctcgtccaaatggtaatttgatgagacaattcaattgcttttcttctcggcagtattcccgtccaaataataacgttaacacccagtt

SEQ ID NO: 42592 - DNA, 820 bp, Manihot esculenta
  Intron number 1 from transcript cassava4.1_006345m (locus cassava4.1_006345m.g) derived from phytozome v7.0 (chr-ID scaffold08003; pos 366779 to 367598 reverse strand)
tttaggtagttaatgcattgcccttcttattttacaatatgcttttatttatcctggttaaattttttacctggcaggacttttgcaattacgtaatttgggttccttatgaaacaaatatataacaagtaagatacatgtactcgtgtgtcctttagatgacatttcacgtgtatgtgctcttttttttttttttggggggggggggaggatgaagaatgatgaagttatgtccattctaaattattatgtaacattgtttttgtattccactattttcgtaatttgatttaatactccacttgtgcacatcatgcattagatttcaattcaattagacattgacaagtattgatcaaaattgtaagagtatcaatttgtacttatgtcaagaaaaatcttattttgaaagagttctgtaaatgggaaggttacagattacccaccttgttttttaatttttcttacacaatgaacaaaatggataatctgtatccttatcatttacataacttttttcaatatgtgtgtgtgtgtgtgtttcaagttcatcaagatttccgtaaaccttggactaaacaatagggtttgagcttctcttattgtaatggcaaattggaatttctaagcttagagtatcctctcttgaatctgtgtacttgaactatatatatatataatgtatatactgtgtgcatacatgtgtgtgctgacacatgcgcgtgcgcgcgtgtgtgtttatgcttttgtatttggcttgtatttatatttatttcaccctgtagaagctgtgattcaacatttgggttggggagtctca

SEQ ID NO: 42593 - DNA, 1026 bp, Manihot esculenta
  Intron number 2 from transcript cassava4.1_009867m (locus cassava4.1_009867m.g) derived from phytozome v7.0 (chr-ID scaffold04314; pos 122707 to 123732)
agcttctcaagtctaaattttgccatcctatactggtaacttcttttttaactatgagtttttaggtacatttacatgtgctctttcatttttttttagttatctggtagacttgctttaaaatttgattaatttgttagtggaatgctcgaaattacttggtaaatgtaatttatgtggctttatctaattaaattttctcgtctggaaagtgaagttttccaaatattgaaaatgtaaatttaggtgaagttaagtatagttgactcgtttgtagttgtgtgttctcctgttaagttgctatattaagcaatgcttctcgagaatgcatgacgcgtcgtcatgcatataattgatacggttcatcagatcaagaagtttggtatttttagtccatctttatgtagtgcatgaaaatggtgatataaaaaaaatgtgaatatggaaactttttttttaaaatagaaagactgtgttgtctaattagctaatatatgaagagaaatgtagtccgattgaacataagatatgtaaaaagtataatgatgcatttatctttatttttaagtatatcctccctgaatcacatcctatttttttatgcaaggatcttatatcccccatcgtatccttgtttcttgcacatctcataaagatttgtttttggacatatacaacgttcttgtctctttggggcaaaagaaacagatataaccaagaggaaaaagcttttggcatttgccctgtcaaagaattatattctaagttgtatagatttttgggtaatgcatcgaatggtgctttgcattgttcttctttatttttttgcaatttacgtctctgaatttttaactgacgacaaaagttactcttttaccttttacaatctaaacttgtgagttctattactcttgcctgcctcataacactcgacattgatgcttacaagtcacaactattgaaaaggtttactttctttatgattgtttttattatttccattttacaattacaggttcgcctggg

SEQ ID NO: 42594 - DNA, 885 bp, Manihot esculenta
  Intron number 1 from transcript cassava4.1_026621m (locus cassava4.1_026621m.g) derived from phytozome v7.0 (chr-ID scaffold06914; pos 1008558 to 1009442)
tcagcattagagactgatacaaaacgtgctaaacagtatgaactttatagaatttttttttcctgaaatttcctgtatctttttcttatcttggtatattacttttatatatcgtatgggtcaaggcacatgattgctgcattaatgtcttctcatccttagacagatgtttgatgcaccttcattcttagaagggaatttattatttagttcctatgctatggaaaaactcattagttgctatgtgattttgaaaaactcatttgctgatccttcagttttgtaaaaagtttacaattagttcctttgtattcagagcattttagacttttttgtaatatttaacggataaaattaatgaataaattaattagtaaattttttaaaatgtcagaggcgtttaatgtattttctaaaattaagggactgaggagtttcctaatacaacaagcaccaaatagtaattttccgttattggaatatcatagagttgcatgccagttttgagtcttgacctatgtgataagctatgatttaaatcattcaagcatgagcgggaataactgatgtttccaagagaaaatatgaactcctatcctatataagatttctgtatttttgttaagcatacatgtctaccttaaggtttgggcttgtcctataactttaatttgttctcttcaatcttttttgaacatcctcttactcatatgtggtagttactttagaaatttgtttcgtaagaagatagtctaatacacaaatatgtaaaattgaaaagttgtgtatgatgtggaataaagtggtcagtgatatatgatgctaaaacttaaaccgctatctaatgtagacaatttgctcaacgttcccgggttcggaaacttc

SEQ ID NO: 42595 - DNA, 987 bp, Manihot esculenta
  Intron number 3 from transcript cassava4.1_013246m (locus cassava4.1_013246m.g) derived from phytozome v7.0 (chr-ID scaffold06631; pos 366290 to 367276)
gcatttcaggcaggtaaatgtattttctatcccgctctttcttcctttttatatttcttttctccagaagtaaagattaatcattaactaggcatagcatctatacacaggagagaatccataaaatctagaggctttgaccaaaagcaaactcaagcatagaaacaagaagcacgcacagtagcaaaagcaacttgattagcttgtctaggaaccaattctaaattaaagttccttccatgtggacgaagaacacatgccattatatttgggggtttttagatgagttggatttgcttgttttcttgcaggttgatgcttgactcaacttctattcccaaaagagattcataaattaaattttcaaactccttggtccttgccaatgtcaacaaccacataaatgtctgctaagatgcagttgactgcatgaattgtagttccttttctcccttattttcttaaatttagtttttggagaaagatttttgggcttctacctctattgaatagggatatttgatccttcactggaccccctaattcttaaaggaataaattcatgcaagtagttttctatattttagtaatttgatactcaggcactcacagaagtgttttttttttttttttttttttggttaaagctgaagcttttctttttattattttaatttcattagccttttatgtgctaaattgctactttttttcttgggaaagaaaagaagattatgaaaaatctgttcaagggacatgacttaatggatggtgtgactaaagtacaatggatgagtttatgaactgcaaaaaaactaaaaacaaaatctatcatagtattgattgactacatcattttgctctatttgtatgctgatatgactctattttttcttttcttttcttttttttttttttccatttgtagtccctacttatgatttgctgttctatttttcaggtagttttgagtttactcgttgtaac

SEQ ID NO: 42596 - DNA, 1028 bp, Manihot esculenta
  Intron number 1 from transcript cassava4.1_007991m (locus cassava4.1_007991m.g) derived from phytozome v7.0 (chr-ID scaffold04175; pos 808691 to 809718)
ctgatccagagaccgagaaggatcgccaattgcaggtaattctatcgtttattcagtaggttacgtttatatcttagagatttttcattaatagcaattgggcattgagttttgatatagtgtgtgtttagcagctttagaaactgaagcgaagagagtctaagtagccgagttaatggtgtcagcttttaggcacaaagagttaacaaatgcgactctagtcgtatttttcttgaaaattaaacagatccatttctgatagtagggaaattcagaactcaatgaggcatagatgccattactggctgatgtttgattgattagtgtaaatttggaaacatggaatgtggaaaccattcggtggatactgaattgttgaagcagttttgcgtagtgaactatttacgtctgaacttgtggaatagtgtggtatggtcttcatagatctcctaaagaagggagagaactactataactatatcaagtaatgggacaaatacaagtgctctatatgtttatagttggtaaaagaaagaaagaaagggagggaggaggaaaagaggaaatcaggttaccattttctgcatcagtcaagttgagatgttgaggcagatatataatcaccatccttccttcacgatattttagtacagtgtttatattgtgagaagggttccagatacgttgagaactataacaaaaaagaaggttcatgtagggtgcaggggtctctgaagggatcagaatttaatctcctttataattatggtcacaaggatatcatagatgtcttcctcttttctgcttattattttcatttttttaaatgttcttttgaaatacaattcgtcttcatattagagtatggagaccttttcctcttcctattagagtctaaaagtgttgcaacagggtatataaattttctgcttgatcataatctgaacttcagtgacattatcgaggttaactgtggagtgcttctgatttcaggttgctttaatagaattcttgtataaatccaagta

SEQ ID NO: 42597 - DNA, 590 bp, Manihot esculenta
  Intron number 1 from transcript cassava4.1_004177m (locus cassava4.1_004158m.g) derived from phytozome v7.0 (chr-ID scaffold06853; pos 292108 to 292697)
ctgatattgcagctgataattctactgcaattgaggttttcctttttcactttatcatttttagttaattttcattatttattggatattattttctgtttggttgttgagtaagagtggaaaaagcaaggcaaaagaagaaaaaaaagggtatttagctgtagaattattatatgggaccgaaggaaaaagaaaaaggaaaaggaaaattgaaagctatgatggtttctgatggaacttgttaaactgacgctttgctatcaaatgatgtagttaagcttttgttttttaatttctaattgattcatagcgattagtgaggagatgcgtgttgtgccgctgcagcatttgtacttcttgaagttgagctagttacgctttgtaatttctgatcataaatgattgatcacttcatattttcaaagggatttaggtttttgcttatttattttgagtggccaaggtgaataccaattctattaagagtagcgttcaccatggatggattcgattatgtcatttgcaatgttatttttcctattaacttataataggcgaactttccatttcttgctacagttgtcatctgt

SEQ ID NO: 42598 - DNA, 917 bp, Manihot esculenta
  Intron number 2 from transcript cassava4.1_027369m (locus cassava4.1_027369m.g) derived from phytozome v7.0 (chr-ID scaffold03280; pos 16914 to 17830)
agaaagtagtaagcttgtgagtgttctttaatttggattctgcatcttcttgttttgcttttgcatgtttgatttttttccccccttctcaataagaaaaaagtttgagcaagttttgaagcaatttatctttagctcttttgattctttaatccatctaatgggattttttgcttgttttaatgctattttggttgaagaaataataaataaaattgaagtggagttcctgatagtcgtgtatattatactattttaaatctttatttaatttcttctaatttaaaagcttcaataatctaaccgagtagtcgttggatatccatttaattcaataaagaaactaatgtgttgaggaaatatcaatttattaaagatttcccctctctttctctcttggatgagttctcaatgtctttccaaggtagaatttggacaataggatactcccaaaaagaatttactaaaggctttataaatatagcttaaactttaattttttaaccaaggacccagatgtagatgggaagagacaaattaaatactagtgccagccaccttactgatttttattgacaatttgtttgattagattagattaggtaagattatatgtccgctatttagtgatgcatatgtgatgtttgtatggtggactgttgaaataaattggctaaatagttagattcttgcttttttctttccttactacttttgagttttattattgtaaattatatttctattatcattgtttcttcgtgctatcttttactatgcttgtggatcatattcctcaatctgattatgtggtttatcagaactttggtttggtttgttttgttatttttttgcctaaagtcagaactgttcaacttgaaggcatttgaaagatctgtgtcttgaaggaacactgg

SEQ ID NO: 42599 - DNA, 1006 bp, Manihot esculenta
  Intron number 5 from transcript cassava4.1_011127m (locus cassava4.1_011127m.g) derived from phytozome v7.0 (chr-ID scaffold00341; pos 243662 to 244667 reverse strand)
ggaactggtaggtaccaaatattcctataatttcatttttcttacttatttccatgaatgtctgctttagattgaaataccaaattcagcactccatttccttgatggcattattctttacaacccagactgcctaacgtattaagctgagaccactaaatgtgcattatcttggaagaatctaaaaggtgaaaatagtagatctttgttgaatctgccatggtcttggacactcctcccctgagctaacttttgggctgagttaggccagacccagatttaacatgctattggcgatgataaatattttacactccagtgtaattttggatttgaggggtgtgtttgaatcttatatcggtttgggatagggttatgtctccttataagggttttgggcacttcccttgagctagcttttgggtttagtttttggagtgagttagggctgacggcccggatccaaatttaacaatctttctttggtgtagtgataacgggtacattactaattacttgattgttccagaaatggaccaaatgttgcagagtttcaaaagtactgcatttatttgtgatatggactacatcttgcagcagaagggttagcttttgtaatggggtctcagaatagctaacaagcaactactaagttcccccacaagaattaagctgtatgctctctggaaagtaattactcggaggcctttactcaagaataataaaacatgcactaaatttgacattgaattatttgattgatctttctcttgtcttgttgaaattattggcttctttggcttgatataccaacctgtatatcatgtatgtgtcgcacattcattctggttaatttgctttattttgtgtgcctaaattatttgcgtggaagatgcaaagttccagaagtaagcaattttccctatttatattgtttttggaggactaaagtgaacccttcatgctttcaggcgtaacattaaagaaactggagaaagagaaaggc

SEQ ID NO: 42600 - DNA, 548 bp, Manihot esculenta
  Intron number 3 from transcript cassava4.1_009998m (locus cassava4.1_009923m.g) derived from phytozome v7.0 (chr-ID scaffold04151; pos 75597 to 76144 reverse strand)
tcacaggttggtttacccggtttccgattctgctttctatttttttctcttgggtttaattttgaatgttatgatctaatattctaactaaagtcttatgtcattccttacggcaaatcaagttgtatgctttgtacaacttcttgcatcacaactttagattaccatatacctgcttccgagcttcaactttcagctcattatgtaaaatttcttatttattaaacttattaaaaaaatgtttaaagcttatttaattgttcatcatcattcatccatgcactttaaggaatgttctgtccttagtaatatatgatcaatactgatcttattaagattttcattctattaccttgagaatcagttggcaagaaagatctacgaaaatgaatgtctttcaatatcaataatatgtagaacagaccaatcaggggcccttttgatcatcttatgcaaattgtaacttcacctgctctatccgtcttctaaaaatcaattctgctattatttgtgattattttatatctttttgcctgtttcttgcatag

SEQ ID NO: 42601 - DNA, 475 bp, Manihot esculenta
  Intron number 3 from transcript cassava4.1_017507m (locus cassava4.1_017507m.g) derived from phytozome v7.0 (chr-ID scaffold07591; pos 64829 to 65303 reverse strand)
gtaattggaagcaggggtttaggccctatcaaaaggtattttcattcttcttcttcttcagctctagtaactcccttcttattttcacttcttggtccaaaaaccagacctaatcgatcagctggggcaattaaattagaaaccggatcaacagatccaacaacttttatttggctggttttgctaaaccagttgaatactgttttttcattaatcctggaaaagttatactgttggccattttctactgtttttgtatagcacccatgagctatttttcccaattgaaatcaaatactctgtttctgaattggtgactcaatcttgggagaagtttattactattatttatttgattttgaagtagatgaagtgtccctgaacatgcataagttgatttgattatctgaggctgagcagtgatgttgtggatgtggcagggtgttgcttgggagtgttagtaactacgaggtga

SEQ ID NO: 42602 - DNA, 633 bp, Manihot esculenta
  Intron number 3 from transcript cassava4.1_009104m (locus cassava4.1_009090m.g) derived from phytozome v7.0 (chr-ID scaffold08974; pos 131552 to 132184 reverse strand)
ttggtgggtaagtaactggtttagcatcaatacaacaagcatagtttttccactattccttttggtatgatggcttcggccattttaagagtttttgactgtaagggattagaagtaatcctgaagtcttgttttattaagaaagaatgctgctgcttcttcttgtccttatactactactcctcctccttcttccttaattttctttttatatactgtttcatatgctttttcaccgagtataataaattattaattgatcttaaggaatagcatgtgatagtgaaaatactattctgaattctgttgggaggagacttttcatgttattcttttctctgtgtataagtgcttatattcttatttagtaacagattttgcataggatggactaccaagcctgaattttgacttatttggcataaaatgattacttatttctccctaggtggaaactttgttatacaatgcgtaatgtgtttgtatggtttctctgtgttttgttctgttctaagaattttgcacatattaattaaagaatttatttcacaaatcctattatgcttgtttttacctgcatttttgtattaccatctgattttatgtgaactgtgcagttccttctacaataac

SEQ ID NO: 42603 - DNA, 605 bp, Manihot esculenta
  Intron number 1 from transcript cassava4.1_023868m (locus cassava4.1_023868m.g) derived from phytozome v7.0 (chr-ID scaffold07991; pos 28319 to 28923)
ttgttgtagatcctcttcctgagggcgtggatcgagtgagatatctgttctaactttttaggttctttatatttaaatacatttctatatgatgataaaaaaaaaactacatcaaagaatttacttcaggacatgtatcgttctcaatggattttggctctgccaatgagtccattttagacatttaaatgatgttatattggcaattaagaaagtcctggacttctgaacatattatcataattatggctgagagagtccaacaggcaaaaaaaggtcttttgtgaatgaaagatgattcctaaagtagggggactggatagggatggccatgagcccaccacttactctcattttattgcaattccaagttcgtttctatcttacatcattaagtctgtcattcaaataaagtttagaactttgatttcaaagtacattttacatttttgcctcaacatttttcactacctcttctatcctaaactttttgaagaaaacagtcactgcttctcacttattactatcagtgatggcttaatcacatattctactcatttggaagtttaatgctctatgcagggttatattgtgttaaatagacc

SEQ ID NO: 42604 - DNA, 1060 bp, Manihot esculenta
  Intron number 2 from transcript cassava4.1_015158m (locus cassava4.1_015158m.g) derived from phytozome v7.0 (chr-ID scaffold08020; pos 19590 to 20649 reverse strand)
tatacgaagctagatatcttgctctgctagaggaggtactattttgttttataccttgtgtgtgtttgtgggaagaatttttgcaaacctttgacccttttcttagacatatatatttcacgttgaagctgtcatgaaatattgtcttgcttcattgttttaacttacttccttattttgggtattatagaatgataagaattttagaaaaaactcctgatttttctccttcagctgacatgcattggttgttattcctctatttatgttttgttaggtttctcacactaagtttggctataattggaaagaaattaaaacatataatttttcatcaaaacaaagatggctttggaccaaaccaaatttctaaaactaattcggttcattcttatttcagtttgaaccaaatattactcactatcttttgtttgaagaatttcaatgaatacctaacataaatgactgtacaatcacccgataatataataaaagatatttattttgatagacttggagatggttaatttgcatagtttttgtctttacttggctgatagctcaatggaaattaacctaaaagacctgcttagcagaaaagatatatatgttcggtaactggttttgaaatccttttggagaagaataatgagagagaaaaaaagaaggcaagcaataaaaaggtagatattagtaatgggtaaaaaaaaaaatcctttcaccctgaaacctttttcttaaaattctgtttgggagcatatgaataacgatgtatttgattggcgagaaactcattttcttgtcctcgtgtacattattgtctatgtgttgtgagtcctaattcccttgttcacgttatactttaattttcaactcattatgtctgaaactcatagttttttgaggattggagtatatatatacatatagccattactcgtgtaagaatttttaattgcttcacaaatagtctagtaagcaaaatctaacttgaatgcagtttatctcataatctgctattgcagtctctattaagaaggaagaagatatttgtgcattt

SEQ ID NO: 42605 - DNA, 837 bp, Manihot esculenta
  Intron number 2 from transcript cassava4.1_018553m (locus cassava4.1_018553m.g) derived from phytozome v7.0 (chr-ID scaffold11132; pos 104259 to 105095)
gaccattttactttgtaagttatagtttttcattttattcgtgacatatatatgcaattaataggatgatgttttgttgcatctcgattcttaaccttgaaatgatcatgtctttaacacttgtacattacaactattagcattctgccataaaaacaaacgttattttggattgtattttctctaattaaagcatgcataatagtcatggatatattatctgaatgatactattatgtaaatgagaaaatgttttggaatggttcattttttttgcaagaaaataatttaaatgaattcttacaaaatcatgcataatttcattttctattaaaatgaaattttttttagtaaaaaagaattggattcttcattccaaataagagaattgattggaaagaaatcaactaattttgaatagggagatggacttgtatttttgctttccatccaagctcgtctagcattcgatcattgcttaaattagctgcacgacaaatgggataacatatcatcattcattattttggcacttgattctggtgaaagtggcaacctatgctttgaaacggaatatagttggataacggcatgggggggattgcaaactaagaaaatggtaaataaaagagtttacaccaccaaagctctttaaatatttgtaatctaaagcacaatcttaaaaattagctctttgatgttgcaaaattaaaataaagaatcattttttttttataataattcttctattatttatttacgaaaatttgggatggaaattactgccttttaccaatgttttaacatctgctcaatgatcctgcaggttgctgattc

SEQ ID NO: 42606 - DNA, 617 bp, Manihot esculenta
  Intron number 1 from transcript cassava4.1_011723m (locus cassava4.1_011723m.g) derived from phytozome v7.0 (chr-ID scaffold03614; pos 2857990 to 2858606 reverse strand)
cttctacaacttctggaatcaatgtaagtctctctctctctagcttgttttgtttctgttgtttgttatctgctgtctgctttctccctctgcctattatttgatgtttgttctgagtggatttatgtgtttgtttgtattcaaaccctttggtggtgttaggacaagcatttgggttgtcatgttttgggttttgtttgtggtaggattggcatgtgggctgtctgttttgtatttctttagaagcttgaacttgttcagatgtgaatgtctgccatttcaggggaaaatactgctcttgttttggcattcactactttgcccaggagtttgctactctccttttaactttattccttcaactcagtatcattttcttgggaattttttgttcaggccaccaattcataatcataccagagtaaaattttgaaagaaaagattggaaattgtggagtatttgttgatgggtaattctaatatatgccaaaactaaaacgaggggcattagaggaggggtagtttggtcaaaatatgtgatttttactgtcttatttcttcctttttttttctttttcgcaggagagagattctgttcacattgcaagtttgttccc

SEQ ID NO: 42607 - DNA, 869 bp, Manihot esculenta
  Intron number 4 from transcript cassava4.1_009411m (locus cassava4.1_009411m.g) derived from phytozome v7.0 (chr-ID scaffold04260; pos 66902 to 67770)
cagaaatttaggtgcacatataacttcaaactcaggtaaatccgttgatcagtttgtacttttatacaagtaagcaatagtttctctctctctctccactttctatgatttatgctcattagtcattacatataccagaatgtatcagactgtggctttctgctatttgaattgttttgttatccaaggggcagtagactctgaggatgaaatgtatctttgctttaaaaatgatttattttcctgaaaaaggaaactgagtcttctgccaactcaggtgcctcaaatattttgtatcttgaactaggtaacttcacaaggccccattttagaggaaaaggctgatcatcctggcttttcaacattgtggccccatatgagtgttcattttcatcatagtggatacaaacaatcttaagcattcttatgttccatttcctgattgggagaggattagatctttcttatggttgtcaaagatgataaaaaattgaaaagaatgtaaatctgtaattctggcatggaaatatgatcttcctctgattctgtcaatttgtaatgagaatatgattgcgttacagcttgaaatcttttgtttgacgctacaaaattcttatatcatgataaatgagttaatcatgacacctcacgtggttgcattgtagtgtgatatctcataattccagtaacatgatcaatggctttctcatgatatttcatatcatagatcaagtttgatgtcaggccattctgttgcaaaaatctgctgcaattttatatttttggttcttgaacatattttataaatatggagaaaccaattatcacactaaagttgaacctatatttgcctagcttgcccgtatttc

SEQ ID NO: 42608 - DNA, 725 bp, Manihot esculenta
  Intron number 2 from transcript cassava4.1_008089m (locus cassava4.1_008089m.g) derived from phytozome v7.0 (chr-ID scaffold09761; pos 240134 to 240858 reverse strand)
gagtaagttttgcctcaatttcttttcccttaaaaggaatcttcttgtgttattcttgcattgatattacaatcaatatgttaactttcaagttatgatgtagtcttggattaaattcgttcatttgctatgtatattcacagtaagatgcatgtgattaccagttgaatctttgtatatatgcatatgacatgtcaaatactcaagctgactcagttatgagtttttgtcaaaattatttttgagggaaaatctacttaacatagcttggtcaatgatactactatcagtatataatttttgtggaagagaacaagccacccaaatggtttatgattggtcaaattatagattctacaggcttataatattcataggaacaatttctttttaggggaacctgcaaaggtctttggattacctggttgttttactgtctgtgcatgttcggtatgatgcaattgaacatagcataatgaaaagaaatgtatcttagttcatttctattgaatttttgtttgattacattcatttctttcctaagatgcacttcttcaattcttttggcatctgttatcttttgaagttgtaaagtacatcaactagtttgatgggtttttaaattgaccatagcatgatttagaagataaaatttggagcttatcaactatctggtttataattttttaggttgtgcaaaggtggtgaactattggataggatac

SEQ ID NO: 42609 - DNA, 665 bp, Manihot esculenta
  Intron number 1 from transcript cassava4.1_004260m (locus cassava4.1_004260m.g) derived from phytozome v7.0 (chr-ID scaffold01895; pos 180779 to 181443)
attctgtggatttctcctacctaatttggtcgaatgtaagtgattttgatctctctctgatttttcttggcttttaataactgtttggttcccgagaaatctgaggagaaggaaggagtctgtggatttttttaattctttttcaagctatacttggttgcttcgagatttctagttttcttctaatggatcacagttcttctttttgttttttttttttaaaaacgtttgaccgacattgtcgcttattgttcctctgttagtgaattaattattacgtaacatatgattccaattttctctcatggtttttgtaaaacatgaatgatttcatgcggctaagttgtgaaaaagaactgtagatttctaagcggtttaagaaagctgcaatataattaacttgatcaactgttctccaactttttttttttttcattttaattgaagaacttgtgattttcctgcttttctggctgctaccttttggtaaaggatctcatttgaaggagcttcctttatccataatgtgatgttatggatctggcaactttgccaggactctgcatttgggaaataaattaaaattattgatttgttttcatttgtgcttctgccaagaagctcatgcgtaatctttcttccttgatagaaggagaacttgggaa

SEQ ID NO: 42610 - DNA, 879 bp, Manihot esculenta
  Intron number 1 from transcript cassava4.1_020186m (locus cassava4.1_020186m.g) derived from phytozome v7.0 (chr-ID scaffold03332; pos 967838 to 968716)
aggtgtggtaataaatgattcatgataaatctcaagaaagtgtaaaaaatgtacctgggatccatatatggccttagatcaagcacctcaccaaaattaacatggccattcaatttacttaaacgaccgcgggcatcttggctgaacctcttcagatgaatagtcaaaataggcggggctttatcaatgaggactctcttagtagcatccctcttcactttcacttttctggacattttctcctcatcttcctcagctccagaacttccagagagttgggaatcatccatttgatctttaacagttgcatacccgctaagtctagaagaatcaacagctggacagctgaaactcccatgactacatgattcatagtgagcagaagaatgagtttgctccacaagagcagaagtcatctcacccatatgttcttcacttcgagaaacaattggttttagctcatctttttgactaatttcagttcctatgcaatttcgattagaggaatcaaattttccattatccaaaactaaaccttcaccagtagagtcaagaaaagaattggtattaatatctccattatgaaggtctctggtttctgtagaacatgagatgttgtctaaatttggtggatgactttggactcgaatctcacttccgtttatcatagtttttgatacagttttaccttgcttcttcttggcttccaacctttctagggtttttgaacagctttcacattcccaagcattatcattagaaagaagctccagctttataaaatgagccaaacaactcttaacagacactggagaatcgctatcaccaacttcacctggatcagactcgctgctgtttcctgctgtaaaaccagtcccc

SEQ ID NO: 42611 - DNA, 649 bp, Manihot esculenta
  Intron number 2 from transcript cassava4.1_008344m (locus cassava4.1_008344m.g) derived from phytozome v7.0 (chr-ID scaffold03055; pos 150864 to 151512)
aactgcccatcaaatccgcacaagtgagtgcattttcttgatttcagtatggagttttgagatctttgtttgattaattactgagagttgcgtctgagtccatgtttatgtccaaaactggatccctttttattcactgtaacatgagaattcagatcctgctgctaatgttgaattctaagtcagtggttttgttttagtttgttgattaacaagatttattaatggatttgatcaccttgtttgctaagcacccctttgctggttaacatggctgcacaacgaagaagtttgtgggaatttggacaaatgtgtggaccctgtaaaactaaactgacgttgtctgatcaataagacatcttctgaatgtttgaaccttaaagtaatgtctttaatcatcttctgttatgttgtgttgtttgaatccccaaattgatagatctcttaagtagtatcctattttatccgtttctttataacattttttgagcttataagttcagcttataaaccgaaaaaaaaaaattgtggaaccggctttcattttgatgcttataagcactaagcttataagttggcagtataataccattttcatattataaatttgtttgtatgatttgttaggttacagaatcaactgatttca

SEQ ID NO: 42612 - DNA, 680 bp, Manihot esculenta
  Intron number 1 from transcript cassava4.1_019633m (locus cassava4.1_019633m.g) derived from phytozome v7.0 (chr-ID scaffold04691; pos 87066 to 87745 reverse strand)
caaccgtcgcctctgctctatattgccggggataggtaaatcttcctacgccaaaacctaaccttctctctctccctctatcttctggaattgggattctttactgggatctttgaaatcggaagaattatgtcccgtttgatgattcttctttggttcctttccaatttggtgctacggtagattactcgttctgtttaatttcattttatttggttagatttaagtttggcttatatctattttgtatttctggttctgggtttttattctgagaaattatttgaaatatgtgcagtactttgctcgtttatagatgcctgtgatgtgaatatacacatatctgtatgcaatctcaaaagcatagcgctttcacatttccagttcgtatgttaagcttctactagtgtttttagcttcaccagtgttttagcttgaccaattgtccaaatttggagatggatggatttgttctgcttcttttttttcttttttttcttttgtatgtaaatattttgttttgcttgccaattccaatgggttgtgcaacaacatatatagatattgattgctgttgtgtttttactcatatttgttggtttggttctttatatgacgtgtgaagcaatttggttgtgttttcagctattaggtttttctcaaaagacctgattgaggat

SEQ ID NO: 42613 - DNA, 752 bp, Manihot esculenta
  Intron number 1 from transcript cassava4.1_020044m (locus cassava4.1_020044m.g) derived from phytozome v7.0 (chr-ID scaffold07519; pos 838989 to 839740)
tacgctccgaccgagaactccgtggcaaactccatgtatgtctctgcattcactctcttcaatctttatttacatatgcaattgtacttttgggagtctttatatctcgcttttgtatccattgacgagaaacctgaatggaaaattaatagtttttccccctgctagtaaaggatgtgcatgttgttttcctgctctcatggtgaggcaaaggttatttttgtctagggttttgcttgttttatatggtttaattggattttcgaagtattattatgggtcaagtgccacaaattgaaattattgatttttggtttattaagaaatgatttttttttttgaaatcaagaaatgatattatttttattaaagcttgcaaatcaaatggttaatgctctttgctgctttttttggtgttttaaattagtgcaggcttaatatgcaattggagatgagggggatcgagggtattttttttctattttctagatgctctatgattttctgaaaatatttgctgaattttataaaacagcaacaacacaggcttaatcccaaactagctgggatcgctatatggatccttttgtaaccgttcaattctttttggaccgatttgctcagtatcttatctaagaaaaaaaagttgaggaacaatttttctattttctagctattacgcaatttacaaattttgtttctcaattcaaatccctagattctattcgtggtttgaaatgttatgcaggcat

SEQ ID NO: 42614 - DNA, 821 bp, Manihot esculenta
  Intron number 1 from transcript cassava4.1_033795m (locus cassava4.1_033795m.g) derived from phytozome v7.0 (chr-ID scaffold04151; pos 266144 to 266964)
gtctcggccaaggcagcagctgaatctgctaagaagtttgtttcttttcttcatttgctcctcgcggtctactttttcattttgcaacttattgatttgcaattttgctatttttgttttgcacagctattttctcctagttttagtttgattctacaaaaattaatgaaaatgtctccgttaaatttctctgtggttctgtttatggatttgtattgttattttaaaaggaaagttgttcatttaaaaggatttcttttcttttttatgcttttttttttctagattgttggcttcttttaaaaagtagaaaattgatattatctttttacttgttgccttttttttttctttagttcttcctttgtttcacgtgttcagaaaattgcgtattatctgtattctcttctgtgttgttctttttgtatactctctttatgtaaggagcatgtgcattgcacagtctacactttagaattcttgaagccatggatactattttttggctagaaagtaagttggcattattttctctccaaacaactccattttagtgtgttcgtgtcttgcattaggggtacctactctgctttctgcattcaagagtgaattggaatacaaataatttatttctttctttatgatttggattttgggagagacgagtgggaaaaaaggagggggggtgttagcaggaaataaatttcccagtactaggaaaagtgtgattgtgattttcatatatcaaaatttataatgaaagtatctcccgacttttgttggttattgaatattgttttactttgtacagtgcaggggct

SEQ ID NO: 42615 - DNA, 983 bp, Manihot esculenta
  Intron number 1 from transcript cassava4.1_004097m (locus cassava4.1_004097m.g) derived from phytozome v7.0 (chr-ID scaffold02815; pos 45350 to 46332)
ctgtctctttgcattgcaagttatcaatcactctgctttaagtttttcttgtagtctctttagttctttagtttcaggattacttcagaaattttgttgtttgatagtattggggactcagtattttcaattgttccatttgctggtttggttattacttattactgaatgctggagttggaaattggactagaatatgttagtcctaggatgtcatggctcattaaaaaagaagggtgaactataatgtagtccctgaggtttaaccataacttagtccctgagatttcattttgttaataaaatactccttctgttaaaattcaactgttatgctatagcaatttagttctctgaatttcacttagtccctttaattttgataatttgaaacaatttagtccatgcagtttcaatttttataacaatttagtcctttaattttagttggcttcttcaattaacgtttggccaataacatatttaacagaaggagtattttgttaacaaaataaaaattcaggtgctaaattgtttactattgagaaaagtagggactaaaattgtaggtattgctaaatcttagggattatactgtaaattacccaagatagaatccttgaattagctttgaaatgagagtacttgttcactagaatttatctttttctttttgcatctatgagttctacaatggaagcaaattaattcttgattgccctaacaattggaactccatgtgattctccaattcaaggtagaattgcttgtttggtttaaggagatacaaacaagttaataaatgggaaaacaacatattttgatgttgagacttgattaacattctaattgtcacctagcatgtgcagtggtggttgtttattgcagtaatatcttttcaattaactgttacatgactatagctttctttttttttattattatttaatactaatcttaggtgattttgggagtaggtttag

SEQ ID NO: 42616 - DNA, 393 bp, Manihot esculenta
  Intron number 1 from transcript cassava4.1_004803m (locus cassava4.1_004813m.g) derived from phytozome v7.0 (chr-ID scaffold01127; pos 656500 to 656892 reverse strand)
tcagcatttaatctcacctttttttttagtgaaaggtaattcttttttacccaaaaagaaaaaagaagggttgttgtttgttccatgtgtagtgatttggacgttgggtaattgaataacttattgaaagcgtatttgaaggatttgtttggattacgtgtgtagaattctgtgtattaggatttgatatgtgacatcagattctattccctttgataattgtcgctcaagtatttttccttataacgatttatagtgattttcttcttcttctgcttcttcttaccttttttcccattaaatgctgtattgaattctgtttttgttcgttaaacgccgtgttattttgctttctcaggctactggaggcgatttcttgtgtttgatcgttga

SEQ ID NO: 42617 - DNA, 759 bp, Manihot esculenta
  Intron number 3 from transcript cassava4.1_018513m (locus cassava4.1_018513m.g) derived from phytozome v7.0 (chr-ID scaffold07991; pos 299143 to 299901 reverse strand)
cagggaacatttccactcgcaattttgatcaaacggtgagtttatttttctttttcttttttcctattcatagctgctgcaatcatgaaaatcctctgtgggatttccatttttataatgcattagtgttctgtatctcacatgctattagttactccatagcttgattccaagaattttgattactatctttgattgaagaatgatacaaattagtaaatgttcaatatgggaagagagaaagcctatagtttctactgatttctcatatttttgttacccttgataatcatgatcttctcaaatgctttttgcccttttatctgctattctttggtaattattgtttttttctgcaagtgtctaagaaatgagatagcaatccccatgctttttttaaagaaaatattgtcggtgatgctagccacatgatagccgtggaattcctgaactgtataaggttcttctaccagttgttagttctccatttgaaacaaactacatattgccagttgctctatttcagtatgagcaattttctcaagatttctttaacaccattttcggacttctgaaccatgggtactttgttgatttttgaaatttgagtgaaaaaggaatattttcttattgaagggcttacattacactaatttattgaaaatttttatgattgttttatttgatatgtaataatggatgagtaggtgcaatataagttttctgctaatagagatactgttattgcagttcaaaaag

SEQ ID NO: 42618 - DNA, 540 bp, Manihot esculenta
  Intron number 1 from transcript cassava4.1_012728m (locus cassava4.1_012728m.g) derived from phytozome v7.0 (chr-ID scaffold03614; pos 1716811 to 1717350)
gtccaatttctcttctgtggttcgcctcaacatcggtctgctctctctgtctctctctagctatctttgtcttcaaatcccatctaggaaccaagtaatttgattgttaagcaactgaaaccctaatttacattggttttgtggttgaagagcaaaagcaacacttattttggtcagcagtagggtttgtcgtgttgtgagtaattaattctgctcgtcaactacatagatttttcattggtagtttgctagatatcgtttcagttgttttcttttcatttttctcggctgccaaacagagatttcaaattggaaatgtgggtggtttcatattaatttaacgaattttaagtaattaagggccgtaattgaattgctattacttaattgttttttggtatttatgcctgctttactaactgaaattgtttttgaaaatgctctcagttaatgcaactgacttattatcactgaagaaacctgtttacttttcgtgttttcataggagggaaaaaattttgcaccacggttgatactttg

SEQ ID NO: 42619 - DNA, 951 bp, Manihot esculenta
  Intron number 2 from transcript cassava4.1_024263m (locus cassava4.1_024263m.g) derived from phytozome v7.0 (chr-ID scaffold06914; pos 525640 to 526590 reverse strand)
tatatacaacatctcaatcaattctccaaacaaaggtttgaaatatcccaacttttgatttgtcaacatgtgctcacagctgtttaacagctgaaatttatattcagcccatacccactggattaaggaccatatcctgttcgttaaaatgcttacaagaagtatttgctccatctgattgaacctcaatcttattcaaggccgaaccactcataattcagcccatacggcttttagagtaagttcgttcagaattaaactttagatatgaacctgtgagctctagctctgtattataatggaataaccttatcgttttgccaattcttaccatctaaatagcttgttattgagaggtatgcctggcctgcataacttttctgcaggcagagtctgagacactacatttcctgtgatgactctgcgatggtgcaggataagattctacagaaatatcaggcaggttaaagatagataatgggatctacttagcaaaatgaatttgcctaaaaccaaagtatttaggaagagatttcctcaaattagcttggaattgcttcatatagctgattatgagaaaagtgcacaaaacttcatagaaacatacgacacaaatcttcatgccaagcttcattcagcgagtagaaatctagccatgtcctgcatggacttttcagaacaaagtcttgatattcttgacttgaaatgctagaattagctttcatcagaatctattaaaatcctttttctgccattgcagtattatttctgatgcttctgcttcttttgacaatgattagtgactgacctatgatccagattgaagaattagatctagctattttctcatgttccttatgtaattttttttctcctcgctctcattatgcatagcttgtaatgatatgataatgttattcttgtaacagaggccaaagttcttaagaccaa

SEQ ID NO: 42620 - DNA, 742 bp, Manihot esculenta
  Intron number 1 from transcript cassava4.1_010438m (locus cassava4.1_010438m.g) derived from phytozome v7.0 (chr-ID scaffold07571; pos 231821 to 232562)
ttttactatttcttggaacttcctttcactcccaggtatcttgcttatgtgctatgaactcctcttttatctgttcatgtcttcatttttaacccttttcctttgggtcttcttcccgattctttgagggattcagtcagtttatgggtttgttggataatcagctagatattatgatatgctcatgcttgatgtttagttgaccatgatacggacaatagtttaaatctaaaagttacgatatcaattcagttttgagcgaagaacttcagaatttacgagaatcatatgcccttttaatgggcagttctagagtttttgcgttattgatatctcttatctaagctgaaatatacgatctcgatcttactatttgagggattttaatctttttttagctgtactatggattctagatgtacatgacaaaatttcatgtgatagaatcaaagacatatatcaattcaactgtactaagcaatgaaaaaggattattttcagtcatactatcttgtaactgctagctaggaacttttatggtttgtgaatttaagcctatctgaagatgctgctgttgttttcttttgcttaatgttttcatacaatgatatatggaggatattcattctgaatcttctttctgtttgttttgattttgaaaattactactttaagttggaaatttttatatgttatattgtcaacaggtgattgctgcggcaccagattcgaagctgaagct

SEQ ID NO: 42621 - DNA, 669 bp, Manihot esculenta
  Intron number 2 from transcript cassava4.1_007091m (locus cassava4.1_007084m.g) derived from phytozome v7.0 (chr-ID scaffold07571; pos 630623 to 631291 reverse strand)
tggagaatcaggccactttactcaggtatagttttgttgcttggtaaatgccatacaaactttatttattcgtgattactctaaactagattaaacttgaaatcaaacattgcattcatacaaataaaatatagacttgaataatctgtttaatgctttgtatttcactatttgttttaattttttatttggcagcttatgctgggaaaggaggaaactgtttctgtatatgctaacagtggcatcatttttaagcttctccttttattctctctctctctctctctctctctctttctcttcctcttcagtctaatatggatcaaggctcatgttagcctactaatttggatcaaacttggaactgggaatggtgtctaaactcgtacatttctgaagaacttcccatcagttgtcaattgtttacattttctttaaaagattttaatatgttatttacgttctttttgctcactactattgaggccataagagttgacaattgacatgtgtcagtttatcagtatcgtttgtatcatatacctttgttgttgggtaatgcaattcacacacttaagggagagatgccctctttctacttctgtcctgtcttcttctttttgtgctttaggttaaatgctgtgcttgctatctaccatacatacaggg

SEQ ID NO: 42622 - DNA, 813 bp, Manihot esculenta
  Intron number 3 from transcript cassava4.1_021166m (locus cassava4.1_021166m.g) derived from phytozome v7.0 (chr-ID scaffold11746; pos 407148 to 407960)
caggtgtgtgcttgggacgtttgcatttgttgacactatttaaatataatgttggttttgtcactttggatgaacttgataattgatattgtcaaaaggcttctcttgtcattctggcatcaattattgggtgcatgctactcatctgtagaagctatataggagttactatgttttaaatttaaccaagtgacaccaattgctatacataagaagttaacagtcaattgggattggctccatcagtgcatatgcaggtgattgtagctcaataaaagagtttaatgtttggacgctataggcctgtatcaaatgaaggggaaaaacctagtacagtatattgaagctgacctgtggttgtaaaaaaaaaagaaggaagttcaacaaacttttctatagtttactttgtattattgtcatcatttgcttgacttggagctacatttgaacttgcatgcacttggcataatctgattattgaggttaaattactatttggatgtttcaagcctccttaaagtatacaatattttgttggttccaacgcagttccacttgccacacattggcggtatctcatctaattgaatttcccattagttaatataggggattcacaagcacatgcaaagaattttcattctagttgtccatgaggatcttctccttttattagtttcttaatgatttttaaccattcccggatattcctttcaaattcacatatggaatcactctattagtgaatgctcctctttgttggcaccttgattttacatcaatagttgttggtctttacaggttctcagccaa

SEQ ID NO: 42623 - DNA, 782 bp, Manihot esculenta
  Intron number 3 from transcript cassava4.1_006574m (locus cassava4.1_006588m.g) derived from phytozome v7.0 (chr-ID scaffold03360; pos 12467 to 13248 reverse strand)
attctgcccatatcaagtggacttcagttcagcaggtgtagttttttttttttttttcttttgtttcttgctcttgatgtttgcattttttttccttgctaacttatactcttcatgttcaatttggaggagattgtcgaattttagttcaatgcatgtattcatggttcagtaatataaaatgcctggtattctgtcttaaccttgcatatgctgccgtgtgaaagaaaaattcacattgaacacagagagatgctttgatgtcaatactcatgtgaatctcataattggggattattagatgctgtgcttaattttggttagaaatctggctgtttgaccttgaactatttcttgacgggtgttagctactatgttgatagatggtctgcagatttaagtagattggctatgcatttatgtgcattcaagttcattacaaaatcaaaattggttggttttgccattaaagaattaaatcgtctatctctagattctgaatctggatttgagcaaagtaaaagtttgcctcagctgtataaatgctgtttctctttgtttcaaagaaatattttctgttttcttctttcttttcaaattttttctttatatatgttgtagcatagtttcttgtttctttcaattttgttttcctttgatcattgttttttgcccaaaagaagagaaggaaggtggggttggggttggggtttggtgggagggggaggagaatattagagtatgatttaaaattcaacatttgcagaaatcaactagtacct

SEQ ID NO: 42624 - DNA, 978 bp, Manihot esculenta
  Intron number 2 from transcript cassava4.1_006574m (locus cassava4.1_006588m.g) derived from phytozome v7.0 (chr-ID scaffold03360; pos 14311 to 15288 reverse strand)
tgaaggaacgttatattcaggtgctcttgtgtttgtttgtgattcccttcacctcccctttgactttgattacaaaatgaatgtaaacgaagtgtggccttgattgctttagtataatggtttgataattatatgatattaggcatattcgtgattatttgagattgcgcatgattttaacagtacattgaagatttagtttggatttgttaaaatggtcttataaaattgcaaagcccatttagtttttttttttaaattgataagttgtgaattttacacatgtaatggattcaaatttggaactgaatcagaatttgggagaaggggtttgctgaaaggtcaatgctagaatcaatttccacacagatctggtggtgcacattattatttattactatgctttggttgtgaaatgtaagttgtgcgtttgagagagggagagttattttgcatgacaactatttctgtggtaatgcctcaatcacaccaatctttaattttaatttgcaatattggtgttctgaatcatctcatttccgaagttagaaccatttgtgaaaaaggggggactttatacgcacacatatatctagatttattcctacatttcctttttcaaaataaaattatattcatgacactgttgaactacgacccagtcaccataccagtttggttcttggtctggtgttaaaaccactattattttcctctttacatttaccccctctaggtattctatcttggaagttcagcttttgcttgaggattaacaaagttttaagttttaattgcctgtgttagtatgcttgtaactctttggaaagcacttggccttcaaaattttcatgtcccaaaaggactttactcttgacagtccttggcctcagtaaatagtattgagagtaatccatggttctgaaattgtataatgctgcaggtacctttatcattttggccccttgtcgaagacag

SEQ ID NO: 42625 - DNA, 555 bp, Manihot esculenta
  Intron number 2 from transcript cassava4.1_012318m (locus cassava4.1_012318m.g) derived from phytozome v7.0 (chr-ID scaffold03025; pos 180958 to 181512 reverse strand)
ctgcaagattatattggggaggcctttcttgcaaggtaaagaaggatttttttttctttattgtttaattggcatgtgttgttctgtaattttattttctaattgaggtttgtgaggattgttgtgggaattggacgttgatataaataagatcatatcttcaagtttgggctgaactttagcctgttttaatggggtgtaggaaggttttcctaagtaaagtaaggtaagttgagaagttaaggcatcaaagctttgccaacccatcaatttgcaagtttcattcgaagcctttttctcaaacaaatttaaaaaactcataccttaaacaactttcacccaaatataggttgtggtcttggacttaggtttggtaacttttggatcattaagagctttagttttgaattaaccctgtgattgattctgcattgtctatcaaactcttacatttaagtccgtaatattcatctaattgtgtttatatttcttgtctatgtttatatttcttgtctatgtaatcaggtccttgataaggaagcttttcagaagcaa

SEQ ID NO: 42626 - DNA, 694 bp, Manihot esculenta
  Intron number 2 from transcript cassava4.1_032756m (locus cassava4.1_032756m.g) derived from phytozome v7.0 (chr-ID scaffold03921; pos 3151 to 3844)
gaagtaaaattgtagtcaccactcgtagtaatcgtgttgctgaaatcatgggcacaatctctccccaaaatttgagtcttcttccacatcgagattgtttgtcttttttctttaaatgtgcattaatgatagatttatagcggctaaaacaggttgtttttgcagtcagatggaggttaagtgtgctgaggcagtgacttttcgagaggtattgagctggattaaagagtgcggatgagatcgagttcttttcaaatcggatgctcagtttcttattgtgtcccttttatcaccttttggtcttttggtttaaaattgtaaattgcttctatccagttatgaggaagcaagatgtgcttttattcacaagtggtctgcgaatgatgtcgctcatattctagcaacatcggctcattctgagtcaagtcaaggaatttgggttcatatccctcctcattgtacagttttcttgatagctttgaattaataatatttttttcatttaagaaaaaaaaagaatatgaagtaaatcaaaattcaaatttgacaacaattgggggagaaatagtgagaaaatgcaaaggagttccgctagcagtcttaactttaggatcgttgctctactctgtaactgatgaacgtgagtgggaatttataagagatagtgagatatgggaattaaagtagaaggaaa

SEQ ID NO: 42627 - DNA, 679 bp, Manihot esculenta
  Intron number 3 from transcript cassava4.1_011826m (locus cassava4.1_011826m.g) derived from phytozome v7.0 (chr-ID scaffold03614; pos 3136830 to 3137508)
gaaccttgttcaagtgttaaagataggtactagttattttgcttttgtactttatggaaggtctctgaatccatcattttatgctttccttcccaaaaaccaaaaaatgacccgaaggaggcattgtaagttaaatgaaaaactaccatcatttcatttttcaatctcgtaatttcagctgaaacttaaaaaaattaatatttcatcaatcctaacatcaaaaatatatcttttgaatattttaaacattcctgaacgaaatgcaatttggcttccaatctgtcaattcttatctgcctcttttgtgccgtatgtctcaattcccattttttgtgaaattgattcaatttgccaacctcaatttcaatttggctgtacgagttgtttttgtgtctaactgagccttagtgccaaatacaagggccaaatcagccttttattgtgtaatatgattttatatagatctgaaatttttactcctagggacatttatcctgtttattgattttatatgatttgcgcgtgttggagctttattttttccccttctttaaattactgtgtagcttcattgttagaaattggatttccactacatgtgagaaaacaaggcctttgaaacattgtggctaatgagatttttctttgattcttcttttgttgtaggattggatatagt

SEQ ID NO: 42628 - DNA, 299 bp, Manihot esculenta
  Intron number 2 from transcript cassava4.1_000850m (locus cassava4.1_000850m.g) derived from phytozome v7.0 (chr-ID scaffold02960; pos 416795 to 417093 reverse strand)
aagatcgcaaaacccgtggtgagaattgtcattcttgtactattataattattatttttgttcgtttttgttttttctctttatttttttttttgggtttaggatagaaaataattagttgattttgcattttagaatttattttaaaagattcttttaattttctttttaatatagttctatggctgagtcagcataaagaaacacgttctgttgcaaaataggtgaagaattgtattcttgagttaatgctggtaaatttggtgtttaaggtccacggattttggggagaagtaata

SEQ ID NO: 42629 - DNA, 581 bp, Manihot esculenta
  Intron number 1 from transcript cassava4.1_005295m (locus cassava4.1_005295m.g) derived from phytozome v7.0 (chr-ID scaffold10173; pos 946736 to 947316 reverse strand)
ttgcagctaagaagggtcatttgggtattattctgatttttttgactgcttatcggcttcaccttttaatttgattcttatttattggtccttcttttaaaaattatgaatgtttttaatcatacttatttgagaattgatctaattcttcttcttcttctctttttgtgtgtgtgacttgatttgtttattagttttactgagcatatttgagggagaggcttgatgtggaactagagctgaatggaaaaaagggaccctaagtaatttgagattaagattatttgttgtttatgaaagggagaggctagaaaatagtgaatcatttgagtcgtttaaactggaaatttgacttgtatgcttattggaagttaaatatcaagctggaagaaattgacccctttcaagctccagagctgtcaagagaaactctgctctctgtaggaaattactgcatttatttgcataataatcctagagggttatctggttatttagtgttctacaagccatttgatttggtgtgtcattggctgttgctttcaggtattgtcaaaaaacttttgagcatttggcctgag

SEQ ID NO: 42630 - DNA, 681 bp, Manihot esculenta
  Intron number 1 from transcript cassava4.1_003116m (locus cassava4.1_003116m.g) derived from phytozome v7.0 (chr-ID scaffold11483; pos 24150 to 24830)
cttgcattaccactcgaattttgcagacaatagaggtataattgtccaacttccttatgttcatgtttgaattctactagtcattatttttggtgcttatgtttgattctttagcttgcatctgaagggaagcattgatggatccatctgtattttttttttttgaaaaagtgttgtttaatagaatcttgcattcttgcagttgcttcttattggtctatgaaacttaaaaactgggtagacaagttagtatgcaataacttgaagctcaaagcatatacactttttgggagctacaaaatgtatgagcaattggattttgttattccaaatggttgcatctatttttcaaataaaaactgggagtttgttaagcatcttcaatttttattgtacacaatttctgtatagaatctcagttctcttgctttccccttttcaaaaacaataaagttggttcaatttttagcaatgagtgacccttttctgccagttctaaaaggggaagtatgctgtgaagaactggaaagctttgtctaaattcagcttaaaaagtgggaagcatgccattcttttgctaatagtttttccttttcagtttggttttacttgtggagaggcgcaaggctttgttatattagttgtcttttgctaattgttcgcccttaaatgttgcaggat

SEQ ID NO: 42631 - DNA, 816 bp, Manihot esculenta
  Intron number 1 from transcript cassava4.1_033142m (locus cassava4.1_033142m.g) derived from phytozome v7.0 (chr-ID scaffold06631; pos 187416 to 188231)
gctttcatagctattccaacaactcctcataccaggtacttatttgtaattagcttctgtgatatgtttaattcttcaagcttttttaatgtttatatatatctcaattttcttataagatataaattattattaggtccttatactttagtaaagttaactacttagtccctatttctaaatcacttaatcaaatttttttatattttataaaataatttacaatataatccctgaaatttagcaaaacttacaaaatagtcattacttttctaataataaacaatttagtttctgagtttttattttattaacaaaatagtatttccattaaatttgccattattcaactgtcaattgaacacgtcaatttaaattaaaaggaataaattattataaaaattaaaactataagaattaaattattacaaattaataagactaaagaggctaaaccattataaaaagagaaatttcaatgactaaattgttataatcggacagtgaattttaataaaatgactacgttgttaacaaaatgaaactttaaaaattaaattatttattattaaaatgatagagactaaattgtatgttttattaaatctcaagaactatattataaattaccctattttattaaaaaaaacttttaaaccaaagcttttatcaaataaaaaagggaccaagtagtttcttttcacaaaatataggaacttgatagtaattaacttttttataattataattaattcatttattattatttattgatttgcagagagaagttatagacgcagtaaaggaactcatcaa

SEQ ID NO: 42632 - DNA, 320 bp, Manihot esculenta
  Intron number 3 from transcript cassava4.1_004361m (locus cassava4.1_004361m.g) derived from phytozome v7.0 (chr-ID scaffold06914; pos 1456246 to 1456565 reverse strand)
tcttgtcacggattggccctacagaattttacaaggtaggtttcctttgttattgtgtccatatgttagccatgtcagatgtttccatgtatgctggtccactggttctaaacttcattagtaaagagtattgaataatcacatagaatttgtgcatgttactatatttgtttgaattccgtctaatgtctcacccatttcatttcttcagagtgattttttatttcttgtgttttcatattagctatggcattaagctcttgaatgacacaagtcttcctaatggaaagtttcttcttcaatttaggaccttgagacat

SEQ ID NO: 42633 - DNA, 775 bp, Manihot esculenta
  Intron number 2 from transcript cassava4.1_011067m (locus cassava4.1_011067m.g) derived from phytozome v7.0 (chr-ID scaffold06512; pos 865819 to 866593 reverse strand)
aagcaatttcaaactattgagaggctatttgaacggttagttcaataataaaggctttcaagtacttgttttcttaattttctgagggtttactccgtatggctaaaagtaatcatgattaagttttatctggcagccttttttgcaaacagttaaaaagaagcaagctaggtgaactgctcataggcatgacacagatgaaaattctaacattaataatattaactccatctatcaggatttgatgtaacacatgttgtcctgccttgtgatggcttagctatttgatactaatgttgaatactgtggtgtcgtgggtcatgcattttttctttaaccattagtattatggtattttttttttccatccatggatcaaccaaaaatgtattaatgtagtgaagagtcaaaatttttttctccttgggatcatagtgaagtcaatatctcatacctgttaaattattcacatcatttatatctgattttgtttggaaatccaaaattcatgctgactattgattacttgtcaacctagagccaaattgtgatatgagtctcttaggttttaccatgcgtccttggtggcaatgtctgtgtttttgtatcttgctttatagcctaaggaatttaagttcctctatctctcactttctctggtcaaagcttgtacccctctctcctccacctgttgttcttaaagcttgattacttcaagagctaatatttttatggagcaggctagttgcaaagacaacccagttagaaggtgaga

SEQ ID NO: 42634 - DNA, 533 bp, Manihot esculenta
  Intron number 1 from transcript cassava4.1_010087m (locus cassava4.1_010087m.g) derived from phytozome v7.0 (chr-ID scaffold01551; pos 2929617 to 2930149)
cggtctttttgtggaccaagtcgcttaaggacaaggttttctatgcttccttttcttttattgactttgggatatgatcgatcatatgtagccagcaaactttgattttgcttctcttggaagtaaactttttttttcccttatgttgaaaaatttttcagtcggtggtgatttcatgcgctggatttagcttggttgaaaaactttcagagccgaatacaaaagaagagagtttgaaaccttttagagtgttaactcagtgaaagcagtcacgtgaaaacaattatattttgaatcctgaatttctgaatttcataatatagataacgaaggacgttctgtatgtttgttcttatgaatttcttgattaatgaagccaattctaaattagctctaggagaaagtgaatatgcacttcgtatgtttgtttttatgattttactgaaaatcaatgagattatttcaagtttgaaatattaatagatgtaaatcagctttattaatttgtttattgtttttaggtagcgaaagca

SEQ ID NO: 42635 - DNA, 765 bp, Manihot esculenta
  Intron number 1 from transcript cassava4.1_029595m (locus cassava4.1_029595m.g) derived from phytozome v7.0 (chr-ID scaffold06261; pos 82924 to 83688)
cttctctgaggaagatattatcattaatcgttcaggtaagattctttccatggtgatttcgtagagtttacagaataggttaaaaaaataaacacagatatgttaaataaaccaaccaatagagacaaacaataataattaataaacaaaacaatttaatcagagtttagaatagcctgtgggttatggaatgaagcacgctcaaaatgcgttgtcctttgagagagaaaatggcccgtttgcactgagtaaatttatcaccacgtctcgcaagatacttcaattcgtttgagctcttgtgtgcagctaagaattttccgaaccaaaaattttcaatactcaatatttatatatatagagaagtgtttatactttaatatagtaactattctcaaacaccaccataaatacttagtagttaatttgatataaaagaaaaaaaatcaggaatggatgcttaaggaaaaaagtaaaaactttttaaagttatttttccaaagctataacgagtgttatatataggaaaatttcagtacaaaaaaacgttagtctaggcctaaaaatcagctccactaacagctagtaaaccaaatctataggaacaatattttattcctaaggactaagtaagttttaaccataaaaaaatgtaataaatattattattatattttaatcatatttttctatccgtatgcaatattagctgtttttttggaataagggtgagctaagggtgttagatttgggtaataattggtttct

SEQ ID NO: 42636 - DNA, 585 bp, Manihot esculenta
  Intron number 3 from transcript cassava4.1_007431m (locus cassava4.1_006134m.g) derived from phytozome v7.0 (chr-ID scaffold07571; pos 343779 to 344363 reverse strand)
agaaggaagagaactttggagagtggtactctgaggtatttcttagactttagaattatatgcatcagctgttggtaattttatgtgtaggatgattattttccgttttgagcttgggagatcaggtaggagtgcttgatactgacacagtagtacagtacatttataactttgtaaaaagcaaaagaaacaagtttttaatttaaggacatttctctgtaacttgctatatggaaattctttatgatagtatgtgtccgtattatgcatggatttgttcaaattctccttctagcaagtggttattccaccacccaatgcgctaatgcagtatgttaagatcatatgttcttgcaaattttcagtgattctcaaatttcaataaatgattttctttgtttgcttatgcacttgttagaaaatcaattgtccagccaaatattatgattgtcccatcctgttaaggcaaaatacattttgtgatgaagaaatgcagccccgccgacactaaatgatgttatctactcgaacattagacccttaattgtcaatttgtttccttttggcccatgtaggtggtcgtca

SEQ ID NO: 42637 - DNA, 682 bp, Manihot esculenta
  Intron number 3 from transcript cassava4.1_018786m (locus cassava4.1_018810m.g) derived from phytozome v7.0 (chr-ID scaffold03614; pos 2340167 to 2340848 reverse strand)
aatcaagtttctcagtaagtaatggaacatacattgcttatttgctggtataagttttcattgttctctgtattacatacagtgcatttagagtattggctgaagtttagctatttggatttggtttgctagtaaacagatgttgggttgtattttggtttatgatgccaaagttttatagtacatctgattttgggttaacctttactggcacttggcaggctgacttttcagtctctgttaaagttggatggctaattcagtgacctagctataagatttaaaatggaaaataataagttaccctgtaaactttattatttctgttgcctaacaggaaaaaaaacaaagtgccttcaaaactccattattgcagttactatgaatctatgatctgtgcaatttttggaggtttgtagtcatctgccactggctatattttgttccactttgtgaaccatgatgagtctatcgagggaaggactttgggcgttattttctttcagctatatgatatatcctaacattatgttcagaatatgaaaataagaaagttagtgaagatagatggtgcagaaagactcgggattcacaaaatttggatgcctcaaaattgtatatctaaagtaggtgaaatttttgttgtttttattttgcagggtatttgagaaatcattacagt

SEQ ID NO: 42638 - DNA, 587 bp, Manihot esculenta
  Intron number 1 from transcript cassava4.1_018786m (locus cassava4.1_018810m.g) derived from phytozome v7.0 (chr-ID scaffold03614; pos 2341558 to 2342144 reverse strand)
tccatcttattcaagaacggtttggcaattcagatgtgggttttgtattagttcttgctttgttcatcttcagttttatgttctatcgtttcaatccttttttataattgtatgggaagggaagggaagggaactactgaattgaaatttgttgctttctgcggattttctaactccaatttttgttatttctgtaatctttagccaggtagaatctgtgtttgtttgcttcgttattctgatttttcagctctatgtatgtcttgtttagttttgtgctaagtttaaagacgaattactaggtatttatacgctttcatgttttcaatttctgacctaaacacaaaaaccaaattgcacgtcttcgtttctctccctctttggtaatttatgtgccttgaaatctagttaggctgcaagcatgtattttcatcatttgcaaaatgtcagctgaactttttttgctatttcaaagtcgtatatttcaaatcaaaatataagttagtttactttattagaatcctccgctgtctaatgtaagatgctgattttcttcttcatttttaatctatcttttgttttccagc

SEQ ID NO: 42639 - DNA, 535 bp, Manihot esculenta
  Intron number 1 from transcript cassava4.1_000824m (locus cassava4.1_000824m.g) derived from phytozome v7.0 (chr-ID scaffold03874; pos 91027 to 91561)
atatgtacgctccagcttgagggggagtgttgagattatttctgtaaatagcctagatttgtagtggtaattagggatatgattgtgtgatatgattgggatatgattaggctgtaattagggaattaatttattttcttacctagtgtgtattcttgtaagtagtatatataccccaattggcttgaggggaataatcaagtattttctctcaaatcttttgctctctttttcttcctttcatcaaagtttaaacactagaaatgaaaccaatatataagtgcaggtgacagtaatacatttttgaagaattatagtgaattgtaaatttagcaattttttggatgattaaccctattaattacagacttttcaaattagagtaaacttccattatttgatatgtgtccggcaatgatggcttccccaagtattagtgttctttttggttgttgaatccttctacactattaactttatatcagagttatttttatgcttctatgtttgctaaatgaaggttcatgcattaggt

SEQ ID NO: 42640 - DNA, 688 bp, Manihot esculenta
  Intron number 1 from transcript cassava4.1_003069m (locus cassava4.1_003069m.g) derived from phytozome v7.0 (chr-ID scaffold12270; pos 45217 to 45904)
gctcttcatttttcagtttcgactctctccctcaggcgagttctctttcgccttctgtttcaatttttttcctgtttcaatcttcataatatgttcgcttataagcttttggcttgatttgaaacattattattgataccatttgcttttgaaatcagggatataaatattgtaatggatttgtttttaaaatagtcataattagtgtttcttctgtaatgcttagatgttaatggcccattatgcagaggtgaggagtgcattgctatttctttaattggtgtcgtcgtgctgtctaggacttgaaattactgattagcattactgtgtcttagcttattgtttgaaaatagcaaaggagcagccattatatatggttcggttatgtgggctacgaaacatgtactattttttatagaaattctctgtgtgcttatgttttcaatttgattggacagtggcagatcgtttccaagtgcacgtattccatttttgttgaaaatctcgcttgcaggcttaaaattcaacttgtatccatgacacagtcctgaatttatcttattttgttttagtcttcctgagaacaaaattatgattctttccccctattttgctgttgatttatctgttggaaattgatttttttccccctctttggtgcttgggaatttcagaacagacaaactct

SEQ ID NO: 42641 - DNA, 883 bp, Manihot esculenta
  Intron number 1 from transcript cassava4.1_015145m (locus cassava4.1_012890m.g) derived from phytozome v7.0 (chr-ID scaffold11668; pos 47419 to 48301)
gctcctttttaacttgcatatctcgttttcctctggtgaagcttctctctttctaattctttgttagggttctactttcatatgattttcaatttggttatcctgattattattcttagcccgtttctactttgatgatagaattcatgtgcttaggatagcatatgaatgtaaattttctaaaaatgagaatgagaaattttgtcatgtttgtgaatttgtatgtcacatcttgatcttgtgttttggttaactttaccttttgcctttggttggtatttgggaaaatttggaaaggatcatgctttttgtcgttaatttccaaaaaggcagaatttctatggagtcgtatagtttcactatgaggctcttatgagtttgtattttggtggtgattcggtttaaaattttggtaactttgggacttgtttagttattaaggaagggcattggttgagaatatgaagagggtggacattgcaatgagatgcaatgttttgacagtaacactgcttcagctttatttaagcttcttcgagatcacatgccatatcccataagccatgtagttactagaattgcaactgttttgaaatttatgttgtttattctgtgttcttttagcgttggtatttgtctgacagagtatagaatctcaattgctggaatatgctgaacaacgatgtagataaccttgtgatattaattaaacgagtctgtaatttttttcttcatatttgatggttttctagttgagtgattagggaggccagaactaattgctaggtgcaagatggttgtcgtgaaaatctatggagtaccaacttgtccctttgtacccatgatattaagtctctttatgctgcctacgcaggaaaacttg

SEQ ID NO: 42642 - DNA, 881 bp, Manihot esculenta
  Intron number 2 from transcript cassava4.1_003299m (locus cassava4.1_003299m.g) derived from phytozome v7.0 (chr-ID scaffold03332; pos 1136776 to 1137656 reverse strand)
aagataaaattctcaaagggaagctcataccacaggtgagtctaggataaagttttttcgttcttcagtgcatgtttatgcttttttctgcagtactgggttacttgcttgtgactgtgcagtgattgctcaagtatttttttctgcttatttatgaaaagggataatttacattgcatttgtagttaattatttagcagcatagcctcttttattttttttcttttttttttaaatcttcttttgtaagtcacaatttgggttcaaataccaaaacaatgacatgcgacaaaccccagatggtgcagatagctaatgatgttcatagtggaattttattttttatttttgttttttgtacattcgtcttattactgtccagatgcatatttgattatgggaatggagaactgattggctttgtttacttgggtgttttactttgcaatactcttaataatgtttttcaagtaacatgtgaggtttaatatgccatagaagtgctattttatatcagggaaaattacaagaaatttgacccagtaaatatgtttgtccctattttccaaaagcaagtacttgggtccattcagaagaaaaaaaattgcaaaatcttgtggaactaagaaccggaggttttcattttaaaaaagggaaagccaaaaggtccaaagaacctgccttcctctccctctccccccacctcccaaccccacccccaagtttcttttttctcttagatatggattaaatgctgctagcaaaactttagataactatgtctgaaatgctcatggcaatatcttcaatgaggtgttctacattgtggaagctgtttttatagataagtttcttttgatgcaggagatacacaaaatttt

SEQ ID NO: 42643 - DNA, 739 bp, Manihot esculenta
  Intron number 1 from transcript cassava4.1_003299m (locus cassava4.1_003299m.g) derived from phytozome v7.0 (chr-ID scaffold03332; pos 1137806 to 1138544 reverse strand)
aacattggtgaggttggttcaatgatgttagttaacatgctcattttaagctcccttatttttgcataaagttcaataagagttggtcattattttttattttagaatgctaaaattgatgattttgatgataaattttgttggaatttctaggatgtagtatattgcaagatttttggaacaataggtcatttgtcagaaatggagttcttagtccatgatcaaacgaaagaagcacaaaaataaaagtaagcaatgtggaacggaatctaaaattacttccatgaactaatgagaggcagcccttcctctgcattatgaagaatgctttgtagcctttgtgttggcaggtcccactattgtttatttttgaataaacaatgagaaagcagtccaattcttttggggcttgtttttcttgttgaactgaggtcaaacaagaggggctagagcctagtgtttgagcttgagctgggttcaagttgggtatcaaagagaatagggcaagtttgaacagcccaaaactcactttccttggtttatgtctttaaagttgatactaggaattcctgagattcatatgcaagagtgcggtttgtaagcaccttgtttccgatgctttctcctacctaagttgacaattattgacatcagccagtatctgtaaagggttggatttgcttgtttttttgcatcttggagattctatttgacttgactcgctttctgcatctcaagg

SEQ ID NO: 42644 - DNA, 973 bp, Manihot esculenta
  Intron number 1 from transcript cassava4.1_003234m (locus cassava4.1_003234m.g) derived from phytozome v7.0 (chr-ID scaffold10173; pos 824108 to 825080 reverse strand)
cttcgccgttgcctttatcacggttagtttgctaggttggaaacttactattttactagttatacttaaatttcatactgtttgaagaaaattgaagcattatggagaagtttaatagtttttagggttagcgattttaaaagatactatctcaagtatttactgttggcattgtcgttgtcattctttgtgaaatggtccaaaagagatgttgaatttgtatccagcgtctactacttaagaacgaaatggacagaagtagtgtgaatttgatcacagctattggctagtgtattaaaatttctctctcctttcctcttaaattgtgtgcgttatcattttgctctttgggtatctcattgtaagtaccctatgaatgcacgtgaaatgagtgttagccctaaagaatctgatttaccctcttgttagtctatttttaattgagtgttgtaatgccttcttggttggaggtcaatttaagcaagaatgaaaaccaatgatgtttagggtaacgttgttttatcagcaaatactcatgaaaatcaaatttatggagttgactttctaagattccataatgcacaaaatgatgtgttgagaatttatctgaggccccactttgatgctcaattgttgaaacacaaatgttccctttttgtaaaccttggtttaaagctttaagtacattaaaattgaatatcgtttagtttattatttgagtttgatatcattttgtccacagtaattgtctccttgcatatgttctcggtaaaacatgagctacatgacctgttagacactcattttttccctttattctcatgacacttaattttagttttgttgatttcctgaattgttctgccagacacaacagcatgcttttgtatctgctgtataacgcgaaaggtttatctagcttgttttaatggttgcagttacgagttgttccgaggccaaagtcgcgttggat

SEQ ID NO: 42645 - DNA, 634 bp, Manihot esculenta
  Intron number 1 from transcript cassava4.1_016596m (locus cassava4.1_016596m.g) derived from phytozome v7.0 (chr-ID scaffold06314; pos 163490 to 164123)
gaacaggtgaagtatggtgcttaattcttgtgaagatattgaattagggatttgattgttcatcgttagaatgcgaagtaatgcataaaagtttattcgctattttgagtgtttcaatacaattgagttcgaattgaagtagttgttagtaccattacttgagtgggtagtctataaattttgattgagggaactaattatgatttattctttcttatacttgtgtagttaacttgtaatcactgattatcccaaatgaaagagcgtcattatgcaaaatatgtatcagactaactatagtttcataagttctctgttctagaggaatttgatgtgtgcaattatagatgctaagctcctaaatgattgatattgatgaactattttcgtttctaagagcaagttctgaaccatttttcttgattgaaaaggcgaaatgaatgctttcatactgtcaatgttattatagaaatacagaggttgaagtttttgtgacaaattttcagaatttgtttgaaaattgacttgccggagcgattataagtgcaaaactggacaaaagattggcctgttaatggattatgtttgtgtatttcatcactgaaatgtttgaaacaggtgtttggagcagaat

SEQ ID NO: 42646 - DNA, 1015 bp, Manihot esculenta
  Intron number 2 from transcript cassava4.1_021562m (locus cassava4.1_021562m.g) derived from phytozome v7.0 (chr-ID scaffold07510; pos 62238 to 63252)
ttgttcttctcaacccctcctccctctcactgacggtactttgtatatacatacatacatctatgcgatgtatttttttaggggtaaatcggatgtttttatatttattggtaaccctcaattgttatggatttttagactaattcatatgtagagctctgggttttttaagcttatttatgcttcgatcacgcagttctgtttcagttatttttatacagaaagagtgatgatcttgcactaattgttgattgcgagattcactcagcagcagcgcttgtggttcacttagatttcaagtctaccgatttcctatttggcattggcaaccaaattgctgtagagattaaaacaagggaaaatatccaaaatgaaaaaacttccataattgtttacttttcagagggtggaaaaaggaagatggaacatccttatacatggaacttatccatttagctcatctgatagtactgcagaacccaaacatgactagatatatccaaccttgaacatatgttgtaatttgaatcagcccattatgtgagaggaccacacctggcctacataacatgttccttttctttgttgttgttttcgctatcgtcgttaattctggagtatatatctggttattcattgtattggaagttaattcggtttctctctttgttttttctcaggtttcagcaacaattcttttacaggttagtttatgtattattataaccagctctcttatacattctgatatatactctactctatccgaattctctctttttcccttttttttggggggtggggagtgcgaggggcaagaaatgctatggtttcttgtgatgcaagagcgaaactaatgtcactctgcatggagtccaacaatgtggccaaaatgtaatcgggtaaaatatatgatctttttctttagtatgttaacatttcttttttacttgtggcattttcttttggtacatttatagactgtacgaagcctgatcctgaggtaagtgaggag

SEQ ID NO: 42647 - DNA, 405 bp, Manihot esculenta
  Intron number 1 from transcript cassava4.1_011399m (locus cassava4.1_011399m.g) derived from phytozome v7.0 (chr-ID scaffold06512; pos 1314560 to 1314964)
tcacgactttctccaagcttccgttctcatttcaggtccctctttatctttctcgctagttgtttatatgcataatttgatatttatttgttgttgatttagattgaattagtcattggaaaggagaagaaattaatttcatgagtgcttttctttttcctttttttgatgttacttgcaatgcgatgatacttgatttcgagcattaaattagcccatcttaatggattgtcataaggtatcttcaaatctcctataacttaatattgtgtttattttagatttcaagcaattaggtgaatcttaggcttttttccagctgtgtcatattatttaatccaacttaatttcatccctgacccttttattggttcaactagtgcagaaactctcttacactatcgt

SEQ ID NO: 42648 - DNA, 877 bp, Manihot esculenta
  Intron number 1 from transcript cassava4.1_012407m (locus cassava4.1_012407m.g) derived from phytozome v7.0 (chr-ID scaffold02994; pos 114824 to 115700 reverse strand)
tatcaagattggctatcgccattttgactgtgctggtacctttctctactcttgtttttagtttttaattgtgggtttgtgtctagttattatcttaacttcaagtgaagtaacatctttagttcttggttgcataaaatccaaatgggtactcatttagttgggctaattatgcaaaaatctacttggtggtccataaatatgtggtctttctttaatttgtacttaagatcttagtctgtttgattttccttcttgtgtagagggaggggaagcagggtttgaagcttaactgcctgggagctatggggcaataaaagcttatattttcatttttatttttttggctttagtaataagtgcattactttttttttttaatttaattaggctttaaatggaaataattcttgataaaaatttcttcctgtgtatgtgtatgttgttgctccactgatgaattctgagtccttagtttggcatgattcaagaaaagaattcaaaagaattattgcaaaatcatacaacatttcaacttcttttaaaatgaaattttttaaaattaaaaaaaattgttctttcattccaaacaagagaatcgttagaaaagaaatcaattgaattgaatttcaaacagagggttggactgataaaacataaggttcaatggaatttgtttctgttccagaaaattttgctttttgtgcctttaatattcatgaaaaactatgagggagcaaatgcaatggatagttctacattaaaaacttaatacataagattagctgtttattcctggtccatttgggcaatacctctacttgttcatcaaatgatattttaacgatttgatgttttcttgcagctgattaccaga

SEQ ID NO: 42649 - DNA, 367 bp, Manihot esculenta
  Intron number 2 from transcript cassava4.1_026522m (locus cassava4.1_026522m.g) derived from phytozome v7.0 (chr-ID scaffold03614; pos 1095855 to 1096221)
acactgacatctcccgtgcccagggatatccctttgtgggtgttcttcactactaattaaagataaattttgatttatcttttattgttcttaactttttaatttttgtatttttagaacattcatactaacaatcagaacttcttcatgaaaatagagtaatcactaaatacaacagtgaattgattttagaaaactgaaatttaataaaaaggtaatcaggacctaatcaatgtttatcatccccactgtatatatatcttcattgaatttaccctgcttttcttttttgggattatcagagggtttaatatttggcacattatttgtttccttttgcagccacttttccctagagttctagggc

SEQ ID NO: 42650 - DNA, 892 bp, Manihot esculenta
  Intron number 1 from transcript cassava4.1_016391m (locus cassava4.1_016391m.g) derived from phytozome v7.0 (chr-ID scaffold08420; pos 83011 to 83902 reverse strand)
cgtcttccttgctctattattctcttggattccaggttagcttttgggcttcactcatatttctcctgcaaattgagtttcagctcttcaaaaggttgtaactgttaggggaattttgaaattttcaaaaaattgtaataagataagctgagattaattgaaattgaagttgagccagtagaatcgctgcatatgtagctctcaaatacatattaacagataatataggcttgttaatgaattcaatgagcttgctttgaatacgggcagatgaaatttaaggaaaaaattggatcaacctaagtcctaacgcacgcggtttgggttcccacttctctttctcttccctgctttcccactcaagtttcagcttccttaagctcgctcccatacgctccgacctatggtgactgtcattgaatctccggcttgcttgcttgcttacttccattatcgagtttgaatttggttcggttccctctggcgacatgttcccgtagcacaaccgacccaccttttttttcttcttttgacttgtttacacgtcacgcaatcttcggatagagttatagtttaaaattggtttctccggcggtttaaggtgctaccttttccgcctttgattttgattataaactggagatgtgcctttgtttctaatgttactggatttgcttgtgcacttgttaattagttgaggctttgagcagtagatgaggtttggtttttttaatttgccgtatgccagttacatggcttgtctattttcctttttgcaggatcaaaattaagttttgctgaattaaatgtggaagtggaagtttttgtcttctcgtcttggctcattaaaacggagaacttactttgattttctctttgtggttaataacag

SEQ ID NO: 42651 - DNA, 941 bp, Manihot esculenta
  Intron number 1 from transcript cassava4.1_024631m (locus cassava4.1_024631m.g) derived from phytozome v7.0 (chr-ID scaffold05206; pos 194768 to 195708 reverse strand)
ttcccaaatccaaattcaaaatcagggtatctttttattattattattattattattattattgatttggatcaatgccttgtaattttctgtttcatgggttggttttgatgtttttttttttataagaattcatatctttattttggatcgatgctttatggtttatttgcttatggctctattttgataagtacccagtttgtttatttgaataaatatgtcatccatgttgtttgatttggatcaaggtcttgtaggaaacggtgaacatggcctaccaagtttcgatgaatcctgcaattagattgtggatatggagttcaaacaatttttatttggatctttgtaatgtggttaaagaatatgcatatggctgttattttaggatctgggattgttcatgacttttgtatggttattgagtttgatttttaaaatttaatggaaacatgttcatttgcatttttggtttagctttagaagaaaattaagcataatcatagaattatgtgtaagcccaaggaacttagagtacattatgtatctgaatttgtatggaaataggatttttttattacataattgatgttcaagcttcatgctagttttatttgtttgtgatattgatgagatatattactgaaaaggagacagaaagattctagctttaagactggaatacacttgtaaattgaaatctgacattcagacaatttcttgcctggtgatgcttaaaaatctttacttagatatcagattgctttctatttgcatatttaagattgctgtttatgtaaacttgctgccaaatctgtttcagtgaatggacatttggttaagtttcctgtttaaaaacctaaatatattgcttgttgcaataactgaagcttctttgatgatctacttacgcaggctggtaaaacattaagtgtaaggaa

SEQ ID NO: 42652 - DNA, 884 bp, Manihot esculenta
  Intron number 2 from transcript cassava4.1_010916m (locus cassava4.1_010916m.g) derived from phytozome v7.0 (chr-ID scaffold06697; pos 267063 to 267946 reverse strand)
agcttgtgcctcagcccctaaaggccccgaccctggtctctctaacactccttatccttatatctacgtattttaatttggcagaattttagttcttctagtttgttatgcttgctatactcaataaggtagaattttccttcttttttttttccttccaattactttgttgccttagttttggtttggggatgaaattgccactttattttcttcagcagctcgtattattagaaaagatatgttattgtcctgattttgattacttgttcatgattgtttcatctcttaacaggtaattgatggctgtgtgtctcattttttttactagttatcattgagctcatgtatgtaaatgtagttgccttctcatgtataagaatcctattttacacttgctattacgccttttagtaagtatagtttctaagttagccacccttttggctgtctaagtgcataaaacataaatggcgttttgattggtatagggaaagttcaaaattggatgatggtagttggtactgtccatatgaattatgaaatacctgattatctgaaaaaagtactgctttatttattgcattataatactcgctccccccatcctcaaagatatgcttcttctcctttttcattcgtcccaaattagaggccactttccttttgagttaataatttatttaatgggttaagctttgttctgcaaattctttcatttgaaaatggaaaaaacttctgaacttgcaaacctgcatctcatatagattagacttattccgctatttgcttgctttgatgacaacattatgtcttaactcaaatgtgtttgcttagtcttctgttcattggtttctgcagacttggttgcaattgcagagcgg

SEQ ID NO: 42653 - DNA, 638 bp, Manihot esculenta
  Intron number 1 from transcript cassava4.1_014357m (locus cassava4.1_014186m.g) derived from phytozome v7.0 (chr-ID scaffold00977; pos 121743 to 122380)
ctccctccgggtgcaccggagcaggtggaattttctcagttcttgattacttgattctgttttttcttttattgttatttattatttgaatggttaagcaatggaagtgcggatcaataattagctcctagcaagctgatagtcctacaaaattatcagtttgttgatgttaggggaatgagattttccttgtagacatgttaagctgggattactgttttctttgtctttcttggccatgcttctatatttctactttagctaatgtaaatttggtcaaagtaaatatgaagtattttttaaggaaatttttgtgtaactaaagtataatcgtactaagaattgatattgaacttatactaggcctgctttttctcttgtctataagaaaaaacagatcaattaaatggtaaagagaagaagttccaatctgataagaaattatatgtgcaattttcatttccttgcttctgaatttagggttgattattactgaacagcttactaatgaaaagattgggcctgtgagcaatttgttcaagttttatgcttttgattagtctcacaatttgaacaaatgatacgcatgtcttggtgctgcagttcaggaaattgtttccaccaacaaggtgggctgc

SEQ ID NO: 42654 - DNA, 785 bp, Manihot esculenta
  Intron number 1 from transcript cassava4.1_014119m (locus cassava4.1_014119m.g) derived from phytozome v7.0 (chr-ID scaffold06656; pos 341656 to 342440 reverse strand)
cgattaatttcctaacattgtgtaatcgattgaaggtaaagactgaatatgcttttttattttctttttggttttcccaaactacagatggaaagttttgaggatttgtttagctatcaaatcagttttagaagtaccgtttcaatcggtttatggaatttctcctccatgctagttttgggaggaaaggatttggtcttgttttatattatcaatcttttttctgcgtaattttgcctaaaaattgaaaaatgttaagcacatttggataaccaaagaaattggatgagtttctcttctaattaaagcattcacaaaacgttcgttaggttggatttgattgcagtatgaattttgctgctggttggagagagttatgatagaaagtcattgtatcctgagactacagaattggaataaaacattcattcccatctttgggtgtttagtaaccaggaattattttacagaaattcatttttcaaataacaggaaaaggacctgagaaaaactttagaaatgttcttcagcaggcatatctctttgtttaggtcacagttaatagctggcgtgtgttttggttaaatgttctgttatccttttgtctttctctaattgaactgttatcctaactgcctacttttatgattataatttataaactacaataagctttatgtgaaatgtacatatgcctgagtacattttcactgacatagcatttcgaagatttctaatccctctctccctgcttcgcaaaataaaaagaccacaaaacggaaagg

SEQ ID NO: 42655 - DNA, 1016 bp, Manihot esculenta
  Intron number 1 from transcript cassava4.1_008164m (locus cassava4.1_008164m.g) derived from phytozome v7.0 (chr-ID scaffold01551; pos 2956832 to 2957847)
ccagtaagtacgttatatttatttattttttttttcatctgtgttttggacttctttttttctttttatgttcttgctaaatctggaaatttttgtattttgatttctccaatcctatgattatttgtgactgattgaagattctttgaagtgccatattggattacctttctttcatctcttactgttttctagtgtatagccaatggctatgatacggaattcagttcgtatttaatgtatttaatttgcataaacgatatgcttgtatctgtttcttgtttcttgaaagtaaagactgattttgggtatcatgtccaaaccaattctctcattccttttgttgatctctgtgactctggaattctatctttactagctgttggtctccttttcaactgctttgctttccttggattctagaccttttcaactttttcattggttggtttatttaatgcattactttctttgcttttagagttaccaaaccatacttcagctttttgcatttgagatatctagtttgtttccctgaattatggtcgctttgccatctttccttttattttttctgtgaccactaatttttcttcctattctaattaatggggatctctcatatcctattgcttttacttggagataatatgtccaacatttagtttatttgattttgtttaaatgtgcattacttgttaccacctaccagcatttggatttattcaacaagaagggcgactttgttttggtttctgtgtttgcattctcttgttggttttttgagcaccttaattcgtagattccgtgagtcaagcaaaggacgacgactaagttggccttttcattttggttttcctatggaagtaccattgctctctgtttctgtttctgagtcatttctatttaatgttgtattatttacagcaatattgaatcttgattttggaacctgttttgagaaatgtgtttcccaatatttcaggtggcattgctcttgctgctggcactaagat

SEQ ID NO: 42656 - DNA, 869 bp, Manihot esculenta
  Intron number 4 from transcript cassava4.1_016110m (locus cassava4.1_013111m.g) derived from phytozome v7.0 (chr-ID scaffold10735; pos 74450 to 75318)
attgaaggcttgaaggtatgggctggctatcattataattctgctttttgcagttttcttttttttggttcatttggaggtattggaaggatatatattgtcatatgcaagactatcattggattcataaatattgaaatgtgaaacaaaatagataggaagaatttgtaagatatactcctgagccgtgagcacaaggccgattaaactaattgaggctttttttgttataatttatgtttattttttatatgatgttttagattctaaatagttgtttgatatctatggatgaaatacttaaacaaaaagaaatgatgtgccatgagcaattataggcatcaaattgatgctatttcagccttttatgctagcattggattttatttgaatggttaattgcacagaaagctcattacatatcaacggtgcagctttaggtttggcaatatatgtgtttcatgatattttgaatatgatgaaagatatgtcatacttgtttgcttggtcaatttggtgattggatggcctatgtactgacaacctagatgtcctcaaataggtaatatttgattggaattatatcctcatcattgttgttgaataggaaactcaattatgagttaataaaattacttattgatatcatggttgttcatgcttttgtttgcatttcctggatttcttctattgttactttctaataccaatgcttatactggttttttcttttctttttttttttcttgataaaatgcttataactatttgagtccaatgtttgtaacttcacatatgcaaaatgacatgtaaccaatttttacctttccctttttggtgacagattcttgagaaagttaaaatagcat

SEQ ID NO: 42657 - DNA, 812 bp, Manihot esculenta
  Intron number 1 from transcript cassava4.1_000437m (locus cassava4.1_000437m.g) derived from phytozome v7.0 (chr-ID scaffold09151; pos 320621 to 321432 reverse strand)
atccaatctaacccaatccaattgtttcaatctcggtatgttctcttcctgatctctctatctctctcgctcagtgctgctgctgctgctactccatatatcaatgtgcaatgagaaaaacaatgttatttcggtttctgctattttttcattgttgtatatgctgtagtgttaattttttgatttatattccactatgtgggcaatctactctccgattctagggttttctgttctgtcattcatttgatagttttttcccctttctttcatttggtgtgactatttagggtttagcttagttaatcattcttatataaaggttgtgggtttagaacgtgggtctacctgggtaagtgttaacttttagtttttttcacttggcttgttttgatgttagctctctcggttgcgcaatgtgtttgtgattgtatagtttgatcggaagagaaagagaaaagaaatgcaaaatatatctgttggcggtctaatcttataagaaaattcagatggaaaattgtttgaactgtgttggtcttcttctgttttgtctttgatatccatgtaaccattatgtggttgtgatgtattttataaattgttagttgtattaagcattctgaattcgtcaatgaaaagaaaataatacttttgtccccatatcctttgcatgcccatgcgcttgcatgttggattcattgggtttcccagcctcaagagctgttgatttgagtcttttattttatattttttttttacttatttcttctctcctaggtgtcatataacagagcattgctgctgtccacata

SEQ ID NO: 42658 - DNA, 532 bp, Manihot esculenta
  Intron number 2 from transcript cassava4.1_016897m (locus cassava4.1_016884m.g) derived from phytozome v7.0 (chr-ID scaffold06512; pos 197824 to 198355)
gcggaacacgttcatccattcccaactgctggtgggtacgaaaacttgacctttctcctccaattgattagccttttacgtgatctgtgattgtattgatcgaattgttttccatctacttgattttggaatgcatttgtgttgtccctgtccgacgatttatttacgcaacagcactggggagagtaattcatgtaacatttgaagtagcatcgctatcaagcttttgtttgaaaaggaattgaagtaattacctatttctgcagtagaagttcgtttgaaaattcatgccttcgagaaactggctgttttaaataattcttcatttttaagaagccattgaaaataagttcggtggatggtagtattagttctgttgtgtgatccagttgttcgatcaaatgcttcaaagagatactgcattgtttctaaaattcttctgtaacctgcaccaaattaatggttttcttttatgaaagttgactaatttaatcttttgatgcttttgattgttactgggatgatagttcgc

SEQ ID NO: 42659 - DNA, 987 bp, Manihot esculenta
  Intron number 7 from transcript cassava4.1_016897m (locus cassava4.1_016884m.g) derived from phytozome v7.0 (chr-ID scaffold06512; pos 199341 to 200327)
tgggtatatctatccttatctggaactgatcctaggtaacgactagtgtctccatgtgctgatgctccccttctcatgccccctttgcacaattttcttctcatgctttatcttttgtttaaggtataagttggtagtgggtatttcctgcatgctcaagtttaatactagtcagttctcttgatatgcttttatagggttactagagatgaaatttgaacattcaagagtatgtctgttgtttccatttgcttttgagttcataggtgctggtatatcaaggcagcaagtgcttgaggaatattgttctaatataagagagttttttctagtccaattttgtctcgtaatttcctatttaagtgcttaactgcctcctattccatttcgccagagcttggggtaaaactataatagaatgtttatttaggaaattgtagtattccttgctttaatcgcttaaagattctgttcatttctctttcagaatggcatctaagtcccaacttggtttgtgaacctgggcttactttgagtctggataaatatataaactgcaaaaaggatcaaaatgccttttggacttggtatagggaacttatttattgtggatggttgaatttggacattacttttccatacattgatatatagttatgtaaaagaagttacacacttgaccaatttaagcatctgcaatttatgaaagcttgagaattgtagtaggcaacttgaaataagaacactggaacttctacatttccccccccctctcgatttctttgagatatgattagtagagaatgtacctccatgttattaaaccatgagattttctgatctctagttcactgtatatgaaggaaatacgtggcttaaggaaactgagactaatggtgttgaacttgtcaggcgacaaaatgaccaataagatttaagtatccttttactaatttgtttggcagggaaacttttgtcagtacattt

SEQ ID NO: 42660 - DNA, 662 bp, Manihot esculenta
  Intron number 1 from transcript cassava4.1_009901m (locus cassava4.1_009901m.g) derived from phytozome v7.0 (chr-ID scaffold07762; pos 198124 to 198785 reverse strand)
ggttggcctgtaagtgcatacttgcattcgaactcatcacttgttactttctcttgcttccttgctgtgtgattgctttgcttaaagacaatcaattttgtctggtttttatgattgtgcgttcgtagattgagatttttttttggcctttgctttgtaggaacacagcccactcaagcttagattgtttctgtgatagttcttctcaattctaacgcagtccacacgtttgatatttgttttccctcttttttgattcatagtcacaaagttgtctcttccatgacttgtattacccaatgaagcttctaatcttaactgattatatatgtgtatatatgtacccatttgataaatgatgtctttttagcaaaatctcttactatggtttcataatatatttatatctttttgttggctagtattataactatcttcttcgtacaggattttgaatttgttgcttcttaaattttctcaattttgttatatcctcttcctgattgaatgagtggatcgggttctcaagttataatcattgtagtgtcttttcttgattattttctatattgatcaattggaaaaaaaattcatgactagcgaaaatctgattacatcatatctatttgggtttcaggaacgcacagataactggagagacg

SEQ ID NO: 42661 - DNA, 974 bp, Manihot esculenta
  Intron number 2 from transcript cassava4.1_010359m (locus cassava4.1_010359m.g) derived from phytozome v7.0 (chr-ID scaffold06512; pos 1654626 to 1655599 reverse strand)
ttataacagtgaaggctggagaggtaattttcttttttctatagtcactaaatgtcaattccttaataaaacaaaggcctattttccaggataaatcttatttatggcattagaagtattttcttttcaacagtgtacatctatactcctgcaaaattcatagtgttgaactgtgggttttttgtttttcattttcattgtggcaaggcattgcataattgcaagaaacttaatatttcactcctttggctgacaactataatgcgtcttatggaagagtagtctttctgttttatttgctgcaacttgatcatggaatattgtgttaagccaccatcagaataaggtagaaagtttcactgataatgtacttctggaataacatatgtctagccttaaaatttttagttcctcataacattggatcaatactgctatagttaaccgtcaatgttctataatacagcttaatgtgatcagcgtgttgctttgttgactaagattttggttcattaaaggggatgccaattagtttaaatcatgattatacgcctgaggataagcaaataagtgtcatattataaatgcaacatgcaagtgatgctgcatacggtagcatttgcagtcaactgctattgaagcatggtgcagcgttatctttatgggtggggcatcacagtattgtttgacatggttatgcagtatgcgctcgtgtatttccattccatttctttttctctggagcaaattggatacggcaactgagatggctgccctttatcctacttccactcatttgctaatgcaaattgaagcaagatgtaattaaaaaaaaaaaagaaagctgcttttgttctcccaaataaggggtctcttttatatatttactttatagcagtttgaacattttacaagtgttgtttcatcttttctcaggagttattatgtttgattttaaaatttatccccacagg

SEQ ID NO: 42662 - DNA, 928 bp, Manihot esculenta
  Intron number 2 from transcript cassava4.1_010279m (locus cassava4.1_010279m.g) derived from phytozome v7.0 (chr-ID scaffold07313; pos 175174 to 176101 reverse strand)
caaagtcattctcttgtattgatatggctcttaaattatttatcttgtttttttgcttgttttggtgtctattgaacgttaattgttgctccttgggatgtgcatattactgctggtttgcttatggccaaaatcttttgggttgttagtaatttgtaaactaagtataagtgttgaaaattgaaatggatgaagaaattaattttctgggtttgttttttttttttttttggggggggggggcaattacgcactattttctctcagcgatggatttgtatttcttcgtctgagttggaagatttgaaaaagttagaattttttttttaagaactcgattgaaagggattcaaatgatattcatgtcttgagttgctagtattatggagctttttatggaaggttttgttctgaactaatcacttgcgtggaaaattagaaatataataacgctttagagctgcctttgttccttcaatatttttgtagtttgaattattttttcttctttgacatcagtgttgctgaagacaacttcttcattacttgaggattgtgacttgtattctgtttattggtagtatattgtcagtttcattcttttgagtctacacatcaattgaaaagtaataatctttcaggagagctttttctaatatgagaacattatatgtggtggcgtgaagcattggatcccacatgcagaactccaaaatgcgagaggctgaaagtttggacttgatggactagtatcaggttgggtgacctcctgagaagctccatcaagtgggcctcaatcacgcactggttgaatgaggtttgaaggtttcttgactagtgtaaccaattatgtttaattatacatgtaattgttgcttctaatgtgtgttatatctaattttgcagagaccatttgtgtgttcagctg

SEQ ID NO: 42663 - DNA, 942 bp, Manihot esculenta
  Intron number 1 from transcript cassava4.1_004121m (locus cassava4.1_004121m.g) derived from phytozome v7.0 (chr-ID scaffold10015; pos 453385 to 454326)
tgtgaagacgagctgggtaggtgaccagatctagtgggttggagtcgccggcgtccggagatactggaggaagggttgctggcgtgaaaaattcgccgaagaacagttcatgtgtcggcatgtgtaccggagtcggacaacttgggcggtggtggagccagttctagtggcggcgctttaccatattgccgattgaaagccgacaagaaaggtgggctaggcagtgagactaactgatttctagaaaatctccaaaagtaaggtgacagatctgccactcacaactagttcaagtttcttggctccaataccatggaaacggtgatgaaaaaaaaaaagagggaagaagagactttgagagaaagatgcttgatgatttctctcaagtcaattgggtatatatattacttacaagaatatatactagctaagaaaataaattaattttctaaaattaggctaatcatatcacataattatatctctcgttatgcccacaatcactacaaatctaggctatttacataaagtatctcaacattgccaaattcttagttcctcttaagcaatttcattttggttcatcatcatcattgcagtcatcattttggtgactaaatgcagatttaaattgctttctttgataaattaccaactgaaggtctgcttataaggtaaatttacataaactgaattgcaagttttagtaagaggaagaaagttgatgacgaatcactgctttaagagcagttgaaaatacaaacatacttatactgcagaatgttaggaaaattaaattttcagaaagcttctgccatgagaaggatcttgattttgttttatttgatttatgttgtaactttttttatgcttcaagttgttccacaccttttatggtagttatgtatgtttatttcattggttggctaggcaactcctgat

SEQ ID NO: 42664 - DNA, 704 bp, Manihot esculenta
  Intron number 1 from transcript cassava4.1_001437m (locus cassava4.1_001437m.g) derived from phytozome v7.0 (chr-ID scaffold03332; pos 184224 to 184927 reverse strand)
ctctgcaacagagggtttgttttttgtgttcccaggtacaatttagcttattcaatttttaattccctctttttgcttcttactgtattccttatctgtgctcagcgtctcccattatcccccttttctccatgtggtctcagttcatgttttgttcctatttttggcttgttcctagctcattgatttgcctctgctctatatgcaatgcatggtattgctttgtgtttgctccagagctaacctgaacctgaacctgaacattaccctcttcattaaataggctcaaaattgatagccctaatctgacgtctattttggtgctcttggatttggtagcttagttcaattggttcaatcttttagtttgttatctatgattctatttgcttggttggggttgctgggttagggatggattgctttctttatggatttagttaacttttgaattttcgtgatcaatttgattttgcagcttctatgaaatagcaggtttttagttactgggctgatctctagcagaattcagttccattagtatacctgcttaatgtattgatttaaatttggtttttcttttttttttttcttttccttgtaatttgtatttcttattcagtaagttgattttgatgttattattatttacatgatttcattcggttttgatacattgtgctttatctgtcagatattgatac

SEQ ID NO: 42665 - DNA, 1027 bp, Manihot esculenta
  Intron number 3 from transcript cassava4.1_001932m (locus cassava4.1_001932m.g) derived from phytozome v7.0 (chr-ID scaffold10322; pos 21136 to 22162)
ataccggctgctcaagataaggtactcgatgtataattttctctccttttttgtgttttctcccttccgtcttgtcgtgaaaacaatttggagttcttgaagctgatgtaaaattttttcataagtttctgtataattaattattgtttttttaataacaattgaaagaagtgatggtgaaatttgtgtacacacacacacagagtggcatatatgtgttgtccatcatacaaatcattcctatgtttgagtccccaaactagtgcctcctgaaagaagtcaatgggtaattttggtttcaaaagaaaatcattatcaacaaactgttattatttttattttcttcaagtagtttggttagttgacaaatttttaatctaaatacaactttgtttatcagtaattggtgctgtgaccaaatctcagttgatctatgaatggtaacttaagagacctgtttgttataggttgttgtttattttatggctcaaaccttgatgagagtcaaaatatatttatagtatttccaaaatatatctatttctaaataactttaataaatatattgatattatatgttcttctgctttgtttttctccggtttttttcatatataaaaaaattgcattcagattgaatttaattgagaaaataaatgaattttgtattttgttcaagtaggattcatcgggttaaacatcatagttctcatcgatcaatttatgaagtaggaagctaatcaggttgaagcctagtcctctttagcatgagttagaatagtttgttcgttttgattcaattgttgtaaaatttataccgcacagtgtgcccatatgtttgggattatagtcaattttcttttagtgtagcctttcttatatgtgaaattaggatcttgtgcaattgcactaggctaagagtgagtttttggtatcaattaattgattgtactcaaagataattttaagcatttgcccttttatttttgcagtttgactggcaaggagatctaccattgagatattc

SEQ ID NO: 42666 - DNA, 370 bp, Manihot esculenta
  Intron number 3 from transcript cassava4.1_005342m (locus cassava4.1_005090m.g) derived from phytozome v7.0 (chr-ID scaffold00247; pos 192365 to 192734)
ctccaaggtttgtatttaaaattgtgatgcaaattttcgtttattcataggttctggttgtttgttgaagaggagtgagtatgtttgaactttgttcctattttcttttacgttattgtttgttgagtataattgattctctttgagcaaatgaaaactctattgaaaactttaattcgtattaaatgaattacttgttaccattagagactctttgatccttcttcatcttctttaaccttctacatttatatcttggaattcaatattaaatagctttgtaatttaaataatggcattttttgattatttgttgcactttggtctatttgtaggaacgagtctgcattatttgcaaatcaagtggcca

SEQ ID NO: 42667 - DNA, 795 bp, Manihot esculenta
  Intron number 2 from transcript cassava4.1_005136m (locus cassava4.1_005136m.g) derived from phytozome v7.0 (chr-ID scaffold01701; pos 708514 to 709308)
actacaaaggtataatttagatctcgagtttgatttctgatttatcgttctctttctatttgaaggcaaatttgaattttaatatttctgtctttgcttgttctatttggtatcgttggtgctataagactaattactgatttgaaagtttttccttttcgttttactaggttttctcgtaatcccttagttataaatttgctttgctgataatatagcgatgttgatatttcggcgcacaaaatgattgcttgctttaattacatgtgattattgggtcaatttcgatactcgtctggtgtaagaattgaaaatgtttaaaggttgtttttactgagggttatgttattcgacgagtggaggaaacgaaattcagtttcatattttgcctagatagtagacactgcttactggttaattgatagttgggaaaggtgccgagggagggagggagagacagaaagaggaatgtgatgatattggtgtttgcaatctctcttaagatggttgtggatttctcgggatttgtatatcttatggtggatttatctagtgaagcttctgggtgatttttatgatttatctagtgaattaaggttgtcttttccggttttcatttactcccaaccacctaatccttatttattattccttctttgctttgcactaccatttaaatgatgattatgagggttggcatttgagattttgtttggtttacttgaaattctttctttttaacttgtgctgatgtgcaaatttatgttgttgatatttctattttggtttaggtgt

SEQ ID NO: 42668 - DNA, 975 bp, Manihot esculenta
  Intron number 1 from transcript cassava4.1_027664m (locus cassava4.1_027664m.g) derived from phytozome v7.0 (chr-ID scaffold06914; pos 470615 to 471589 reverse strand)
aagtcgccatctaccaatccaaaggcgccctggtatctaatcttttctactgttgtcaatatcaattctttcatgtgcaatgattttgtccaaaacccttaagtttgattcatgtttgactaatgtgcgcgtgtagcttgattttctgttggttgctcagaattgaaaaaggatgttgaatctttgtaaaagtagtgtttttgtgtggtgttgatctttacaattagtgtaatcaatttcgagtatttttgttatcacaaatattggaccaccctccaacaaccagagagcaattttagccagaacttctgtgctggcttccggcaacactgaaggctgcaacctctatttctgtagctccactattcttctgaagcagaggttaaagtgtagcattggaactgaatatgaatgcgcctttctccaaaatttttgaaagtgccattacatccttggttgcaacatttacattttgttgaaaagaaatccacagttatgactcttgtaaagtcgttttacttgtcatccttgttgcttgcttctatttgaaatggctgtatctgctacggtatctgttgataaaatggttttggcttgctgttcaatacaaagaagggatattgatctcaattggtttcaaacggagctgaatggtgaaaaattatccttgtagtagctgactccatttggtttgggattaggctttgttactattattgtgatagtagttgttgctgttgattcaatccaaataaatatgaaatattagatttcttattcctatgttatatcacttatcgacatgatataatttcttttggaaaaatggtcaaattgttgaaattggccctttttgaaggatacaatttaaaagaatagaaaggcttagttaagttgacatcgttttctctttgggaaagtaaaaaacagatgatatggtttcattttctttttgtgatgcagttgaaaaaggag

SEQ ID NO: 42669 - DNA, 830 bp, Manihot esculenta
  Intron number 1 from transcript cassava4.1_017613m (locus cassava4.1_017613m.g) derived from phytozome v7.0 (chr-ID scaffold12615; pos 81250 to 82079 reverse strand)
tcactccatcagcagatcgagcagcagcagcagtgagcgtatatgtgtatatatttattttcatttcagtagtaactatctgtttggttcctgagaaaatgtgtgaaagctgaatggaaggaaggaaaatgaaaagcacaagtatagtttaacagaataatatggcataatttatgtcttttctttttctatttccttttaattgtatttctttttcattttccaaggaatgtcaaaggaggacataaacaaatctgtctttgttctcgttgttgtatttcactggaactaatatatagcttggtcttccgtagtattttttcttttactttgatggaattttcctatagcgtaagttagggcttctaagctagcttgaaggtcttattcgtgagttataaattttttacttgggtatgttttagttttgactttttagtttatttctcgtaatttctggctgagaaattaattatttttggtgtaataaggaaaaaaaaacgaaaaaagctttacttttcttataaattaatttatcagcttggaatgtcgaggacatgggagcaaggaaactaaatatataatatatatgtgtatatatatgtgtgtgtgtgtgtgtgtgtgtattttgtaataattgcattgcagttttgacatattcaacagatttgtagagtaactaagttgtaacatgatgctatctaaatgtagtcttttcctatttggcatacttggtaattcttttgcttattcagaattggatgagtgcttgaacaattttattttttattgcaggcctttgtcaaggctcagaaaaccaaagcttactt

SEQ ID NO: 42670 - DNA, 987 bp, Manihot esculenta
  Intron number 1 from transcript cassava4.1_007606m (locus cassava4.1_007630m.g) derived from phytozome v7.0 (chr-ID scaffold06011; pos 245534 to 246520)
ttcttcgccccagaaagacaatcaaaacaagaaaggtaaatgtttcctttttctttggttgattgcatatgttgttttttagcattataatgtgcaacataatttacatccttatacctatcttgtttatttattgcaagtgaataccagttccgttaggtagcttatactaatagtgatattgtcactatttatccaatactaatagtgaacatgttccaggaagattgtttttctattcacttaacaattacagattgggttggtacagtttgatgtgagtttctattattggaggaaatttcagtggcaaatttgcctattagtctgatctaacccataatttcttatcttcggtggattttgaaaaagtgatggaatatatcccataatgccagagtccatgaatatctgaaacgtctactgaaaaatgatggcataataactaggcagattagaaatgggttcaaagagcactgtagagactagaaaatgttagacaaactgctagttttcagtccattctttggaaaatccactcgaaaattgattatgtataaattttattttgtgtattcccagatggcacattgaatttggaaagggggtccctagagatgataattcaatggccctcttctcaggccaatgggcatctaaatgtgacagcagtcaatcctttgtcagatctcacacctatgatcttgtattctaatctttgtagaggcattgagccccctgcttttgtttttaacttgccaagatatggtcatggaacctctaaccagatctccatgtaagaaaaagataattaaattattaaagattgaaaacatatggtgcttccatgcttcatctaattgtatctcatttttttttaagaagcataataaattatttttgtgtcaggtttgatttgcatttcaatatctccgtgttaacttgattctgaccctgcaccaccatactgaattcatgcagtaactg

SEQ ID NO: 42671 - DNA, 675 bp, Manihot esculenta
  Intron number 1 from transcript cassava4.1_010798m (locus cassava4.1_010798m.g) derived from phytozome v7.0 (chr-ID scaffold01551; pos 1371528 to 1372202)
acgaacttgtttctttgagagagagagagagaaaggtgagatttgggtttatgggttttgcttacatgcttgttgcttttcattctgtttagaggtttgttcactgaaattttttgggggtttattttgaattttatttatttttaaagttattcggtcaattgggtcgttttcttagggtttactcttttttttttggatttatttaaattagtggatggaataaaaacattgatttggtgatagggattttgggaattccacagttcaatttcttcagagtagagaaagtattttgcttactcattttctgattggtgagcaatctatcatataaggtcatattggaggtaaggattttgggttggtgaattgaatttctatttgctcaaaattttcactacagtttttgattggtaattttattgtaggtgaaatttgttttttgaaatttcattgctgactgcaaattgctgggtttgtttgaattcgaccagcgtaataaaaaattgactatagcgatcagttccttctaggatagtaaataactttatcatttctgagttttgtcatttcttttatcactgtctggggtttaaggctctctttggtacttaaggagttgtgtttgtgtttggttctttataatggattcaaaaacaagtgcaagtggag

SEQ ID NO: 42672 - DNA, 765 bp, Manihot esculenta
  Intron number 2 from transcript cassava4.1_010798m (locus cassava4.1_010798m.g) derived from phytozome v7.0 (chr-ID scaffold01551; pos 1372485 to 1373249)
ttgcaggtgaattttttctctttcccttttccccattttgtttatttttgcaattttctcgtagacctccgggttactttaggtttttgtagaggtcttgttgggaatttatacattttaggagctgaaaaatcttgttattattacctctaatttattagttggtctatttttcaaaccttgttcggtatgtatttaaatgaatggaaattatagtgatcctggaaaacccaagctttggatcatgtgacatttctcctgatacaacatatactaaaaccaacccatttaaaagttcaaccagattaacgattaatcttgtttagtatttgaggtaacaacgtatatatggaaaccctgagtggattagtgtccttataagaaaaagccaccttgttggtcagttggggccttggcggaccttttgattttgggattgcatggaagaggtgggcgttcctttttaagaaaaaatatatatatacttgtgatcttcctggcattagataataaatctttttttggttttttaatgtgagacttttgaaattggtataatgaatatagtgatcacgttgtattggatgtatatacgcttatccagaaaatatttccattaagattcacatagcttgcttgaatttgtttatttgatgtgtaatgcatgacaggattacaaagctaaatcactgtgtttgttaatgtaaaatgcttactgcaattttttgttggacattatagtgaagctattggactggggtgagg

SEQ ID NO: 42673 - DNA, 971 bp, Manihot esculenta
  Intron number 1 from transcript cassava4.1_007707m (locus cassava4.1_007707m.g) derived from phytozome v7.0 (chr-ID scaffold07519; pos 598716 to 599686 reverse strand)
tcttttctccatctctctatctttatttctctcaggcaagttcttcatctatctctcgcttttccatgttcgatctcactctgctttcatagatgaatgtatagtctgttaggtcgctgagaaaatcttaaccagaaatgaagtttttagcttcgaatttcattgttattagctattatttagacccgaagtttttgtttttaaccccgttttgctcttgtttctcagcttctgaatagggccctagggttttcagttttcgcatactctaaatgatttattttttccacctttggggtttaacaccgtctcgttttggtttactgcgatagtttttttatttctttattcggaccttttacaattaacttcttgaatactcattataaattgcttctgatttattcatgcattgcaggaaataagaacaattacgttgtacaaatagtttgtctagctttttaaacgattaattactgaacttgatttagttttttacgcaacgtccctttttaattattacatactagtccagtgtaaaacttgcttttttcgttttttattgtaaagttgttcatttgaggtctgcattagcattttcttgtgtaatgcttataaatggagtgatttggtgtagttgattccattttgggtgagatacttacattgtatatgtagctcttttagatgcttaaacataaattactgaacttgatttggtttttatgcaactttatgtttttaatgattaaatctggtctacgtgtaaaacttgcgatttcagttttcgaatgtgaacactgttgttcatttgactactgaatgagcattgtcttgtgctgtttattggtggagggagctggtataattagttgcttcccttttggttgagatactcttcaatgagatatgatgctttgggtactggaaatatgaactgtgggattgcttttgtagcagggtggtacaaa

SEQ ID NO: 42674 - DNA, 368 bp, Manihot esculenta
  Intron number 1 from transcript cassava4.1_025547m (locus cassava4.1_025547m.g) derived from phytozome v7.0 (chr-ID scaffold07012; pos 889808 to 890175 reverse strand)
cgctgctccaactctgcgtattcctgtgcctataggtttgtacgttattctttataagtgtttgttttctgaaaattcttcttcagaggatacatgaacaattagatgttttactacaattctctaaatagtaagatatttggaagttttaatgagaaaaatttgtctcaattccccaattttgtggtgtaaaaaagacctctaaaaacctaacccaagctctccccaaccaactcaaattcaaggtatctaaacctcgaagaatctcccgttactttaaagaaaacccctctcagacgaaggcttagcttactacgttcagtcatttgacaggtactgtcgtcaagcataaaagagggaagctactg

SEQ ID NO: 42675 - DNA, 553 bp, Manihot esculenta
  Intron number 1 from transcript cassava4.1_015153m (locus cassava4.1_015153m.g) derived from phytozome v7.0 (chr-ID scaffold04151; pos 256884 to 257436)
cgaattctttgtgctgccgccctttacgacctcaggttcgttgattcttttgccctttctacgttctgaaattagtgaaattggcaatcttggttcagatttctgtgcttttttttttttttcaatggattaacattggggattctggtgggaagagaatatgacttggacacttggtggttctcccaactgctgcctatatctccatttttgaagccttcttaatccttgtgctgcttcgaccccccccccccccccaacccaaaaaaaaaaattaatgttaaattctatgggttaactttttagttgtgtttttctcgttaaaactttaagacttttgaattagattataattgtcgagcaacaattggtataatgtgtatatatatatatatttccatgaaattactctgttttgttgtaactagaatagatttaactgggttttattagttgaatttgtaatccaactgtgctcacaggataagttttttgtaattgctttttgttataccatgtataactattttctttgtttttcctttgaatagga

SEQ ID NO: 42676 - DNA, 1003 bp, Manihot esculenta
  Intron number 1 from transcript cassava4.1_033971m (locus cassava4.1_033971m.g) derived from phytozome v7.0 (chr-ID scaffold03718; pos 274794 to 275796)
actgcttcgttaatgcaagtctcttttacttatcaccatttcttcatttatcttgcacattgttgcatgtgatgcatgtgatgcatgtaataagagattaagaacaaactctaaaatcccatttctgaaatatttcgaagtgttagtttgatatatgcatggttggtgtttctcagaatactccattttctcttctgtagccaggtttcgctggtttcagtaaaaatttcaatagtttttatgattcatcaactatacatagcgggctgaaacttttgccaaagggctgaaaaaaattttcaatatatttttttcctatccattgggaaggaccttttcaagactttgcttcaatatgattgtggattggaagaagactgatattttctgatcttattgaagtctgtttgttaaatttcacaactcagctatgcatgctttcatggaatttttggtgcatctaaaatatcattatatataatttgattctatatgtgattaagagaaaaaaatatttcattaccagtaattttgactttgattacagcctaattaaacttattattatgatttgaaaatcccagaagccaaaaagaaagattaacaaactgccgtctggtataggaacacaatgatgccgacattattgactttcttccattatatgatttctgctaataatctctcctttccattattacgtacaaacatgaatcttttgtccttttgcatggttttattatcacgtctccttcaacttcagccttcttttcaattgtgttgaaaatgatctaatgggaatcacacgatcaagacaaccacaaagaagcattcgtaatcactttaattagattgcataacgaaactaagacattatagtcttatacatgtcaatcagaagtgtgaactcatatatttagtcatgcataattgtgttgaattatatcgtatctgagcttatatttatttaaaaaaataataaaataaaataatatgagcaggg

SEQ ID NO: 42677 - DNA, 546 bp, Manihot esculenta
  Intron number 1 from transcript cassava4.1_017775m (locus cassava4.1_017775m.g) derived from phytozome v7.0 (chr-ID scaffold06550; pos 431098 to 431643 reverse strand)
attcgtgaggtatgtttgctggaatttgtgggtttttactgggaatttttttcaagcttttttagctgatgaagtttttgtttgttttgttttccccaatttttttctgattttgggaaatttttaaatttttatccttttttggcctgtttatgctttttaccgtctctaagatccctgatctgaacataacaggacatgagttttaagcatagaagcatatgaaacaaggaaactcacgttcaacataaaatatttaagtatgattttttcccccttttttaaaaaggaagagagtaaaaaatattctcctcccaaaaattaaggccagttcctgtcaaatttgtcagttaatttagtgattttatgtataattgtgctattaagtgatgaaatgttttgtaatttgtggctttaaagctaaaaccctaagataattaggatgtttttgattctggatagggagatttgtgatggttatctgtaactttctgatttgaagcaaaatttcaaatctatcaggaacttgaagcactagcagatccc

SEQ ID NO: 42678 - DNA, 969 bp, Manihot esculenta
  Intron number 2 from transcript cassava4.1_010140m (locus cassava4.1_010140m.g) derived from phytozome v7.0 (chr-ID scaffold01828; pos 28662 to 29630 reverse strand)
gactggggtttttccgtttaccctcttgttcccgggtgagttgatcggaaatttttgtccaaactagattcatataaattcgtaatataaaatataaggagatttgatttttctcaaatttcataatcatatggaccttttgttatgaagagttttatttattaaaaataaatcaaactttttttttttagatctaacatttgtttaccaatcttctttatcttttaatgattttttaaaaataaaaaaatgaaagtaaatgtttatttagctttagctttactaatgcttttactctttccaatatttttaaaccatttttttaaataataaaattaaaattagtattttgggcttccaaacctgcatcaagagataatatacaaatagagttggggtctgcattaattttgagataatacaaattattgaattaattatatttttaatttataaattattttaaattgaataccaatttagataggagtgaagacacagatacaatctcataacttttataaaaaaaaaatcttaataatttaattatgtattaaaaatgccaaatccatttttatgttatagagattatatcgttgggtgtaaaaaatatatgaattaaattatatatgaaataaaagaatttcattttatatggattattttttaatttttctaaattgtaaagacccaatgatttatattttaaatatattattgtttcattaaattttatggattaaattatagattatctttttttaatagctacgtagcatctctataaaataaaattagttaaaatttaaattgaaaggtgatatctagataaaaatttctcaataatagcaattatttgattttataaataaaatccatttgaaatcagttttaatatcatataaattttcttttttcttaaatgctggaattgcttgtaatagtaaaatcccatttcgataagcaggc

SEQ ID NO: 42679 - DNA, 566 bp, Manihot esculenta
  Intron number 1 from transcript cassava4.1_015346m (locus cassava4.1_015338m.g) derived from phytozome v7.0 (chr-ID scaffold09876; pos 192949 to 193514)
catttcccagtgagtactacgcatctctatagccggtaagcgcacgcatctacttatattccaactagtgcatttgtttttcggtcaaggaattctcgttcctatctctattttattctgcttcgtcgctaatgctatcgattttgagttggaagactgcaactttgatgccttaaatccgttttctgatttgttgttatttctgagaatttcactcccttttggaagattttatattgtcagtgagtaaacttgtttaacttcactgatcacacccagtgaagtgatttgttaccttagcgagtaaattttattatcaatcacaaattcaactattagatgctatttattcacatattttactcattcggcgcttaagtttaatgacatatttctttctcttgttatagttttatgttttcgtgttaatgattcagctgaactgaacagaacaaaaataatttggacaattagaatgcataatatttattgctttaactggaattatagatattagaagtttttgttcagtagttgtcatcgttcattcttttagaaacaagccg

SEQ ID NO: 42680 - DNA, 818 bp, Manihot esculenta
  Intron number 1 from transcript cassava4.1_009178m (locus cassava4.1_009178m.g) derived from phytozome v7.0 (chr-ID scaffold03614; pos 1020223 to 1021040)
gttatgctactatttagtcattcataatttaccatctaaattggacatgcttgatcaataatgtctgaaatctaatgtttgttctttttccgttgtggatttttgcagaatatagtttcggtttcatcagttgaggaagaagatcaaacagccaattcttctaggtgaatcttcactttatgacgtttgcaattaactgtttttgtttcggaatctagctggagtttgtattagcttctctctctctctatagctcaggatcctggtgtataattttatacaactaagaaatttgttgtctttctgtataatcatgttgaatacttttctggtatttaaaactatattagtttcttggtaatgctacgaatttgaaagtaatactaggattctatgccaccttttccataagctcatttattttatattaatttcatattggagatgaggattcttttgagcatgctgagtttaaattgcgcttatcaaacgggaaaatgatagttagaaggttggcatggttggttagcctttagtagaagcaactagttaaagaaaacgtttttctgtcgtcaaatgctcaaaaatcaaaatgcttgttgatagggtttttactcttatcattaatgtgtttgtttgtcttcttctacctattataaagtgtttatgtgattgagaatgttagcaaattatagcatataactatcgatatttgatgtgttcatataatcatactttagaatcacatattttgtaaatgtttctcagacgttattaatgcagggacagggaagacactggattttcatctggtctta

SEQ ID NO: 42681 - DNA, 747 bp, Manihot esculenta
  Intron number 3 from transcript cassava4.1_015970m (locus cassava4.1_015970m.g) derived from phytozome v7.0 (chr-ID scaffold02960; pos 711229 to 711975 reverse strand)
cctcgagaggtatgtctgcgagaaccagaaaaagtcttctaccttttataatggttcttttccttttcttttttgcataaaagggctacaactcctattattcttttatgaaaatggattgggcgtagatttttggttctcaatctcaatctttatttctttttgatctatttattaatttctctgcttttggtctacttatctttttttttctttaattattttgttgagtcgtttttctttctttttttctttttccttctctcttctttcggtcctgccattttctgtttgtttcttaagatttctgtcattgaggtaaataattcgtttactccacaagaaaatcaaaatgatcacaaacaagctgttactcaagatttctactcctgtgacaaatacttgatagccttatccataataatagttgagtagttggcactgggcattagaccttttccatacatacttatgggtttctaccttctgctgtcttcttcttttagttctttagcagtttttattcttgtgtttttctttcttggcttctttcaaaattggaatttcttctcttttctttttcctgttatgagataaataaattactggctaggaagttgcctagttaaactctttggattaagtccactattcctgcaatactcatcattgcttcactgcacaaccctccaaacttcatccccttttgcagttaactggtgtaacagtgggggaagtgaaggcagt

SEQ ID NO: 42682 - DNA, 589 bp, Manihot esculenta
  Intron number 1 from transcript cassava4.1_015970m (locus cassava4.1_015970m.g) derived from phytozome v7.0 (chr-ID scaffold02960; pos 712234 to 712822 reverse strand)
ctgctactgagcttggcaaggaattggtatattgttactattttaatgactcccattttaagtcttttgtttctgctttacttgtttgttttcgtctctggctgcattcatggaacttggtagctacgcatgttcttttcttgtgtaagcatgagaagagatttgcttgatatttatattgcaagttgctccaagttcattatgtttataacctgtttgttacttggctcatgggctctaacatttttgtaatctagaatggttttttcaaaatgtcctttcttggatttgtatgtctctggcattattatgcaatctctcgaggtttttatactactttccctcttcatgtgaacactgaaaagctaagacctttttgtgaattgacaagtactggttgatttgccaattgacaatttcacaattgtttgaatgtaccataaagaagacatttttattcataatttttgagaccatacccacccacatcggaacttccactctctgccttctaaaaggctcatatgtttctaccaactgattatgcttgtgggtttcttgcaggtctcaaggaacattgatctggtct

SEQ ID NO: 42683 - DNA, 773 bp, Manihot esculenta
  Intron number 1 from transcript cassava4.1_002201m (locus cassava4.1_002201m.g) derived from phytozome v7.0 (chr-ID scaffold02994; pos 498749 to 499521 reverse strand)
caaggtccactgggcaatttattgcagacacagcagtaagtttctattacatgtaattttgaatttgtagacttgaaaatgcgagtaataataaaaagatcacatgtatacagctcaactaagtattaatcccaatctagctgggtgaactacataggatattttcctttgtgactctatatgactttgtttagggctatacctatagaattaatgccattaacatgtttgcaactatgcacatctttttttttttagttaatagtgtcacaaggtgtgttctgtggatgaatcttatagctgctttcccttgttggagtgaatgattcatgatttgctgactaagttgctcaactgctgtctttatctgtgtagagcagagctgctggtgctttctataacatctgcttcctctctgaggtgttagtgaatgttaataggttttgagtcttgacaaatgacaagttactttatggttgttgtttgattcctttacttcacattgcctgggagttaggaagagtttttgtttcttgtcttgccttcgaagcgagtcaccttaatttaattgatgaagcatccttgaagagggaaggcggggaatatgaaacatcacatgctatcaaatgatgcaaaaataggcactgccaaattttattctcttttattcttattgtgattatttcatttctttcactatgttttcatactcgttctgatgtcatttttggtattcagattcagatccatcctgatagaaaaaattacgaaaa

SEQ ID NO: 42684 - DNA, 456 bp, Manihot esculenta
  Intron number 2 from transcript cassava4.1_016051m (locus cassava4.1_016051m.g) derived from phytozome v7.0 (chr-ID scaffold00080; pos 9775 to 10230 reverse strand)
cctacgcgaaagggtaagtttccttccaaaaagggaaaaaaaagcagaaagtgaatttatcatgttcaggattttttgtatttacttcctttatgtgcttgatccatttaacatgtccaatatcacgtatgtagatggctgttccaagtcaattgccaccctatccttcttatagatcaactataatttgatatacattacgacatacgtagatttgagggaaatacctcttatgcttgtgttatcatttaagactgttgcctattctgctttgtggtcaaagttttgattttatcatgataacatcaaacacttggctgtacttggcataatatatttttgggataatcagggaaatgcacgtttagttatgattagattgctggtgctttaacttatcagggagaaggattttattcgattgaaaccttttcttctctgcagcaataacaataa

SEQ ID NO: 42685 - DNA, 788 bp, Manihot esculenta
  Intron number 1 from transcript cassava4.1_004783m (locus cassava4.1_004783m.g) derived from phytozome v7.0 (chr-ID scaffold07313; pos 28851 to 29638)
accctctctcctcgccatttttgtcccctgcaaaggtttgctctctctgcctatcctctctcgctctctttgtcgtaaaaaatcgtttctacaaaggctttagatctggcgttcttgcatttatgaagctcaatttaaatttttttctttgtggaaacctgtaatttcattgttttttcatttcactttctcttcaaagttggtgtttgtgttgttaggtgataagttgacgatacgttcacattctttttgttttggtggatcttgatctatcattttttatttcaagaatttctttaataaaaaaaaatgttaaatgtaaattaattcaagtgtaatgcatgtattgagaacgaaaattaactaggaagttttctttctcaagtttatgctgttaaactgcttgattagtgagcaaactttgtgttttggtccttaatggtttattaactgttcattacctgattttttcccccaaattcatattcttggtcctatagatgattggaaaatgttcgcccatctcaaatttgatctctctctttctcttgaagctccataatgcagtataaggagaaggttttttttaatatatatttatttattttgtttcattttgatgttctccaataatatagctgaatggataagaaattactaaattttgcttgtagatagctgttttggtacgttatagtttccatttagagcttcttgttcttctgaacttgtggcttttgttttgaacactagtatccttaaagctgggcatcttctcatcggtgata

SEQ ID NO: 42686 - DNA, 988 bp, Manihot esculenta
  Intron number 1 from transcript cassava4.1_020134m (locus cassava4.1_020134m.g) derived from phytozome v7.0 (chr-ID scaffold02960; pos 683145 to 684132)
aatctgagttgtttaaggttttttttttttttttcccacctcttttgctttagctttcctttctctctaatcttatgccttatccccgttacagttcttgcaacttctcataaaaattcatgtctttgatcaccagaaagctggctctttcttgatgataagaaaaaaaataaatctacttatagacttctaagttgttgggtgtgttaattgaagtaattgcattggtgggttttcttccatttcattatatatgaaatcaaagtgatagaagttcataacatggtaacattgtatcgggtttatgctaatttcccctttctatgcatcttttgcatttggttgacatgatgattgggactgaaacagatactatcttacttggaaataatgctgcaaaagagctgaaaaattgttcttaatatttgaatgcagcccttttaattagagattcattgaaatagtgtcatggatttatgagttgttggttattaacctacttagaaagtttttatgacacacataggatggttccttggttaagttaacgtgagtgtattttgatccagttgaacagacacacattgacatttgatctaaatattggatatatttgagattcaagaaaatgtaggttcagcttatccattcgttcatagatctgttatttttttttctttgaaaactctttcttaagaacctgatttgctccaattatatctgaattgctaaaattcagagtttctgatggaaagctctgtaaattttttaattattttcccttgaagaatgaaatgtcttttttttttttccctctgtctatttctacggcttgttttttacattaattgttgtagcatttatacgttttattaatttatttttaatggttaagctgacattgtttatcctttacctaacctttaacttatgatgcttttttattcatatttttaggagacaattcgatcttgccaacagggaagca

SEQ ID NO: 42687 - DNA, 879 bp, Manihot esculenta
  Intron number 1 from transcript cassava4.1_005195m (locus cassava4.1_005195m.g) derived from phytozome v7.0 (chr-ID scaffold05474; pos 86439 to 87317)
tgtaatcttcgtttcttaattgttatatcacgatctgtcacgatcaaaatgtacaaatgataaagctgtttaagcatgtttttttgtgttctgtttttttttcccctgccttctgggttggattctcttctgcttcgtttggttgttcatggtcaagtgtactcctcatttgtatcatctgatgttgtttttatgatctgggtctgttaaaaagctgaaaatttttcattatctttggtggagtgttgataatcacatcctctgtttctgggttctgaaactatggattctaattttgcttgcgccgatcacttttgatcggttgacaagggactttaattaattaattttttttggcttgttttgttgagtttacgtgaacagaagtttctcttttgatgttggaattccttattttctgggtttcttttgggtgtggaatatcctttcagccaagaatagtactcttctcttctaagttttcattttcgagtatcccttgaatcgtttcgtttccggagttttgttactcaattacgtgtttctgtaggtttccatttcgtcacccattcaattaatgatctaaattgctttggcaagcttaatatttgaccattgggttacccttttgcttctctgagttctatcttttttgcttgtccttttggtacattatctaattcattagtttgcttaagtgttgccctttatctatacctactcagttgataccttcaaacatcttttgttcgttatttgagttgatttttttttccagatatttcaatttgctttcaacttcctgccttgtatggagattttatgatcttgtttttgcctgtaggtttgagaattgaagcttggtgattagtgcattat

SEQ ID NO: 42688 - DNA, 376 bp, Manihot esculenta
  Intron number 1 from transcript cassava4.1_014432m (locus cassava4.1_014432m.g) derived from phytozome v7.0 (chr-ID scaffold07991; pos 349107 to 349482)
cgtatgtttccgatttattactcgttttattctgtttatctcgctcttttctttttattgcttgtattggggttgcatttccttttgttccttttgttttctatatagattttaaacttcttttttggagagtttgtattatggaattgtgccgatcttttgatcaccattccatgacttgaagaatcctatcattttatcttcttttttttttgcgggtgttattagatctgatgaattcaagtccgatattcaatatttgatttgcatatgaaatatgacgaatcgttagtcggttttaatgtgtgattttgtgttaattgtaccatttttaacaggttgagtttatttatttgattttttcttgagttgcaga

SEQ ID NO: 42689 - DNA, 1058 bp, Manihot esculenta
  Intron number 1 from transcript cassava4.1_018106m (locus cassava4.1_018106m.g) derived from phytozome v7.0 (chr-ID scaffold03614; pos 993015 to 994072 reverse strand)
cgtcggtactatcgtcaaacttacatttcctgctggtaatttttcgcatccgtcaagattttccttccttttcctttctttctggagctattacttgatctgatcgtgtttttgtgttattttttataagcaaatttaacttcttgaaattgttagttaaccttccccttgcctgctaaggtgtcaaggaaaaaacccaaaactggaattcatgtacatgttagggtacccagtatatgctccagttcatgtatatcccgttttattatactggtgatggttaaatgctttgatgaaaacaaaactcagctgagtagaataacttctgtcatgttttgggtctggtgcactgcaagtcatttcacggggacaatttttatattggtattgcagattgtattgtttacttttctttctcaggatgatttaatttagctgctaatgtcctctgggaaattggattggtttgtgaatctcatagagttggagatgaaccaatattgccaatttattgaactacttttcttttggtacaattagctctgattgggttcaaactcaataactctcagccttggaggcgactccagtaccatgagttaaagcttattggtagtaatattgccaattgaactagtagtagtaaccctgcggtcaagtgagtccctatctcaaagttttggatgtaatatgtgattccattcggcttgtaagtagtaaccctgtggtcaagcccccaacttgaagagctgggagctgggtatatcctgtggtcaatgcctatctcaaagagttggaactagtaagtattaaccttgtggttaagcacctttctgacgagtataacaattgtctctctcatagagttggatatggggctttgacttataatttcccatcccatctcccttcaccaagagagatcacatactgtttccttttgcaagagaaaagatgtgtcattcatttgcaactcatttaattattaaccctttgatgctgtttaattggggatactgctaggaactcctggagtaggttacctgaaggaaatattt

SEQ ID NO: 42690 - DNA, 183 bp, Manihot esculenta
  Intron number 1 from transcript cassava4.1_019816m (locus cassava4.1_019816m.g) derived from phytozome v7.0 (chr-ID scaffold06446; pos 162805 to 162987)
ctggggcaaggaccagcgtcctccctctctccacggtgccttttctttttctttccttccttccgtttcttttcagcccttggaatttgaactctgcttacaagggaaatactaattttttttgctttgatttatccattttgcgtttcaggtcctaaggtggaggcagctgcttctgagtga

SEQ ID NO: 42691 - DNA, 979 bp, Manihot esculenta
  Intron number 2 from transcript cassava4.1_007505m (locus cassava4.1_007505m.g) derived from phytozome v7.0 (chr-ID scaffold04681; pos 359160 to 360138)
tctagggttttgtttccatccactcttctcaaccagtaagtgttgaaatcaaacttttctcattggttatttagattcttatttttattatgcctgtttgaattattgtatttgttaatttaagttttcaatttctacgactttctgaattgggattctttagaaattatctgctctttatggaattttagctttatgattgtggtgtggtcggagattgtataatcgtaagtcgaatctgaagtaatatacaattttgcttttcatgtgtttgtttatccccgataactttggggtatatcgagtccgtgtttgaagaatttggaattgacggaatggaatttgaatttgaggtaatggttgtagtaattaagcgatacaattgagtgatagtttaaaaaaaaaaaaatacttttgatactgaatatttgaataagggcctattagtgctttaggatcaatgctttcctctcttttttttccttccatttttgcatatatggttattcctactagttctgaaatatcaaacgttttcttggttaattggtatacctgcttgactagggatccatgaactgaaagattaaacttgcattcttatttgtgtggagttgctaggccctatagctgcctatagtgatgctattattttggaggatagagttgcattatcacagggtgcttctttgttcaataatttctctgcttttcatgttcaaaggagtgaatttctaatccttaactttggattttttccactgttgtgatcagcaaactgcagtgaagcagaaaactctattattctgaaggaaggtgtttaccataactccttgtgtgtaatataaataataatctttgctaggtcatcatatatggtatatctctcattccttttctattcataactcttgcaactttgcattaatttctttggaggacaggagaaaaaaagaaggaattaatatccatctgaagg

SEQ ID NO: 42692 - DNA, 914 bp, Manihot esculenta
  Intron number 2 from transcript cassava4.1_033582m (locus cassava4.1_033582m.g) derived from phytozome v7.0 (chr-ID scaffold08057; pos 58511 to 59424)
actgtcgcgattatacaagtaatgtgtaattgatctcttcttttgatagacgctaatctgtggtatgcatcttttgtttattatcttgttaaaactatgcaatctaggaatcttgtcagactctctctctctctctatatatatatgtgtatgaattctaaggaaacatcttgctgccttggtaatgcatattagtgtacttttggattatatttaggttaataaatcatctcctggtgagtataatccattatgttagatttataacttataatcatagcaagaaactatttttcaattagaatggaaaaagtgttcctcaactgtagaagcatagataggaggatggtagagaaattatttgggttttatcgtcgcgaagagtggtttttgcccaatgaagtataatctcatggaggaagagagagactttagctcaaggcggagaaggttttgcccatgtagtttaagacattttttgtagtatataatgtagttacaataaatatattggattattttcagaggaaaataaaatggattaactaatatattagtataaacagtttggccgagggattaattgagtatactcgggttgatgcgtagatagtttgagtttttaattggtgacattattgaaaaataatgaaagataaatgggcgtggatgtagtctaatattgatagagtgaatcaccttaaaactttttatattttgctttttgtcatttgtggggattgtcccaacacattatcattatgcaatctgttctttatgaaacatcccctttctcaagggaagattaagaacacttggattaaattgcatctcccttcatttatttctccagcctattaatttattcttttgcaaactggaaggattggtagaactcctcaccggtgaaagaa

SEQ ID NO: 42693 - DNA, 894 bp, Manihot esculenta
  Intron number 1 from transcript cassava4.1_029999m (locus cassava4.1_029999m.g) derived from phytozome v7.0 (chr-ID scaffold02960; pos 702685 to 703578)
aaatctgaagcctttcatcgtgaaggccgaacgtaaccaatacttttagcttgtaactggcttcttagttttttttttttaacttgaaatgttatctgggttatgggtggggcacgtgtgttcttttcttttctttctttttctttcttttttttttctttttctaatcaatgtttctgccaaatagaagggtttaagatgtatttatttgctatttattgtgatgatttgcttccttagcagtgtaattcaatttcttggggatgcatgttgttgcctttgagaaaattttcattgattatttttcaatatttctgtggtattaatttatcattatttttgttgcatctagtttcagatcatattaagctcaggcatttgtgcacttgcttaaaattataaaacatttggtccagcaaagcaatacactcaaagctttgtgctttattgcctgtcaaagcagaatgttctgtgttatagttcttcggtgtactgctaatgtcgtgagatagaaatagtgatcagatagtttttgcattatctgtcatgtttggttgatgttaaacaatgctgaaatctaagcaatgacataactaatacctcttatagcagtgcaatggccaatagggatcagttttgaatcgtcaagtacttgctaatatgcagttcagtatcatttgttggtcattcatttcatcttcaatgcctcctttgtgtttataagtatgattcttttatcaaaagggatgagctaataagatttcaaatgagtgtcttctacagcaattgttcttgttactttgagttatgcccttctagagaagaatttacattagtcttatggattttaatcattatttttctgcaggacttgcacaactgggcttcaaagtg

SEQ ID NO: 42694 - DNA, 545 bp, Manihot esculenta
  Intron number 3 from transcript cassava4.1_007453m (locus cassava4.1_007453m.g) derived from phytozome v7.0 (chr-ID scaffold01701; pos 494777 to 495321)
aggcaacaggtataagtataacccatcaaattcagcaccttcgttccttttgtcaagtggcacagtaaactaaatgatattaaatcatttgcaaagtaagctgtaaccaaattgccatccctttttttcatttcactctttgaccaaaaaggcaaaagttttgcaccttgagaaattttttttttaaaaagtatgattaacccacctgcatatgcttaagaaactccaaataaaacagtgttttgtctcccctactgttacttcatcaacccaaaaaaaaataataagaagaagagaaaagggatatttttgctttatgggaattttaggtttaagaaagctgatttacctgcgtatatatgctttttatggaaattataatttccacactgaagtgtcatgtgaactgattctgtaaatttaaaattcaaaaactagttcaaggccattctcgaggtctttatagttgagcatatgtgcgtggaaatgcatatataagaacgttctaaagctattttaccttttattttcttaagccagggaca

SEQ ID NO: 42695 - DNA, 311 bp, Manihot esculenta
  Intron number 1 from transcript cassava4.1_013884m (locus cassava4.1_013884m.g) derived from phytozome v7.0 (chr-ID scaffold03614; pos 688107 to 688417)
tcggttagtacttgataatcctttatcttctatatcaaaatttcttttggtctatttgagattcgtattttttttttggccttttaagttgttcttgaattttttgttgagaaattgaaggtgtgaaaatgatttaggttttgcttaatatcttgttggtgcttattgattgtggtagtagtatgcacgttctaagcattcacctgttatcatttgtttccttaatatgatttatgtttagctagattggtggatttgattattgattattccttccctgtcgttacagatcagaacagtgaaagttagca

SEQ ID NO: 42696 - DNA, 247 bp, Manihot esculenta
  Intron number 2 from transcript cassava4.1_013884m (locus cassava4.1_013884m.g) derived from phytozome v7.0 (chr-ID scaffold03614; pos 688487 to 688733)
tcgaattgcataggtttgtttttttgaagttatttcaatttatctttgtcctttttctttgtatccacatgttggctgcttagcacatgaaaagaaagtaattttttggtgttcttagttgtgagctcctttgttgcaagcggaatcgggtttataattgtttgtggatggtgtgcatatgctatttatgttgataagtatcttctgattttgattttcagtgaaactgagcggtctcaaatcgcat

SEQ ID NO: 42697 - DNA, 431 bp, Manihot esculenta
  Intron number 2 from transcript cassava4.1_019684m (locus cassava4.1_019684m.g) derived from phytozome v7.0 (chr-ID scaffold03718; pos 61837 to 62267 reverse strand)
cccagaaggtgaaccttaatggatttctaatgggtttatcttgctcttttttctctcctaatttgattgatttttggatggttttggtctgttactattgattttgtctgtgattttaataatcggtttcttattgctttgatttttgttattggggatcgaaaataggcagggaaagcagttgctaatggtttgcaaagtcgtgggttaggtttatattgggcttcagatactgaggactgaatattagtgtattgtattcttgatatgaatccattacgttttttttttcttttttctttttttttttgggggggggggtttccttgacatattctgtttgtatattcttcattcttattccctttgcctcttgcttttgctgtttatgggattgctacaatttgtttggactacagggaagaatttgg

SEQ ID NO: 42698 - DNA, 496 bp, Manihot esculenta
  Intron number 2 from transcript cassava4.1_033518m (locus cassava4.1_033518m.g) derived from phytozome v7.0 (chr-ID scaffold06914; pos 212016 to 212511)
agacttctctgcctctctctgcaccaaccccacaagtaatttgagtttcttgcttctgggatcaaacaaagatagtttcagctccccattttattttatttcatttttatttcttttctcgaaaaggattatgttttcttattttgcatttttaaaaatttttggggttgacaagtgttttatcaattgttttcaccatataacttattttttattacttaattttaatttaaaaaaataaaatatattaacaaatttaaatacaagttgtaataatatcatcacaatgtggaaaatgagtttttcttttccattccttgatcaggaaaatagtttcaattgactaaattttctagatgtgatgaaaaaaatgtgaaaaatattttgtgtgaaacaaacttggccttaattttctagttactaatcaaaagttttttttttctttcatcttgggtgaccagccatcaatagcaacactcaattcaagaaggtatac

SEQ ID NO: 42699 - DNA, 222 bp, Manihot esculenta
  Intron number 1 from transcript cassava4.1_013561m (locus cassava4.1_013561m.g) derived from phytozome v7.0 (chr-ID scaffold03614; pos 1893304 to 1893525)
acaaggtttctaccaatctcttcaatttctggaaatttttttgattacccagtttcatttttctttttctatcacttgggtatcaagattcctgatcaccttagtatatataatcgttgataaattagaacttgacatgttttgcttatgaattgagtgtttcttgaagctaatgatgaacatctaaatatttgttgcagaggattaagcaagtggttcagc

SEQ ID NO: 42700 - DNA, 840 bp, Manihot esculenta
  Intron number 1 from transcript cassava4.1_002407m (locus cassava4.1_002407m.g) derived from phytozome v7.0 (chr-ID scaffold09761; pos 141166 to 142005)
aatctctctcgcccccttcttcccttcaagtccaggttttccactgcactccttgttttctcttttattggaacttgtacttttgttgtttctgttgttcagttcctgtttcgttttccgggaaaaagcttggggaaggaaatgaaaggacactagtgtattgtttaagttttctggtaaaaaaaggttgagagaactgaatactgttttaattatgacttaatgcttgcatagttgttgctttgaaatgacaggatgaagtttacttggtttgctaaattgcttaaatgaggtctaaatacatgggttttatttagttgtttggattattgagcttcagcttgagcatgagcttgaacatggatggaaattagttttttgagtatagctgccttaaaaggttaagttcaaacacacttgaattttgttcaagcttttttttttttcttgaccctctttacaaagactcttcaaaaatattctttgaattaagaagcgaaatctattctttttaaaacgccaacttatatggattagaaaatccaaaatcattattctccctatctttccctaacagggattaggtcttaaagatagaagattagaaaagcagaattcacgtcatgtctaaggtgcccctaacagccattagaacatattagttatctgtttgttatagaatttttttggaaagaaaagaaaagaaaagaaatggtgaaatatgtacaatgcaatggtttttaagggatttggttagtagcataatttgatgatattttcttctcttgctatgtttatattgcagggtgagctttccactgagagggtttccaaatcgat

SEQ ID NO: 42701 - DNA, 802 bp, Manihot esculenta
  Intron number 1 from transcript cassava4.1_012568m (locus cassava4.1_012568m.g) derived from phytozome v7.0 (chr-ID scaffold04151; pos 140196 to 140997 reverse strand)
accctcctgtggccagaaacaaacaaaaggggtgaagtttcctctcttgtattttgttcagtttaaatggtgaaatgtgtaggttttctggtagagataaaaatctttgaattttctattcaatgtattcaagaaaggaggaacattataatgttaaactcagaaactttttatttgttttattcttgttcgattatttgtaatatgcaaacagagatgatgatttgcttaaatgcccagcaatttttatgcagtgtagattattctggaagacttgttcaagttgatttttgatgttgtttaattcctactgaaattggctcatgcttcttcaatgatagtaaattagtaatccacaattgaaatagagccttctctgtgaagtaaaactaggtcctcctttcctttttcaatgaacgtagctagtgaaggcttaagcatgactactcattagatgcaagtgaaacattctctaactatagttgtattcacgatttgttcaagcatgtttgttgttcctttgctcaaatgtattgattggggccctttgggcccttttctgtaaccaatattcatgcctattccttgcagccatggtggtacaaaaagacaactaacagaactttgtccttttatcaaatgaaaatcatatttctaatttatgcaactagtttactctctttaacaaaatttcagcatgcaggtggtttaattcacctcagagttcatattacacacatatatatataagcaagctgacagttaacctggtaattaggtgaaaagctctccttggcgaagt

SEQ ID NO: 42702 - DNA, 604 bp, Manihot esculenta
  Intron number 5 from transcript cassava4.1_022501m (locus cassava4.1_022501m.g) derived from phytozome v7.0 (chr-ID scaffold01551; pos 808311 to 808914)
aagaggttgtaaagcaaacaattcttttccacgtaaggtgtgcccaaatgatttcttctgcatttttcacgcaatttagattttgcttatgtcatattgtaggattagaaacagtgcttcttgtttgttatttttatcataaaataaactcatccaatttttttgcttaatgaatttgtgaaatttatgagcaattcttagtttgtcactcgtgtgggatttgatatcttggtgtgaactcctatccatgggtcatggaggaactgttgatgacttaatgtactatttttggatgaacccttgtgcctcaataccacatcctcctgaagtatagttttctttgctttcctcaccatttgttaactctactctttttaaggatgcctcattctcttgtaatcatagaaagtaatcatttccgcgcttttcttttagtattcctcttgccctaaaaggctaaaacatgtatttgtagtcaaaatcttagaacagattgttagtagctacaagttaaaaggacaagggagtgcatactgcatacacgcagctgggcaactactttgtaattgctgatacttataaaacctttgaggttattttgcag

SEQ ID NO: 42703 - DNA, 956 bp, Manihot esculenta
  Intron number 1 from transcript cassava4.1_015202m (locus cassava4.1_015202m.g) derived from phytozome v7.0 (chr-ID scaffold04882; pos 188707 to 189662 reverse strand)
gagactaaatccatcgggcactcaattcggtactggtatactctctctccagccttctcagttctcgtgtattgaaattgcaaaccctcaccatttttattgctgatcttttctttttgaggtatatatgtgatatgttggtgtctatttgatgctttttgctgcgttttatcttttgttctcgcgcaattcaagtacgtgattaatatgtttgctaatctggttttactgagtttctttccactcagaagtttctctatttctttattagttttataatctttctactttttctcgctgatggttgattgtaaatttgaatttagcatgattaggatttctttgtttctatcttgcctttttatggcggtggtattaaacgaatcgcaaaggaggatttttttttttttcccttcaatttttttcttcgtaatttatttcttattagcagcccaacgcggaatccttaattttacgtaaaacatttgaagaaaactttttgtttacataagatatgcctttttgtttacagttgaagaaaacttttactttttcttatatctgctgattttctaccttttatctgacttaattttactgattttaagagtaaacatttcatttcttataggggagggtttagcttcggtcgctaatgattaactagtatgactagctatgccaagtggtacaaccataattacttttacattattcgtatttgattctaaaatttttatgatttcacctcttttgtgtcatgcaaatgctcaactgagaagttctgtttggagtgttacagctctccccctccagaaaccaagagggaaaggaggccccgcaatttctttttttgattttcgaatgtatgttttcacatgtccttgttgttcctctatttcttttttgagttaacaagtactatgtaaatctgcagttgttttctggactaaaaa

SEQ ID NO: 42704 - DNA, 412 bp, Manihot esculenta
  Intron number 4 from transcript cassava4.1_006500m (locus cassava4.1_006500m.g) derived from phytozome v7.0 (chr-ID scaffold04260; pos 299971 to 300382)
aataggtctgggactctccatagcaaaagtagcaggtaaattattgaaagagatatattagcaacagtcatttttttaatgattatctaatactctccattctattggataagaagtattaatcattaattaattatatcctacattaatcattaattaattattatacttttcaactaataaaatgaaaatcgttagataattatccagaaaagtgactgttgctagccttttattgaaaagaagaaactcaactctctgtgctttgaactgaatttttacgtagtgaaacaaacgtattaacttgagaatgattctgatgttattaaatcaaagttattaattaaaagtatattttgtttgttgggtataaatttttgtaatgaaaactaacgaggaataggagggggac

SEQ ID NO: 42705 - DNA, 1001 bp, Manihot esculenta
  Intron number 1 from transcript cassava4.1_028670m (locus cassava4.1_028670m.g) derived from phytozome v7.0 (chr-ID scaffold08655; pos 242585 to 243585 reverse strand)
ctgaccagtactgagatatttcctgttctgttggtgttttaaaatatagctggtaattttgtgcctgctgacattgttggttggagttgattacttttgtctctattgctgataggtttcccgagttacgtgatgcattggaaaagctacagctcaatgatgctgcattaaaggtatattggtttgtagttttatgtaatgcagttccagcttgtcttacaacccattttaattaggtttgcctttgtgaggtggttcttggtcaatgtcctttttggattactagtgccataagttgaaagttttagatggtcagaattgagcttttgtatcgcttggttaacacagcactctgatctaggcttcttatccaactgctaatttttaaatatagacaactggtttgcagaacctccaatgtgccagagtccgatgaaatgtccagagttcttcttagaaactgttatttaaactaccattattcatcaactttctttcgccactttgatgattcagaaacttcttgttgattgtcaaaaattcattgctctttgctgagttgctaacaattcaattaaaactggtgctctctctctctctctctccatttaatgctaactttaatactatacatgtattgctttctccctccccccattctccctctctttccttctttaccctctcttttttattcccaaaaatatcataatatttgatagtgagaaatgtcttatgggaagctaatttatttgggaaattagccacaaaaatttcaaaaatttgagcttaagagtactgttgacagaaaatgacagctttattgctatactcatgttgcacgcagggttttgaatagttgacaatatgtaatggaatatgcagttgacatgatatttgttgttacatcttttgtgaaatgggatttatactacataatactggaatggtatgacatggttgaaagttgaaacagctgctatccatcattttggaattag

SEQ ID NO: 42706 - DNA, 571 bp, Manihot esculenta
  Intron number 1 from transcript cassava4.1_029171m (locus cassava4.1_029171m.g) derived from phytozome v7.0 (chr-ID scaffold09761; pos 767147 to 767717 reverse strand)
agttctgcacttgtaaaggctgctaagcaggtacaaaatgttattgatggattagatgcttctgctacatttcttgggtggcttcccatttagttataatcattggattgttatggggtgaagcagttgttctctgcatgatggataaatgataaacacataaacttttctttttgctatgcaagggcatgcagttcccattattttcacgatctaaacccaggaccaataacaaaagagcagcagaaccttagcattgcattacatttttcatatttggatatttccagtgacaaaatcttggaataaaacttcaggaagattcaattggcttggaagggcaagtctgaaattggcacattcaaagtagattcccttaacaatacaacatatctgtcatattgtgacaacttggaacatgtataacatatctatggaaacaaattgatgctggatccacagaattttgtccaaccacatttgtatagcttctgatatattaccattgaatccttttattatgtgatccaactacaatcagctaaccactggatgttgcttatatagtttg

SEQ ID NO: 42707 - DNA, 979 bp, Manihot esculenta
  Intron number 4 from transcript cassava4.1_017559m (locus cassava4.1_017559m.g) derived from phytozome v7.0 (chr-ID scaffold00247; pos 52773 to 53751)
tgcgttcccttcattggctgtctgttgcacaagcagtaagttacttttttctgatcataattactgtacaagtaataactgggctttgatctcattctcagcgtacatgtatttgtcaataactagcatttgggttgtggaatggggacccttaagattattttgcatgtgaatctcacatttctaaggatacaacatccctccaagtggagggaatgtaatttctcggttgaaggagaagaatctcatgatctgaactccaaactttttagaatttgacataaactatctagagaaatattatttgggcagaaaatggttttattatgaaccacaattactaataacccatacgttctcttttctttatcaaatctttcactcaatagtaactttataaacaaaacccaggcccccaaagtaaaatcttgctgaaagaaaattttacatgctagaaatggatttagcagctgagacctatgtgtgcatatatgaacttgatttgaatggagaagcatcaaaatagttgaccctaattaggttggaattactgtgaccatttcttcaatgcatttgtaggcccttgtgttaacttgcaaaaatgagttggagagctcaaaatcttcttttgtcttagtttctcagttggaaactggattaaggggatgtgtggttcaaccttgaccatgaccatattctgtttaattactcgacactttagaccaaagactaagataatctactgcttaattagaattttgtatcataattattgaacttgcgctattttctagtctccactaattgatttgtggaattaacttgcacggttgcgcttatcatctctggggtatcttcagtttcttgccatcttatcatctctatggtatctttagttccttgccatcttacataagaatttggtttatgaattataactgcagctgcacaagcctgtaacagctgaagatttggcttc

SEQ ID NO: 42708 - DNA, 772 bp, Manihot esculenta
  Intron number 1 from transcript cassava4.1_005794m (locus cassava4.1_005794m.g) derived from phytozome v7.0 (chr-ID scaffold03614; pos 3974420 to 3975191)
ttttaagaagaagagaagcttaccaggaaacccaggtcagttaaatatatataggcatgcagttcttcaaactttgattaattctcttgctttttattttccatttttctaatttctctttgatatttttctttgaatgttaccttcaaaaacaaaaactaacttctctgatcttctacttttgaaattaacgagaaagcataaacaggagtccgtgtatctgaaattaaacacaatattctaaatttttttttcttttgtactttaaattgatctctatgatctgttaatcacaatctgttattagattctgtctgatgatgtatcaagtagttggtgatcctttttatcttttggatcacaacaaaaagaaaaccatgtggtacagattcagttcaattcaagagaggcataattaattaattaattaaaaaagactttcacttttctgatttttttaaaaaattattttagggttaaaagaaaaaagaatgataattggttgaagagggttcaattattggctgggatctcaataattgcattgaactgttggctttttctcccttttgtttgctttgtttttaaccatatctggcaagggaaacatatattccttcctctcattctttctcttggagtttaattatcttgtctttatctgtaatattaattaatctgcttaattaagaacttaattattgaaattaacaaacagataattatgaaacatgcagaccctagtgcagaagttattgctttatcaccaaat

SEQ ID NO: 42709 - DNA, 695 bp, Manihot esculenta
  Intron number 1 from transcript cassava4.1_012297m (locus cassava4.1_012297m.g) derived from phytozome v7.0 (chr-ID scaffold07012; pos 1436029 to 1436723 reverse strand)
gcaacacctaccgtaaggtactcgttttcttcttttaattcggtctaaagttattgctatagatttgtcttgtttttttctcttttccacaattgagttgggatggaaatgggtttctttatttggatcgagcctctatctatgcttcacatgcttttagatttgctatttttccctggatttttagtttttctctgaattatttttctgtgtgtttctttttagctctcgtgcgttacatccctatttctcatctggtttttagcttcaatttttatggctggatcattgggcaattgaacaggatcaccttgcattatacttgtctcgtatctgctgttttattatcatcctccacttattcctctctcttaaggagatagcattggaaatttatgctactgaagaaggtctattctcagggctttctaattttagaacttgaaagttcaatggatatgattgattagcttttgattgattaatgaagctctaatggttagtgttgcccttttctaagaatttaaaacccaagacgttggtatggagacttcagttgctctgtagtaggtgtttttatctcttgtgctttgcaatctgcaactacttcctctactgtttgtttatatccctttcatattaagggtagtcataatctgatttagtaccaccatgtttggtttgttgatccaggg

SEQ ID NO: 42710 - DNA, 994 bp, Manihot esculenta
  Intron number 1 from transcript cassava4.1_017771m (locus cassava4.1_017771m.g) derived from phytozome v7.0 (chr-ID scaffold11236; pos 158302 to 159295 reverse strand)
aggttaattccactcttcagaccaagttcagccaggtttcgattctccctctttattaattggctttttttttttgctaaaattagttatctgacatgggttttgcttcttggttttagttttagtagattttccgcattattttggatgtgataattggatcttatttggctccagatttactttattgccacaaggaaaattgttgcgttgttttgtggggcagttctgaaaagcgatggtctctttgattacattcttgttgaggatttaggtttatttttttggttcattgtttatttattggatctattattgttgatttcatttatgttgcacttcgatttgattttggtttatgatttgtttggcttcataagaagtggatccagttttctattgattttgcctttttgctgaagtgagatagtgacagcgtttatttgcttttgttggtcctgcaaattgaggaaataggatttctttgttttcatttggttgaagtgtaaagacgtggattttttttttttgtgcaatttggttgaggttaatctgttgttcagttgatgggaagaaataaaagattgagttgaaagttgacttgttttctacactgatagcagaaattgtcaaataatttgacatgcaaaaaatgcgggactctttttctgtatatgtccttgtatgtaagttgtttgtgaggtacactttttatgacttcattactagggaaatcttttcatatagtgatagagaccttctctaagtattgattctatgaatgagatccatgtttagttgatgttgtgtgacaatattataagaagatgtaacttttatctttcaaatacagctttctagaagttatagctgtctttgctggcattttcatcatcccgcttcacttatatattgatctttggtattcttgtatggttattgatcatttatatgtgcaggaacctgaacccgttgactgggaatattataggaa

SEQ ID NO: 42711 - DNA, 662 bp, Manihot esculenta
  Intron number 2 from transcript cassava4.1_016012m (locus cassava4.1_016012m.g) derived from phytozome v7.0 (chr-ID scaffold01551; pos 3032920 to 3033581 reverse strand)
gggttaattgtcttttctctcttcttccctcttctcacttgtaaaatttattgtggtatttatttattttgtctttaattcgtaaggttttaaggttttcttctttccagcaaattatctgttttcgtgatatgatcatcaataaaagctacatttattatggcaatgcacaacacttgtggggttcagttaactttcttctgggctggttcatagaagatatttagtgattgccagcaaagaaacttttggattgaaaactagtagagagtggagagggattgtttttgggttccaatatatttttccagccatggattgtgatcttttgatcgctctgtggtactagcttctaagtagaaagagggtattgtgtggatcaaaagacaatagcctttcagtcaagggggctttatagtgttaaattatgtgagcctttaatttatggctgttttctctttttggggagtgttgctgtctcctagagtccaatgcagtcattgtagtctttaacactcgtttgaccttgggttttcagtgcttatacaacttagtcatggtggcgttactggtgataatatttaagaaccactttcctaagctgcttgttcaaattatttgtttcaggtgtgcccagtctgtgctaaacgggttggagtgga

SEQ ID NO: 42712 - DNA, 630 bp, Manihot esculenta
  Intron number 1 from transcript cassava4.1_006739m (locus cassava4.1_006739m.g) derived from phytozome v7.0 (chr-ID scaffold06631; pos 112795 to 113424)
aattcaaaggtattgtatccatttcttgatttcttcttcatcttctgctttgatccctgttaagtgtacaacagagtaagtgttacattgtgcttttcttggggagattttccctgcaaccaatcaggagcctagattcagtgggcagcttcttcttcttcttcttctttttaaaattttctttattcttatggaattctctgtttttttaatggtttctggattgtggctgagttttgaattaataattcatttgctggtgtcagacggtcagcgtgtttgaggttttctattgtgccttttctattcactgcataatttaggatagcttgattattttttttcttgtcctaattttgtgtatgttggtaattgggtactttatgaaattagaaattttccttttttattgcccgctatattatagttgggataattttttttcttgtccgtaatttgggaaaggctttgaattgcagaagaatttctgtttggttgcagtgaaaactgctaaatagtgtgaatgggtatttatgtgccgttctttagaagcactttggaaatttgtgcattgacttggcaaatagtaaaaaaatactgatagcttttcttcttgttttataagctcag

SEQ ID NO: 42713 - DNA, 902 bp, Manihot esculenta
  Intron number 1 from transcript cassava4.1_010286m (locus cassava4.1_004587m.g) derived from phytozome v7.0 (chr-ID scaffold03332; pos 355355 to 356256 reverse strand)
atctgcttcaaaactgaaattgaaagattttgttggtacgtttgattctattgtttacgttgtccttgcctttggtgtttatatgcacagccatttcatacaacgttttgctgtggtgttttaattgaaattttatctgcaactttgttttctacttctgaatttcctcccgtgaattatgtattttctttttaccattttcccccttttctgttagttcttgaagttcgtcttgatattttctctgctaacttgttttcttcatgtggatttctacccatgataaattgttttctgctaatggttgattttaagcataagtgaaaaattgggtcgttggaaagtcagaaagcagattgaaatcttgtcgattaagctctatcatgttttctcttctgggttttgtagactgtaacaaaaagacatgtatttctttggcacacagtcttaggttttgcttttgtttcttttattcaaaagcaccatgttgtttcttcatgttttcatcactttgctctgcaatatgctaggtttttgtatccccctctttttcctttcctttaaagcatgcccttttttaaaaatactgaatactgttctatatttccagatttaagttaaaaaaaaaaaggttatttctgattctgataatgttctggttaggatgacttcatttctttaattttgtttccttttgttgttcatgagacaaaaatatactgcagggattggatttgcagaattcccccccccccccccccttttttatgagttattttgtgggttttactagatctgcgactagttgtggcagcttagattctgtactttttattttactttttttctcttccattttctggtcttgaggtgttatttctttttcttctgccattgcagtg

SEQ ID NO: 42714 - DNA, 933 bp, Manihot esculenta
  Intron number 1 from transcript cassava4.1_005894m (locus cassava4.1_005879m.g) derived from phytozome v7.0 (chr-ID scaffold03614; pos 1190807 to 1191739 reverse strand)
tcttcttcttcttctaatagtattgtttgtttcaggtatggcattcatgaccctttgttcccatttctttgccaatttttgtttttcatcttttttcttgcaagaattaagattgaattatttgcttcttttctgggattgcttcacttatttcactcttccttttttttccttgcttcttgttcttttgggcacttttctaggtatctccaccttctgttgatgaattccattataacccagaccatttccaatacggttaacattgagaataaacaccattggctgtcatttttttctatctaataaagaaaacaaattgttgctgtaattggagttaaaacctgataaggttggaaattgctagttgaagatgattatatatgctttttcttacgaccctttagttcatggtttaacattcttgtctcagcttatagaatttcacttgatttttggggactatgcacagttccaagcttgataactcacttgaagtatcgttctataaacatgtgaaatataggtctaatgaggctaaactcaggtcaaggttttagataatttgttgttagtgttgtactggtactgatgtggttttatgtttaatttttattttcattcacttgttgcataaaatatttgttcttcaagaaacacaaaattgaattcaggagagttttctggatatatacatctcttgcatctgcttgtttcccaaacatgtgattgtttgaaatgaaatgttcttatggccaaacatgaaacaaacttatgcatccatttctttttcattgtctacttgactgtgttacttctcattctttgtttgatttagataaaattgatacaaagaagcctgagaattgtcctttttcttttcttttttccccagaaggctatcaaagtgatctttgggatattaatatacag

SEQ ID NO: 42715 - DNA, 742 bp, Manihot esculenta
  Intron number 1 from transcript cassava4.1_008285m (locus cassava4.1_008290m.g) derived from phytozome v7.0 (chr-ID scaffold07519; pos 735262 to 736003 reverse strand)
ataacgaatctttcagcagtgcctgtggtataaaggttagtttttcttttcccatttcagacctgaaatgcttagatttgacatgttgaaattgaagctttacaattttatctagaaaaatacttgatgggcttggttaattccgccttaaataaaaaattttaggggttgaaacataaattaggggtttaactaaagaaaatagtttctgatctcaacaatttttattgatgtttttttttttttaaaaaaaaaaaaagaccaattttgacccagttgattttagtggtttttgcatatgggtttggataaatatgttgtatttttgttaattcttcatttgaatacatttgtacgattttgaaagtgagatgattgatcgaatttgtgtggtgttttccccctctttctgaagtgtgttttacaaagtatatctagttgtttcttttcctttttgttaagatacctaatttgaataggatcgcacttaataggaagctaggtttgagttaatatcaatttttgtttaaaaaccctgtctagaactggccaaaagatcatcctctgataaagtgttaggtgctttaggtccatgcgagtcttttcttttgtgagaatcttctttacttgctttgtgcttttccttatctgtcttgtatcttatttctttcttgtttattaagcattcatgctaaagattaaaataaactttggttgatttgcagttgtctgcagttgtggt

SEQ ID NO: 42716 - DNA, 727 bp, Manihot esculenta
  Intron number 4 from transcript cassava4.1_001525m (locus cassava4.1_001525m.g) derived from phytozome v7.0 (chr-ID scaffold09120; pos 175046 to 175772 reverse strand)
ttgaagacatagaactaagaactctctttgaggtaattcaatttgttgtatccatatttgtttatgcactttgttttagttgtctgaagtataggtataaagttgacatcagttctgtgtatcacaagtaagcaatcgtttgcaaaattcagacatcaaatttaacatggtatgtgcatacagaagaaattgttgcaaaacccaaaaaagaaaaaaaaatggctctataagagttaggatatgttatgttattgacttgacatcaacaagttcaagtatttaacctttattgtaaatgaaagtagtttgaatattatacatgcatttgtatatatggtccagaaaaaatgcattatttaacaaatttgtattaaaagcatatgagaaatttgtcacccattcaaatgcattggatcacaagaagtaaggggactatgtaattagatgactatgacttgtctcattagaaaattctcaggttctccaagtaaaacaatgtcttttgagcactgaaagtaagaattgtacagggtatttcatggttgtcgcaattgctttataggttggtaacatgtaaaaattttaaggagttaatattcaatatatgaattgtacaggctctgactgttaacttgcttgaaacttttaaataatgtggttttcattattcatggcttcttctgagtaatgtggttttattctttttatctgctcattctgtagcaat

SEQ ID NO: 42717 - DNA, 1029 bp, Manihot esculenta
  Intron number 1 from transcript cassava4.1_001525m (locus cassava4.1_001525m.g) derived from phytozome v7.0 (chr-ID scaffold09120; pos 176583 to 177611 reverse strand)
cttaatcgctgcttgatttccttgacctcattcaggtaatcatattttttgttatttattattattgttattattttttttttggcttcttagtgagagattttgtgttgttgggggttgtacgagtttgatcaaattggttgttttattttttaagttaaagtttctttgtttgatgttgatactgctgggttgttgctttcttgaatttgaatagttatttgatctttttgaggtcaattaggaattgggttctttgttttgctggtctttattgttgtattgatagtaatttgaacttccgaggctctctatctgtctctctctctacctacccacttcttttttggtaataagttgtttgatggtcctctttcttgtctatctatttttctattttttcgaatattagcgtttattgggtcattgttgtaccgttttgtaagtttatggagttatgtggaagtatatttggaacttttatgctccgtgttcaagtggattgtaaggtttgggtaatgtttgtatatcacagtccactttttcttataataacaatgtttgtattcgttgcctttgcttttttaattctttttttttttatgcatgagaaaagttgtctcctttggctttaagcaggctcaagaaatttttatcaggtgttttttaccctcatacacaatgatttatatattaaattgttttttggaattattttgttttactttcattgcaagtgattttggtttttagagtttatgatttgtcataaagattccttcattatttgggggcagttattttagtttcatatggcttgtagtctgtgactggaaaattgaatctatttacgtagtcagctgccaagttttgtactagtatttaatgttccatcagttcagtacatcagtttgggaaccccaaagatctaatatttaattattaatgtggttcttaaccggagcaaatcttaatcaactttttccctcctctttgttggctgttgttttgtctcatagtagaaaggtg

SEQ ID NO: 42718 - DNA, 820 bp, Manihot esculenta
  Intron number 3 from transcript cassava4.1_007824m (locus cassava4.1_007827m.g) derived from phytozome v7.0 (chr-ID scaffold07991; pos 220655 to 221474 reverse strand)
aggtctctctctctcatttccttttgtatttaccctattgttgtaacttgttaagtaaattcttttaattatgacttctaaatcagaaatgtacttttggttttctcttacatctttatctgccatatgtaggcgatgtcagattttctggttatttttcatgcatgcatgttgctaggaactgttgatggtaattttgctaagacatcatttgcacctgtttcccatggaaatgaaatttagcatctcctttaggaattgaggaagaatcatcaacaatgatagaatgcattgaatcctgtatcatttgggacagtgattatgaatcccttataagagcactttgagctagtttttgagctgatccaaatttaacatgttatcatagccttccatccgatgttgggcctctcttaaatatttcacgctacagtttatttctaagcgtggggtttgtgtcgaatcccatatcagttatgggatagatgattcagtggaacatgcttccaaattgataatcctaaacaacactttgaatttcctgcagcaaaattgtggagtttagttcatgacatgatctttttgctagtaaaagattttattttaatgttgttagcaatttccatctccagtttgagttaaatctaagattctttgttatgtaagctactattttggtatttttagtattatgtgcttaaatataattatgattggtctgtccaaaattattacttgaagaaacctgagtaaagatgcaagatgtaaaatccatatacttggtgtaagctttatcaaacatttaactcttttccaggtg

SEQ ID NO: 42719 - DNA, 745 bp, Manihot esculenta
  Intron number 1 from transcript cassava4.1_007824m (locus cassava4.1_007827m.g) derived from phytozome v7.0 (chr-ID scaffold07991; pos 222056 to 222800 reverse strand)
ccagttcggtgggcgaattggtgattggacttgaggttaatgcacttcttatatttatatctatttctgttgttctttccttttttgtttttcatttctctgaattttttaaaatctgatatgatccaatattctattatgcttttccatttcaattttcatctttgattcttctctaatttttaatgtaatttgatgctttgatctgttatttatggtggcaaagtgtcaattaggcaggatcttctttccatttgagtggttattacattgttaaataaggataccagcttcctaatattgtagattatttgggtatgccacttctttttatacatgatctgtatataggttctgctgtttactccgaatgcaatttttgtgatggtttctgtcctaaggggatgaagttcactgtttggaaattatgagaagtggtgatgaaaagaaaaaatgtcagctttttgtttcagaacttacgcttgtagtgttccatgtgaagcctgatgggaacagttagttcatttaaaatttcaagctcataacattataaaaaagtttgacctggagaccaaacattatcagatcccaaaaaatggagttcaatttatgttcacaaagatggagcttggaaatggctgaaaatttattcatttcttttaaatttatgtggcagttatctggaacttgttctttgatttgcatttcaggaagatcatataaaagttgcagaactgtgaggcta

SEQ ID NO: 42720 - DNA, 680 bp, Manihot esculenta
  Intron number 1 from transcript cassava4.1_001903m (locus cassava4.1_001903m.g) derived from phytozome v7.0 (chr-ID scaffold01551; pos 2105344 to 2106023 reverse strand)
caaccgagttcaggactcttcaccaatatcagaaggtaattcattccttttgctcttacagccctaattctgctttgatctttaaagtagttcattccagataatttgccgtcacatttcttctgggtttgattggatgctgcatctttgactagctcgtttcttgtcgttgtcttcgatttctccactctctctctctctctctcttcttttgttttatttattatgtggtgagtagcaaatttctatgtttggttgctggaaaagaaaatttcacttcagcaagcgttcttcttcttctcctccttttactaagagcttaattgggaattcattgcactttaagctgagaactgcgttttagaattgtatatttacccttctctttttgcattactctatctgacttctgtgggatttactccctttttagctacatttgtcaatcataaattgcatatacacgtaagacaagtacgtttgttcgctcaagtgcccagtgcttatttgaattccgcgtatttagggggagggggggggggggggaggattttacctgcccttttctgaaagagcaaatttctgattgctgccaacaacgcccaatatgccacatagttttggctcttttattttttatttttaattctctttttgatgctcctctaaatgcagttcag

SEQ ID NO: 42721 - DNA, 886 bp, Manihot esculenta
  Intron number 2 from transcript cassava4.1_026840m (locus cassava4.1_026840m.g) derived from phytozome v7.0 (chr-ID scaffold07012; pos 948226 to 949111 reverse strand)
cttctcaggtgctcttcctttccttcgatttgtgcttatgaatgaaaacacaggcctgcttgcttgcgaaaaatttgtgacaatttttggaaaaatttgatcaggaaattgaaaattataagtttatggtcacgcatagaactaaaaattttaattttcgttttataaataagatttgaaaagtcttactttatattagaaaataattgtttctataaccaaaattatattatagtttttgataattaatttgcaaaaaaaatttatttacactgataaaatattaattataatattattagttttgaattaattataatattattaaagtaaataattaacttattaaaataagtaaaataattcttttcatatatttgataatgatttgttctttaattatgataaatatatatttaatttttaaattacgcaacgccttttttttttaattgattgaatgtgtttaccatacattttttaggaacataaaatataaagaaccattttttaaacttggcacctagtatttctttacatctttgctctgaaagtttggcttattcttggatcgcatgatttttctacagtgtttccaattgtgacgcttttctaattttagctccatgcacgttgaataatttcagtctagtctttacctttgtaaacttattgtattgtgagtaagaattggcctcttaagttacgttcacgttgatcttgacagatttcgttcttatgcacaaatttagatttttattgctatcaggaacctatgcttgctttgcttcattttactgggtgcttatgcacagcatcacggtcggtcctaagaattatccttctttcaggttcttgaaagcaagaaagtttgacattgagaaag

SEQ ID NO: 42722 - DNA, 439 bp, Manihot esculenta
  Intron number 3 from transcript cassava4.1_005030m (locus cassava4.1_005030m.g) derived from phytozome v7.0 (chr-ID scaffold06446; pos 522287 to 522725)
ctttttacgaccaaggattttcctgtgaatttagtgtaagaagctcttagtgtttatagctcgagcatatgcttatattttgtattttctatgatttttgttagggtgcctgatgcattttgtatcatgaaaatatcaaagcttcattagactctgaattgagagattgattaataataatattgacatgtaccttacaatgcaactgactttgtagcctgaatttatggaatgattatccataaactcagcctgccaagtagaaggtagaaaaaaaggggggttagaagggatctatataattgttcagtctggagctttcagatgctagatcttttttttttatctgtaagtttgacattttcattcttttcactgattgtgatatttgctatgcttctcaggttgaaaccaccagccattgcaagttcaaaaaaga

SEQ ID NO: 42723 - DNA, 669 bp, Manihot esculenta
  Intron number 1 from transcript cassava4.1_011484m (locus cassava4.1_011484m.g) derived from phytozome v7.0 (chr-ID scaffold01551; pos 370340 to 371008)
ctcctcatccatcttcatcacccgataattttcaggtaaacttgttcgtttgttctattattaactattttgttcatgggttccttcccattgtcttgtttctttccttttgagtatgttagatctgatataatgtggttacgcatttgaatttgttttttgatcttctggaatctttgataggttaaatgataatcaatgtgatacctttttctcgttttcgattattgggaagaaaacgaattcagtccatggccaacttgttattggggtttaaatttgaggttattatgatgttgttgctggattatgaagatatgctatctgtgtttgaaatattatgttgtgacctatgaacatgtcatgtttggtagctcagaaaccataacagaaagactgaagattttgttttgtagctgaatacaaagaattagagaaagaacatacttatatttttatccaaggaatcccacaaaacttaggattttgtttgtatcttataatccacaatttctgtgattgtgcattcaatttggagaagataattgctttctttttggaaaaaagaaaagaaaattcattgcccttgtgaatttattgaattggttgtgatgcaaaatttttgaatgtgtaggccaggcagttttctaatagggggaaatcattttc

SEQ ID NO: 42724 - DNA, 745 bp, Manihot esculenta
  Intron number 1 from transcript cassava4.1_014542m (locus cassava4.1_014542m.g) derived from phytozome v7.0 (chr-ID scaffold06914; pos 280880 to 281624 reverse strand)
ctcgtaattttctcataactttctccctgcttttgctcttgtaattgtttctgctgtttttttgtccttttttatttgaatttgattttgcagcgttcaatcgagagaggatggattggattaggggcatgttcatagttgagctccgtatggttactggggtagttagggtttttgttctctgtttctgggtcccttcaacttctggatcgcctgtcaaaatcttgggccttgcttctgaatgtttatcaggaagaaaggctgatacgttttgctaagaaatgagattgacatgcattttttttttctttgaaacagtgatcttcaggtttgaaaaagctagaaatggcaacccttataattgaagcgcgaataaaactgttatgttattaatgcaactgccccactcgtcttgtcaatgcctttgatggagctacagtatcatgcaattattgtaaataattgtatggtgtttgaaataattttgcgattctaattgtgaattctatagttgatggcatatttaggaggtggttgcagtaaaatttataatacacatcaaggcagctggatgatctatgtcgagtttgcaagttttctgattgactaacattatcatatcctcgtgatggtgcatttattgattgaatcttgtttgacctgtcaattgctatggggattttctttaaattctttgtgcatttggagatttactaaaggagatatcttattctacattgtagta

SEQ ID NO: 42725 - DNA, 895 bp, Manihot esculenta
  Intron number 1 from transcript cassava4.1_027217m (locus cassava4.1_027217m.g) derived from phytozome v7.0 (chr-ID scaffold04300; pos 144209 to 145103)
tcactacacttccactgatatctcctccactgttggtatgttcttcatctttttatttttgttccaaaaattgagtttctgattaaaaataaagcagttcagcaacacattttttttttttttgcatttggtggtcttttcattgtgggggttttcctaataaaaagttattttttttcctggaaattggtgttttaaattaaacttatcttagattttataacattatgtattttgtccactgggttttcttatttgatgttcatatctagaggaagatttggggaggggtttcttaatattgggtttgttatttttgcaaattaaatcaattgtatcatctgttgattggtatttatttgttttgtaactaaggtcaaaccttttatggttcaattcatgttgaaactagaattccagtgttattttgggtggtctgttggcttattaagcaatgacacaggttcatattttgtggaagtctgtgtttttttatattatgttttgactggaagtagaccgcctttcttagactgcattacctctgcagtagttgggttaatttttgatgtgtgagggaagagtattttgggtgaattttattttttccatgtactgtcttcttaattgtgtaaaaatgatgtttttgatatgttgttaatgtggcatgtaccaattgtatgcaatgattctattattaaatcaaaagctttccagtgagaggtgctttttcaatgtacttttgtatcattcgttattcttctttggtgttattttgtgtagtgtgtctgttgtattcctctgaaatgtggtgtttacttgtgtagaaaaaaagaagggtggaaaactgacttatgctttgctatttttgatggatgtatgtttagatcgcatc

SEQ ID NO: 42726 - DNA, 521 bp, Manihot esculenta
  Intron number 2 from transcript cassava4.1_013894m (locus cassava4.1_013894m.g) derived from phytozome v7.0 (chr-ID scaffold03614; pos 2183365 to 2183885 reverse strand)
ggtaagctttttgatttcccttattgctaatctactttactaaatattacagtcaagtgaactttttaaacataataatgaagtgaaaatggacctggccatcgttttgggctggaactggcgacttatggttgctaaagggaatggaatggaaattatccggccctaggcggttttggttcagtggtctggttcaatggtggtaacagttccagttttatgtggttttggttttggagcggtttgggctgattggcttacttggtgcttctttcatccgctgctttgccttttttttttgtgaaaagaaaaggtttcgactggatcagactgccgttttagggctgggaggggaggggaacaaaatggcctactccccttccccctatggcctatagtatgttgatgagggcctgaacgccaaatatacacatgaagttttagctcatcctcagttatactaacagatgagtttacaatagttattatatttatgtttatgatgcaggaccccttcatta

SEQ ID NO: 42727 - DNA, 600 bp, Manihot esculenta
  Intron number 1 from transcript cassava4.1_007545m (locus cassava4.1_007545m.g) derived from phytozome v7.0 (chr-ID scaffold03332; pos 927308 to 927907)
cgaggttctcgtagatttctcttggctgcgttcaggtaatcggatctgaaccttattctcttcactcaggttattatattctatggatggatgtagattcatccttgtatcaagctttgcattaatcttaaggtccagattttggtgttctcgataatctttgatgattttaccaattttttaaaactaggatttatagatgcatccgatttttttttagtttttagcttttagcttttctgatgtagagagacagatttgttagatttcaaagaattttgtgatttagctcgtcatgcttttgttctaattacctgttttcttttgtttaatatccagatctatttgctctttcagtagatctgatttattttgtttgtttcgtttagttgattttgagattaagctcttcgtttcgtgctctttttgttgtgaatctaagaagtgtgaatgctatgtctgttttctattggatttatgaggagaaacgatgctgatttgtctctgtaattcgactcttactggctgcttatagctaaaacaacttcttattcgtttttattcctttccgttttccagttaagtgtttaaacatctata

SEQ ID NO: 42728 - DNA, 835 bp, Manihot esculenta
  Intron number 1 from transcript cassava4.1_030101m (locus cassava4.1_030101m.g) derived from phytozome v7.0 (chr-ID scaffold06656; pos 922908 to 923742)
tctttgacactggtgggtgttcactttatttccttcattttgtttctcttcccccccctttttttttcttatttttcgtccgctgtaatattttcaattttgaggtttgcttcatttgttcttattggttctgagataaagtttttttttgtataatcttttttgctagaccttttgtgtttgttatgatgaataataactctgaaattgttcttttagggtttctatgggtttattttatgggtccttgttttgcattcatttcatgtttttctgatttaaagcttctttctttctcaatttatttttattttggggggatggtttgatgtgtataacaacttgattgactaagggattttatgggggttataatgggaattttgtactgttcttgttgcgaggcattaatactttgttgggagtttatcatgtaaaatatgttgaggtgcttgttaagttgttgttatttgttacttgtattgattggcagtttggcactaatttcttaccttcccccttctcattgtaaactggtatgtctggagtatcgattatcctatcttagaatctatgtaccacatggttctcttgatttctttttttttaatcaatgtaacggagggtagtatcttcagtaatgctacttttaatgcttttggtttgctacttaagatatatttattttctcttgcttgggtattcatggtttctgttcacaacaaattttttccttgcttttaaatcatttgagattttcttttctattattgaattttcctacggagatttttcttcatgagcattgttcacgctctgttgctttctggcagca

SEQ ID NO: 42729 - DNA, 674 bp, Manihot esculenta
  Intron number 5 from transcript cassava4.1_001702m (locus cassava4.1_001702m.g) derived from phytozome v7.0 (chr-ID scaffold08316; pos 891125 to 891798)
ctgttctctttgaagcccttgctcttgtaagtatatttccagataagctctttagtatgtgacaggttttatggaacaatcttctttattttattgtagtatgttattttgattgagatcagtgtccaaatatcttttggtagaacaacagtatatcagctgcacttgctgaaattaatgataagtttctgaaacattataaaatcttgtactacagtttcttggtaggtttcctcccttttattgtgaatggagaattcttctacagggaaatgaaactaaactgtttcttaatgcaaatatctacataaatgtgcaattcttgatctttaattaacaacatagatggacatgtatgtatatttggatctctttctctctctttctcttgcattttttaaggcacaaaatgcttttttttttctaaaagaagcatggacaccttcacactggttcatggttgtccttttaaatcattattggtttttattttaagtgatatcttcgcctgtcttaaattttttttatctctgctatactgtggatggaaaatgtgtttatttcactcctgccctttcttccattcaaaaagtagaagcttaatccattgaaaataaagccatatcttatttagcattttggggtcttggtgttcaatttttctattgcaggtc

SEQ ID NO: 42730 - DNA, 658 bp, Manihot esculenta
  Intron number 1 from transcript cassava4.1_009338m (locus cassava4.1_009338m.g) derived from phytozome v7.0 (chr-ID scaffold06550; pos 231733 to 232390)
tggctccggtaactggcagctacttgcttctttaggtaagtttcaagaaacccagaaattgaaagggaaaattaaaacaaatttataaagtagcgtagtttactgttttcaagtttttttctctctcttttgtggttagtgagtactgattgattgcagagaaaatgtaggaaaagaaaagggcgaaaaaaaagcataactaaggagggatgattttatttatttcaattatcgctttgtttacccaaaacaaaatccaaaagattcaaacttgccaacttttttcttaagattttatccttaattttctcaccaacccacccactatatccaattatgacctccaagaatctaaaaaaagaaaagaaaagaaaagaaaagaaaaataaagctgtttaattaggaataaatgagggaatatgaaattttttaattatgtttaaacataccaagattggttaaaagattatccatacatacaagagtggatgattattttattccacagaaaatattattaatatagtaaatttcgtttttatataattaaaggaagaggactagaataactctttttactctttgttggatttgatctcacatgtgaattttgatccatgaaggagagctatttgcgaacacagcaggaggagacttc

SEQ ID NO: 42731 - DNA, 1016 bp, Manihot esculenta
  Intron number 3 from transcript cassava4.1_007669m (locus cassava4.1_007669m.g) derived from phytozome v7.0 (chr-ID scaffold05335; pos 124966 to 125981 reverse strand)
ggtttggttcctgatgtatggctttgtttctgattatttattggaatttcgcatccttgttgctgctgggtttgttggcattttgcttcttttcatctttgaaggcttaggttctttcagctgtatagattcgaataatgagtcccctacgttagctatcttattcctaatttttagaaaacccaatctttgtttcctagactgatattctgtttgttaatgagaaattcagtgattaaaaaaaagaaaattctctctctgtagtttcttgcttgagatattatagatttcttaattccattctggagccaagcagttttggtttataacagtggttttgtggcgagtgtgaggtgcaaaagtacattctttgatattgtgggccaaagacatgaacttggtattttgggacatgaactgctcggaattctgggactccttacaattttgcctgtggaacttcattgtgcttcatgaaaatatttcttaatgaatttagttgtgggattgactgtgcagagccaacaggggctttgttttcagatctctttcagtttctggatatcttttttctgaaggttgtctgtggtatgtgttcaagggtgtgatttaacatatatgtatccagtggtgaatccagaaaaaattgtaagtgggaggaaggcacacacatgtttttgtgtgttgaaaagttaaaactatttgattgaatgggtgtctgtgattttatggggcagagttggtaatttagtgggaggtcaagcttgcatgaactatgattatacagggaaattttacacggtcagcgagagaaactaagttaattaatgggggagcagttgccgccattttatatctaattgaagcttgctaattgaaactttacctgttaggccaatgaagatatcaatttgaaacagtagtttagcagatgaatctgttcttttattgtaattgttgtggatttgcattatgttacaggtaaccttatacaactttttaatctcaacctgtgg

SEQ ID NO: 42732 - DNA, 1017 bp, Manihot esculenta
  Intron number 1 from transcript cassava4.1_023625m (locus cassava4.1_023625m.g) derived from phytozome v7.0 (chr-ID scaffold08847; pos 600144 to 601160 reverse strand)
atagttttacctataatctttgccaggtttggtcctctttatcgttagattttgattgttcctataatgtcaatttggtttgtgggtttctgctttttttgcctttttttttttaatgttatatgatggtggcttgaattctaccagttgttggatgctgtgaaaatcactataattggtagacattatgttttcacacatccatggcacttaaatgtaggattagattccttttttttccttacgggaaatttccaattgaagaaagggggaatatattagggatgttatgaagtgagattatctgtattctatcaaagttatgtagctatggaattcctaagatcttcaaaaggatttcttaaatttccttttccaaaagattttgctttaagtggatttctaatcacaaattcgcaagtaaagatacgtgatgtttaaaaatatctgtgctttaaatgaatttctaatcatatggacatgcacaataatatttttatcattgagtgggttttttctgtaaatcctctagaacagttattcttgaactgaatttataacatgcatgtatgcataatgtttttgaaatatgctttgattgaatttttttatcaacatgtgcttcagagcacgacattttggcaaattttgtgcaaatgcaaataataatatgcttttggaaaaagaagaaatagtacaggtttgcttttagctcttctgaagtggaagcacatcagttgctgcattgtcaaattatgtttgatttagatgaaacttcaacatttacatgaaaatgaattaactgttgtccatggccaagaataacatgcatctttaagttttcatacaaaagaaggaaaatttatgaagtcttatcagtttattttgtagcatttaggaccttctgcctttgttaactattttgctccttctctcaagtcacacatgcatgcccaatttgttcactgcatttttaattaaaatctgttttgctgataccttttggttgttaagtac

SEQ ID NO: 42733 - DNA, 563 bp, Manihot esculenta
  Intron number 1 from transcript cassava4.1_000579m (locus cassava4.1_000579m.g) derived from phytozome v7.0 (chr-ID scaffold06853; pos 210662 to 211224 reverse strand)
taatcgtcgatctaagcagaattctcctaatccaggtttttctttttctttttaccttttaaatatttgttattgatttactggattgtatagcttgtagagtaattcttgctatactcttattctatcagttacagttgtctctgaagtggccaaatattgattaattgttatgaagttatatcgtggatgatgatgatgtgaatgtgaatttttttgcttgtcctttcttccttttgtcgtttgtttggcttcctgttgatcatatgtcctgttaattctttttgggaattttggtggctggccatttgtttccttgaatattattataaattttagaagttagaatgattgttcccaccactaagttgcttaaattttacaattatttgggctatgatgatgcatttgacttttctcgttctcgttcctgtgatggcttctaaacttatgtatttgagtcccctatttgaatgcatgggtaacatccagtcaatgatttttgcttttattttcttgaacttgattatcatgagagcagcttctaatttagtaaacggaac

SEQ ID NO: 42734 - DNA, 1019 bp, Manihot esculenta
  Intron number 3 from transcript cassava4.1_006100m (locus cassava4.1_006100m.g) derived from phytozome v7.0 (chr-ID scaffold02906; pos 79219 to 80237 reverse strand)
taacatttacaggatatcctcttccctgtctctatgtaagtgggcttttgtaatgtcctgggatattgcttgattggccttgttttttaagaagtatttctagtttgtgtggcactatctcttggagtattgtcaattttttccctctaccgaactttcatttgccaaaaagttactgtgtttaattggtgttactgaaactccagtacactccagcttttgtaaaaccagaaagaatttcatcttttataaaaccttaaacaacttgagcttatttgtcctgaattagtaattaggtgcttgaaaaggatagcttcatgatttggtggtttgggtacctttcttccaaaatttgtgttcaaaatatccaatgcattggatgcttatgcaatattcaagctggctgtctcaagtggcaagctttctaccaaatattattctcttttgctctggttacttccgaggagatgtaatccagagaataatctgcaaaataaaatattgtttttccgtacctcctttgagcttgttgtcttatgtggcatgcaggcttttttgtgtaaactaaatatgtttcccgttgtattttagttggtcttgggaatatcagatctaaagggtgatccttaaaaaaaatgccatcactctttagtggaaatgaaaaaaatagaatggtactccaaatgctatgtcaagatttggagagacagttgagagatcctaacatgaactttatttctcaggaaaaggtcttatagtttgtgaaatggttgtatacctttccaacattatgcaagataacaattataaagcttacctttatttagttgtcatgtgcttctaagtctaggttaccaaggttagttagataattcatgatattctatatgatcactttttgtaagtgggatatgattgaagtttattttgtttggccatattttctatctttttcctgaattctttgatgaaaacatgctgcagacagcagacctaagctagttgctggatcccctgaa

SEQ ID NO: 42735 - DNA, 562 bp, Manihot esculenta
  Intron number 1 from transcript cassava4.1_011392m (locus cassava4.1_011392m.g) derived from phytozome v7.0 (chr-ID scaffold07991; pos 547163 to 547724 reverse strand)
ttcagtgtttgaggggattgctgtcggagttgcaggtataactttttcctactgttttaacacaataaattcattgtttgttagctttctcctccactgttttaacgcaataagttcattgcatattagctttttttcatatccaactctaatttgctttgattatttcggtaattattgtttcttaagaagatgtgcacgtgaaatcattaaaatctctttttagttttagaaaaaaagaagaaaaagacataactggtgttcattagtctactagaagattcgattttgggtcattggttgagttttatatttagaataccttcacatgtattggttgcaagttactaaaaatagcttagctcaatgctgcctagagtttctactttatggtaagagacttggtttttcacttttttttaaatagaatcgggaatgggtagtagaatttgagacctctcaaatttattcaaatacacttatcagattaaatctgttagtgtttccatatataattttatttatcattatttttattttggtcagcaactaacgcagaggc

SEQ ID NO: 42736 - DNA, 809 bp, Manihot esculenta
  Intron number 1 from transcript cassava4.1_002200m (locus cassava4.1_002200m.g) derived from phytozome v7.0 (chr-ID scaffold04260; pos 350850 to 351658)
cagaatcagttgtggttccaaatcaattttaccaggtgcagtccacattttcttttatattcaattcagttccaactttcacacctttagctttgatgttttgttgcatttactttgttgttttttgctggtagaaattggattatggccctaagcaatgtagtttttatttgcttgtttgtttttttacttattactgtcaggatgtttctgtggcaatgcattgatcatgatgcttgagcaaggttgaatacattttacactgaaatccttcattgtaattttttatcagactttgaactcttaatggtttttatgatcagctttaataaattcatttgagctatatttctagctccagtttggctcaagaatgaacctcatctcaatatcctgatgcctgacttgactctgactttaattctgttttgctcactttagatatattttgaatctatattgcacaacttgtttccatgttccgttaccctttgtttggaatgagggaaatggagcaaatagaaagaaaagaaacctgatttctcaaaattttcatttttagacgttaaatggaggagagaaaacgggcaaaggaggatattaaattagatttcctttcttttcttttctatttattccactattcaatttctcttcatttcctctgcacaattaaggatccaaacaagggattagagccattttgacaagtatattgtttggcaccattttttagaattgttttgtttgtgaatccctgtgcctgatatgtgcattcccacgtttcataaagattgcaagcaaaggcc

SEQ ID NO: 42737 - DNA, 1026 bp, Manihot esculenta
  Intron number 4 from transcript cassava4.1_001739m (locus cassava4.1_001739m.g) derived from phytozome v7.0 (chr-ID scaffold06711; pos 494277 to 495302)
aacgactcaaggtttgtaattgatgcctatgcagttattctttatccaatgagaagcctaaagcttgagatgattgataatatgatatatctgcccgttccctgttgcctcagttggtttcattttgttgattgcttcagttctgggaaatcactttattcaccatattatagcatgttgtgcagagttgctgtagttactaaatttatttatagtttgataatttaaaagttgtagctacagtctggtggcatactcatttgattaaggtcaatttatttgtctgaataatattcaagatccttttgcaatttgtactattagtaattgggagatcaattgatatattggttttgcagttatctgcagcttgatgatgcaattgcaaagtgaaccaaatagtttagaaaaacaaagaaaaagaaaacagccataaatactgtgtgttgcatggttacatggaaaattctctgatttagcttgaaactacgagataaatgagcttatatttgttgatttcttgcactaggtttagtggcttttcatgtgaaaagtattctatttcatgcatttggtgtgtgttttggggttgatggatttttatctattgacaattgatttgcattagtaggttggaaatgttgaggctttaaattgttattatgcacatggagagcaaaactcaaattttcagagacgtagctactggatgctggactcgtgagtataactatattcattggtgttcttgattttcaacaccttataagttagctgacgtgctatgattttagggaatttcttacttatttgatgaaattctgagcaaggtggaaatttaagtgtatgcagataaaaaggggggggggggaagaggctatattaaattatccacccactccattataataattcttactttgtggcaaacaagataaattgatgataatgtcatgggctgtatttgctcatgctttgcttttcttggcagggcgtacgagcatattgttcttgttcattatagag

SEQ ID NO: 42738 - DNA, 462 bp, Manihot esculenta
  Intron number 1 from transcript cassava4.1_011541m (locus cassava4.1_011541m.g) derived from phytozome v7.0 (chr-ID scaffold12435; pos 8310 to 8771 reverse strand)
tattgggctggtaagtgatcccttgtttagagttgtttactattgccaagctccatgtttagtgactagtactaaataatattatcctctgagtgtgaggtatcaatttgggttgtcttttcttctctactttttcatcattcctgatgaatttcactcttttctgttccaaacagaagatgataattgcatggacacaaccttgattgatttggtctcaaatattatccatatcgtgtgaccaatagatgtttaaaaactggatcaatattaatatattatatgagactttgttcacatattatcaaaaacatgtttctggtatggggttaatatataagtgctggtgttgacaattgttgcagtaaatttgattgtcacccaatatctttccttgttaatttgtggataatgtgtctaaaggaaagttttctgatgcagagaaattatcgattcttcttc

SEQ ID NO: 42739 - DNA, 663 bp, Manihot esculenta
  Intron number 1 from transcript cassava4.1_002963m (locus cassava4.1_002963m.g) derived from phytozome v7.0 (chr-ID scaffold01127; pos 588059 to 588721)
gagaatttgcaaggttagttgcttcgtctgtggaaagacttaagcttgggtttatgaagtgtgcttatcgatatgtggtttcttctatctgttaagtttacattatgtctttctttcacatggatctttcttcctttagctgagatatggaaatgtgaggttcactactctgctgatctgcttcaagaaatatgaaagaatgcgctgttttattatttgcattaatgtaattattgcgcatgaatttgcctgtactgttatgctgtgataacatatgatatttatttattttttctctccatcccttgcattctctcgctgtggctggtccttagtttggatgttcagttgatttaaaagcttcgtttttgttctttgatttcccagcttcataactccttctgtatggttattatcgaaaaagctttaaacttggcaactttacatggaactttcccaaaacgctagacaacagtgttcaatcatgttttgccttttgaagctatattttcttttggatttcacgttaaaggctaaaagatttaaacttggtgaaaatttacattttcccctaaactgggtaatatttttggcttagtttgtttgcttatctggttttgtactgcagttttgcagctttgttataaccagtttaccggaagc

SEQ ID NO: 42740 - DNA, 834 bp, Manihot esculenta
  Intron number 2 from transcript cassava4.1_006395m (locus cassava4.1_004686m.g) derived from phytozome v7.0 (chr-ID scaffold09460; pos 90213 to 91046 reverse strand)
tccttgccgatatcgctaagtctcaggactctgaggtattgattttcttttgaaattcatataggtggctggattggaggatagaaggaaatgatttttttttgtttttttaagtactatgttagactttaattgaagtttggattgatcttcaatgtgaatgtcacgttatacatatttacaacttattttttacgcatataagctttagttcaaaatcaatggcaaccatcctgaaatgatgctctaatcagttttctgatggtggagtttgttgatgtttaacatgccaagtggcatatatcatggatttgcaatttattcttttcttgatgccctttgcacttacagttgcatgaaagctaagcattaatgatcgtgtactgcattatgtatatttgtaagatgattattcattagttaatttatttcatataataattcaatgttgtactgaaaaaaatttacaagtgcaatgccagaacatggttactcatcaaagtaaattgcttttagttaaagagatcttacatgtgaggcatcaaattttggtcaaatatgatcttggaaaattagttgggttgaagctacttgtacgtttgtccagaatctgagactggtatggagaatttagggtgatgagttttgtgctatttatcacaagaattatttaacttaggatttttttttggggggggtgggtgggtggtggaggggctgaggggattcatctcattttgtgatatttgttttctgaaaagcttaaacaatgattctttaaaaatgttggctatgcattccacgaaattacatgttttgtgctacaggttggtg

SEQ ID NO: 42741 - DNA, 487 bp, Manihot esculenta
  Intron number 1 from transcript cassava4.1_016092m (locus cassava4.1_016092m.g) derived from phytozome v7.0 (chr-ID scaffold03332; pos 440253 to 440739 reverse strand)
aacctgactctgatacttttcaggtctctttccatttactctttacctgaaatgagagagaataaagctaattttctgctctgcggttcaattatcgatgaatcttaagtagttggcttcatgagtttgaatttagcgttttttctttattactggtttatgtgtgttctattttgctttatattttccggttacctctctatcgttatctcgaattaactttgccaattcggttgcctatgaattgtgaaaaaaaagaagggggagcggtgtaagagagggagagtttgttaattgttattacctttatttatttttctttcaaatattcttgctcaaattgcatattatttcttctatacccctttttttttcttctcaatttcacgccaatgttctgatagaaattaataactgtaaatgtattctattcttaatcttgtgtgctttagattgaagattccaagacaccaacttctccatcact

SEQ ID NO: 42742 - DNA, 395 bp, Manihot esculenta
  Intron number 2 from transcript cassava4.1_022323m (locus cassava4.1_022323m.g) derived from phytozome v7.0 (chr-ID scaffold07595; pos 113102 to 113496 reverse strand)
ttgagcaagtgaggtgcaaggcaaaagagttcaaggttagttttctacttggtggtggtgcatgtatgtttgtgcagagagatacatgcttgcgtcattaattaattgtataatagatgataatctcttggaatcaactcaaagacctgctttgctcttcttaataatgcactatctttataagttgtctacaaaccaattatatcacagttcccactgtccaaaaaaaatatagtagataatccattaatgaggtttgttaggtaaaattgagcttccaaatcctttgaactgaaaaagatgaatggattttaattatgtgattgtgtatctttttctcattcttatctgtgatactttaaatgtttggatgactgtagcctgagctactggca

SEQ ID NO: 42743 - DNA, 713 bp, Manihot esculenta
  Intron number 1 from transcript cassava4.1_022323m (locus cassava4.1_022323m.g) derived from phytozome v7.0 (chr-ID scaffold07595; pos 113475 to 114187 reverse strand)
cacagaggaaatctgaacttgccacgcagaataaggttgcttcaaatacttctgttccgcttattatatcatttgtaccagagtctttattggctgtgatatacatgccaaattgctaatcttttgaacctttacttggttaatgaatttttttcttttttggtacccacttggttacttgtccaaatatctgtttgcttctcagactaagtttgtcttttacttgctagaatccactaattttagcttgtttaagaaatttcagttttgatcacgtgatttatacctatgattattagtttaagtagatgcttgtttaattttaggtgcctaaactctgtccaaaaatgaacccaagagaaagaaatgagcttgcttctttaggtttaagttgtctctatacgatgttctatctttacatgttttaatattcgttgctgccaacggattttttgaaattgtctttgttatccagtggaaaaaataaattgtgatacacaattgttggacatgggatgtaaaatctagtttagtcaagaattttgatgcctccaacactctttctcttcatatgcataccctcatgcttggaagagatctaatttctgggaacacataatttatgtggcccccttggattttttgtaactttaatgggtcttcattatgtcattctaggtgaagcaatctattgagcaagtgaggtgcaaggc

SEQ ID NO: 42744 - DNA, 734 bp, Manihot esculenta
  Intron number 3 from transcript cassava4.1_002624m (locus cassava4.1_002624m.g) derived from phytozome v7.0 (chr-ID scaffold06011; pos 73932 to 74665)
agctctgcattggaccctgtacgacaagaggggaagtacgtttttcacttacatgttcatcttaattcatttaactatcccattttgccacaaacttgcaagagtgacaataagctttgtgagtttgatgccttatagttggtctaactgcagtttttattatttaaattacttaatataccaggagaggggaggtagattatattattagaaaatgcttattattaccattttcttttaccaactcaattgaagctcattcatttgattggatataattcttatcaggtggtgcaaagatgtacaagaattggtgatacaagtagtactgttctttattattatgattaatgatttctgaaataaggctgttgtatcatgttttttattattgagaaattgatgtaaatgtagggcaagggggtggacaagtaccattccttgggtatgcgttctgaaaatgctgattgggtgatggttttttcacttgtgacattgacatcatagcatgtacttgtaatgtgctaaactaactattgatgagtactaggagcagttataacttattttcattttagcttttgcttaggtctgtggcctgcacattttcattttatcttttttgttaggccttttctcatcttccattttttccgtaacttcttctttagttataactttgagtggagtgtcttttcatggaatttgacatagagttttgcagggattctact

SEQ ID NO: 42745 - DNA, 373 bp, Manihot esculenta
  Intron number 1 from transcript cassava4.1_000888m (locus cassava4.1_000888m.g) derived from phytozome v7.0 (chr-ID scaffold03614; pos 3760026 to 3760398)
agatttctaaggtaagattacgattcttgtaatttttgattttggtgtttggagtctctaatttattattttaatcttgtttggttgcttatagaatgagaaaaagtcgttcttcttcctgcgtcttttaggattgatgtcatgataactaagctagtagtttagtttatttgacgctgttacttctacaacttttagaattaaaaagaattatctgtgcttttctctcctgcttttttatggaaatttgaacgtgtgcattgttttaatgatgcgtctccttctcttcttcttcttcttcatcatcatcatcatcttttacattcttattgatccagacgaaccatatcaagactagcaacgggccagttcc

SEQ ID NO: 42746 - DNA, 483 bp, Manihot esculenta
  Intron number 1 from transcript cassava4.1_012943m (locus cassava4.1_012943m.g) derived from phytozome v7.0 (chr-ID scaffold03403; pos 40231 to 40713)
tgatctttataagtacgatccctggcagcttccaggtaattttgattttgatttcgatttcgatatttttaattttatcttcttcttctttgataggaaacttttactgaagatcttgaaatttattgattgattcgattcaatttgtggaaatagagaatctgcgtttgttttaactgacttcatttcatttcgtgattaaattggaagattctacacttaattcttgaagtgacaaactttctggatcaatcagatccaaatccttgtgcagttttacttctagacggttcttgtcttcttctttttttttttttttaaatggttagtcctactcgattaaacttgttgacgcgaaaaatacgattgatttctcaaatgttgctcatgaatttttgtattcataattttctttttgtttcaatctattattattattattattattgctaattttttcggtatttctattgtggtgcagag

SEQ ID NO: 42747 - DNA, 816 bp, Manihot esculenta
  Intron number 1 from transcript cassava4.1_010511m (locus cassava4.1_010511m.g) derived from phytozome v7.0 (chr-ID scaffold01127; pos 147801 to 148616 reverse strand)
gctcagttcatcagaggtaagtagatcagttttttcattattgttattggttgctgagaaaatgtctatatattttctgtagaaaaatggaaaagtttctgtaacttaaatttcataaaaccgagtttacatttttttaataacgtgtctacgtagttaactatctgctgagttcacctgagcaaactatacgcttcataacttttctttaattctcttttcttccaagtgatatttagagtaaaatggatttgcttagcagtaaggaaagcagggtaacacctttatccatagagttatccataatttggtttggcatcttcagacttgcatagatcttggaaattagatcaagtattgattttttttgtttacccttttcaaatttccaagttgcaattatgttcatatattttatctattttttcttggggattaagtggttgggatatgagtttcattgatgatccttttcctggatttagactcaaaatattgtcttccctgcattattttagatctcttattgggggaagtagtcaacattttgggtttcgccactccttaatttatatttgtcggcacccaccttttgtcattttccttccttccacatctccttggagaaaaaatgataatgttggtttatctgtgttaatcttcacgaaataattttgcttttgatggtgctccgtgtgactgtgtttcaaattgtacacaaaatttctagctgttccatcaagtaaattcctgtccttgaagtacatttaagttgcaataaatcttgaatggtccgttaatgttctttatgggcag

SEQ ID NO: 42748 - DNA, 233 bp, Manihot esculenta
  Intron number 1 from transcript cassava4.1_002091m (locus cassava4.1_002094m.g) derived from phytozome v7.0 (chr-ID scaffold01551; pos 205975 to 206207 reverse strand)
attcatcctcagcctccctcttcccgccgtcacaggtcttccctctcaaatctcccaatttgaatcaaatccttgacgttatattagttgccgatcgatttttctcttgttcgtttatttatttttatgtgcgattcaattacgatttgatttttgttatttgataacaattaatttgcgtgtctcgaatgttgcttttgataattcgatcattgattttgccagtggtaata

SEQ ID NO: 42749 - DNA, 477 bp, Manihot esculenta
  Intron number 1 from transcript cassava4.1_003226m (locus cassava4.1_003226m.g) derived from phytozome v7.0 (chr-ID scaffold03614; pos 3813943 to 3814419)
atcttgattctggagagctcttggcggtgaagcaggttgtaattttttttaattatgttttggaagttatttattgcaattgttgcttcttgattctcttcgtgttttgggtctgttgccggatgcttataatgggatttcgttgatttgatttaggtaattctgggcttggattttgatttccttgtgttttctttttcctagttgattctagtttgggtttttgggaactgtttctggggtttaactgggattttgcaataatttacttaattaatttcttagggtatagttatctttctcctttctggttgatatattttgttttttttcttttaaacttaatttccccttttgtgttctgcttagtttcactcccagaatttatttttaagtgttttttttttttaaattttatggggtttagtttaatgttgcaattttttgttttacctttctaggtattgatagcagcta

SEQ ID NO: 42750 - DNA, 291 bp, Manihot esculenta
  Intron number 2 from transcript cassava4.1_008760m (locus cassava4.1_008760m.g) derived from phytozome v7.0 (chr-ID scaffold09876; pos 69191 to 69481)
acagtaagaaagaccctgtatgtgttctgttatttgcttcttcttcttctttgtctacctttttccccttttagctgaaattgagaagcaatttggtcaatgttattttattaaggaattctgggaaatgaagcttacttctgtttgtgttgtttgctataaattttattttattttttcccgtttctggagtttaatagcataaacgggaatattgctgttgtaatgatggtgtgtataattttgctttatgcagttattagctgttgctaggaaaagcggtgtggtacg

SEQ ID NO: 42751 - DNA, 973 bp, Manihot esculenta
  Intron number 1 from transcript cassava4.1_002846m (locus cassava4.1_002836m.g) derived from phytozome v7.0 (chr-ID scaffold05335; pos 745841 to 746813 reverse strand)
cctacgtctctgttcttgcttttcagttcagctaggtaggtccccttttaactttctgctcatatttgtaatccaagctttagaaatcttcaagctttaatgcttattctatgaatttgtgtttgctggaaatttccctagtcaacctggttcatctgtccttttaattctttttttaatttcattgcttattgttgattattttctttttttagcaaatgacggaattgggattgtcaattggattctaaagttgctgcttgtttttcctaaggattgaaattggaaatgagggctgtgcttatataaatagttatggctggtgttaggtgcttgcttttgaatttcgtggaagcttcatttgtagccggaactttgtgaagttttgttttccgctattggaatgcttgtaaggctagtagctgttttttgtcattcaagatgcttttgcatttgttagagactgcacctattatagatatacatgctttatcttctacagagagaattagggcaagaaatgcatgttaaatgtggtagataatccaataagacggtaatctggttgtagatttaaatttatctcaagactgaagggcagagaaaaagttcatttgtgtacagaatcatgttcttgataatattttctttctggtattcactaaccaggaaaaaaacttacacagtcaagcagaagtatcttgttggaaaagattaattgattcattcatgctttaaccctatgctataaaggtttaacagtatttcctgtttctgcttttctttgcaatctctcttgagcttttctattttacttgcttttcatacttttcatgctaaagtgatactctaatctctgatctcccaacctagcccccccccaccccaaaaaaaaaagttatgaggatattttatgtttattcaagaatgcaatttgatttttcttttcttttctctccatcaggttcaagga

SEQ ID NO: 42752 - DNA, 655 bp, Manihot esculenta
  Intron number 1 from transcript cassava4.1_009701m (locus cassava4.1_009701m.g) derived from phytozome v7.0 (chr-ID scaffold03718; pos 471919 to 472573)
aaggaaggtcggtgttctctacatgtgtgtttgtgtatatacaactatggaatgctagttcaatgatgaatcaaagttttatttagttctagtctgaagttgactttttttcttttttaaaccaattattttccctttttaattttaaaaaataaataatctgaggtaaatactgcattattgctgtagttaggatgagagagccagtcttcttagaaaattttagccatggctggatgctgtacacaaaagattatgtcttgtcccttaaaatatctgattttttctcgtcataatagatgtgtaatgataacagaatttgtattataattgatatgataatccataattgaagagctataaatctatactattcttcataattgttggaattatattttatttttatgtctgattgagatcatgcctaattggcatgtaaaatttttaaaacatgcttttcatctttaaaatttgtccaagtttcattatatgaactatttgtagatcctgttccattgaataaaatgtgcatttgtgccttcacactgagagtccaagagtagtatttctggcagctagtgtccttgttatgtaggtgcaatcaaatatttttccaggtacggtgatcgaattgttgctatcaaagtgctta

SEQ ID NO: 42753 - DNA, 937 bp, Manihot esculenta
  Intron number 1 from transcript cassava4.1_022912m (locus cassava4.1_022912m.g) derived from phytozome v7.0 (chr-ID scaffold03777; pos 101365 to 102301)
ctcttgaggtactggctttattggctcactttaggttcagtggattgattcaattgccatttcttgttaaacaaatgatttccttaatttcgcattttgatttttgataattgaagtgtaaagggtcttcttttgcggtttcaattttctcctttttttttgttttaaattaatgggcagtaatatctttgtaaatgttattcgtgaactaaatgaaaaaatagttagtttgattggtagtggatggaaaactctcttgttgagcagttgtgttctctgtttattgttattattttgtaattaatgggcattaatatttgtgtaaatgttatttatcttgaagtaaataaaaaatgctccttcggtcccatattaaaaaatataattttttattaacttttcaattgtatccacaataaatatattaaattttattaaatattaagagacatgttgacggttttattgaaaataaaataaaattgaatagattataataatctatttatatgttattatagtctaaaaaggaaaatgggtaataattttgaaataatgaaaaaggaaggatggacaaaaattataggacggagggtgtaagtattttaattggtaatatatggctgaaaatctctattgatgagcaggtgcgtgacaactgttttctgtgtttatgttcatgatatatttaattaatagcaaccgttcctatgatgttttccctatttggagatatatttgttggcaattgtcatgagacgtaatgaatgaaatttgtatgagtaaagaaatgtgaaagataatggagtgtagttctgttattgaatttatttataaaaaatttatgtttttgcatatcaaggttgattctatgatttcttgaagtgctagctcctggttagattctcacattcttttccctcagatttcactgtgg

SEQ ID NO: 42754 - DNA, 704 bp, Manihot esculenta
  Intron number 2 from transcript cassava4.1_017323m (locus cassava4.1_016783m.g) derived from phytozome v7.0 (chr-ID scaffold00636; pos 4422 to 5125)
gaacaggagggagatctcaaagtatctctttcaaggttgagatatctctcctctaattgtcttgcttattatttgttctgatttattgtttgcctgtccatttcagatcattcgatagcgtagaaaattattaaaaaaaggttttgttttcgagtttgcttcttcttttcaaggctttaaatacattttagagcttttattaatcaaatgatttccaacttccaagaattttatacgacttcatatcctctccaaattgattgaaattttaaatgaagtataataggaacactaaagatatcaaaatcatcacaatggttccaactttgagaatgatttatacgtatgaatatacagggtaccaaagatgatttcacaaaggaatttaaaattcattatagtgaagtaatttcaccataattgagctgctggatgggcagtagatataaatggtgaagagccaggttctctttcttttttcacttttttgtttgtatgtttcccatttaatatagaatgaagctagtatgctacataacttaaatcaagttttggaggggctttgtgtatttgtttgtttttggtaattgaccgtttcaacactataaattttcatgcattttaccattaagtaataagtaagtggatcttatttctggtgaattatagagggagtttgctacgcaaagaaggatttcaacctt

SEQ ID NO: 42755 - DNA, 977 bp, Manihot esculenta
  Intron number 2 from transcript cassava4.1_010926m (locus cassava4.1_008447m.g) derived from phytozome v7.0 (chr-ID scaffold06512; pos 1142090 to 1143066)
ctcgtgtcagggtatatatgtttattctttttattattttgctctcattccttattaggatattctctttttttatgcgaagaatgctttgtatttgttcttttaactgaatttcttctctttactctttgctttgcaattaatgaaagtcacttgtgtaaacgaagtttctcatggcaatgtgttctttttagttacttgtttgcaaaaccacaagtgacggaatgttgacgtctttttccttgttggtgctgcttttgcataattgtcaacttctttttcaaccttgctgatcattggatttgttttatatctttcatttggttcatgtactttgtctgctacattctgtgtttctactttcaaattacattgaacaattgaagtaagtggtattaaattgttacaatagaatattgcataagagcttcaaaatttgggaggtatatgccaaagagttcataacagaactcatgattccagttaggcttttgttatgtatcttgtgaattgagtgcgaagaactgcatctgcagttgggttcaagcagtttggtattgaagtatttatactttgatgcgcctgttacaggtagagggatttcctttgaagggataggtaaaaaaaattcttcagctagatttattagatggatgacattgttgattttggctatgtccattccagagttgatatgtcatgataataattatactgattaagaaaggatgttttaatcaaaacagtgagtcaattctccaggaaactctacagactcttgccttttcttaaaactcatgttggtctcctctctttcctgtcgatatgaagaactcaaaccaaaatactttgtgtactcagtgtttccactgcgctttatcctgtctgcattttatatgtgtacaacctgatctattccaaataacttcttgttcaccatattcaggagagactggaagatattcagaaggatcaac

SEQ ID NO: 42756 - DNA, 560 bp, Manihot esculenta
  Intron number 3 from transcript cassava4.1_018779m (locus cassava4.1_018779m.g) derived from phytozome v7.0 (chr-ID scaffold03049; pos 662478 to 663037)
cactgcagtatgtttatatttttcctttctgctcactctctttaacaagcattatgatttggtgtagaacattgtcatcactgatctcatgtagtgggttcaaaccaagggattttattttagtttttattttgtagtatatgcaaatttgttaggaatgtatctgaatttcttaagaggattaggggcagcagctgcagatggtgattaacgtactttaaaaatagaagagtataagaaattttgtttttttcaagggaaatatggaatacatcatcttctagtatattatggtccttgatttggaccaactggctagatttaatttgcagagatttaatttttaaggtcagaggttagaggtggttgcaacttgcaacttgcaacatatattatgctttgaatgaaagcctggtatgaatcgtgctcattttcgtactcattaattccatgggtcatgaattctggattttcagcttccatatctagtggtattacactagtttttcagtaagtcagagtgatgaaaatgatctctattgtgcatcctcttgtaggca

SEQ ID NO: 42757 - DNA, 248 bp, Manihot esculenta
  Intron number 1 from transcript cassava4.1_015889m (locus cassava4.1_015892m.g) derived from phytozome v7.0 (chr-ID scaffold09501; pos 211055 to 211302)
tcactcaataagatctctgatccccaatttcaaaggtctgtgcctttgatcattatctctctttctaacttgtttgttttcttcatttatctaaattgtggaattcggtatctaattgcacaaattctattaatcgtcttcgctagatcggtctccatctttgaaaatagggctttatttgatctgatattgttgattctatttgtgattcagaagatcgcgtaagcgttttgatttgtggatcggag

SEQ ID NO: 42758 - DNA, 1024 bp, Manihot esculenta
  Intron number 3 from transcript cassava4.1_015889m (locus cassava4.1_015892m.g) derived from phytozome v7.0 (chr-ID scaffold09501; pos 211915 to 212938)
ggccagggaattcacccgagcaaggaataaaagaggtatgtttctgctttccacttgcaaatctttagggtattcagacttttacttggattatgtcatcatatactttcatttaatttctctgaatagcatatcaaaagtgttgtttgccattaatcttattctttcgaatgcctatgtaaaaggttggctatgatggcttccgatattgcagtcagcttgcttctgtttttttttttttttgaacttgctagagtctcctcattaaaataaagggccgggaacctattaatttgatgcagtctccatgtgttcttctgattttgaaaactttcttcatagtgttatttacatgtttggttatccagtagaatatgtattttcaataaagtaaggtaatttcgggtagatgtattttgttcctctttcctttcataacagacacatcatgcttggaatttcacctcttgtgttccgatttcatatctccattatgtcttaagtagaggatgtttttcacaacaatcatttacagcactccctctcttgctctctcccccccccccccttccctctctctctttgagactaaagagaaatatccctttataaaattcatcttgatgcagttgtgtttgatgctggctacgtgaatgttataaagtcccttgatgttgggtgaaaactgaaaacaatggaactggtttcttaagacaacaatgggtactttgcctattctttctgcttcagattacacttgttaaatgatgatacttggacatgagagagacacttttagctctttaaattactgagaaaaatctagtgaaatttttgaacctgaccaattcaatcatacatccattatttgatatcataccatagtccaaaagacgtatatgataacttcattatgcaagtaaatatggtaaactgaaatctggtgaagatgtgaatgctattaaaatttaggttattactgcttgagttctgattgatacaattatcatgcagcggctattca

SEQ ID NO: 42759 - DNA, 1005 bp, Manihot esculenta
  Intron number 3 from transcript cassava4.1_002343m (locus cassava4.1_002343m.g) derived from phytozome v7.0 (chr-ID scaffold03203; pos 107016 to 108020 reverse strand)
tgatcggggacctcagcttcaaccaactctgggtaattcaataatttaacaagttttaagctcatcttacccgctaatgctatctgaactcgttgaacacaatggtgtgtcgttgagaaagaaagcaaagttaaaatttttgttagtgacaaatagttcaagtgagtgatatgcaaatggctgacaagtttaatgataaagcacaaattgagaagtgtaaaatgtaaatagttgctttaaccatgctatgcatactaaagagttaaaaagtaacagatgaagtaaagattaggtgataagagaatagaggatttaatgtttatgaaatagtttgaagaagatcagtttaacatctgtaataggggtgagagccccaagcatagttttatacagtttgaagaagaataccttgatcttatggattgagttgatagaatcgtcatggagttgagggccccagcccccaagaataattttacatctctaatagagggagataattgagcgacgaaaagatgaattatgtgagattacaccgaaatatgattgcaagtttgaagaagaggatgaaatatgaatgggcaatatgctactttcctcaatatgagatcaaattagcttctccaagttgcatacattattatggtgctacaatatggatcttaactaatttgtaaagaatgtctctttcaagatcgtgcctgagcatttcccctttgtgttattgaaatttgttcacaatgtacaaatttactttatatcacaccccacaatgcattaaaacagtaaaaaattattgaaaaagattatctttgcttatgtgttacataccattcatccatttcaaatgtcgcggtattctagtgtctagtcttaaggaaacactgtggcacaggtttccttatttgaataaatcttttgttttattttattttattttggtttgtgttttgtgcttattatattgcaggaccaccccaaagagtgctgtcaagcttcttgcac

SEQ ID NO: 42760 - DNA, 679 bp, Manihot esculenta
  Intron number 3 from transcript cassava4.1_012469m (locus cassava4.1_012469m.g) derived from phytozome v7.0 (chr-ID scaffold03332; pos 564735 to 565413 reverse strand)
gtattggtgctattgtctggaacgacaaaagagaggtactttcctacattttccaatttccatagcctctcttgctgtttctgctttgcttttatttgttgtcacttttcttttttctgttcacattaaaacatatatgtctacgtgcttcactttcatcattcatctccaaaagttgggttttattttattgagaatgtaggtcttacttctcagtttcttcatcccttccctcatgtgtttgttgtccaacttaaaagaaggtatctttctacttcatgtcagtctaacaggggtttagcatttatcatgtaggcacttctctataaattcttctaattgcaaaagaaattctctattcttttccattcgctatatgttctgaagaattagctacggatggccctctgtgtatcagtcgcagtcaaaatgttttttatcgagttctaacactctcaagtatcatcggggcaaaagttcacttgattggcgggatcatctcaattggtttgatatgatatttgacacacatgcacattcatatgttgttgattttaaaatgggaatcctcttgactgtcgagttcatcgttttctacacatgcttatattgctgggcttgaatgggaatctcttcttcgttagctactcgttgtccaggaaaaaattggcatatttcg

SEQ ID NO: 42761 - DNA, 774 bp, Manihot esculenta
  Intron number 1 from transcript cassava4.1_013756m (locus cassava4.1_013756m.g) derived from phytozome v7.0 (chr-ID scaffold02906; pos 288493 to 289266)
gtgatacgttctccaatctgaaaaaacaaggcaaagtaagcacctcattatcctttttattgtttcttatctttttatcctttggttctcttactttctgggatttcgttgttgtttttggagttgttgttttgagatctgaaagataagagtgttgttagttttggtgatgagaggagtgtgcattggtgggatttgaatttgtaagaaatgggaaattgttttagtggtctggcagttgattctttctacatgataatttccgatatccagatagtggtgctcagagatgaatttttaaattataaatggattcctcatttttcattgatggttatcgaaaattaaacctggaagaaaggaagggcttaactggattaaattgaccagttacaaattgaaacgcttaattcatttggtggccttataatccagagcgcaaaatttgctgcgggacatatggcatgttttcagttagcttttgattgcttgttgcaatttgttgaagaaggcaaaaatgaaagaggtctagtaacctagttattctgtgatgctggtctttgaatccaacttctagacaggaacagccagaattagggggatttactcgataacagtatttttggatgtccaaaaggaaatattctctgggtttgggaaacaagggagaagattgagaattagcattaagatttatctgttttctaactttgttttatggttattcatttgcatgaaggtggcattcattccatacatcacagctggtgaccc

SEQ ID NO: 42762 - DNA, 722 bp, Manihot esculenta
  Intron number 1 from transcript cassava4.1_028869m (locus cassava4.1_028869m.g) derived from phytozome v7.0 (chr-ID scaffold08608; pos 1104 to 1825 reverse strand)
tcccaactgcaggaaacatcagaaaattacaataggtaaagcttttataatctaaggagtgatgatggtaagcatctataggtaaagaaaattacaatatgcactccattgcgttattttatggagaaaaggaacagtgatcggtattcggtaaggtactgatcttaatatagtctaaataaaatagagaacagtgcgactcttatatagtaggtcataatcgttgacttttgttctgtctggtttaagaggtttagtacattgaagtaagcatgtcaatattggcttcatgtcttccttgtcaagaatgcatccaaaaagtggttttgaagaaaatttatttatctttttatcaagttgaaattcatgcttgcctttttctttgggtaaggctggagtgctgcaaaatgaagcaagtttgcttctgaataggctcagcaggtcctcgtttatggtcttctgattaatctttttgatattaaaacataaaagtaaaattttttcaacatctttagatctttgtgattgagattggggaaaacacagtaggcaggctcatactatatcatgtggtagtataatgcatttcttgttttgttttgtttttgttttttcttacctcaggctccctatgcggtggatattgctattagttttcaaaaatttattgttttgtatgtggtgcaggaaagttgagacctttgagagggaaatagcagtta

SEQ ID NO: 42763 - DNA, 466 bp, Manihot esculenta
  Intron number 1 from transcript cassava4.1_000545m (locus cassava4.1_000545m.g) derived from phytozome v7.0 (chr-ID scaffold03614; pos 603266 to 603731 reverse strand)
ttggaggaagagaagttcaaggacacagttcataagtaagtttgttttgtgctttgttgtttcaattcattctatgcttctgtttggatgctgagaaaattggatagactaatcggaagcttacatttacaagaagagagcaaaactagatgaaatttgccaaatattttgttagggttagttagcatatggtttggtttcttcagttttacttaaatgggaaattctttgattttgaaagctaaataggatcattcttggctattcaaagctggattaaaagcgaccataatgtttggtatatggtactgcagttttggtcctatctcctgagttttctcagcttccaaatggagcataaggaaaatgaaattagattgcttgctaatgccctgtttttgctgctttgtttgttgttacccatggaattttaaggttagagcaagagtctggttttttcttcaat

SEQ ID NO: 42764 - DNA, 676 bp, Manihot esculenta
  Intron number 1 from transcript cassava4.1_001408m (locus cassava4.1_001408m.g) derived from phytozome v7.0 (chr-ID scaffold03614; pos 34839 to 35514 reverse strand)
tctggcgaattcgccaatctctgcgacaagtgcgggtaaatttattgcgtacttctattttctatcttctaatgcgcaagtaattttagagaagggaaaagggaatggtaatttgtatggatgactaagattgtatgggttcaggctcagctgtagttttatttatttatttatttattttatttttctgatttcgtccttgaccatatatttatggctccttggtgttattattattaaaaggcttttatataccaaccttctatttttgcgcttttgtagaatttttttcactgtggcattgttgtttttgggacattaccatgattttcctttgcgtgtcccatttggtcgaatctgatggtttcactagaattagattgtgaaaacgattatttgaaagtgaggtccgaaatttggaacccaactggaaagtgaagttgttttttcatgatagtttaagtttactataccttttgtttatcctaaatctaaaatttgtatgattttgggaaaaatgtgcatcaactagaattaggcgatcagggacaataactaatgaccgttatttatgtactgataaagataatgtggaagatttgacttcaacgtggacaggtagttatgatccttaattttaatttgaggatgtttcattattactataggtctgcat

SEQ ID NO: 42765 - DNA, 650 bp, Manihot esculenta
  Intron number 1 from transcript cassava4.1_016597m (locus cassava4.1_016597m.g) derived from phytozome v7.0 (chr-ID scaffold09151; pos 138273 to 138922 reverse strand)
ggtgctgctcctcgccgcgtcctctgtcactgcaggtttggatggttattttgaaattgtgatttcagatgtgtgctttctgaggtttgtgagatctatttatttcttaaatttgtgaaaatattaagatttatgtgaagttttcgtttgtgagattattgaaaaattttgaaataaacactgccattcagagttgttttcgtgatattgagatgtgttttagaatattgttaatgtggattttgtgtgaatttttgattttttgtttttgtttttgttgtgattatgacttaatcgggttcggtagtgtctggtattaagttgttaatggtaagaaaatttaatttttaaaggggtttgagacggtttgggatagtgtatctataaatgtattcgggtttgggtatttaaaatttggcttttgcgggtaccttacctggtaccaactccaaattccaacttctcctaaatcaggtttttattgacaaaatttagatctaccttctctattcttttaccatttctttgtttcttttgtcttattctccttgcaatatcttgtctttgttagcttttatttgtgtagtttaagtaaacccatttgatagttttaatcatcttcatatctgggttctcattagcttgaagaa

SEQ ID NO: 42766 - DNA, 466 bp, Manihot esculenta
  Intron number 5 from transcript cassava4.1_004792m (locus cassava4.1_004792m.g) derived from phytozome v7.0 (chr-ID scaffold04314; pos 18583 to 19048)
cgagatagctgtcatagctgccgatattcccgaaggcaaattttcttatccacaaccacagatactttctttttgactttttttgtacaaaatttcatattaaaggaatgtgatgaaatattacgaatttcttttttaattaataattttaaatttaaatattagagaatcatttttttttcattattttttgttaattaagtgaattgacctgacctaatctgatatttttatctttattgatttatattcatggccttaatttcaaagtgttacatatggaaaaaaaagggaattaattgaagaactttaaattctacatacacatattggaccaccaaattaattaaacaatttcatatctttcctaaataaaataattttccctcaaaaaacaattttctttttaactctttatttattattggcagtgattgggacagcttttgccttaaatatactgttt

SEQ ID NO: 42767 - DNA, 742 bp, Manihot esculenta
  Intron number 2 from transcript cassava4.1_012281m (locus cassava4.1_008771m.g) derived from phytozome v7.0 (chr-ID scaffold06914; pos 1225910 to 1226651 reverse strand)
ttgcagaaattcctcaggtctctctctctctctctctctctctcacagtttctgtttctcaagcatgaacaaatatgttaagctttcagaattcctcaatgaaattattgaagatgaattatgcttaagaaaaaaaaaaggatatgcattggttctttatgattctgaataggagtttgggtgaaggttgagaatttaatggttaattctaaatagatttttcagaatatttggaaaacctggaaaaaaaaatcagctaaagctaattatgactttaacttaccgtgattccttcggttgtttttttttggggtgtatctggtttgggaagaacaagagctttatgaagctcaaaaattttgctctcttggcgattctaggtattattgtgaacaaatccatgtagcaatgaatcagtttcagacattattgaaataagctaagtcgaaaagaaaaatatgcatgaaattaaatataacatgttgctgtacaactttaagcatgttgtctaaagtttttatttgaaattcctcttccttcctatttgagtctgcaatgtggttttctcaagttgtatttatcatgtttttaattgtaataccattaatcagtagaattgctaagttttccttttgctataggttttttctccaatttttggggttcattaatatagacaaggttttgttggtattattcttctacagctatccaatttggaagtctggttccagcgacccaa

SEQ ID NO: 42768 - DNA, 669 bp, Manihot esculenta
  Intron number 1 from transcript cassava4.1_002580m (locus cassava4.1_002580m.g) derived from phytozome v7.0 (chr-ID scaffold07088; pos 104175 to 104843 reverse strand)
cgggtgtggatggaagattatcccctttttttaagctctgctattatttctgatcatctacatatagttgattgagtttatgcaatgaaggcattgttttatcaaaaaatatatataatcatccacactgctgtctgagtaaaattcataattatattttaaattaaatattcaatattttatcataaaaaattaattgatttaatagaaaagttatattttactattgatgtttaggtcttcctaaaatcaaattcagatactaaatcgaaaaaaatgaacaacggaagatgcacttttgtaataatttttcttgtttctaacatcatcaaaatttaataacgtcaatagaaaagccggtaacaaattgtttggcgtttatgttacaaagctaatatgagaagtaattttttcccattaaaaaattaaaatctgatcagattggaacttgaaatcgaaacaggtcaaaacggctttggtgacaccgtcgaacggcagaaaaataacaaaaaaataaaccgtcccgtaatccctccgttctccctgtctttgtatgtgatttataaagctctggttccctctctaaaattttaccctctttttctcgctctctttgactctgatagattgaaagagctgtcgtgtaaaaaattgcaggatcaaaatttc

SEQ ID NO: 42769 - DNA, 720 bp, Manihot esculenta
  Intron number 2 from transcript cassava4.1_016816m (locus cassava4.1_016816m.g) derived from phytozome v7.0 (chr-ID scaffold01701; pos 402863 to 403582 reverse strand)
cagttcacaacaaaagtctggtaggtaataattttcctattctgctattatctcaggtcgattgtagtgtatggcgaggttttgacagcatgattatgagctacaagaatttttcttctctatatattcctcatgtttattattttttattatctatgtcttcttaattattggagtggcagtattgtaaaaagtctagagaattggcacctttgatcgccttaaaattaaggatgctattggtttatgcatgggatggatttaaaagttaaggatcaattttgcaggggtgcatcttgttgcatgatgtaacattaatcttttgccctaacattctctttccttttactatgttatatttgcagtagatgtgctgatcttttcagggtgctctgaaatctaaatatgcaattttatgtttacgctggtctttgaattcagaagccacttgtaatttctatcattacatgaagatcgttttaggttctgtggtgttcaggaggaattgtaattgtccattagcattttcattctccactcatgtgccatcttaagcctttaaaattaattgtattggtttcaaattgaagattagtggatgcatatagtggcacagaattttgagttgacgtatgagatgactaactctgcaatcattttctgtattgtgattttcctgcttaaggcaccctaatattagcagccagagcggggcaattt

SEQ ID NO: 42770 - DNA, 605 bp, Manihot esculenta
  Intron number 1 from transcript cassava4.1_016816m (locus cassava4.1_016816m.g) derived from phytozome v7.0 (chr-ID scaffold01701; pos 403612 to 404216 reverse strand)
aggtggcactttccaaattgatatttccctgccgggtatatacacaaactcgttgcttcacagttctgtcgtatgtctctgggttcaaattgtttttctgcttatccgacttgctttatgctaattttgttgggatttctcttaactgagctgcatttaagtattatttctgtttcttcatttgaagaaaaagaaaattccacaaaataaagcgtcgcgcttgaaattgaaatcatttcatttgttggtgatggtttttttttttttgggttaggtttaattgttcacctgctactgttactcttagatactggatacgagtttgatatgattatagggtattagaattttagctttatcggataactgctttagcaatctgttgacttttaaatgcatgtgcagtaggcctaattgcttggttgttagaattcaggataaaggactatggacttggccaaacattgtgcaagtttttttcccgcacaaatactcattaagactagctaaattggttgccttattaattgatatatttacaaattaggaggttaaaaaaatatcttctattgacttgcattagtgattctctattctttttgtag

SEQ ID NO: 42771 - DNA, 625 bp, Manihot esculenta
  Intron number 1 from transcript cassava4.1_001657m (locus cassava4.1_001657m.g) derived from phytozome v7.0 (chr-ID scaffold03614; pos 1044239 to 1044863 reverse strand)
tcttccaagatcaagtaattcttacagtacatgaatttacttgcgtaattctctctatgttagatctgaatctctttctcacttttattgtgtctcgtcaatctgaaatttttagtgctgccatggaattttcttccaaagttctttatcggtttgttggatctatcttcattaggagttctttttttttttccccctctctcactctttttcttactgttactctagttcgctactgtacacacacacacacactctatctctctctttccttaattttgccttttgatttcaaatttgatacggattatcccctatttttgctggtttggattttttcatgttcggaattcggaattttgatttatacaattgtatgagtatggtattaggtgaatttgatgatcttatggaataagagaagttgttgtttcaaagttctcatgtttggcatggatccatttttaatttcaaaattaattcaattttacgaaatgggcattctagcattgtctttctaaaacatgggcttttacctgtaacaatttttcatttgaggatgtaatgatgatactttaaaacgtgtatagatctggtttatctgaaactcccacgaaagcatcac

SEQ ID NO: 42772 - DNA, 431 bp, Manihot esculenta
  Intron number 1 from transcript cassava4.1_015169m (locus cassava4.1_015169m.g) derived from phytozome v7.0 (chr-ID scaffold09761; pos 221351 to 221781)
tctttgaaagacagataggttccaataaatactcggtgagttcatgtccagctaaagttgtcatgagttcttttggattttgtatttgcatcttgtgacacattggtgagctataaattttgggtacactgttggttcttactttatggagaatctgcatactttgtaattttgtactcattctgattttttaaaagatattaactggactcagagacgatcttgtttattttttaacccttttttctctaatgattagtaaatgatttaatttctgttttgctttgtataacaatcgaagggtcaaaataaaaggaaaagaaatgtttgttttgtgattcaaatatatgccgtttttactcctttagatatcaaatatttggctcaatggtgcaggtcttcattttgttctctataatcttttcattact

SEQ ID NO: 42773 - DNA, 630 bp, Manihot esculenta
  Intron number 1 from transcript cassava4.1_002004m (locus cassava4.1_002003m.g) derived from phytozome v7.0 (chr-ID scaffold07991; pos 195705 to 196334)
gattaccatccttcttaattaatctatctgtctaggtatattttcataccctcctctctgtttcatttctttgttatcgaagtccttaccagctgcagaaacactacaacttcgaattaaaagaagaaatttggaacaatttttcattcgtctaagaagcgtacaaaaaggagagagaatttttttttaaaaaaacgtgtaggctcaagttttggactggtacagcgtggatctgatgtggcaatccgatcttcgcagtttgaacaatcaaccaccagtctgaggattgggtatgctcagccaataagagcacaccatcaacagcacaagcacaacttaaaattcacgcactaacgatgacttcaaaatcatgtttttccagaattaatcccgaatctcttgtaaatttcacccatctatctcgttttccttcaattcaatcatattcttccttctttcttaacatctcaaccacaacgacgatcaagaaccggcgctctatttatagtattctcttttctccattttatttttgtttggatgctgggaaattgagttgctcaccaagtttgattcttttgtttatgtcttctaggtcgcaagtatttttcgcatcgcgcattatctttg

SEQ ID NO: 42774 - DNA, 749 bp, Manihot esculenta
  Intron number 1 from transcript cassava4.1_002915m (locus cassava4.1_002915m.g) derived from phytozome v7.0 (chr-ID scaffold03049; pos 260265 to 261013)
gctagagactctgcttcgtcgttgccaatacagtcttaatatcctcgtccttgtgttttttcattcactcgtttatgggttttccgagttgggtttttggattcgtacttccttgttatgattttgatgttggtttgctgattggctaatttgggtgttcatgtccatttggtgtttcagtttatttcattttgttctttgtttcgcaatttatttatatatctgcgtggaatacgaaatctgcgccaattgttggcttaattgaacttctctgttgtattttttactcccttaattttttcttgaagtgtgtgtctctatttcatatctttctttcgcgagatgggcccttagatgtgcatctactttatgctttattattgtgatagagtttacagtttcgcttttgaatctttaccgtctccaccagctttatatgattttaatttaagtgttttataattattggaactgtaggatccaccgagttgattgcttatgtacctttggttctagttctctggagttagatttttatgttctttgcttaagtttccaatatcttgtgatttattgggtgtgactcattactggattttttttcccttcgcattggttatgtactattcactgcttttatatgttttaactgattgtggtgtttctggattttgactactcagttttattcaaaatggattttgatctgtgcagttaccacaacaagtcaggcaattgctgcattgaag

SEQ ID NO: 42775 - DNA, 727 bp, Manihot esculenta
  Intron number 1 from transcript cassava4.1_016655m (locus cassava4.1_016655m.g) derived from phytozome v7.0 (chr-ID scaffold06914; pos 217874 to 218600 reverse strand)
gaacaggttgagtattatgcttagttattgtgaaaatattgaattagggatttgatttcacccttaatgctcgagaaatgcatgaaattctctgcttttttaagctttttaagaaaattactgattttttttttatggatgctacagtttatgagccagtttggaaggataacagtcgttaaaatcaacttttatgtttcacaaattttgtggaattcaattggattcgttgtttgatgtgtttggtttaaattatatttgggattgaatagatagctatatattttgattgaggaattgattttgatttgcttcatttacacatctgcagttgaattttactcggtaattattcctgaaggaaagagcatcattatgcaaaatatgtatcaggctacctttaggtccataatgcactattaggagatttggatgtgacaaaagtagatgatattaagctctcatatgactggttttactgaactatcttgtttctaaaaataagttctgaaccaattcttcacttcaacaggcagaatgagtaattccatattgccaatgtgcacttaagtagttgattttgtgtggcacataatcagaattttgtttgaaaaatgtctgacaagagcaactgtaagagaaaaaggaataaaggattagtgtgaaaatgagttttgggtttgtatctcatcaccaatgtatttggaacaggtgtttggtgcagagt

SEQ ID NO: 42776 - DNA, 516 bp, Manihot esculenta
  Intron number 3 from transcript cassava4.1_004672m (locus cassava4.1_004672m.g) derived from phytozome v7.0 (chr-ID scaffold06512; pos 1888498 to 1889013 reverse strand)
ttttccagcgccagcttagaacaaggttacctccggtaaacttcttcgacaaccttttcttccttctcacctttggaagatttgtaagattgtccattctgattattaaaggcccttgaacttcctttgattgacagcttaataactatatgtttatgagttttaaaagccttaccaagcctgatattgtcttttcttttgaaatttttgtggttatctctgctcaaatctgctggtacccttgcttgctttgcaattgtgctacctttatgtttccaacaatatgtgactatttgtttttcccagatagctcatatactttatcttattatggaaaactcgtctttctaagcatttggtgtatggtacaccgtgatgttttagaagattggatgcttagttatttgcatttatgatcttcaagcaatacaatttttattgctcttttgacacagtagggacctcaatttactatttttttcccctttcttattgcacgctagataaagccagcat

SEQ ID NO: 42777 - DNA, 609 bp, Manihot esculenta
  Intron number 1 from transcript cassava4.1_013282m (locus cassava4.1_013282m.g) derived from phytozome v7.0 (chr-ID scaffold09120; pos 22183 to 22791)
cctgctacacctggttctcactatctctccattttgtatgtcatttcctttttattctttttgttgttttgatggaactttaccaaattcgaattgtataagaaaccatgattaactattgattttacttagtgctgcaaattctttgtggtttttgtatgataattgtatgatgagcttctctctatacctctccaatttttcatttttttttaaaaaaatctaatgtcttttttttcctctcccttgtctgcatatggaaattagccgtcccatgagaaatgttttgagggtttgatgaatgtttgaacaattaatggcttgcaattctgataattggttctattgctttgaacagtagtggttcctcttattttgtaccagttaaaaccggtcaactgtttttttgtgtttagggtttgtaatttggttttgaagattgctttgctaactgtaagtacccttaatgaagattgatttattcagataataataaaaaaaaatgcaatggctgttttcatcttgcacatactatttggttggaagagttttgattcttaaaagaacatattataattagctcctttcttttagattgcatactcatac

SEQ ID NO: 42778 - DNA, 797 bp, Manihot esculenta
  Intron number 1 from transcript cassava4.1_013826m (locus cassava4.1_013826m.g) derived from phytozome v7.0 (chr-ID scaffold08910; pos 147430 to 148226)
acctccctactagccatttactgggctctgttcctgtaagcactggctttttagcattgattatgatcgattgttcatgtttcgatgttattttttttttggtggttatacattctttgtttggcattttgggtttttttttttgtttgtcgaagcattttggggtttaattttgaagtacaggtttcgtaatcaattgcataatctacattgataaagttttgatttgtttggagaagtctgtgctttttggtttttgaagaaataggagtttaaatatgaccgagttcaatagtaacgctatgcttaaatatggaattttgtgggttaagtaaaagcttttttttttttaaaaaaaaaaaaaggataaattcatatttatttatgttgatttaagtgaagtgcgtgaagcttgttgatgcaaaatagatttgggtaaagatagttcaattagagcttttttaaaagcataatttcatttttatttatattgatctaagtgaagtgcatgtagcttgttgatgcaaaatagattggggtatttgtctttttcttttttcctgttaatcttgttttatagataatttgatttgtggttttttaaatggataatttcatttttatttatattgattcaagtgaagtgcattaagcttgttgatgcaaaatagattggggtatttgtcttcccccctccccccttttagtattgttttgcaggtaatctgattagtctctttctttttcctccttgccttataggcagtggtcattgaagaaaaaagtaccaccaccta

SEQ ID NO: 42779 - DNA, 654 bp, Manihot esculenta
  Intron number 1 from transcript cassava4.1_018660m (locus cassava4.1_018660m.g) derived from phytozome v7.0 (chr-ID scaffold01551; pos 2366395 to 2367048 reverse strand)
cttctttctcaaggtcctccaagcttaccttcctggtaaattacaatcttgttctgctttcccttctctttgtttgatttatttgtttattattgatgctcttggtgcttgcttcttcatgttttcttattaccctgattgaaatgtctggccttttcatgagtcctaaatcttgaacttgtatagcttctttctgttttccgttattattattttgggaagagggattgtttttagatttgctacccaattcatatagactctaattcatgcaatagagtttctttctttctttttttttgaattcttttgaggcatttggtatattgctgattctgagctaataaaatcctttcaaattatttcactcattcaaatgccataaatcatctagcaaaagctaatctggccatgtgtttgatgtcatattctgaaatttgtttcctatttaaatgctaaaccttgtcaggctttgatcccaggtggttttgaatccgtcaatacggttgtagtgtgacgatcaatttggtgccgtttttatatatactattattaaatttaggatgctcttggcgatataattatctttcattgtataagcatacctggacttacatggtttttctgttctaacttttgggcagacaccaagca

SEQ ID NO: 42780 - DNA, 901 bp, Manihot esculenta
  Intron number 4 from transcript cassava4.1_026180m (locus cassava4.1_026180m.g) derived from phytozome v7.0 (chr-ID scaffold07510; pos 112705 to 113605)
ttttttcaaatctttctattttcacaaccctgtaagatatcttcttaacttgttgtcatcactgttctaatagctttaattgcaaagaatatttctcgtcatttttttttgtaagcaagctctttgttgtgctatattttgtttatatatcctgggttgttttaatcatttatattgtctacttttgattgaagttacttacatatggatcctgaattttatttatttttcatgtagagccttagtccctcgcatggttctttagccagtcaagttattgaggaatactgaactgtagctcttgcatcaataattataagcttatgtgtgtgatgcctcatgacgtgataaagttttagacattttagaatgcaacttaatttgaaaaggttaattttggactaaattcatgcaaggattgctattggaaagggtagggatcagatggagcacaaggcattctaatttgagagaaattctttttctggagagaaaaatggcaagacagggcaagcagggacatggaaaacaaagagctttagtgagagtacttttgaaaactggcagtcaaaatatagcggtagtacatttgaaactctattatctgtacttggtacaaagtctgaattaatcattagcaagtggccaaaaaatttacttgtgttgtgcctctgtttttgctgcacataaataaaactgatgcattttgctgatattttacatgaatacagggatgtcttatgaaccatactttttgaccatttgaaaaattctcgaatgctttttcaaataattatgctaataggttgttaacttgatctgataaaaaaaaggtccttaacttgttgtcatgcttgtggatgcagggacctctctttcaacaatttcagtggagatcttc

SEQ ID NO: 42781 - DNA, 466 bp, Manihot esculenta
  Intron number 1 from transcript cassava4.1_010199m (locus cassava4.1_010199m.g) derived from phytozome v7.0 (chr-ID scaffold05335; pos 254714 to 255179 reverse strand)
gagctagtcctgggtaagttctttcttgcttatgtttcttgcccaaggaaacgcaaaaaatatatattaatgcataggtgttgtaattcgtgtactttgtattatacattctgtgttaatgggaaatgaggcattaaaggagggaagtgatgattttttttttctttaccatatatttcctggtagcctttcctggaatgcgggggggaatttgattttttgttttgttggtaaattttaatctcagtaatgattttctccattgctgctcgctttttatgactccctaatagatatatacacataatagtaatgtcccatttctcccattagctttagttattcttttccttctagtataatgggttcttttatgagttttgagaaacttcaactgtgaatttgattggttgccttaatttttactgcagaaaaattttcattggaggtttagcgagggagacta

SEQ ID NO: 42782 - DNA, 925 bp, Manihot esculenta
  Intron number 1 from transcript cassava4.1_014858m (locus cassava4.1_014787m.g) derived from phytozome v7.0 (chr-ID scaffold11110; pos 200237 to 201161 reverse strand)
ccgtttcgaagaggcgaggtgaatccgtcgaccgtgtacttagcctttgctcttttatctgtgttgcttgtttgatctgttcactgtggcttctgtagggttttgatttaatctcccattctttcattctcagtaattctgtgaaattatgcatccgttgttagggaaatagtttaatagttaattttagtaatgcgtatgtcaatgtggctatgcgtatgtcaatgtggctatgagttaagattatctctagctactagatccatggatgggttacttgttggttttatggcgtcgctacttttgatgattaaaatcaatacatgaatccctttgagatcgaatttctattgttaactatgttcaaacttcagattactaaaatgactattttgatattcttttagtcttgcattttctggaatgcttaggatgtgccattgtcgacgatcatgttttcattctgaagtttgaaatttgttgttttgtttaacaacataattggattttctttctcggttgcggtgacccatatattattctccctccttgttgtttttgaatactattaatttacttgactggtctgtttgtagcttctacatctcccgactcatttagcaaacaggaaatgtccttctccctgctgtttttgtcagcatactccctcttcactgcttacttagtgcatcatattgcatgaatgagtcatggaattttcgttatttaaaactttttctgttactgataagggaaggttataatgtctatgttctctcgttcagttttatgattgatgatcacctctctctcgtggaagaggaataagttgtcatctgagcctttaatgtgttgagttttagattatgtttttcttggttttaattctgctaccttggtttgttttgtttgttcatgaccagaa

SEQ ID NO: 42783 - DNA, 668 bp, Manihot esculenta
  Intron number 1 from transcript cassava4.1_002763m (locus cassava4.1_002763m.g) derived from phytozome v7.0 (chr-ID scaffold01701; pos 414400 to 415067)
cttttggttttatataagcgcgggtttcaacggtgcgtcttgtgtttgccttttcatttttagtgggttatgtttgtttgttcaatgagaaatttcagaattttgcttcggtggtgtcgacattatttattgaagtgaaatgttgtagcttttgtgactcatttatgtttggttgcccagaaaatcgaagtggaaaaataaatcataaaaaatgggttttatgcttcttttttttttaatgtttttggggccggggagggtgggggggggattttaagtagctgaaaaccgatagttttttctaggcccagtttaagtataaattttgttttatttttttctgggcgataatgatgctagaaaaagtagatgtgtgtgtttcattttcttagcttttggttcctgaacatcaagtcaattatctttcatttcttgcgctcgttaattttctaggaagagtgggttggattctaccgtgtgtatccatacttctagttctagcacttaaagaattctgcgtggctgacggatctttttttcagttgtgaatctaatttctggagtttgattcgttaacctgagtagttataaaggttctgcagacgtgaatttgttgctgttgtatcattacaatatgaaactgatataattttgtacgctgttccagg

SEQ ID NO: 42784 - DNA, 803 bp, Manihot esculenta
  Intron number 4 from transcript cassava4.1_017132m (locus cassava4.1_017093m.g) derived from phytozome v7.0 (chr-ID scaffold11668; pos 94504 to 95306)
agcttgctttgagagctcctttgggacagaacacggtatgcgctccttttctttcttcttatatgcttttggaaacatatgtatttttttattgttagatttgttgggtttattttagatctttgaatgctatttgaattttgttggtcttgtttgcgttgcctggaaacacctatattatatcacataaacacagttttctgaaaaaataaaaactaaaaattgggtggttcttctggatggaagactattgagcaatgatgagtatacagtcctgtaatgatttgtggtgatgatcgcaattttttatgaacatctaagggactgtgccctcaatagtaattcgactatcagtgttcatgtatgttactgtactggtgccgtggctgatgatctggtgtcaagctgatcatgttgtatgatatggttaccaataatcattcttaaattttttttgttggcttcctgatccttgggaagctgtatagtaatttgtcccatgtttcttctttagagaaatggtgattgaagtttccttgaaatggcttttagattattgagaattctataaattgagggttgcaaattttttctctcccgcattgtgaaaaatatgatagggtgtcatattttgcatatacctacatgacaatgaatttttgcttttatttttctctttattatcatcctcttctgttagcaactaagcatcttattgcctccattttgactacctttgtatttctgctggatgaattatgacaatgaacctttgttataggttctccttagaggtccaaaga

SEQ ID NO: 42785 - DNA, 565 bp, Manihot esculenta
  Intron number 1 from transcript cassava4.1_005986m (locus cassava4.1_005984m.g) derived from phytozome v7.0 (chr-ID scaffold09501; pos 685258 to 685822)
gcgttctcaagttagctgattttggccaggtaaagtgggtttcttctttagtcaatttagctgagggagattatgcaatttgtggtcgttggcctgaattgatctttcttttttcttttttccttcacggttctagattagtttgttatcagaattgaggacttatcttgaaaagtttttctgtgtgcgttttctcaattagggtagaggatagttgtgaatcaagtggcagatgaaattatgattaatgggacaaaacgaatgcattggatgatgggtattcataattgtaatacttcaattgtgtttcactttgttaagttaaagcaaagatttgtgttgttaatgagcaaaaaagagagatagaactcagcaattctatatgggttattgtatacagatttgagtctaagcatcttgactgctagaatgtttttcatgtcttattcatatttcttcatgtttgcatgagattgtgagtattggtgtacagctgcttcaaagtgttgtctttgtattatttgagcaatggaatgcttagtttgattcttatgtccaggcaagg

SEQ ID NO: 42786 - DNA, 513 bp, Manihot esculenta
  Intron number 5 from transcript cassava4.1_009133m (locus cassava4.1_009133m.g) derived from phytozome v7.0 (chr-ID scaffold03777; pos 76776 to 77288 reverse strand)
tgcacaatcggcaggtaaaatgtttttatttacctaagcatgaaaaagagaatgtacgactcttctttagcaggatgctaaattaatagcttacctattgggatgcttcctcaatggatgtgcaaagtttcatattgttggtatttattcaaatgaccatatcaataaattgtcaagtttaccgtgaaagattcagatgatattaatgaggaatcattataattcccaaacccaaaaaaatttggcccatcatctagttgatgtgtccattgtcatttagtttggaactggattgcaattttagcatgagcaatatttgtcctgggcactgaggcttcatttgatattcaacacatactatacagttatctgatatccatttccagagttgcaactaccaccagtaaaagtgttttttgtttttgggtttgtggtgtgtttgattatatttagtgtttttttatgtgatgctttgtagatagttcattttcggtctctcgagaaaccaaaaga

SEQ ID NO: 42787 - DNA, 948 bp, Manihot esculenta
  Intron number 2 from transcript cassava4.1_019413m (locus cassava4.1_019413m.g) derived from phytozome v7.0 (chr-ID scaffold09501; pos 193870 to 194817)
gctggtaagctgtcttcctttatatttggtttatagcttgtgcgcactttggctctattggtctctttttgggtgctgctttattaatgggtagcttgtttatttatggctgtatattggcctttacatgaatatgttaatgtttccactagaaaattttgattgatagttatagtttcaatgtatttatcatttataaatgagtgcttggtggagatagattgagaatagttgagctgtacaatttatggaggtagaattttaatgcctacgtgcaatgtgataggtgctgatgttggctgcaatagtcatttttataattatttttttggtaatgagtattcttgagtaaccataggagcataaatgtggggttaacgagttatttattaacaattgggtgaaagttcaggcagtttagtgggatttagattatgatgaaaatggcatgccattaggtgtgctgtgggagaaagaagactggtaaggtagtttaggtagtattagttttggtgcaatagatttatgagtttccttgtgtcattttgtactattgatttggcttcacatctgccatcatattttaagagcttgcaatttggcaagcctactgcttttgcatgcatccttgtattactaaccttggagaatatcattatatagccctgggtttgggatatgtatgtagtcattcatttataattacattgaggagttctgttttctttgctttagtaaattgacgaatttttatcatgtgccaacaatttggtgtcatatatcatcttgatagtatttggtggtgatagtagcttattgtaggttttgctaattgaatacggacaagtgtaattccttcaaatgttaaggtgatataatctttttatttattcggtactcatctctaataaattttggataacagcaccttcaagaagaaggctccca

SEQ ID NO: 42788 - DNA, 860 bp, Manihot esculenta
  Intron number 1 from transcript cassava4.1_010502m (locus cassava4.1_010502m.g) derived from phytozome v7.0 (chr-ID scaffold06550; pos 363336 to 364195)
tcttgcttcaagggcaaatacgccggtaatctctccttctttttctattctctcgtcttttaagcttgtttggttagattccggtggattctctctcttttctccttagatcttgtctcagcttttttttatttgattagatctgtgttttctcttatccgatcgttttcattttcacattatttttcggatctgttgttaattggtgatgctaaagctttcttttccgtgattatttgtctgtgttttcattatatctgattcttcttcttacttctggtcgaatcaaatctgtttgtttgctgtaatttctctaatgagcttcgtatttgatctggactaccagatctgtctccatatagtttgctttatgaagatcagtagttgaacaaaaggatctcaaaaacagtttgattgatgaactcactagttttgtgctgtgccaatttcgaattaatttttttgtgggaaagatatggagtttgatgaatggttattgtcgtcgagttatgagcgcgtccagctactgctgaacaaaggaaacaatatcatgtgattaatgctttagttagatttattatatgtgaattttgatgatttcttattgtgtttatatggaatgaaatatgagtgactaaattcatccccaaatttccctaaatgttttagatgatttctgaattgtgcatgcatgatagtttatctgctgttaaattattttcactgttgttttttataagcattcatgtcattggtttgcacgctggaattggtgttttggtgggttttgggaatttacacatatgaatcgaacatagtatcttataaaaattttctctttgcagacgaactcattgcca

SEQ ID NO: 42789 - DNA, 999 bp, Manihot esculenta
  Intron number 1 from transcript cassava4.1_006192m (locus cassava4.1_006203m.g) derived from phytozome v7.0 (chr-ID scaffold06711; pos 219589 to 220587 reverse strand)
attgtttgggaggttagcttttcctttacatattttggttcattttcgtaggattatattatcattcacatggtccaattagaagttaaatggattttttattatatatatattgtgtattttcatggttggctttgcaaactagaatatttcgtttcttgataactgtgtgctcttgatcagcggctagtgtagactgtatatcaggggaattttccgtttgctccctttctttcagcatcaggattttgcttcaccaaaatttggttctgtggtgactttttgatccctctttctttctggattgagttatttttaagaaaatatgctagggaaagattatattcatcatacaatgaaaagcttagttcacctttttatgtatcaagtccctgacatgcatgtcaaaatctagtatccaaatgatttgttacttatttgttttacaggttttctctctgttattcttctatctaatcctgtaatgtctttgtggtttctttttgcaaactaatcaatgaactgatttttgttttcttgctgtaagtgcatttaattggtttcatttctcatggtgcatggatgaatatcctctggccagatagtcagtactaattgtgtcaaagacactgagtttctgacattaatcttgaaattttggctctgtcagaattatattttgtacatcaaaatgcaattttgacttttaattggtgaattggaagcaaatggtgagattgaactaaaagtttcttcattcttcatctatgatgggattgttcttttggcagactttcacaaatttatgctttatgcattcatctttttcatgcttccaaaactggatgattatacaagctatttatattcttctctgtattttaaccttatgtatcatagtgtgcttgcatttgaaaagttgaaaaatatttttcttaccatgttgaaagtgttggatttccagaattttggatcaagaaaggatacagtgttttgtgg

SEQ ID NO: 42790 - DNA, 756 bp, Manihot esculenta
  Intron number 2 from transcript cassava4.1_021276m (locus cassava4.1_021276m.g) derived from phytozome v7.0 (chr-ID scaffold09565; pos 171773 to 172528 reverse strand)
tgttatctgcatattagtaaatttctctcttaatcttttccttttcttacaaatattaattaatagaatcacaattattttttcttatattttcatagaagtagataatagtagcttgtttggcggaattggcttcaattcactgattgggattcgagatctcgaaaactaaaatgaatctattcaactttagctcattggtcgttattttgtttacaatgtaaatatcattagcaattttctgcatggtcgtttagtgataatatcattatacttcaatcataagcatcataaatttatgaagaggcaaaggactgtaattattatttttttttttggtgccagcttcaatcgaaatgatttctaacagctacaaattgatgggaaagaactccatatttcaataattataagtttttatctcaattggggctattaatgatataagaagttaatgatgtttctactgacttatgggttttgttcctaggacagccaacatgatggctcaccatttagctaatttctccaacattgatgatggtattggttcactttgggttgaggaaatgcttaatctatacggcctttcattttatctaatgtttcttccttttctggatgaataaaatttcagtttttttttttctgcaaaagtagaataatcatgtttatggctttggttgttaaaaaatgtgccacgatttgaattttctcacagggtcttggcttgttgactctatcgactactatttc

SEQ ID NO: 42791 - DNA, 762 bp, Manihot esculenta
  Intron number 2 from transcript cassava4.1_000009m (locus cassava4.1_000009m.g) derived from phytozome v7.0 (chr-ID scaffold01551; pos 2280309 to 2281070 reverse strand)
ccatatcaagtcatatcaaggtgaattccccctgtatatatgtatgtgtgtgcggacatatatatgtacttatgtatgtatatatgtgtatgtatgtatcatgtgtatatgtatgtatatatgtatatgtattgctttccttggatattcataatctgtttgcataatgagaaattgtgagagagccaagtgacgtaaatatgagagatcattcttgaactcctagatttattctcctctcatgtgcggtagatttactgaattttgttaaaatcagaagataatttatcatttaattatggctgaaatttcagggataaacatgttttgtacacttctctatatgatgaaaataacacatggtattacttttggtcaggtggatgttgaatttttaaaatttgactcttgatatcatccgggtacttaatcaggatttgaactttgaaatcacaatagctcatgcatagtggaaaaataagttccatttagttatgattgtttgttaagccccagagcctgtgattccagaatgcagattagtttatatactatgctggcctcagaaatgttattaggcttaaatagaacattagctggggactgttacttttgtgaatgtatcatttgcctagttgtccccttgtccctggtattttagatattgttatttcagtacaaaatttaactcggcgatcttatattctcaacttattaatgtgcttattttccctctttttcgatttccttcattgaagggcc

SEQ ID NO: 42792 - DNA, 655 bp, Manihot esculenta
  Intron number 1 from transcript cassava4.1_014828m (locus cassava4.1_014557m.g) derived from phytozome v7.0 (chr-ID scaffold03614; pos 4032994 to 4033648 reverse strand)
gccttggccggagttcagttctgtgctcgttggatgcaagtctttgtttctggtttgtctttatgttgctgtgtttgcttttagtttaattttccgttcttctgtcttcaccataatttttcaaaattcatcttgagttgttagctattattattttatgttctcaatttaccaaactttgtgaagttcatcttgatttgttagctattattattttattttctcaatatatcaaacttgagagtagtttacgagtagtttctggccgtgttgatgctctgtttgcttaatgctgttgttggagggttaggtcactcgtttgatgattaaaaatcagtaagccagtaaaatgcttgcaatgcaataaaaaaccaattctaagttcccttttctcactctattctggcggtgattctgtttgggctttagtttacttgactggctatgtttgtggtttacccatgttaatttagagcttatgagatctaggtatctattttttaagtttttgatagaggaaggtttcatcatgtatggtcttatccatattttttcattgatggttattcatttgagtctttatagtgtggagttctagattatgccttttgtggtcttaacactgctagcttggattctttcttaatgattagaa

SEQ ID NO: 42793 - DNA, 563 bp, Manihot esculenta
  Intron number 2 from transcript cassava4.1_028312m (locus cassava4.1_028312m.g) derived from phytozome v7.0 (chr-ID scaffold01135; pos 213710 to 214272)
gtggcaaggtaaaggtattattgatgatattttatcaccagaagtttttcaagtatatcagtattttaaactaattataaacctgcccagagtgaaaaatatattcctcctttaatgtatttttgtacatgattttttattccctgggtatatcaatggtattttgattttcagtatataacagaattaaatattccggtcatagtaagaaagcacaaagtaaaatggtgggaatcattcaggaactctaccacggaaatagttgtaaaaaactggatacttagaaaagcatagtttcctactgtgtcgtatgctgataaattaactctgcaaggagagccatcatttggagtccagaaagcccaatgtcaggccttattagcagcagctaaaaccccaaaagaatataagatgatttgtcaacagatgttcaatcatcttacttcaggagaatcaataaagaaagaagaagtaaaacaatcatccagtaaagaatcctcgaagaaatcctccagtaaatcaagaaagaagtccagaaggaaagtgaaaaaacagtcaagctt

SEQ ID NO: 42794 - DNA, 695 bp, Manihot esculenta
  Intron number 2 from transcript cassava4.1_028644m (locus cassava4.1_028644m.g) derived from phytozome v7.0 (chr-ID scaffold12270; pos 157274 to 157968 reverse strand)
caagggcgattttataatcgagtatattggggaaggtatttttattgttggttcttattttttcatttgcactgaatcaagttctagttattctttttattgtctttactacaagttcttcatactgctttggtggagattcaataactcataatcaaatgtacaaaccattaccttatagtaacctcattaattatggctgactttagtaagattggtagaaaagcagacataatgcccattacataagagcagtggccgttaccagcatgacactatgactacttcataaattccaccacctctgctcccaccccaattataaaaagcacatgcttaaaaagaaaaagaatagttaggcatttttataaaatgaattttataacttcaaaatatccaactgtagctggtctccttttttaggagatctactcctgcctcctatgctatcattaagggatcagtattagcttctctatttgcatttgcatttgaaaagtttaaccatgatattctaaaacaaatgttactaaaacattttctcatactgtttgttttttatccttccactatgatatcctttaaagttgcagtccatttttctgtataatcaaggaatactttagatatatgtatatgtatattgctttttctggagtatcagttcagttgctgtatttctgtttcagtgattg

SEQ ID NO: 42795 - DNA, 838 bp, Manihot esculenta
  Intron number 1 from transcript cassava4.1_012606m (locus cassava4.1_012606m.g) derived from phytozome v7.0 (chr-ID scaffold03614; pos 1810677 to 1811514)
aacgaccttctatcggtattttgcccttcttttcttgaatttttgtttcttttctttgttctttagtagtttgttttattgggtttgtcatgttttgaattttttttttcttgttagtgttatagctttcttaattggatccattaccctcagagtaaactaagcatctgattataggtcggttagttaaagaagttcagaaacttatttttgtttagtgagacagccgaaaagttgaaggaaattcaaaatcttttagttgtagaagtttactgtctaaacatttcgaaaataaagactgaatattttgattgaattaattaatctggtcttttgtagtgtataaagatattgaatctttactgcttagccgttattgaaagggtgtgtaaacaaatatggtaatcatacttcctatagttcttcattgtgccgtcaggtttcctccttgttccttcgtgttagattcactgtttaaatccagaaatgtaattagattacttgctattgccatcatcgtcttgctgctaataagacacactcgatggcttttttgttaatggtgcttgaggattcataatgctaatgcatgttttcaatccatgagaagcttatcaatcatagatgacgctgttttcttcactattggctaccgagtcaatctttccatcaagctgaccatttagtatctttgtgttgatattatcaagtggttataatgtttagcagatgacgccgtagtctggcttatgctaggtttagctggatttacctgtaagtgtaatgagttgattattttgcaggagtcctttgagatccctcgtgggcagagttctag

SEQ ID NO: 42796 - DNA, 653 bp, Manihot esculenta
  Intron number 1 from transcript cassava4.1_028639m (locus cassava4.1_028639m.g) derived from phytozome v7.0 (chr-ID scaffold01701; pos 554566 to 555218 reverse strand)
accaggttggtgttgcacctccatgctctattatatgactctgaaggttatacatttagttagtggtcaatctcccttgcaacttttccacaattttcattctttgggttccatgtattctaatgtcttctgtcatgcgatgctgcttattttcatatagattgatcttttaagatgctttttattttctagaatgagaaggaaaaacaaaccgagaattgagaattttaaatggttgatgtatgtgcaactcctatcatgcaaatggatatctaaggagatgattactgtccagaatgagaaggaaaacaaattgatagaattagggatcttaagtggttggtttataggcaaccttttcttttcaagattaaactccctctagaagttaagtaacttgatctataagttgattccagttaaacttgttaaagtattctctgcaccattatgataaattagtttggcatttccattcttaaatgctgattctttttctatgttttatgttttttagcataaataattattttgttttaatacaatttaaagttttagattaatgttaaccaacctcttcttgactgcaatgcttaatgcctctagcattcactgcaggcacgtgataaatttctgtcattaaggaagagcac

SEQ ID NO: 42797 - DNA, 298 bp, Manihot esculenta
  Intron number 2 from transcript cassava4.1_021009m (locus cassava4.1_021009m.g) derived from phytozome v7.0 (chr-ID scaffold06631; pos 565625 to 565922 reverse strand)
aactggcttataggtatgtggttatctcatttattttcattggtgtaaattgtgtatatattcacagtatttgactgagataagagttttcacctgtggattataattactttttagttcctttaaaaaggttttttatgaggtattttgagtggttatatctcaacttacccatatttgtttttctctgttgctggtgtgataatagctttagcaatgccaagtgtgagttcatttttttgttttccttcatttaccagacttcaattcttctgtgaatgcattattttcagtatca

SEQ ID NO: 42798 - DNA, 649 bp, Manihot esculenta
  Intron number 1 from transcript cassava4.1_021009m (locus cassava4.1_021009m.g) derived from phytozome v7.0 (chr-ID scaffold06631; pos 566046 to 566694 reverse strand)
tgtaagttgctatttggtttatatgcgcatagagctttttggtggggttgaggttttagtttggacttaaaggaattatttctggcagataatactgagttctgttctattgggaataaaaattggggaaatgtgaaattggaaataaaaaaagaattgggtttctttgagtatgcgtttgctgcctctgtttttggtgatcgagaaagttaaaggaacttgaaaattacgcctttggaatgtttagaagagtcagacagctgaagtataagaactgtacagccctttttactgacaaattattaataaatagtaaattcatttccttgttttacgtataagaattatgaaagaagaggaaaggctaaagactttatgtttaaatttcttctcgaggaaattgataagtacagctgaattattttaacttatttttgttggatggaatgtggtcttgaaaattagatttgcgtgattggatatttgagttcaagtggtcttccggtggagttgtataaaattgaggttctgcttaacatgctgttgtctttttaatcttccttgttcattcaaaatttgtgttttttaaaattccttttgtatagcctctaaaatggcattgtgatgatcagatttgacattgaaggat

SEQ ID NO: 42799 - DNA, 1042 bp, Manihot esculenta
  Intron number 2 from transcript cassava4.1_019311m (locus cassava4.1_019099m.g) derived from phytozome v7.0 (chr-ID scaffold03614; pos 4085741 to 4086782)
ctccaccagtatcgcctgccggctctactcctccggtatctcccttctctggtaaggtttgctttcgatccaatcgaatgataatcatggccctggtctttttacaaaatgcctaaaatgacctctcctaagaaaccggagatgggcgttgctactagaaatatccaaagggcagtaggtttgcaaatttaatagagtgaggctaattttgtcatttagcggtgtgggtctgcccagcaattggataatgataatacacctctctatttaagtgaattattgatcttgccgccttggataatgacattttaggtcgttgtttgacgtactttttatgcatgggtgttggccagctcaggctaaccatacttaaccatgcgtggttacttgacctgttagtttaacccaattgcgatattacctttccttttttgacatgcaattgcgatattatcattattaacaatattgcaatagagtatctttaaaaaaaataaataagggataaagcaccagttgattttgtatgaaattatcttgaacaaattcttatgaagagtgatctagtgtacccaaatttagttatgacaagcaggtgtctgtagtagttgattttgaggcaaaatataaagccaaatgaatgaaaaaatttatagaatacaaattgaaaatttctattgtgtattgggatggcaagtgatgatgctagctcctctattaatcttgactaggtggaactgaactttgctttgtgtttgtctattgtatcgcaaatgggttgtgtacttgctatgcatagacgtacgttttactcatctcatagtaattataaaagaaagaatgaggccagtagaataatagtattgatggtacgctgagccatgtgtgggacaagtagtatatgatcatgagctcattttatgctcataagctgcatgtatttgtatttacttaagatgagacgattgtatataaatgctgatgagctgttttgttatgatatgaaggaggcagagagtcctttcggtttcgaagaagatca

SEQ ID NO: 42800 - DNA, 727 bp, Manihot esculenta
  Intron number 1 from transcript cassava4.1_009815m (locus cassava4.1_009808m.g) derived from phytozome v7.0 (chr-ID scaffold03614; pos 2886380 to 2887106)
attctttaggccttgcaggtaaagatctcaactgggtttgtgctcttttgttctctcactcattatcctttccgtttgggatttgtctatatttgttctctgtttatgtagtttcttatctaaatttctgttcttgatgaaattaatgacattggtagtttgatttgtgtttttttttttcaattacgaattttaaataaagataactttcagcagtgattttgtttttgccatagataccttgctccatctttttcaagaattttgctttcctttcgttaaagtggttttctggttctatctatacctatttctagattacgattgtttggctagaattgcttcgttttccttgcctcatgttctctgcattttctataaaaatttctccttagtagatttcataaactttgactgtgacctattgatgggttgcgggtgagaagctcgtattaaattgtaaatactgctatggcaaatgttttcattttcctttgagataggtaagagctgaagagtaattataacatcagcagtcatctcagctggtaatcttacctttttctctcttttgaggaatggcatttgtttaggatcccagatagtgaagcttttatttcatcagtctttgatacttggttaaattacagtgattttaacacatttctgttttgtctgatgcatcttggatgttactttaactgtttggctgatactgtgatacagt

SEQ ID NO: 42801 - DNA, 557 bp, Manihot esculenta
  Intron number 4 from transcript cassava4.1_009815m (locus cassava4.1_009808m.g) derived from phytozome v7.0 (chr-ID scaffold03614; pos 2887931 to 2888487)
gtccttttggaacttggaaaggtgagcttctatgtctgtagttgctttgtccatgtgtttgattcgtttgcttcttagcctttgtttatttcttggaggataccttttaggaaaattttccatatttttggacgtttaggaaacgggtcaatggaaaatgtttttcttgtcaaatggaaaatgtttttctgtcaaaaggaaaattaactctttttttttctaaaagaaaaatgacttactttattgaaatagaagtcattttttttaactttgagaattttattaacatcatcatatatacatttattaatgtttaatttttaatatcacaaccaaataatagaaaataaaatatttttctggaaaatattttccacccaaaacatttttgatctaatctatttttcatggaaaatatttgccaaatatagtcatttctccaaacaaatggagccttagattgtaataatttttccctttatggattatactaattttggtattttcttgcatctataacaggtggcagggagaaggcacctgctgctttttgtaga

SEQ ID NO: 42802 - DNA, 843 bp, Manihot esculenta
  Intron number 1 from transcript cassava4.1_029418m (locus cassava4.1_029418m.g) derived from phytozome v7.0 (chr-ID scaffold12115; pos 29546 to 30388 reverse strand)
tgatctcaacaagtgtgaaccttgggatctcccaggtatactttttaatttctttctattattcttcttcttctccttcttgtatctcttctattcatttgcatgtgtattgaatttgaatgctttcttatggtttctgggagttgattttgaatgctttattgagtcttgttgcctgactataaagctagtatcctaatggcttgagtctccttggttaattggagatataatagtaatagcaacatgtatcacttggataaatactccttcggatttatattattggtctttgtgttattgctgtagaatgtcattgttatttatctaatcccatgtttgtaaacaattgggaaaatgagcaaaaaagattttgatcacagaataaccagatgggttttaaggatcacctttaactttttaaatatatttatataattatacataaataactgatttttatttctcagtactatgtaaattaattaaacgaaaaataataataaaagttttggactacgttcctccaaaaagagtccattgtattataacgttaatattcatagaatataatcaataggttttatctcattggttttgaagtcattttcagaaatgaaatattttgagtttaaattttaatcaaaatcaaatatataaaaaaatatttatagaatataaaatgtatacaattgaaaattatataacgttatctattggcttgattatttcagcaaatcaattaatacacatgttaatcatctatttttagccatctaaaactagctcaaatgtattagttgagcgtgacaaaatcgaaattttggtgcaggcaaggcttcc

SEQ ID NO: 42803 - DNA, 503 bp, Manihot esculenta
  Intron number 2 from transcript cassava4.1_030618m (locus cassava4.1_030618m.g) derived from phytozome v7.0 (chr-ID scaffold09876; pos 237329 to 237831 reverse strand)
ctactgggaaagcagatcgtgcaacagtggagcaggtgaagatcagttgaagctccctgtggcttcgtcctttattacctaccatttttttaagcaagaaagtggcaattacatgtagataaatttatgtgcttaacttaggtttatgtgtgcccaggtttctgttaaaatacaatttgattaaatgtcgtatcatgttctgtgcgctaacgttgctggcctgaagtatattgagttgacattgtgcaggtgttcatgtggaacgtataggggggctatcttcttgttttcttacctgagaattaattcatttttatataattgcagtaatcttataagtttatttgtcttgatataggtttcgcattggctgtcattgtgcctctatgttcttatactttattgatctcataatttaatgatataattctctagatgatttttttttctcctggaaatatattatattttgttgtttctaggccattgatcctagaactccc

SEQ ID NO: 42804 - DNA, 891 bp, Manihot esculenta
  Intron number 1 from transcript cassava4.1_004908m (locus cassava4.1_002445m.g) derived from phytozome v7.0 (chr-ID scaffold07571; pos 620656 to 621546 reverse strand)
ttgtcggtgagactggtagtggaaaaactactcaggttagttagttaataccttttcccctcttcctaggctatagggttcctgcatattgttggaagttgttacttgtcggtttcgttttcgatttttggattctgcatggtctctgcatcgtcttctttttgggtgttctatttccatccttattggtgttgaattgtatatggagcttgcgcatatgttaatcgatggtaaaggggagaaatttttttgaattgtataatgaattcttatattgtgctctgagaaatcggtgaagtttacaagagtgtgtaaaacccccaaaaccagctcccttctcttatactagaggaagttggtgggcttgcaaatccgaactctcttatgtagaggaatacatagggtgcagcgtacacatttccccatgcgcttatgtgctttaagttcctcctcttccttgcccatgtttcagcccacctgactcttctatctgtatgtgcaacttgtgagggactaggaatagagaataaatgaagttatgttgattgcatgattggtaaggttttgaactgcaatgcagttgaaaaagttgcaaactcaatttcgtttcttatgctttttatttgtagacatcctgaatttcaagttaactattctttcttcagccattatttctgttgttatattcgacatgttcccttctgcacggagttttatggatgtggtgtgtttcttttcttatttctgttcatttgaacatggtcatttattgcagtagtgcatgtaacaatttataatgtttttattttaatgattgaacaatatataatgttgtggatctttcttcatgttccagattcctcagtttgtcttggaagctgttgacataga

SEQ ID NO: 42805 - DNA, 752 bp, Manihot esculenta
  Intron number 1 from transcript cassava4.1_034383m (locus cassava4.1_034383m.g) derived from phytozome v7.0 (chr-ID scaffold09360; pos 30395 to 31146)
tgggttctcctccaagtgctcaacaggttttgcttaaataattattttgtaacccctttttctctttaagttttatcataatctgtttcattaattttcagttgtttctctgaaataaaatttacccatgtgtaaattttgtgctcttttcctgttaatggcaatgattgagttggtcatgctcagcgtactttcatctgggatattggttgttgagggatttaaagagggcttttaaagtagataaaggtgattcttgagaagcattttaatattctgttcctgggagacatcactagaccaggcaactggactccaccccacagtttgactccagaacattcttttgttttatctgatcattttactatttttatggcctcttttattatttggttttggatttcaaggtatcgtggctcttttcagcatctttatttcttcaaaatttattgctgctagtttctgcaaggtggttagttgtattaatctaatcttcataatcaggttcaagaagtcttctgcttctccacaattttaaggaattcagctttgcatttgtttttcctaaaaaatcttgatgtggttttctttcgttgataagaagtcactaacattgactcaaggaacacaattcactatgtgtaatcttgttcctgaagaaaattagtacttcttcatgatgtagtattcaacttgcgtttgcatttattatgctctgtgagtttggcttcaggatcccaagtccagtg

SEQ ID NO: 42806 - DNA, 421 bp, Manihot esculenta
  Intron number 1 from transcript cassava4.1_032020m (locus cassava4.1_032020m.g) derived from phytozome v7.0 (chr-ID scaffold09151; pos 1052411 to 1052831 reverse strand)
atacccaaggtatgcattgagtacatgatattgccatttttgtgatatttacctctcccatttccttgcttctgtttgttttccttattgaaactggaaatctgaacataggagacaccacaaaatttatatattagttagtctgcaaaataaatttattaatgaatagcgacgagtccgacagaatcatagcgctctcaaatattaatttttaatagagtacgtcatcagatataaatttatatttaataggttgatacatttgatcttccatattcttaaaaaataaagttaaattttagttaaattagaattagtttagtataattataatcagtgaatacttttcacaaatgcaccaataattcaaacaatttttctaatgtttcctcccttttgttttggcagttcatcattgcca

SEQ ID NO: 42807 - DNA, 413 bp, Manihot esculenta
  Intron number 1 from transcript cassava4.1_033465m (locus cassava4.1_033465m.g) derived from phytozome v7.0 (chr-ID scaffold09565; pos 364213 to 364625)
tctttgttgaggctttgattcccagctatcagaaagtatttcctctccagtgatcagattcagaaacgctattttgtttcagttgtgaagtgctgatatagaacagaaattttgaataccatgtcaaaaataattggaaactttgatggatcgttgattttctggtgttataaatcaaatgcatagcaaactttactagctggaatgactgctgattatgttactgagatcttctgcagttaaaattaggttggtattgtcatgtgtagtggcatcttataatccaataaaaatgaggtggagagtagtgctgtatattgaacatgatcactattctttatgtttcactcttaaaggctaattcatcactgtgttctcttgcttccttcaggactgtattgctttgctggcat

SEQ ID NO: 42808 - DNA, 663 bp, Manihot esculenta
  Intron number 3 from transcript cassava4.1_019641m (locus cassava4.1_019641m.g) derived from phytozome v7.0 (chr-ID scaffold09151; pos 976199 to 976861 reverse strand)
ttataaaaggtaagcctattacgagttgtttttttttttcttttatatttttgtgttttaacggttgtactccttatgattttgtttttactgtgtgggagtaatgtaatccatattatatttctgtaagtgaaagaaagcagtagttttcaatcagattattatgatgtgctttgtataaataaaagcttccatgacagtttttgctatatttatcaaagtatggtatttgtatttttatttttcaactaatttttttcaatatttatcatttttttattaattttaatagtttctattgacttttatgatttgagttggttctcgattttcgatccacaaaatgaagatttaaattctcaaactcaaatcttgattcgacaactatgattgctagatgttggtggcttttttctggcattaccatccagtaatctcccttagcctctttagctttttaacttagtgttgcctggtataagaaaccatttcttcattttccaagtgaataatgtaatcttgtacagaagggttaaaatgctagaagcaccaaattattttcttagagattttttactcttcctatggcttatgaaaattttgacaagatgtattctaattctatttagaaaacttatttatcctgtttcatgaatttatagg

SEQ ID NO: 42809 - DNA, 560 bp, Manihot esculenta
  Intron number 1 from transcript cassava4.1_019641m (locus cassava4.1_019641m.g) derived from phytozome v7.0 (chr-ID scaffold09151; pos 977061 to 977620 reverse strand)
cggccaaagtgtcaccgttcactgcactggttttggttagccactctttctctttcgcttagcgtatttacatttggtacttgaaattttattttgctgtttggttctgcggaagataatagaactttttcctgaatatatggtgttttttctaattagggaatttgtctttcttcatgttgtataatcattgtgtgccttctaattggtgggataattagatcagatgttcgaatatagagtttgatttgctatgtgtgaatatccgagtggaattttttttttcttctgagttgagggtattgtattattgaagcaacgttaaacacgaaattaaatttccatgcccgattaatttgagtgagaagagatatttgtttgcttgtcctagaatagtgggaaaagaaaaaaaaatctgcaatttcagtttagctcgtccttgcccagaaatccaaaagaaataatatggtcaaatttggggatagtggtttattatgtagaatagttgggcttttgctgaaaggcttcgtttctaatgatcttctatcctgcagggaaaa

SEQ ID NO: 42810 - DNA, 1032 bp, Manihot esculenta
  Intron number 1 from transcript cassava4.1_024497m (locus cassava4.1_024497m.g) derived from phytozome v7.0 (chr-ID scaffold04681; pos 585524 to 586555 reverse strand)
gagttgttgggaagattttgttcgctttggtgaaggttgaagaaggatgtgaaaatggacaatgatctgaagatgtgactgtcaggcatgaaactgaaagcactcgaagcagcactccatgatcaatcaatcaacgactgcatgattagttttttttttcttttcttttttctttttcttttttttatggtagaaacttagttaaggggttggttctggtattatacatgtgactgattactgatgcggacaagttttagttgaatataaggaattgagttcaagattttgtcttaattagagattgcatgccttttctgttaattgtctgattatcttgcaatctttttattgatgattcaatcgtgtttttagtagaaatcataattatagtaaggattgtttagaatttgatataatacttctttccttttttttttttttttaatcattaaaaatcaacctactgttaaaagcagtctatgttataattactttttttttttgacaagaattttcatttgctgtaatcagtctatggctgattcataaggtaaaagactgataaattatgtataagagaaattaaatttataagtataaaattagttgtttaaaaattttgattaactagttccttatttctgtccaaattcagtgtagttctatgtctatttaggaattaaatctgaaagaaaatttaatacggtgtcagttcctttcagattcttgatttcttaattttggcatgaattggtatgatttcaatttaattttctaatctttaaattattatatagttattttgatatataaatataaatataaatatattgaatgtgtataatatatctaacaaatcatatattatacactttcaatataaccattgtatttacaaaattgttgtacttttaaatgcgattaatttacttttttttattttgtattgcaatcaataagtttttaaaattattttataagaattcctgtttattgctatggctgattcacaaggtaaaagtaagataa

SEQ ID NO: 42811 - DNA, 546 bp, Manihot esculenta
  Intron number 1 from transcript cassava4.1_010467m (locus cassava4.1_010467m.g) derived from phytozome v7.0 (chr-ID scaffold01551; pos 1254436 to 1254981 reverse strand)
atttctcgagctttgttaggcagcttaacacatatgtaagttttttttcttaatagatcttcaattctgaatgaaaaaaaattaaaagaaagtgggtgaacattgttttgaatagatccagtgtaatttcatgctggttgtgttgaattctctccaatgttcatgaaagagctagaatgtattattattcattttttgtttaaaaagaacttttggttcttttcagtaagatctggttgatcccttttccagcctattggatgacctaaaaagccattttgttagttcatggttggagaagagtgggagtctgccgatgaaaatagagaatatatagaaaccctattacttggttgcttaagcctccacagtgcctggacatttaatttgttagaacttgtttgatatttgatgtgtcgtttttaaatgtagttgtggaaagagtttttagttcaaagatcaaccgagcttaatttgttttcgatttgatcattgaggaaggaaattttggtttatgtaggggtttagaaaggttgatccagacag

SEQ ID NO: 42812 - DNA, 329 bp, Manihot esculenta
  Intron number 1 from transcript cassava4.1_002017m (locus cassava4.1_002017m.g) derived from phytozome v7.0 (chr-ID scaffold03975; pos 135115 to 135443)
ccaaaggatacaacttcgcttctacctgggaacaggttggttttctttttatctactccaaggataattctccaatccaaagcttgctctatagcttccttattttcgatctcgctatagaaatgattctcgactccatcattgtgtgccaattgagggggacgaaatttaaaaatgctagatctgtaaccccagtttctcgtttcctactattgaattggatccaatctgagcatagattttacatttgcggttaacaagtgtgatctatgcttcgtttcaagaaatgcatcgttttcactgtcttccttttgattttgtggtgcaga

SEQ ID NO: 42813 - DNA, 743 bp, Manihot esculenta
  Intron number 1 from transcript cassava4.1_011896m (locus cassava4.1_011896m.g) derived from phytozome v7.0 (chr-ID scaffold05140; pos 86453 to 87195 reverse strand)
ccaaattcagtgtcgaatttgccttgaaactgacggtaatatttcttccccctcttattttcattgcttaggtttcaagatttctaaagctttcttgtcatttgtctcaagttactctttctttcctgtttgatgtgtgtttttggaaaatctgacaaaatataactgtataacttgtttgaatttgtatgcctacgtttggatgtatcttctctgtgtttttccctggattcttgaaaatgtagcatgtttttcattatttgtttgttacattggttcttttttaacttctcatcgatggaggttttgtgctgcttcttttttcttttaggaaatcagttgtctttttcttttttattataattattagtattataactattatctaatttactggcggctgcaacagttgtaaattaagaggaatgatgtcgcttgactctgaagcttttgctattttctttgtgatttttcttttggttattatgtttcatttttgggcacaagcacgaatttgagtcctgttgaaatgtaaaagaatgagataatcttttctaacttgggactgacagccaaggattttgttatggacattcatgtgtcccaatacctatgcgtaagaatttttgcctacagattaccaacacttctcatagcttttgttttatgttagaaattttggctgatcctcatttatttcatacctttgtccacttaggtagggattttatagccccgtgcaa

SEQ ID NO: 42814 - DNA, 455 bp, Manihot esculenta
  Intron number 1 from transcript cassava4.1_001065m (locus cassava4.1_001065m.g) derived from phytozome v7.0 (chr-ID scaffold03614; pos 182653 to 183107)
tcatatcatcttttcatctacggaccctcgtgacggtagttgatctatcttctttgttttaatcaaatgtagctttcttttctcaactgggaatttacccgaataaaaagagtgcatcgttgttgttgttgttattatgagtgattgcattttcccaggaaagtttaattttgatgaatagcgtggtagtgtgatagtcttgtaggcgtagctatggccttttgcaggcttgcagtaacttggaggagaaagctatggtggtcttgtgtgttctatgaaaactatccaaatcaaaatatttttctgtttttacagagcatcatcagacatggggcacattgaaaatggatatttatgtggagtactaacaaattttcagattgtttgaaaatctacatgatccttatttctttttctttctggtgatgcagctgcagctctccagtctctgaaaa

SEQ ID NO: 42815 - DNA, 589 bp, Manihot esculenta
  Intron number 1 from transcript cassava4.1_018433m (locus cassava4.1_018433m.g) derived from phytozome v7.0 (chr-ID scaffold00341; pos 226213 to 226801 reverse strand)
cagcgcaggtattgcatttattattagtatttttattattttcaccttttttttttgtttgaattgatccctcttgttgttacctgattcgattttcaaggtctatgcttgggtcttcgtatgtctttgtaaaatatttttttagctgttctgattgaacgttaattgtgcatgtgctagggctacttctttcgccggccatcagaactgtaattatacggtgtcgttgcttactgaattgtacatagtgatgtgatacttaatcatggttgaggtttctgataaaaatttatgttatagcttcggatggtgaggatatgacatgtcgaaaagattttgaaagttaactgttcaaccaaattttggaagtttattatttgaaattaattgttatttatgcttattccaatttcattctcaaacgcacctaacatgttttttttctttttaatctaattgtgaaaattttcgatttctcatgttgaggaccctgaaatcttgccatgtataagaacttcaacttttggtgctgttctactggtttgtttgccttatttctgcaaatttttcaggtcctgtagctgaagac

SEQ ID NO: 42816 - DNA, 998 bp, Manihot esculenta
  Intron number 1 from transcript cassava4.1_000125m (locus cassava4.1_000119m.g) derived from phytozome v7.0 (chr-ID scaffold08847; pos 507998 to 508995)
gatttttcccctattaaagtgcattatctcctgaagttgtgctttcaaaaaattaactggatcctgtgtgatatgttgaagaatgcttgattggttttgacgaaaaagagtgaatgtagaaaatttcatgttattggaagactgtatatttgaaaaaaaaaagactttaaccatcttttatttaagactatagtagtaagattgcttcaatgcccttgtgattcaaaggatgcatccctagtaatcttctatcatcaataaaaattttaactggttactttgatggatcttataccaaggcgtcgcgtacaagtgataccaaaaagtaagtggtgatttgtgaatcaaatgccttggtaagtacaacatattgcattcttgataataagaaatggaggaactttagaataaagcactaggtgaattgacactttctcggtagattgagcacaaccatccttgagaggttctaattctttggctagtgtctctagttaatttagatcatcggctttaggttgttatttgaagtctttgtaaagttctacgaggctggtttagagtgagtgtactggatagtgtggcactgaggaaattcaagtcttgatatatataagttcctgagcatacgaactttatagcttgatattgtttcatgttcagctcgttggtgctaaagctttctctttaatgggtttgtactgtaacgattatattgtaaccaagttaatgttctctggtgattctgtaactcagtgtaaattgaatgcatagtctttaatgagagaacctggttctacaggtgctggaggtgttagttaaagtgacatatgcagcgctgatataacacagagttttgttatggggcttgatgatacactcattgatatattgtatatggctgtactatcaaattggataacgtgcaattgataatttgatattctttcgttttggtttcaggttagagtaaacactcgtcttctttatcagcaaac

SEQ ID NO: 42817 - DNA, 592 bp, Manihot esculenta
  Intron number 5 from transcript cassava4.1_010838m (locus cassava4.1_010751m.g) derived from phytozome v7.0 (chr-ID scaffold00631; pos 80559 to 81150 reverse strand)
ttggtagaaatcactttctgcatagcattgaggaggtaataccttacattttgttcaattccgttgtagatgcttgtctttttgatctatttgcaagatattgtacctacttgtttgtggattatggataatcttcaattatatttgggatgcttatgttgtgattacttgaagtattataaagaatccttttattgcttttcaatcacttatcagagtatcttttccgtgtatcctctttttgggttcttttctgtctgtttgtttttcttatttctgtagaactcatcaatgttacatattaatgttagttttttaataattaaaatgctgtttagtcgcttgtatttgtaattccagacgacagtaattgttgatattatgttattgttttcaacctatcttggaatatttccactcccttttttgctttttatatgcatttgatatcatttgcatgcggtttcttctcttcattgcagattaattatttatgaataagcacttctattttctagtatggttttcatgtattggaaatttctttattttaattaagatgatgcttctttttcccccttttgtctaggat

SEQ ID NO: 42818 - DNA, 438 bp, Manihot esculenta
  Intron number 2 from transcript cassava4.1_010838m (locus cassava4.1_010751m.g) derived from phytozome v7.0 (chr-ID scaffold00631; pos 81699 to 82136 reverse strand)
cggcagggttcaaatcaatcaaacaggttttcaaggtaatttcgcgctttgttaaattttctattcaataatctagtttgtgtctaactaggctttgatttaagttctaggcttccaaattacttgcaatttcactgtatactgttaagggttttggagtgaagttgcggattgtgatggaagacttgattcagttgaacttgtatgcaatgtcaactgtcacaaatattacttttttaaaacactgattacaagcatattgttatcttgaaaggcttgagatattcttgcaagagggattatcacagggtgcttcttctacttactctccctttctctctattcttttttttttaaatatttttatttttataatgcttgtttctctaacattgttgttttgtatttttaggatattttagttacagacttaaagta

SEQ ID NO: 42819 - DNA, 861 bp, Manihot esculenta
  Intron number 2 from transcript cassava4.1_024368m (locus cassava4.1_024368m.g) derived from phytozome v7.0 (chr-ID scaffold05335; pos 754142 to 755002 reverse strand)
aaagcagaggagaccttcctgttcgtttcttggaggtaattttgttttttttgttaccttttcgtacctgcttgtctacgtcgatggctcttttggatgttctaaatatcctttacttttctttgtttctgtgatcatctgcagtgcttatacttcttgattctttctttgtatgcacattttgatttgtgaatggacattcatttatcaataaatatcatgtgggtatataggatttagtttatacatttgaagttataggagatgcatgttggaaaaattctttatgtttggctagatttgtgaaatcaagaaaagaaatgaaataagacttctttcacttaaacaataaacagcttttagcgaatctgcatgctaggttctgaaaatgcatgcacttagttctacatcattaatgagatctctaagtcactaaataattctttgagaaaaaatagccaactgtatactttaattaccagttaatcactaatatactagtagatataattaaaacatagtatagtaggagtttcagcacaccctgatcctgttttggcagctatttagctatttattctatgttgaaaacatgtttcctgtactttgctttgataaaaatcctactaatttcatctttcattgcttttctctaacacccttaaaatctgcttatgagttgtaatgattgtagaaatgaatttctaacattatcttcaaatcagaaatgtgtgatatttgtttttcattttagaaaaattcaacaggcttagtaagacctatttctcttgatattcttgatagtatcagaattctatggttacagagcaacaagaatcccaaggagtttgctgaggatct

SEQ ID NO: 42820 - DNA, 473 bp, Manihot esculenta
  Intron number 1 from transcript cassava4.1_027265m (locus cassava4.1_027265m.g) derived from phytozome v7.0 (chr-ID scaffold06631; pos 636711 to 637183)
aaatttcattggccaattctagtatgtatttcctctctttgcttcttttctcaagtattattctcttattttgtttttcctgggaaaacccttctgtcttactttgcaaagggtaaggtggtaaactataaatccttcttctgtttatttgatcttcacaatttttcaacagctctaaacttgagtcattgaatataagaatataaagtttttcattttccttgcataatagttcacaacattttaaattaaaccatattttagtatctcaaaaaatcttgaaatttcaattgcatcaactatccggttcattttcaaatcaaactaaattgaaacattaaaattcaatttcacttttttattaaatcaaataaagttattagaaaactaaatccggtaataataagatactaataaatgaagaagtaataatgaagcagaatgaatatgatatttgacgtggaaatgcaggg

SEQ ID NO: 42821 - DNA, 938 bp, Manihot esculenta
  Intron number 1 from transcript cassava4.1_001558m (locus cassava4.1_001558m.g) derived from phytozome v7.0 (chr-ID scaffold04437; pos 73593 to 74530 reverse strand)
agaaaagagaagaatcttggcttcccatctgaaaggtaaattcttttacattttcttcttcatcgccacatggttttgtatcttgcattcactttctattatccttgtacattttctgcttactttgttgagtttctgtgagctcaattgattgagtccctgtctatgttggaagttcgtttcttttcaccattagatgagagatgaataggtttatgcattggatcttttgtagttaattctgataaatcttgctgtgtgaaataaaccttcttctctcttttgatgtatattctgggtttatatgattagatacttaggtaatttcttcactcctttcttttcctccttatatttataatctgggtatattccatttctattaaaaatttctgcacttcttcaaagttcagttatcgtggagtatgctaaaattagtgttgggttttataacatgcgagttttctatctcttaattttcgtttcaatatcctttggttttctggagagcgggagatccattttaggagaagagcctcagtctacaactggtagattactaattttttgtgcagttgacgagtataaggattgtatacgttattttggttctcaagtccgtctcttgagttgtgagagtataactttaagaagctttattgggtttttagtgagttcgtaggaataatgttgcattccaccaaagttccaaagttccacataaggagaaagtggatttttggagtaatcagttgttttgaaatttacagtaatagtctctttgcagtcttccaagcataacttgcattgtttgcactgattctatttagtatgattccttgtttccttttttctcccctccagaccgtgacaattcttcaattcaagtaaagcaatttatctttgtgtagatcagagattccttgttgattctcaag

SEQ ID NO: 42822 - DNA, 420 bp, Manihot esculenta
  Intron number 1 from transcript cassava4.1_021203m (locus cassava4.1_021203m.g) derived from phytozome v7.0 (chr-ID scaffold09120; pos 134242 to 134661)
caccatcttcctctacttttttttcttcacctcaggtgattaattttctttctttcaggaattccaatttcttagcatatttatatgatgctgtttgttcatctactttacatgatattgtgatattctctgtcctatcttgaatttgaataggaaaatggagataattaccttcatctcaataatgaagcagtcaccttttctgaataaaacttgtttttgcctgaaacaatcaacagatagaaatttacttctttctagtatagcaatagaaacgcagagatgagctaaaggaataaagttttgaaatcaaattcttcagctttttttaaatcctcctaacataaaagataagataagcttattaaccttttgattgcttcaggctcaagtgttgcagaaacacctcctctggaagaa

SEQ ID NO: 42823 - DNA, 693 bp, Manihot esculenta
  Intron number 3 from transcript cassava4.1_004987m (locus cassava4.1_004987m.g) derived from phytozome v7.0 (chr-ID scaffold00080; pos 410539 to 411231 reverse strand)
agtttttgagcgcttgatagagccattttgttcaggtataatgttcaggcatgtgcttttaaccaagccctcacaccatacatggcacttctattcatctcatatgaaattatatttttcatgtaaatgtcattagacctttctatgaaacttaaattctaaataatgatacacattgcagtcattaagccagttaagtacacgtgcttctcctccctcccttatcaatgtgatagttgtatgatgtgtacctgcaattttttttatgaaatcctttagtttgtagtaataatggatttcttgtttggttcatttaggatgcatctggggagtcaaagttttaccattgtgatacagtaaaaccatagcctctagtgatatccaccagacttcattttttaaaatccttcgtgtttatggttttattcatacaattgcccatatatgagatggtgaattgtgccttaattttgaatgctaaatgaaatacagtggtttctattaaaaattacagcatatttggttaccaattagttccttgcaatgaacaagatctctttgacttggcattacatagcacttcacaaatgatgaaatggaattcttggaaagtactgaagaatataatgttatattgttaattgattgtgattattggagtaatatgaaatttattgtcatctgcaggtgttt

SEQ ID NO: 42824 - DNA, 460 bp, Manihot esculenta
  Intron number 4 from transcript cassava4.1_030657m (locus cassava4.1_030657m.g) derived from phytozome v7.0 (chr-ID scaffold01284; pos 41166 to 41625)
ctgctagtgagctcttccaggtatgggaatttcacattttggatgttctgtccattagttttttatttttggtcttggatttgattattatatctttttttatcaaaattttactaacagaagtctatggaatttgttgtacgggacagtttctcttccttcacccctgaatttctacatatttgtcttagttcatttcttctcccaactgttactgactttttactctcaaaattttatgtctagtttgatttgattccggaaattgtaaagaaagtttagattttagccaccaaaaagctcttgctcaagtcatttaagtggtctatttaaaattttaatataatctggttctacttgtggctaccagtagtttacttttccatcaatcacaacagtcatgaattcacatttagtattttgttgtaatttgtagagagcagtgagcatcaccccagtt

SEQ ID NO: 42825 - DNA, 508 bp, Manihot esculenta
  Intron number 1 from transcript cassava4.1_009888m (locus cassava4.1_009888m.g) derived from phytozome v7.0 (chr-ID scaffold04151; pos 515908 to 516415 reverse strand)
tcatcgccttcacggtgaccgacggtgagcctccaaatacattcataacttctcttcatcatcttcttaattatcatattttttgtctttgtctacaatcactacaaaaaaataactattttgtgagtaatattttcttcattaaaaatataaattttgctattataaatattaatagcaaaattaaaatttttcaataattttaggggagagatcatgtcaccaatagctagttatgtagtgtggaaggacaagatatgaattatcacccatcttatctcttttaatcaaatgagctagcaagttaataatagaccatgtgatgagaccaaagcatttatgaattatgactttgatctgaagacaaacacagtctagatttgctggacatgtctttaaatattagaattttataataattaaaaaaaaatgcatcacattgcttagttcttcaaatttccctgatgggtttcagaaatattcatgtaaatttcaggtttgttgccaa

SEQ ID NO: 42826 - DNA, 616 bp, Manihot esculenta
  Intron number 2 from transcript cassava4.1_020559m (locus cassava4.1_020559m.g) derived from phytozome v7.0 (chr-ID scaffold04486; pos 92137 to 92752 reverse strand)
aaattgctaaggtactgatttaaatattataatttgtaggtcatttttctttcttggaccaacttgaagtttgttgtcctttttccatgttattactgtgctgctcattgtcctggaatattcactctcccggtgtagttgtgaactttaatttgatatttgagcatgtgtgtcaacttgtgaatcttgctttctcaattatgtcatcaggtgtgtttgtttcagcagctattaatgatgttaggcacgtgtattctgtttcttcctattctattttaaatcctattatatttgatcagaacggggcaaagaacatttcatggtttaatgattacagaagtcgacttgatatgcatatatttttaaatatctgtaactctccagtatttgggcaatgaaagaagaagcatggttcaaaatggttaagcatgccttagtatcttgaccttagacttccaacataatcaggttaaagctactatatatatatataattttttggtttcccttttcttttcttcaaaagttattatgtctgatttatagccttgctttcgtcttttgaaattctaaaatggagtttgcaaaacttctgcaggtactaaacctggagaat

SEQ ID NO: 42827 - DNA, 971 bp, Manihot esculenta
  Intron number 3 from transcript cassava4.1_012021m (locus cassava4.1_010773m.g) derived from phytozome v7.0 (chr-ID scaffold01127; pos 854625 to 855595)
cattggctggatttggttggttgtttcgtttctcctttttaacttagttgtacagtcttgaagtatatgcctgttggtgggatttacgttcttggtttttcctttgctgcactatggcggataagttattttcttttactttctatctgtgatgatctcgtggaattttatgattgcagtttgaaattgtattaattttttaaaaggtaaataaacttgatggaatctgttttgtttgaaaagattgctctgatgttgttaggcagggctgagggtggaaaatttttaacatatataattgtattcagaaagacgaggttatctatatctagctgttgttatttcttcttctgcgttgcactgcgttccatataggagtatattaagtaaaggtaatcactactagtagtgattgtgcgttgattttacttcacttaatgctggctacctcgtatgggatttttagttcatgtccgtgccgcatatgtgaaattgtccaagagactataatgttcatgtattttattacatctgaggctttaagcatggctatgaacagaagagaggaagcccacaaatgacatggcagtaataaatgactgaactgctgaaccatccaactgtaggttgattccaaattcatagttaagttttatcttgcagttttgaagtatgattgcattcttcttaaggcagactaaggatttattagccaggcaactaatcaggaatttttgggaagtgtttttacttttcaaatttattaattttctcttcatgttcatgaaaaaatgcattgaacagggttcaatatgtccgtggcagtaaacatgaacttttaaaagctagtacttgattgttctatgctttcctttcaaagtgaattacatacataatagttttctttgcttctgtggcattcatacataaatgagcttgtttgacttttcatccctatccaattcagaaga

SEQ ID NO: 42828 - DNA, 808 bp, Manihot esculenta
  Intron number 1 from transcript cassava4.1_000004m (locus cassava4.1_000003m.g) derived from phytozome v7.0 (chr-ID scaffold03332; pos 609176 to 609983)
aagctcaagcgaaggaggcctttggaagtggttagtaaactcaccaatattatgcatgtcttatgctttggttttctttatgcagtacttattattgagccttagaatggtgttcattttgttacttttaaggtttatgctatttttcaatattctataatattttgaagtagttggtattgaactgtgattgtttggtaagacaaaggttattgcttggttgttcctctgcgtctattttagatactcttattgttgtgattggattactgaattatgattatttctttctgttaatgaccatgaagtattggcttttagctgtgattgctatagtagactgatgtggtatgtagctgcgtgaaatgtgattttgctttgtaagtctagggtttgttttactttattttatttcttaggaatgcccgtgttatgttaattcacagttttttcttgaatggatttgcaatgggtgtggttgtggtagttaatgaactatatatgtttatacacggggcttctgtttgtaatggctgagcagcagataagtagccaccatttctttgcctattgaataaactttggaaatgaataaggttttgaagtaaaagatggttttataatcctttattcagttggtttggcttgcatttatttagttttgcttctttttttttcttctctctctctctctctctcttttgaattgatttccttatatattttgatccctacaactcatgtaactgttctttttctgtcatttttaccagcctcccaaaattaaatccttcatcaatagtgttac

SEQ ID NO: 42829 - DNA, 475 bp, Manihot esculenta
  Intron number 1 from transcript cassava4.1_019305m (locus cassava4.1_019305m.g) derived from phytozome v7.0 (chr-ID scaffold00366; pos 56190 to 56664 reverse strand)
tctcttttgtcactccctcctctgccgtttttcaggttttcatttcaccttcctcctctccatcctctccctctcacactttttgttcctgagttaattttatagaaactgatccattgaagtgaaaattgtggttagatgtatgcttatattcctttgaagctggttaaaaagttagtttgctatgagaaaaatgtacgatatgctcgcttgtactctaaatttcactgatctgaatgtgttggcaattgtttttttttctttatgttctataatttatacggtaaattgtcttttggctgaatttggtttagttgatttgcttgctacaaagtaaaattgcgacatattattggtttctaattttttctgattattgtcttagggatgaatttgattttctcagactagatattaattctttatcttctttggcacaggtgatcattggcggtggtggcggtggagctttcat

SEQ ID NO: 42830 - DNA, 361 bp, Manihot esculenta
  Intron number 1 from transcript cassava4.1_002043m (locus cassava4.1_001897m.g) derived from phytozome v7.0 (chr-ID scaffold09134; pos 19673 to 20033)
cttccagtaattctcttcgaaggtcagatgtctaatttatgttttagatgatttgtaattcggtttattttcttcattttgttagatttttgagatttctgctatattttgtatctgattgtagttatctttctgattaattgtcagttgctttgattacacggagaattttagatcatttgtaatttgcttgattcttaatgtgagagaaagggaatttcactttattcaatctcaagttccaaaattagcttgattgcaattgtggaacttctttaatgttcattccttcaattgtagtttgcggtctgatttcgtgttttctgtttattttgtatttattatattttcagtagtagaa

SEQ ID NO: 42831 - DNA, 675 bp, Manihot esculenta
  Intron number 1 from transcript cassava4.1_015076m (locus cassava4.1_015076m.g) derived from phytozome v7.0 (chr-ID scaffold01551; pos 2056926 to 2057600)
tttttggtactccattgcttcgttatctatcatcaacataatctctctgttgtattcttagttttatttgtttttttctatttttagttcaatataatttcttggtgattctgcctgcccattccgggattgtttttggtatattggccgtagttttggtaatgatatccctaatggtttttcttttctattttttttcttcctctattttgtttaattattttgtgatgaaactgatggtaaaatctatcctcgtttcccttctctgttcaattgttttggttcactacttattcactgtgttttgaggaggtttttttggtttcctaaagtggtgagtttatttggaacaaaaggattttacaggaggtaaggctttttgaaggtctgacaacttttaaaaacctcaaatttttaacccatcaacttggctttgaagattttgatatatatccagactttataaatcagttctcttgatagtatatagtgtgagattgcctcttttgattcagcaaatagttttgaaaatatagtttggttgggtttcggaacttctttatggtgttggggttctttcccgtatattagatgataagtaaaaattatgaactttgatgtctgaattttgattatcacttggaaccttacttgcctgtcttgatcccacaggat

SEQ ID NO: 42832 - DNA, 510 bp, Manihot esculenta
  Intron number 1 from transcript cassava4.1_000953m (locus cassava4.1_000953m.g) derived from phytozome v7.0 (chr-ID scaffold01701; pos 720142 to 720651 reverse strand)
tttgtctcctttgataacacaattgagagatccaggtgagcgccactatttctcgcagatctctctcctcgtgcatggttttatgtgcttttaaatgaagatttgtaagctctgttattcaatagtggttttcagattctgcaaatctttcctggtatcatttttaaacaaatgatcatctgatcgagctgtttgatcattcatgtggtattttttttgagttttggtgaattcgatgcttcggatctgtagtatttgttatgctagttgtgtcagttttgaattttctgtatgattcatggcattctctggctttttgtgaagtgcgactgatatttaattgtatatactctgtttatttagagcgcaggccttttggatcaacaaaaattcacacttcgtttctaaataatgcgtacacttgttaatgttgttgaatttctttcttactcttctgtgtatgtgtttacttgaactggtttgctgtatctgtagatcgtttttgttgaa

SEQ ID NO: 42833 - DNA, 367 bp, Manihot esculenta
  Intron number 1 from transcript cassava4.1_002253m (locus cassava4.1_002253m.g) derived from phytozome v7.0 (chr-ID scaffold07519; pos 277436 to 277802 reverse strand)
cctccatcaaagccgattacattgcgcgacaacaggtagcattcctttttcttctctttaacagaaattggatctcagttttcgtattctaatgtttttgcatcttcaagtggtcaaagagtagctctcatgttctttagattttaggttttacttagctcttgttgtatttgtttattgaattctgagtgaaatagttaataaatttgatctgataacttaatgattagtttcatgtagcttattgatagtaggtaacttgcaacagctttcttgaggtttttgtaatgtgatgagatgactgtttatgaattttggagggataatactcatctgtatcttggtattttgttctgtttgcaggcaa

SEQ ID NO: 42834 - DNA, 844 bp, Manihot esculenta
  Intron number 1 from transcript cassava4.1_014105m (locus cassava4.1_014105m.g) derived from phytozome v7.0 (chr-ID scaffold01551; pos 50662 to 51505)
attctacccgtccgttacctgtaagtttatgcctcaataatcatcatcgcttttttctcttccttttaagtgtttcaacggctcataacttggccagtttcgtttgtgttgcgggttttttgggctcaactcgccctgactcggctggttgtttaactgttgttgccgagttaactcggggcggttctgtccaagttctttattcaggaattgactcgccttgatgtcgactcggacgagtcaaactagacggcattgaatgggtacacgtactgatattttttcagcaagttgctgatggctttctaatttgattttgtttctttagatagccaaccccgccctattgctttgaacggacaattctgaccagttgaaactctcgagttgcggacacgtggcagtaaaaatttggtagtcttcgagggtatttatgacaattcaaatgtttaatgggccttaattgtgtgagctgtggttcacgagggtagagttgtactgaataaatgtccagtaaaattttttgctttttctggccataaattgataggagcactcacccccacttgaaaagacaacatgatcctaaagcttctaaaaaattatccttctgcgtgtccaactgttcaacaccttgtttggctaaggccaatatgcaatatcacatgggtggcccacttcacacttaaatagggcgcccaattatagacggtacaagtcgtccgagttactgagttatcacatgagtcaacacgccctttttctcatcttcatggggttttatgcggtactggactctgatgttttccattttctctcaggaatttgcagaggaagacctgga

SEQ ID NO: 42835 - DNA, 364 bp, Manihot esculenta
  Intron number 2 from transcript cassava4.1_010164m (locus cassava4.1_010164m.g) derived from phytozome v7.0 (chr-ID scaffold07012; pos 848180 to 848543 reverse strand)
aggttggaatcttcctctaaatttattcctctattagacgtcctaatttggaatttgatccaatatatattttctttttgattgtgaacttgtccaagacctggatcatattagttttctatcaatagttatgtttcatggtatttcttacacataaactcgatttaggtaatcgacgtgtagaggggaactatttacttgttcaggtgtttacttcctacttataggttcctataggttgagattgaagtacaatactgctgcttggatgcaccgttgcgccaaagaattcgttatcttatattttatgggtctttattcatatcacaagccctgtaacttttgtagtgcgatccagaagaat

SEQ ID NO: 42836 - DNA, 741 bp, Manihot esculenta
  Intron number 3 from transcript cassava4.1_013693m (locus cassava4.1_013693m.g) derived from phytozome v7.0 (chr-ID scaffold08154; pos 125790 to 126530 reverse strand)
tgatcctcaagttatcactcaagcatcgtctctaagtactttactttatctttagttgatttttcttttctcgtctttgagttcctttttgttgtcaaaatgtgtgtactctatcatgcacaagtggatgattgtagggaaggttgcgtatcttctgtacttgactacttgtccctccagttggaggtaattgccacatggtgttctgtgtttgtagtttatgagtagcagaactttaaattgttctatggtgtgaatgtaaactgctctattcttgaaagagagtgatacaatagcagttattattgtttttcttatactcttttagtgtgaaagttcaagattatatctgtgatgaactctatataaattaagttgttgaaagtatttcaacaaggccaacagtgaatagtttggaatgggatatgcattaagtatcataattcttttccccttaaatatggctaagaatgtctcctctttttttccctcccatagaagagttgattgcatgtgttttcccattccagaatttctatggttggtgcatcagaaagtgaatgattgtgatgccaaagcaccgtgttccaagtgttgaatatttttctagctgattcttgaatgcaatttttgtggttctctgtcttttaattttataaaggttctatatagtaggtagtagatgattataatattcattcttggcttatctcaggtaatctgccagtggattcttcatct

SEQ ID NO: 42837 - DNA, 711 bp, Manihot esculenta
  Intron number 2 from transcript cassava4.1_013693m (locus cassava4.1_013693m.g) derived from phytozome v7.0 (chr-ID scaffold08154; pos 126609 to 127319 reverse strand)
tatatctttgaggtttttgaagacgtattaacgtaaaagttctgcttagcttcttctacaagtttttcatagatctttttgaattttgtttgttgttgtataatcaggtttggttattgatatttgaatttgaacctggtgattttctttctttctttttttttcttttctgcttagatgtttggtatgattagatcttccccagattggcgataaatagatatgttaattgatttgattatctcgtactcatctaatcatgaataacttagccaagattcatttgtcagttgtgtgacaatagtgtttagtgattaggcatggccgtgtatgtggccaattttggcatcgtagtagctgttagttacgcctattggctcctagttttatcagttttttcatgtgcatatcacactcattcttgttggaatatgatatatttccctattggtttgattgccagggattttagcatttgaactatctctgtctgtttgtctccttttatttgcctattttcttttcacatgcagctcatttacaaatctgctgtaaattgaagttatatgtgtgaaaatcatgtgccatttacatatatggaggggttccctttagcagagagtttgcatgataatgttggacaagttgttaaagctgcttaatgtgttatttgtaggatacaacaaaggcacagagtagcgtgctagcctt

SEQ ID NO: 42838 - DNA, 714 bp, Manihot esculenta
  Intron number 1 from transcript cassava4.1_013693m (locus cassava4.1_013693m.g) derived from phytozome v7.0 (chr-ID scaffold08154; pos 127365 to 128078 reverse strand)
gcaatcacccaacagcaattcgattaccagacaaggtaggtaggagtaggattcacattcagctgcagggagctcttgatctttttgatttccctgtttcttttcttaactgaaatgagtttccttttgtaaaaatttcagtaattataaaccctttttattgggtttgtaatttttattgggttcgagccatgggctcagttcagatcctcgaatccgctttatggttctgggcttcttaatctgtctgcttattttcaccgcccatcccgtctccgatcccggcggccgcctactatagaccaacattgccatcaaagtcaacatcatcaaccgatcatcgaatagttgttaccatcaccgcctttacggagtcgcaatcctccataagaagaacaaaattttcatttgaattttgattatttataatacgtataatacaaatcagaaaaaccaaaaaccctttcaactaaaaccccatcaaattccctctcatttccttgattgtaattctcatcgtttcgtatctccgattggtacttattgcccaattcatgtttgatctttttcttttttcagttatttgttctgttcaagtttaagatattgctgttaattttggcctgctcattttctccatgttcattgaattcttaattttttattttaactattccagggattttcgtcttcttgaattttcctccgcgtcta

SEQ ID NO: 42839 - DNA, 886 bp, Manihot esculenta
  Intron number 1 from transcript cassava4.1_000736m (locus cassava4.1_000736m.g) derived from phytozome v7.0 (chr-ID scaffold06314; pos 198615 to 199500 reverse strand)
cctccgttaacctccaaacgcttcaaaattgctcggtcagtgcacaatccattctttttttatggagtttgtgatgccttgtagggggaaaagaagggatagcattgaggaaagcttggattttttttttttatgggctttcggaattaagatgatagactttgaactcgattgagctccattgaaaatgtggtttcaagtcttattttactggtcatgtgaattttgtaattatgatttaacttgctatttttcaagtgttagctcctattgatagttgaaagttgggcttttgtattctgtgatttttgtggtctgttcagcaattttggctgtggaagaaatgcaccccggggggtgggtggagaggaatttagacaggttttgtgattttacggtatgaaaattattttatttttctagttctgcttgagggaagtgttctaatttttttgggtaaatgctaacggctagagttgaaaaagtgtaaaataaatccttcattcaaaatattgtgtgatcaattagaatcttagaagagaactcttcatctgaatgaactgatttctagctattcacttagttgacatgagaagcttcaacgttctgcaaagtggaaagtataaaaatcctttttctcaatcattaacattgtcacaaaggcaatatgaggattgatgtagtgtaagagtttcatcacaatttttgtacttatgtttgttttttgcaaaaatatgatggtttttggttaataaaccaatggctatataaaataatcttttccaactaaatcttaaaaccaattaagcttttatttcctgcattatatattaattactgacatttaaagtgaggacctttttttttttttccttcagaggggacg

SEQ ID NO: 42840 - DNA, 862 bp, Manihot esculenta
  Intron number 1 from transcript cassava4.1_014139m (locus cassava4.1_014139m.g) derived from phytozome v7.0 (chr-ID scaffold05754; pos 75141 to 76002)
catttcctattacttccagatctgatcttagcattgtaagcatttctttcaattcaaaatttctcaattcaccttattttatttatttgttgattttcctttcttttctttcttctgggttggtggaagttgagctggggtgcctattggcttccttttgttttttcttgcttctgggtaggtggaagttgagctgtggtgtatattggtggtgttacgtcttcttctttttacctttctctatctttttgtttgggtcctacccacatcttcaaatgaaccaagggcagcaatttacaagttctatgaaaattgattgggttttgatgattttttttttctaattatatgggtaaagttctacttcctgtaattttacgggtagactttatcttggacttttgtttctgaagttatcatgatgcttctaagtcatcacagctttaggaatggaatagaaatgcaaatgggcttctcatattcaaggagtctcataccatgtttttttcatgtaattaaatatattttaataatcttgtaaactaatcaatctcagagaattagattccgttttcacttgaattcagattagtcaaatatagaaatattattaaaaaaatggtgttttcctgtaaaccaagaattttgtatcttattccaggaattatattcctttttatttgccaaccatgtatgttctaaatttatatttatttccattttagtctcatatatatttggtttaaaatttgggttttgtattatttactgcaccatgagaataatttttcctgcaaaatacgtacagttgcctaagagcttcactggtattttttaacattgcagctggaacgaggattac

SEQ ID NO: 42841 - DNA, 588 bp, Manihot esculenta
  Intron number 2 from transcript cassava4.1_014500m (locus cassava4.1_014500m.g) derived from phytozome v7.0 (chr-ID scaffold01551; pos 2897516 to 2898103)
tttgatttctgaggagctttctcacaaagttaaaggtacttcatttagggtttagcgctttcagcgatagggtttagtctttaaaagccattatgcttctttctcattgaattaactttagtttcttcttatgactgcgcaagatttgagttcactgtgttttttatggagtttttggaggtaagggttcaaaagggcttttaagcttaggtaagatttttggaggtttcaaatatctcactttttcaatccaccaattggtgtattgggtcttaccttcaatcatcttactttacaaatcctcccttcactctatacaaacagtcaaacacatggtttgaggatattagctccccaacacacaaaatttgatgatatgtgtagttgattaaatcacattgatgacgagtgtctctgtttgaggttaaaggaacaatttccatccttcatgaaatcagcatggcttattgtctagcttatacatgcagtttggcagtttttgatatgattttttgtgttaggctgatttatatttatttttctggacaaatagggctgcctggtgtgctgtgggttttgccagattca

SEQ ID NO: 42842 - DNA, 856 bp, Manihot esculenta
  Intron number 2 from transcript cassava4.1_019158m (locus cassava4.1_019158m.g) derived from phytozome v7.0 (chr-ID scaffold00080; pos 248726 to 249581 reverse strand)
gcgatattattgccaaatacccagacagagttcctgtaagttctcaacaatcgactcttagttattcttcatttctgttttcaattgatcatattttagctctgccaatgaaatttcaagtttggatcttagtgtccattactgctatccttgtgttggcttaaatgatttatttgcatatttcttatcaacatgatgttagttggtgttgattttcaaaaatatatttctgcaatatcgggtatgttgaagttggttttatttcttagtatttttccaattaaatatgttatcatgctatattagttcctctagttctagcatttgccaaagccaggtcatcttaaaggaggactccttaaggttttgggtttttgagacatttgccttccaaattccagctctctttaactatgcattctggtgtggtgaaaattttggaatgaaaaagcttcaacgaaaggtttttttctttttctttttttttttccaattaaaatgaaagtttgatgacctttttctattaacttgcatagtttttcgagataatttgcaagcctagcatttgtcatgcctctcatagagtacacttactggcttgaggaggagctaggtaccactattctagctggcaaagcaaatttatataaatttgtatgcgaatggcatagctatcattgtatggttgatttgttttcttgttttgagctatgggtttgattcttgcggagtgcattggacattggaaatcactgaactatttgcagctgttttgttctctattttacattattattttgatgttgttttttatcttgaaggtaattgttgagaggtattgcaaaactgaccttcc

SEQ ID NO: 42843 - DNA, 773 bp, Manihot esculenta
  Intron number 1 from transcript cassava4.1_033576m (locus cassava4.1_033576m.g) derived from phytozome v7.0 (chr-ID scaffold03614; pos 1832405 to 1833177 reverse strand)
ctcattcttaggcttcataggctgctcggtaataggtacgtatttctgtttggatcgtatggattaggggctgcagctggctgatgaagtagttaataacttcgtttattcaagatctgctgatgttttattgattttgttctccccattattctcttcttttgcttttttgggtttttcctgtgcactctctctgaagagagattgggagatcaatcatatgtttcagattttatcagaatttgatcggttagaaatttagggtttgtgtttttcgtatttctccctcttaatttgagatgcgtttatcagttttctctcttcttcctatatcttattgacattttcttttaaagatcttgtaatttttgagccttcaaattatgtagaagttccaaaattagctcgttctctcatttatcatttttggttcttcactgtactgcacgtctggatacctctctctttctttctttctttctcgctctctctgttaggtaggtagataaattggtaggttttgttcacgatggctcaataaatggggtaggtttcgttcacgatggctcacttcttagttaagcccatatacatgatgaggtatatgcaatcaatcgagctcttgttcataataccttactaatcttgtttgttttatgaggtttttgagttcaattacccaaatattaattagtaatcaattagaaattttgggttaattttaaatttacgtttcaggtggtctttgatagctgggaggattccaggacgca

SEQ ID NO: 42844 - DNA, 1030 bp, Manihot esculenta
  Intron number 2 from transcript cassava4.1_004428m (locus cassava4.1_004428m.g) derived from phytozome v7.0 (chr-ID scaffold06512; pos 1328443 to 1329472)
ctaatcgacctgcatttgaagttcgtcttgtgcaggtgaacattaactactacacgagtgtcccaatcattttctttgctgcttcccttttttgcttgggaaaatagttgttttttctattttatttttttattgaaactcggggaaatactaacttcaatacattggatagaatttgaaattgatgatttgaagtcctggctcctgcacactttgctttaattggtgtcaatttaactacttgttgagcctctcaaccttatagctcaacttggctgccttggctttggtgttgaagcctgatttctgcacaactatgtttcaaattaagactgcagtatggttagttctccatggtctttgtatttttcctcagtgagagtattcctgccattgagctttcttttctcctctttcacgatcgttgtctgtgcctttaagctttctttggccccttgagagtgacattatcatttacatgttatggagaaaggtaactttctctggtgatctacttttagacactaatttgattgtttctcaaaatggtaacttttagtggggaatgtgatgcttgtttcacttttttcttaggacctttgtcccatatcaaattagcttttgttgtgtggaaagtacaattttttacctcaatttctagattgctagatagtgcaattgaaactggttagttacttaagaatgtcactcctgtatctgtttgaaatttctagccagcgtgtatgatcctcattgtttacggtaatgagaaaaattttcgccactttcaggttctaccatatatgccccaacatgaatgtcagaaaggttttatatataatattgtgtttggtgatatctttttttttaaaaaaaattttatggcctcaccttcctatttgttatataagtagtgttctgaaatattggcagtgtttattttgtcattatctaataagtttgacttaatgatgtgtaatgaatagcttgttgattttcttttcttttgtgcaggtctatcctgtctcca

SEQ ID NO: 42845 - DNA, 619 bp, Manihot esculenta
  Intron number 3 from transcript cassava4.1_029048m (locus cassava4.1_029048m.g) derived from phytozome v7.0 (chr-ID scaffold10173; pos 336797 to 337415 reverse strand)
aggagtgatctgggcaaacaaggtatatatttgcacatgtgcatattgactgagaaatatatttagggcactatatatatttcaaccaccgtagcctcaagcctctttcatgtttcatatcttcatcaggttctgaatcatccatcgttgtttgcgtaaatgcattaatggcaggctttatatgatactttcctctaatggtttttatcgggatttcaaagtcaaaagattttgaactgggtttcacatgaaaacgtatgttttggaaaagagtatgagcctcacttcatttattatcccttcatttctgcttgagtttatgccaaaagagtcaagaacataataatcctgcatcgcttttcaaatcttctaatattagcatttctgatgaaacccacaaccccaatttgccactctagctgttcttgatgttctgtgtatatatcaagccatgttaaatgccattgaagatacacatgtgccatgttaaaagctatctacaaagtgtactcgtggaaggctcatcacttctttcacttgacgtttattttttaatgcctttgtttggtcgctctctgtgacagataagagctctacccatcaaaggagacaatctttt

SEQ ID NO: 42846 - DNA, 550 bp, Manihot esculenta
  Intron number 1 from transcript cassava4.1_027100m (locus cassava4.1_027100m.g) derived from phytozome v7.0 (chr-ID scaffold07012; pos 1338079 to 1338628 reverse strand)
agcctgtcactcgccccttcagagattgttctattgtatgtattagaatgctctttttccttttttctttttccctttcaatcaaaacctagctaggttttccacagaatgcatttgcttttttttttttgcttccccgaaaatcatgaaacatatgattagaagaaattggccaaagtcaaaatgaatgcgaagtaattaaacaaataattacatataaaaatgaatgataccagcacaagtggaacttgaagctcaacctcaaatctttaacctgtaaagagtttcaggctgcagtgttagcttgttaaacactatatcgggacttctttactaccttggaatcttacccatgtttatattttgatttaatttaatatttctttatagatgtcagcatttcaaatttttttttatgctaatataagaaaattaaatgaaaacaagaggaattagagttggatttctttttctttggatttataatgtacagtgtttgttaaattaatgaacaggaagcttctactgcgcaatatatagtgcagcaata

SEQ ID NO: 42847 - DNA, 391 bp, Manihot esculenta
  Intron number 1 from transcript cassava4.1_020181m (locus cassava4.1_019675m.g) derived from phytozome v7.0 (chr-ID scaffold01551; pos 3328915 to 3329305 reverse strand)
aagatcgccagctcgattccactcgggtccaagaggttaatattttattttttccttttctaattctaatatgcaatctaaggtataaatggcaacgcatgttgagaaagaaaggattttggattagaatttttcatgtgcagaataattcatttggaattgctaccggacttttagaatttccaaatgaactctaaacgaaaaatccaacaatttgaaaatgagttttatggttaatacagaagatgtgaaacatgaaaggatttgctttatgaaattatatgaattccatgttcatttaatcaaagcacattttagtttatgagaatcaggatgtcctttgatagagttttgcttgagtttatggattatattttaatttgaataggca

SEQ ID NO: 42848 - DNA, 985 bp, Manihot esculenta
  Intron number 1 from transcript cassava4.1_001151m (locus cassava4.1_001151m.g) derived from phytozome v7.0 (chr-ID scaffold11110; pos 65330 to 66314 reverse strand)
ctctttcaattcgttctgtgaaaccctagactcaggtactcaatccccttctccctcaatgcgtatatagctgtttgatattttgagctaatttcggtgttttcaatttgtttctgctcgcaatatgagcctattttgcttttcatccttccagatattgtctaattattgaattatttctctaatttgtcgtctgaagttctcgcatacttacttaatcaaattgtgtttctttgtgcttaattatggttgtgatcttagttagagtgtgctatattcttcttcttgtgggttctccgttctttacattttggctttaaattattttatttttcttttatttttccccgggttataaattaatcgcatggtggtttacttccttgcatttttttttcctgatgaattgttgtctttcagtattgatgttgtagtctcgccacatacgtgaatgcacttgtacatgcatatataggttgatcagtgaatgcatgttatgctgctaggtatataaagatcatatgatgcaattatgggtttctctatgcttcttgctctttgtggacaactgggaatttgaattatcattgactagttcagctccgtaggagttctgagaaaatctgattgatttgtagttttatttgtttgtgcttttctgttgtcccaatgtttgaagtgcatacggcgtggtgagtcattgaatgatcaacaaaatcaacacgaaaaatcaagtcactgtgctttgaatcttgtgattctgtaataacattttctagttgatcaatctcatggcatcttgcttgatggccttattttgggtgttcctttattcttgtgcatgcttggacatttgttatatgatccaaatattgtttcttttcttttagttatagacttgtagtgatattcactatgtcaactgataattaattgaatgtgggtttcagactgtgttttgagcgtaaaaaatttcttctgaact

SEQ ID NO: 42849 - DNA, 365 bp, Manihot esculenta
  Intron number 1 from transcript cassava4.1_000882m (locus cassava4.1_000882m.g) derived from phytozome v7.0 (chr-ID scaffold06512; pos 105131 to 105495)
taggcaaaagcgagtcagcatcttcaggcacggtaataatcttgatgaaaatttttgctaatgtgggtgttaaatgatcgttgagattgaaactattgttgaattattaccagtatgtgtggaaaagaaaattaaagttagaataataatgttgtacaaaacttggtggttaattcaatcacattatcgtccttgaagctttttatttatttatttatttgcttccattatggataagtttcggtatctattgtattcctagaagtttttttgcaagcttgatctcgagttagtaattttaactggaactaaaattttgactttgtttagggggacggggatttgtggaggtgaaggaatttggt

SEQ ID NO: 42850 - DNA, 830 bp, Manihot esculenta
  Intron number 1 from transcript cassava4.1_008267m (locus cassava4.1_008267m.g) derived from phytozome v7.0 (chr-ID scaffold02853; pos 299647 to 300476)
gtttatacagagccattgatacttacctcaaagtaagtgatgctctgcaaaactctgtttttttctatttctatacactgtctctgtttctccattaggcaccctagaaattgcagtcttgttcatgattaacaaagaatttgaattaaggttgaatttggcattctgaatcccagagctataatttttgggttatgggtattaattatttatcaattttttcatgttacaatgattaatagattttttgataagcgagtaacttattagtagatttttttatattatagtaaataaataataaattttgttaaaaaaaagagaaaaaaaaagaagaaactaaataataaaattttcaattagaaagggaaaagagaaaaaaaaggaacaccatctgggaccaagaagtgtcagtagctgtgtagtcaccaacctgagattctttgattcagaactattttggtggtggggttgggttttggcagggacaacagagagtaaattgacgtccatgccctttatctagggcctgttattggttttgcctgttggtgggccttttctttttgtgtggtcatagtaacatgtgtgtgaggtagcgtcagatgtgtaccttcaattgcattgattcaatcgtttaggtaatatttgttttatcttcactctgtccttcaacatttctgagatccagtagcacaaatcaccacgaactttgcgtacatgtacattgcttaccttcactgtttaccatttataaaaatatatcgaaacaccttaaatgaataactaaccttggaatgataaactgtgtcttgctaggcacatcctgg

SEQ ID NO: 42851 - DNA, 906 bp, Manihot esculenta
  Intron number 5 from transcript cassava4.1_034138m (locus cassava4.1_034138m.g) derived from phytozome v7.0 (chr-ID scaffold06512; pos 633866 to 634771 reverse strand)
gatatcgcggcttaaccatcttcgtgatcgagctagtgagaagggacttaggaaagaatatcctttgctatatgatattcttatgattaattttgtaatacagctttctctctgtatttgttgaacgattcccttgcattactagcatattaggcccactcgtacactcatattcacttgaggaagatttttttttctcttatggatcatatgctataaaaaaattgcagttgaggtattaggtaagtagctacattttctgaacttttaccaattgaaagtgcacaatggagagcacagggcgaaagtgctcgttttttaattgtctgatatcaaactgcataaatattgagattaattagcatattgtaaatgtaatgcttttgagtaatatgattatgctcctctcactattttcttttcggatcctacacttccaaagtggggaatggaaacagtgggtggaatggatttctaatgggtgattgagttctcttttttgtttatataataattatttgtcaccatcctatacatcccaatttcctaatgttggcttatcttgtttgtgaactatgctactttttagttggccagtattgcattttgtagctgcattttgactagcatgttttgctgaataacttgactagaggttttattgtaggaagagggcttcgactgttattgcagctaatgcaacagctgcctccattttttgaacttacctttttcttctctccttagtattcatataaagcctgtgataaaatatgcattaatggctgaaaatgtgtggaaaacctagtagaaattcatcaagtagttccttgaccatgctgcacgcttagagaatgtgtggaaaaattagagcttctgaagtcgcccaaagaacgcgagcgcagg

SEQ ID NO: 42852 - DNA, 323 bp, Manihot esculenta
  Intron number 2 from transcript cassava4.1_010191m (locus cassava4.1_010191m.g) derived from phytozome v7.0 (chr-ID scaffold02949; pos 3598 to 3920 reverse strand)
agggtaatctaataacccatttttccaagtcagaatattttatgtcatcgtatctgatgtggcactacataagaagaaagtacttgctagctagctagctatcaatatcattacaatgaatagtggttgcattttgatccaatctttaaatggatcccactttgcaataattaaacttttaaaatagtggccgagtttacaggttgactgtttgttttatagtacacgtaattaatccccacatagatgataggactgaacttaacaggtttatttattttgaagctaatgaagaaagttccaaattttgtttttgcagcttg

SEQ ID NO: 42853 - DNA, 524 bp, Manihot esculenta
  Intron number 1 from transcript cassava4.1_016727m (locus cassava4.1_016727m.g) derived from phytozome v7.0 (chr-ID scaffold03614; pos 3018635 to 3019158)
tcactccttcataaccctccttcaaaacccatcttgtacgttcgttctcgcttcttgcccttctgggttttgctttgttcgctactttgctgctgttagattcatatgcgtgctgtgagtggaagtagtttatttaattttatcagatttttgtgcagatttcattaatttgtcttttttttttccccacttccccttctgctttacatccaatggactgttttgcttaaagagaagaagacgaattttggtttaattagatgagaaatttacaaatttatttgcatcccacagtattaaagatggattagtacttggtgattttctgttcaaggaggcaaagatcaaaagatttcctggttcaaatcaaaataaagaaaggagattagtaaatcaaagtaggctagctaattagaaaaattttccctgcatacaagagtgaagaagagaaaccagttagcttgcttaagtaatatttagctgctgcagtatatttgcagaactaaagaagaaacgaaattccg

SEQ ID NO: 42854 - DNA, 347 bp, Manihot esculenta
  Intron number 1 from transcript cassava4.1_006362m (locus cassava4.1_006355m.g) derived from phytozome v7.0 (chr-ID scaffold06512; pos 2050492 to 2050838 reverse strand)
ttagaacttccagttcgaattcggataaattacaggtatctaagtttctcaataatgttcttgttgctttttggaatctgttcatgtttagcactactcataatccttgaatctagttttttttttctccgcatgattttcgtatagatgtatatatttttggttcttatttcagcatatgttccgatatcttgatggtttgattttatcccctttttcctgattttgaaatatatgacattcccaaatcatattctaatacgacttcctctctcacgtcgtctttgacggactccttattgaacgaagaagacgcctcacttgttccatccgtttctgtactccct

SEQ ID NO: 42855 - DNA, 858 bp, Manihot esculenta
  Intron number 1 from transcript cassava4.1_018987m (locus cassava4.1_018294m.g) derived from phytozome v7.0 (chr-ID scaffold03614; pos 3411834 to 3412691)
tcttctctgtctaagctctaaaggggtgctctgaggtaagagcttttgaattctctctatctgtcttgatctggatcattatgggctttgaatttgatcatcgtgcattgtttttttttttttataatgttcttgtttgctttcttgtacagttgttttcttctttgcttgagtgttaaatctgtactcggatttgatgtttttgttttatttgctataggtttgcatgctttattcattgatctacatatatatatttttatccaatgtcctttattgttaagtgtggggttttttgggatgtaactagcaggatagaaagaaaaatgaattagggatttgaaaatatctcatagaaggatgacttccatgttaatgatatttctctttttggctggtatagtatgttgtgatttttgcgtggatatggtttttcattattaagtacctgtttgccgtcttggtttgtgagataaaattgcttttaggggaaaaagtgacattttagacgctttaaagcaaaaaagtgttttattgtttagtattcttgtcgctaaaacttgttcaatttaattttagtgtctcgatattctctgataaatatatcttgaagaaaaatacttttctggcagcagttctaactgtaatagcaaataaactccatgtttcttcttctcctagaatttgaattctattggaattgagattttaaagctgtttttaggctaatgtctaggaaatatatgagctagccttttttcactttagatttgccttttcagttcgttttacctctggcaagtgttaatatgcaacttttgacttttggcttttatcttttctagatcacgtaaaaca

SEQ ID NO: 42856 - DNA, 577 bp, Manihot esculenta
  Intron number 5 from transcript cassava4.1_018987m (locus cassava4.1_018294m.g) derived from phytozome v7.0 (chr-ID scaffold03614; pos 3413422 to 3413998)
atcttggcaggggtaagctttaattcttagctttgagatcttgtttcaactcttatttagtattgtcattgatgtggacagtggttcctgcctcttgataactagcattaaattttgagttgtctctcaaacattccaactcaggggtaagagaggcaaatttaaatttggggaggcactgattgctattttaagtagtaaacttcattactattgaaatatggagcctggcattcttaagcattttattgaaggttaaattatagaaattagaaatatatgtgcccagcatacaccctatattgtagtaaggtttaacggcaaaatcattgtgataaaatgggcccttaattgtgcagaagttgttttctgatggcattaagtcccgggggggggggggtgctgttaaaccaactttctactgctggtgcccaaggggagacttaactaactattgctggtgtgttgatatgtagttttttcttcttttccaaatggatgtgaatttgtgctagaagcaatggaattccttgtgctttggtatttctataatccaacgtttcctcatcattatagt

SEQ ID NO: 42857 - DNA, 645 bp, Manihot esculenta
  Intron number 1 from transcript cassava4.1_007169m (locus cassava4.1_007169m.g) derived from phytozome v7.0 (chr-ID scaffold06711; pos 308165 to 308809 reverse strand)
cacagagtcttctaacatttccaaattatcttctggtcagtttttatttatttatctttaataatcgattccttcactttctcgttatttctttaccatgtcaacgcttgatctgatctgcgtacttctgatttttcattgtagttagcttttcctttgcattttattatgtcattggtacatgatggattgctttcatgagattttagagctgtggatttttgggctttcttttttggtgaccccacgagattttgattcaatgtaaaaggtagcatttcctttagtgaaaagagatcttctgatcaatttaatcacccgaattcgatctggttcattggtgatgaaaagcttagagtgtttgggggtgttatttctaatttgggaaaccatgtttagctaaaaatagcaatcaaaatcagttatggtcgctttattaccgagtcttgcatctcactgccactatcactcaattgaggttttctatggctattgcaaagcaactattttattgaccttgctgtttattaaggtcttgaattattaacctcggcgtctacttgggagtatatttccaattttctaactgatttttgtttgatggggatgtaattgcaggttctgacaggcttaaatcaagaaaca

SEQ ID NO: 42858 - DNA, 164 bp, Manihot esculenta
  Intron number 1 from transcript cassava4.1_016379m (locus cassava4.1_016379m.g) derived from phytozome v7.0 (chr-ID scaffold07519; pos 351416 to 351579)
accttgctcaaggtgatcgttctcggcgacagcgggtacgatttctagggtttttctccggcattttgtttattttctttgattttggtgtatttgtgtaacgaaacggaaaagaaatttctaatttgttttttgttaatgtcagggttggcaagacgtctttg

SEQ ID NO: 42859 - DNA, 792 bp, Manihot esculenta
  Intron number 1 from transcript cassava4.1_009200m (locus cassava4.1_009200m.g) derived from phytozome v7.0 (chr-ID scaffold08154; pos 150916 to 151707)
aacttttgcagactcttaaaaggtgggttctctttcccttgattttcccccttgcttattttataagattttgggacctgcaagtgtatgatatttttccttttagcttctgctagttttaatagataagttggtattatatgtagcttgatttgtttgcttgctaatgcttaatagcatctggagttgcaaactcttttaatctagctaagatttagagccattgataagaaagagtttcacttccttacttgtcaaataggaacctggttttgagtagctggccgttcttgtttcacgcagctgtatggttggctattcaggggattaatttttctttaggtgttcactgagcatggccatgttacatttgttttatttttttatttttgcactgaacttctgggatgtatttggctggtggttgcaaagagtgtgcactaaaccttaaaatggattatggttactaacctttgctctgtatgcttaagttgggagtactttattgttaacgccattcgtcaaggtaaagtgtcaaaagaaaatgtatagttagtagttgataagcaacaaagaagctttacatttatgcaggtcattctataaatgggcgtaaaatggtgtttgattaatctttccccacccattttattggactgttgatacttcactcttctccctatttgtttgtttgcaactcttcgcctcatacagcagaaaggagtaaaacttgattgttgacttctatgatctgatgcagataccgcttaaggtcaaaggttgagattgaca

SEQ ID NO: 42860 - DNA, 630 bp, Manihot esculenta
  Intron number 2 from transcript cassava4.1_009572m (locus cassava4.1_009572m.g) derived from phytozome v7.0 (chr-ID scaffold07901; pos 24593 to 25222 reverse strand)
atatcaggaatttataatattgtccaagttaattaagacatcatcagttattagcttaagcaatgaaattcaagtatttggtatcaatctttttggttttgatttggtttgcattcggttattgattcagttagttgggaaatagtagctgaaatatttattatgtttatcaatagcatataaattatacttgttatattttacatgtgttaatgttaacttataaaattatatttttaattaataatcgaagcaaaactttcctctttctctctctctctctctctctctctctatatatatatatatatatataatttgcagctatgcactgaagaacagaatttttgtgttttcatggccgttaaagatttagaaaaaaatatgttgatttatcttgtattttcctttggcacttctcaaatttccttctttgtttttcagtttcttccaagtaatatagtattcattattctgctgctttttcatggatatgaaatttctgtgttgagtttgctgcttatcttacatcacttttatctgttcaaaatggtcatcaggttgtactgaaggaaaatttaattcttaccctattcagggatgaggtgagtgatgctgtttgtagtcaaa

SEQ ID NO: 42861 - DNA, 596 bp, Manihot esculenta
  Intron number 1 from transcript cassava4.1_000436m (locus cassava4.1_000436m.g) derived from phytozome v7.0 (chr-ID scaffold07762; pos 313250 to 313845 reverse strand)
aagagttgattgaagattggaggaggaagaggcaggtaggcttcttcttgttaccaattatatagattaattgcaattttcttttcataattgtatttaagatagtagcatgggtcaagtctgaggcattattctttgacagaaacttgaagaatgatgaatgactgggactttttctttgaattttttgttcttttcagttgcagttgattcttgatctccattgaagagctttcagatggcagatttagctatttagttgttttcttaagtctctcttagtttcccacattttaatgttgatcagttgtcacctgtctcatgcatggctttatttaggcaatagatattacctcatttagattgaatctttgcaaggctgtgtgatgtttcatttccaacatctcatcattaagctatatttttgctgttcacttgacatctcattattagtattggtttcggacctctttacttttatctcttattttagtttcaatgttcataggcttactgttatctgattgaacttcttagttcgtaacactgatctagtctattattatgttatcaggatattgaagtgaacaatcgca

SEQ ID NO: 42862 - DNA, 738 bp, Manihot esculenta
  Intron number 1 from transcript cassava4.1_018813m (locus cassava4.1_018813m.g) derived from phytozome v7.0 (chr-ID scaffold07088; pos 378420 to 379157 reverse strand)
tccttatagctctaatagtcatcatcgtcttccaggtcaatccccaaatctatgcacttctctttctctctttactagatatggatgtttcgtcgatttcttgttttttttctttcaactctctattgctctttcatcagcaattagacctttcaacactctaatactcagtttgtgttgtattttgctttgaaaattttggtgattaatttacgtgaaggagctgtggaaataaagtttctgcagggtatagcttattgatttcttgttacatgtactatcttccctttggcatggttcattttttagaaaagaattcacatgaattttcatgaaatcatgtatgtttttttttctttaaaaatgaaaattttgtaagttaaaaaagaaatagaattctttattctaaacatgaaatttgatagaaaagaaatgaattgaattgaattcttgctaaattttttattcaaacaaggctaagcttactgattattcatgggtattcaccaatttacagtttctaaccgttgggaggctagacaagttaaggcgtgaataattgccatttcactgcaaaaatttaagatcatgcttttagaagttaccgaagttaataaaaatgtgtggaaattgcatctgggactgtgttttgcattggttctggtttatagttataatttgagatttctgatattagattatagaagtttaacattccagaggtaattgttgcagctc

SEQ ID NO: 42863 - DNA, 892 bp, Manihot esculenta
  Intron number 3 from transcript cassava4.1_004456m (locus cassava4.1_004456m.g) derived from phytozome v7.0 (chr-ID scaffold03614; pos 3315326 to 3316217)
gctgcctggtctgccctaaaaagatgtatggatctcattgttttgaattcatttttgttcagagccatctaatgtggctaggatgaggataaacacttctgcgtctgctttgaactgattaacacatcattacagttatccatctccttgatttaatgagcatgaattttccttaagctcgagctaacttttcaagccatggctatcagccctactcttattgcttctttcctaaacagtcaaaatttgtggtagatgattaatatggcagtatagttagcagacagtgtggaagcaacctataggctatagcattgtacaacaaaaaagcatgtgcattttttttggttttggggggggggggtgagtaagatgccataatgcagatgttcagcaatatttcaagcatgctgactttggtagggaggatattttctgaggtgggtggacacatgctcccagttacctcattgcacctactgtattcctttctttgttatttttcctgccattacttggaatagcttcttggaaacttggatgtatttttttccctgactgattctttgtttctcctacaatgcataaattgtttgctgaagttgtgcaagactgttctgcattcgtaaagtaaaatagaaaaataaataaagaagatcatatatatatgtgattcaagtgatgaaaaatgaaaatgctctttttcttcttcttagttatatagctcgtgtttttctctttgtttaacaataaattttattcttttatccctcaaccaagttttcttgaaaaaaaatgtttatctcatgcaattgcaggcttcttaaaatttaatcagttgcttaatgtgaaggtatgtgaatattaatatgtttttttgtagtggttcaac

SEQ ID NO: 42864 - DNA, 581 bp, Manihot esculenta
  Intron number 1 from transcript cassava4.1_018225m (locus cassava4.1_015338m.g) derived from phytozome v7.0 (chr-ID scaffold09876; pos 192949 to 193529)
catttcccagtgagtactacgcatctctatagccggtaagcgcacgcatctacttatattccaactagtgcatttgtttttcggtcaaggaattctcgttcctatctctattttattctgcttcgtcgctaatgctatcgattttgagttggaagactgcaactttgatgccttaaatccgttttctgatttgttgttatttctgagaatttcactcccttttggaagattttatattgtcagtgagtaaacttgtttaacttcactgatcacacccagtgaagtgatttgttaccttagcgagtaaattttattatcaatcacaaattcaactattagatgctatttattcacatattttactcattcggcgcttaagtttaatgacatatttctttctcttgttatagttttatgttttcgtgttaatgattcagctgaactgaacagaacaaaaataatttggacaattagaatgcataatatttattgctttaactggaattatagatattagaagtttttgttcagtagttgtcatcgttcattcttttagaaacaagccgcacaactagctagta

SEQ ID NO: 42865 - DNA, 925 bp, Manihot esculenta
  Intron number 1 from transcript cassava4.1_002241m (locus cassava4.1_002241m.g) derived from phytozome v7.0 (chr-ID scaffold03614; pos 3218817 to 3219741)
acacaaaggtgaagcagtcttgtacttgtttcaatcacattgtccatttcagctaagagtaaagcatttgaaatgaggaagttgttttgcttgctgtacatgtgcgtattgtcaaggaaatatttctttgaggacggtgagggggtgggttggttggtaatcaacaatttttttttatttgatgtggtataaaatttaccttaagttgcatgattgagttatcacacatgtagtgttaatgtttgtgtcctatcttcattgggaacttcttatacaaatgtaatttctgcaattcaatacttcttttgctcaggcataatatgttaatactgctaaaacttcacttgtattattttataaagcatagagtaccataatatctcgtctagatgctgttttatgatatatttgttttgaccacgtaataatactataatagtaatattggattccacatctttgtttgctacctttattatttggagtcattttgaggctggagcctatgatctcatttctgcaaagaaatctattaacccactccatattcccgcggggggggggggtaaatgttttcaattctgcaactggtatgattttacagataagaataaagaatttgggtgagctacatttgcttggcattattatttcagtgaagtgttttctgggttcagttgaaaagctttagtttcttgcttatgccgttgggagtttgaaacatgaacttcatgtattttcataggatgagatccatccatctatgcagccttgtcccttaaacaatgtgcttgttttattaatggatttgcaatttgggtagcatttttttttctgtttaatggagatatggacctaatattgcatgtttttgggtgtctattttgcagcattgtgctggcattaattgcttggctgtgtcaaa

SEQ ID NO: 42866 - DNA, 710 bp, Manihot esculenta; identical to SEQ ID NO: 42451
  Intron number 1 from transcript cassava4.1_017303m (locus cassava4.1_017277m.g) derived from phytozome v7.0 (chr-ID scaffold07571; pos 549786 to 550495)

SEQ ID NO: 42867 - DNA, 1021 bp, Manihot esculenta
  Intron number 2 from transcript cassava4.1_019099m (locus cassava4.1_019099m.g) derived from phytozome v7.0 (chr-ID scaffold03614; pos 4085762 to 4086782)
gctctactcctccggtatctcccttctctggtaaggtttgctttcgatccaatcgaatgataatcatggccctggtctttttacaaaatgcctaaaatgacctctcctaagaaaccggagatgggcgttgctactagaaatatccaaagggcagtaggtttgcaaatttaatagagtgaggctaattttgtcatttagcggtgtgggtctgcccagcaattggataatgataatacacctctctatttaagtgaattattgatcttgccgccttggataatgacattttaggtcgttgtttgacgtactttttatgcatgggtgttggccagctcaggctaaccatacttaaccatgcgtggttacttgacctgttagtttaacccaattgcgatattacctttccttttttgacatgcaattgcgatattatcattattaacaatattgcaatagagtatctttaaaaaaaataaataagggataaagcaccagttgattttgtatgaaattatcttgaacaaattcttatgaagagtgatctagtgtacccaaatttagttatgacaagcaggtgtctgtagtagttgattttgaggcaaaatataaagccaaatgaatgaaaaaatttatagaatacaaattgaaaatttctattgtgtattgggatggcaagtgatgatgctagctcctctattaatcttgactaggtggaactgaactttgctttgtgtttgtctattgtatcgcaaatgggttgtgtacttgctatgcatagacgtacgttttactcatctcatagtaattataaaagaaagaatgaggccagtagaataatagtattgatggtacgctgagccatgtgtgggacaagtagtatatgatcatgagctcattttatgctcataagctgcatgtatttgtatttacttaagatgagacgattgtatataaatgctgatgagctgttttgttatgatatgaaggaggcagagagtcctttcggtttcgaagaagatca

SEQ ID NO: 42868 - DNA, 693 bp, Manihot esculenta
  Intron number 1 from transcript cassava4.1_002243m (locus cassava4.1_002243m.g) derived from phytozome v7.0 (chr-ID scaffold09570; pos 146167 to 146859 reverse strand)
ggcgagcaggtgtgtgtttgaatatttacaaattttctcaaggttttctgaatatttatcattttctatttcaattcaaattcatgatttttgggtcataattgattaattggaaaaatatttttctgcacttgattactctgtttctggtctagatgggtttggcatctctagttggtggaacgaatttggaaaattcttaaactataaagcctcagtctggaatttgaaaagagctaatcaacggaaagaagagagactattagctttaaaatgcttccaagtacctatctctgatcatttagagcactcctcttcccccttccaccataaatggaccataaacattgagcccctgtgcctgcttctccttcgtttggcctcattcattttgtaataaaaatattcaaatcaattcttacaaaatcatgtaagattttaacttttttaaaatgattttttttcaaattaaaagcaattgaatgatttcattccaaacaagataaacggagttaaaattattatgataaacgttgaggttttagctgaggaaagaggtaaagggtgaatgggcttgttactttttctctgtttgttaaagtgtaataattttgctttttaccttttgttctcaagcagtacattatttggctaacagggttcaattctaggtgttgaggtggaagtcccaag

SEQ ID NO: 42869 - DNA, 1008 bp, Manihot esculenta
  Intron number 1 from transcript cassava4.1_001132m (locus cassava4.1_001132m.g) derived from phytozome v7.0 (chr-ID scaffold03874; pos 221263 to 222270)
ttcactgtattctcctcagatctggtcttgataaggttcgttttctctatatctgcttctattgttggatccgtttggatgccgagaaaataaagggaacattatactctctcttatacttctctaattttattggcagtcacacctgttctatcgattgttatttggggtaaaagttgctggatttaggttcagtatggttagctggtgtgaatttagtgaaccaattgtgtcttcaatagcattaatctaattttgtttttttctcctgtatataaattcactggttcaaaaatagaagaggaaatcttcttagggcatcgcatttcgggtcgtgatctgaattgagtgaaacctgatttgttagttcaggaaacatagtgatgctcatgctctttctttttctttttgatcactgattaagcagatctaaaatgtgtgtgttaattctatggctggttagaaacggtagttttaaaacgttatgttttttaatttgaatattggatctgattaattgacgtctgaaatggatatacgatggcatgtgaacgtcatttttcgttgccaatagtattgtccctagttctactaaactcgtggttttgtacattgatttgtcaatcaaagtgatcattccagagccttcactcgatctgtcatgcaagtaaaatttagtcaacaaattgagggtaaaacattgctgaaatttttttgttggttttccttgaaccatcaataatggaaatgtaagctatttttcagttttttatctgaaaggcactgtcacagtcatcatcgaatgaaaatcatggtgcagttacatctagattagtggcaatagtagaatgctgttagaatttgtaccttgtttggtcattcataggttattggattagtggttcgtcttatctcatgttcacttcatttttttatcatttggaatgtaaagttgttaatgatttgaattagcatgaatcagttgtgttgtcaggaaacaaacaagag

SEQ ID NO: 42870 - DNA, 712 bp, Manihot esculenta
  Intron number 3 from transcript cassava4.1_016318m (locus cassava4.1_016318m.g) derived from phytozome v7.0 (chr-ID scaffold00341; pos 750396 to 751107 reverse strand)
actcaaaacttgtattctgggatctgggtggtcaggtatgtaaaattcatgtatggaaattgtcttagtttcagaaaatatttgcatgggtgggtcttttcctttaattaggcaacactctagtctcatgtatataacatttttggctagatatcaatcccattccattgtttgcctggaaaaaattagttggatttaagctgcaatggtaatcctgcttatgtaggacaccacattaattaacaaaaagaataaggaaatgatagaaagctaaaaatgggaaattgtaaaaaaaggttgtaccaaatttcggtggtctcgaacagcgacggggagaagatgatatagcagtcaaagaacccgcctttggctatacagacatgctatagcgctagtagtatacaaaagtttgaggcctggtaaagagcctaggctgaggtcgagtctagcaggcacttcacttgctagagcctaaaggccaattttaacatggctctagatgacgcaaaatacatcatcttatgagtcatgcgttgccattgtttatcatgatagaaaatcatatgcagactctttgtagccgcacatggtgcaatgtttgaattagatcatatgatccaattattagtgcaatttgcaaagttcagcaattgaaacatttttttcaaatgtttctgccagcctggtcttcgctcaatttgggagaagtatt

SEQ ID NO: 42871 - DNA, 753 bp, Manihot esculenta
  Intron number 1 from transcript cassava4.1_009101m (locus cassava4.1_009109m.g) derived from phytozome v7.0 (chr-ID scaffold01551; pos 444362 to 445114)
gtggctttcttcaaagaggtgtgtttgttgatggttggagtgatggttgttagaattgatatcatttgcacttgtattatctagtcgcatgaccatgaagtttgttcaagtcaataactgatttattttagtgagctcttactattattatgatattatctagtcacatgaccatgaattttgttaaagtcaattactgatattttctgtgggtcctttttgttatctaacctacttggtgtttctgtgtgttcttcctacttttgcaaaatcttatagtttgtggttgtcacttgtgacatgcacgtgttcacacatattcgaaagacacagccttgtttcctttctgagtctccatgctcattagctcttcttgccatatcaaagagaaggcaacgataaaattgagactttcaaaagtgtcctctttgtgcgtgtgtgtgctgccaccctttggctgttttgcataagaaagatttttttctagtagaaatttggaagcatatcaaagagaaggcaacaatgaaattgagacttttaaagtgtcctatatatatgggtgccacccttttgactgttttgcataagaaaaattttcttgcagaaatttggaagcatatgtaaccaattgactaaatttagcagcatgattatagtagtgtgtatatctctagtttgagtttactttgtcagtcaactactacttctggtttttcaggttgaggcgaagaaggccttgtcaagagaggagca

SEQ ID NO: 42872 - DNA, 498 bp, Manihot esculenta
  Intron number 3 from transcript cassava4.1_015717m (locus cassava4.1_015717m.g) derived from phytozome v7.0 (chr-ID scaffold06711; pos 114420 to 114917 reverse strand)
agcgccctgtaagtatatatttctatattgtaatgctgagatctcactgttcaggtcatgcatataacttgttagaaatgttatttgaagatgtgtaagacaaaccaatagtttcttgtgagatcttgaaagctcttaatgaagtcataatagtgttagaaatatgtcatacttggatgcaattttcattctagcccattggtctgaaaatgcaaatctatttttagtacatgaaagatcaaatatttttccaaaaagcaagtggccaacaaggtgctacatgcactcttggctataaaattataacttgaacattcagcataaaattataaattgaacattcagcaattacccgtttagagtaacataactcatgttttgtcttttttgctataaatgtaccttgctaatgttcttgtgaattggtttatattttgagcagataatgacttcctattgaccctcccttttttcttgagcagaaatcagcagctctgg

SEQ ID NO: 42873 - DNA, 814 bp, Manihot esculenta
  Intron number 1 from transcript cassava4.1_015717m (locus cassava4.1_015717m.g) derived from phytozome v7.0 (chr-ID scaffold06711; pos 115252 to 116065 reverse strand)
gtggtttggatcactggagctagccgtggaataggtactaatttagatttgttctggtttccaattcgtgtaatttttattgagttgtatcgagtttatcgcgttgacttgaatggttgataatcctgatatcagtttcctatctaagtgctattagtacactaatacatcaaaattctggggctttactgtgtacatatgtatttaggagtgcttttatgcgtgtaattcaagggtgtcttgcaaccatttagctgcctttgttattttacgtcattgttgttatcaccaaagtcattcttttgctggacgaggacgactgattctaaaaatgatccttttcgttagaatttaccgcattgcgcagtttgtcctttctaaatttcaatggtagtaaaaaatgaaccgacttggaatcttgcttttgctatcgtagttaagaggaatatcgttatcactggaatgacagcacttaggatttgtttattgggatagcaaaagccaaaaattgtcttcaaaatggaggaagtgatttattttctattgcaatttaggcatcattcttttgttttggggtggtaaattgagataactttattttattgtcaatatgtaattgtattggcatctaattgtttagaccttaaaattgcaattaaactttataatggcttattttgccttgtgtctttatatgtggaagataattggccataggatatctggtccaatctagtcactcctttaagttatcatccctccttttctttttctttttctttttctttttttaaaaaaaaattgccttttgagg

SEQ ID NO: 42874 - DNA, 724 bp, Manihot esculenta
  Intron number 2 from transcript cassava4.1_019384m (locus cassava4.1_019121m.g) derived from phytozome v7.0 (chr-ID scaffold11668; pos 40659 to 41382)
ctccaccggtttcacccgctggctctactcctccggtatcccctttctctggtatggtttgtcctcgatctatagaatgacaattaagtccctggtctttttaccaaatgcctaaaatgccctctcctaagaaactggagctaggtgtatctagaaatgtctacagtcagttttgtcattttgggctgcttggcaattgggtaatgacaattaggtaaattattgctttgctgctttggaatttggatagtgacattttagctaggtcgtcgttgacgtgcacttatgctttgtctatgcatgggttttggccggctcaggataaccataccccttttaaaccaagtatggttacttgaattgttaattaatttttttttaattattttttgaaaaaagaaaagatttaaccctgttgaaactatatgataatatgaaattatctagatcaaattacttttgagagtcaattagttggtttatcccagtcttctgtagtttggtacaaatgtaatccatggtgttcaatggatgagatgacaacttatgatgctaatttttttttagtcttaggtactataatctcgacctaaattgatgaaacttgttacaaattgtaaccttgtttaagatgatttactcgtcatatagctgatgagcttttcttttggtgtttataaaaaaaaaaggaggcagagagtcatttcggtttcgaagaagatcg

SEQ ID NO: 42875 - DNA, 720 bp, Manihot esculenta
  Intron number 1 from transcript cassava4.1_005017m (locus cassava4.1_005017m.g) derived from phytozome v7.0 (chr-ID scaffold03614; pos 23572 to 24291)
ttactcgccttcattcatcttcacaggtaaattaggagaaattgtgttttctttatgatctgagttgacaatgtgcataactgtatgtggggtgatcatcatggtggatttttcttctttttgccacattaatctgctgcgcatatacacttgcatgattttctggaatctggtctgcaaatccccccccaccccagtttttagttcctgagatgtaattaagcttttaaaaagttcatatattcacactttgagaatgtctcctagaatttgattgttcagacctcaacaaatctgataagtttccatatcttttactatgcttagcaatgattctttgataattttcgcaatagattcacatggatgcaagaaagatgttaccagtggttaaaacttctggttggactggaattgcatctgccttcttttgaatataaattttccattatacgctcattttttggcttattcttgcattctgaagctttcaatgtaaatttctgccaaattaatgcaaccgcaagcatgtttcttatttgcttgcaacattgggggaagtttatgaggggtatatgtacaagcatgtgtgtgtgttcacaattgcattcatgaatcttcttttcaaatatttgagatgatatctccaaatcaggcaataaagttgcactttgtgatcatccagggtttgaaggaatttataaacgaggttaacacgct

SEQ ID NO: 42876 - DNA, 541 bp, Manihot esculenta
  Intron number 1 from transcript cassava4.1_020396m (locus cassava4.1_020396m.g) derived from phytozome v7.0 (chr-ID scaffold07268; pos 33187 to 33727)
gaatccttccatcttggttggcgccttgaatttgtgtaagttgctcttgatatggatggagatggttagaatggattctcctggtgtttgcatgtctcagatttagagcctaatcattcatttggatttgcaatcaattcgcctttagcttcgtacttctgactcctggcttcagtgtgttgacaaaagccaacaatagtaactatttacatgagctcttcggccttcaagttgctcagtttcaggcagttagcatactcagtgaagaaaaggcattgctacttgcttcattagatctttttcgagtcaaatttgagtttttcaggttaagcctttagggtttcttaggatgggctttagttggctgtctatttttttttcttaggcttagaggctagagatgtattaagttgggtgatagagcatattttagtccattttatcattatgttcttgatgtttattcacatcttttctgcttaattttatggttttaatcatgttttgtagatattaggtgtaaagagacaatctggagaaa

SEQ ID NO: 42877 - DNA, 947 bp, Manihot esculenta
  Intron number 2 from transcript cassava4.1_027219m (locus cassava4.1_027219m.g) derived from phytozome v7.0 (chr-ID scaffold09565; pos 555795 to 556741)
caaaagagcaagccaaggcaaagggtaagataactttggatttttttttctattaatgggattattttaaaaaataaaattcactaaagctagtgttactggtgttatttaaaatggtaattttgaaattaaattaatgaaaaaaatagaaatatagttagtctaaccaactcaaattttgactggggtcaacttaaaatttaataataattaaatattttaaagctctatttttcttaccataaaaataaataatattaaaatatatttaagagggtaattattatttaacttgatattaattatacgcaactagtattcggttcaaattgaaaaaaattaatcgaatcgaattaatttgaaaattcggttcggttttttatttatttcagttcgattcaatttttaattttaaaattttcagttatttcagttcagtttaatgttgattagaaaaaattaagaaaactgaaccgaaccgaactgattagtgataataatatgttattttcaataatatagataaattaaattatattaaaattaaaatattttacttaaattttaaaatactaaaaataaagtataaaaaataaaaaaattattaaaaattgaaactaattaaattaaatcgaatcaaatcaaactggttcaatttgattcgatttctaactaaaattagttcggttcgattttcataaatattaaaattttaattttcaatttattcagttcgttcaattttaaattgaaccgaccgaatactcacctctaatattaataaatttgattacgcactaatttatcatatttagagatttttttattgatcgaagattaaaattaagatcttataatgtgttaattatataatgatgggagataacagaattattacttttttaatgacaggttcagcagccaaggaagagtaaatcttctggttc

SEQ ID NO: 42878 - DNA, 773 bp, Manihot esculenta
  Intron number 1 from transcript cassava4.1_015657m (locus cassava4.1_015657m.g) derived from phytozome v7.0 (chr-ID scaffold01895; pos 97341 to 98113 reverse strand)
gaaggtcatccctcttgaagactatctcacctcttgttagttacccattacttccttcatctctaatctttcaattctcatgcttttacgcttcccttccgcatttttttttataaacttcgagtcctttgaagagaagtttgtttggacgtttgctacttctgtgtgtcggaatattttcttgatgcttacatcacaatctcacattcttgaatgccaacatttaattgacctcggaggattttggctttctctactatgaatttttccccctaattatgatttggaaatttaaaatttgaaattttaggggcaaggattagtggttcgagtataatctgtctattaagtttgtgcttcatgtgcttgttgtttcggaaatttcaaaatgaatatactggtatcaaaatccaattcaagaagggagagactacatgaaaatgctcgtcttatttatgcttaagcaaatattattcaaataggaagccaggtccgtggctaccttggagcagccttagtttcagaccccgctggttaaccaggaatgagcttgtcagtctaatcatgtgagaagttgcctacgctaaaaattgcagaaagggaacatgagtgttgacatatccacatgaaaattaggattcagccaacctttgtacactgacatactcatagatgcttgaactatgaagttgcagctttctgatagacactgattttttggattttgaaattaaaattttgtttttgctttgtttccattgaatgcacagctg

SEQ ID NO: 42879 - DNA, 928 bp, Manihot esculenta
  Intron number 3 from transcript cassava4.1_005874m (locus cassava4.1_005842m.g) derived from phytozome v7.0 (chr-ID scaffold01551; pos 330272 to 331199)
ccaaggtactgaattctctttggcttatttttgttttcaatacaatcttaaatgtttgggtggtaagtaactggtggtctaatgagcgcctgatatttactccttggataaggtcacacattgaaagaattataagtaggtatgtcttcctcgtcacatttgtgtagcaaagcatttgaatatgtaagttcgaattttctgactactgcatattctccaaaataagtttctctctttctctctctctctctctctctctctctctctcataaaaagggttctattttccaaaggctgcatgaagtgcaaggttgatccagatgtcatatgatgtccagaaaccttttatcgccttagtggtataggtgtttggttttgggtctggtatgcctctagctaagaaccgaaatcaaatcttcagttctttgatttttgggaattaaactttggttcaattttggttctgtttaagcagttttgcacggttaacactaatgttaaaataataacaacattagtataaaaatatattatatgtaattcttagtaaaattattatatagtcttatttatatatttcttaactatatggtttttaattaaaagctactcatataattgtaattaacatataaaaggatattatataactaatttgtatttagtcatacagttaaggattagtaggtaatttaatacatttataactgaaattatttaaaaaataaaaataaaagataaatattgaattatgtgtgtgtgtgtgtgtgggtatatatttaaaaaatttatataagttattgctatttgattccctactcccatcctgttctatttgtgcttttaatttgttttatttacagtttgtccttatggaatgcttgaactacctacctgaattgctacgtaatcttgaaggtttgggacc

SEQ ID NO: 42880 - DNA, 880 bp, Manihot esculenta
  Intron number 2 from transcript cassava4.1_018655m (locus cassava4.1_018655m.g) derived from phytozome v7.0 (chr-ID scaffold03718; pos 20730 to 21609)
gtagacttctttggtgatcaggttagagttttcctctacacctttcatattctctctctctctgtttttgcttggtagcagaaaaaagaggggataaggaaagaaaatccaggttggatgtcatcttttttctcttgtattgatggatattggacagtgtaaaggtcaaacattctacatagattaaattgcccgaagatgaggatttcttaatagaacattatggaaattttttctgtttttgtacagaagttttgaacactttctagaatgatgctgccgtgataaacataggaaaggtctctggtttgactaggcatgagggccatgactactcatattaatcactgtcttgcaatttcttcattgcttctagaataatgtccattagtctgcatatggaggccaggctttgaagctacagtttcatcttacaattgttagagaccaataagaaatagtatcaaatacatacctcttaggctcttaattgggtaattaatttgagcttttggcatggtgaagtttgaggcatcaaatttatctatatagtcccgtagtataaatgtatagggtttcatgtgggtcctactgctattttgtagaagcagcagtctagacaagttttttccctgattgattgcttttacactgtcaaattgttaaattgtggagttagttttatttggtttcaaccttcaaatcgaaggaagggagaaggaagcagggtattacctaacaacatatactagttgacaagtatgttatactaaaatatttttatttcattttcttaatctttttgtgtggggatcaattgtagactatctcctacttgttgatatctgcggcttctacagcagttcccttgacgaacagg

SEQ ID NO: 42881 - DNA, 187 bp, Manihot esculenta
  Intron number 1 from transcript cassava4.1_012219m (locus cassava4.1_012219m.g) derived from phytozome v7.0 (chr-ID scaffold09709; pos 475304 to 475490 reverse strand)
aggtaagattgtaacatttcatttctaatttcttttttggttatctaatcttcaattcttttgcattcatctttttatctttgtttttttagatatgtattttgcaattcctttgaattttcttaatgcttttgtttttgttatccatttttcaattccatttcctagactgtcaaatatttcaaca

SEQ ID NO: 42882 - DNA, 462 bp, Manihot esculenta
  Intron number 2 from transcript cassava4.1_027842m (locus cassava4.1_027842m.g) derived from phytozome v7.0 (chr-ID scaffold08078; pos 133540 to 134001)
gaggaattctaaaacaaagaataaatagtaaagaaagaataattcagtttacctcaggacactggaattcgacccagataaattattctactattaaaaaagaaattctaagtattgtaatttgcataaataaatttcagtctgatttgttaaaccagaaatttttagtccgaattgattgtaaatcagcaaaagatgttttaaagaaagatgttagaaatcttgcttctaaataaatttttgctcggtggcaagtaattttaagtattttttattttgatattgagtttattaaaggaagaaaaaataatgttccagattttctaactagagaatttttacaaaacaatgggaaggaaaaagagtaagaataaagacaaaaagagaagcccaagtctaactcctaaagccttgtctgatcacacaaatgagatcagtaaaaccaataaagcccaaagtcca

SEQ ID NO: 42883 - DNA, 433 bp, Manihot esculenta; identical to SEQ ID NO: 42239
  Intron number 1 from transcript cassava4.1_016302m (locus cassava4.1_016302m.g) derived from phytozome v7.0 (chr-ID scaffold03614; pos 562828 to 563260 reverse strand)

SEQ ID NO: 42884 - DNA, 777 bp, Manihot esculenta
  Intron number 1 from transcript cassava4.1_001697m (locus cassava4.1_001697m.g) derived from phytozome v7.0 (chr-ID scaffold00341; pos 303399 to 304175)
agtttccgtattacctcaggtaattatgccattcctctttggtttacaaatcatctgttaatgattgtgtttttcctttttcatctgagaattgaaaacaccttcctttgtttttctttggtatacttacagtactcctgtcccccaaaattttctttttcttttgataatcctcaaacagtttgctgtttggggatctaattaaatggactttctttcccatatttgtagattcttgattcccctatttctcagcagattaaactgtataagttcactttactcttccatagatacaagctgagaaatcaagattccaaataatatataatatttatattttattcttaaagttcaacaatgatttataacagcatggcaacaacttatttaatattgtaggcacctaacctaccacctttcttttgttcccctttttctttactttatgattttcaagatttttgcttcttatgtgaatgtttttacttgttggtttcttgattatcattggatatcaatatactttgtgaattacacaactcagttataaaagaaatttcagaatcacgttaaatatcgggaaacctttcctgacttgttggggatgatgaaagttgagtcatgatttataccaggatcaataattgtaacattcctgtgaactacttccatgacattattttgaatgatgccccataagttacatactgtactgcagtttttaggattttaaattttttgatgttctgattctgatgatgagcgaatgcagtg

SEQ ID NO: 42885 - DNA, 703 bp, Manihot esculenta
  Intron number 1 from transcript cassava4.1_013522m (locus cassava4.1_010681m.g) derived from phytozome v7.0 (chr-ID scaffold03332; pos 946663 to 947365)
taactcttcagcaaaagcttgactcgttcattcaggtaggttttcttttctttatcccctatttagaatccataatgtaagaattcaattcaattgatctattcattgtcaactcatgttgtagctttaaaacaaattcattttaaaagaaacagaattttgtatgtttgtgtgagaactcatttgccaaatgaccctatgggtttttggaattttttttaattgggctgtctactcggactgtagaagttggactctgttggatttcttagatgatgtaggagagcaaatgagtatgaaaattgcgcactctattgtattagggttttacctattgctaaaatacgcatgatgtatctgtctagagctgctaattagtcaggatcttgatgattttgtctccttgcttgaagaattgtaagaaatgcttgcttgataagctggtggaagagttgaatgtacatttaccttatcatcaatttgacttgtgtttaaaagtggaagcggataatacttaggcttgtaataagtgaaaacatagtttgagttatatattttagttttctataactgattaaaagaataaatatggaggtgattcctttgctttttggcgatgtcttacctgctctttatcctcttttcttcctttatggatttattgggcgttaattgattagcccgcgggttagcgggcggcaaa

SEQ ID NO: 42886 - DNA, 804 bp, Manihot esculenta
  Intron number 6 from transcript cassava4.1_004820m (locus cassava4.1_004794m.g) derived from phytozome v7.0 (chr-ID scaffold06446; pos 390482 to 391285 reverse strand)
gttttggacattaaagttaagctgcaggtaggagtaggactcttctgtcatttttttccctgtgaatatctgggtagatgtaggattttgcattattgaaataaggctccctttgtttttttaggaaaagtaaacttttactgggaaaagttttctgcactttcagtgtttgagttgcattagttttttttttttggttctttttggttgtcaagggggtcatcttttgtaatgttttcccactgactgggtagtaacttaagatgacaacatggtactttcacatgcccaaccaccccaataggccgatacttttgtcctctcttttgtctgtttttccaccttttttaatggaattttagagtggttctagtaaattttatagggtaagggatgtttcagcagataaattttctaatgtttcttcctaaggtatgaagacctaaaatctctagcagaacaaggtcctacatcattcggaataagttttgttttttttttttttttttctaattttcatgtgtacaacacatacattgcttatgcatgcatgctatctaaaaattcacacgtgttagcaagggaataccctaaagttggttgaatcttgttggtttgtcttatttcagttattttgtttcatcagcttgagaaaagatgtataatttgtcaaaaatgatgttgacaatggtgctgaaattgttggagtgtctcttgtttctattatcacataattttggtttcaagtaggatttttatcattatacagggtttgtggctgcgccttctaaaactgggagctac

SEQ ID NO: 42887 - DNA, 800 bp, Manihot esculenta
  Intron number 2 from transcript cassava4.1_012708m (locus cassava4.1_012708m.g) derived from phytozome v7.0 (chr-ID scaffold06656; pos 650004 to 650803 reverse strand)
ttaaggttattctttgctcaacattatggttctcgtattgtgtagttaaagtgtttgatcagccaaatgacaattatattattgctggaagaataatttgaatttgctttctgtaaccatgttattattatcgaacaaaatgctgcagcggctaaatttgaactgcatcatgctacccgtctcgtgaaaactcaattcattgatgtttctctctaatttgctaaagatatttgctttaccatatatgtttggtttcaattttggattagtaaatgcaaattgcataggagtttatttcagcttacgtcgtgtgatggcctagagattgaagtgaagagaagagaaaaaaagcatgccctttaaatatagagaatgctgaatggctgtatcttaaagatgatgtgaacaattttctactttattacttgctaaaggttgcacaaaacattttcttgtagcttatcatactattgttcatatccttcttggcgtgttactatcagttctctcatttaactatgggctatgttatgttactctaatagtttgctgctttatttattattctttacttatctttttgttgcatatgatatctagttgcttgttgggaaagatattgatattgtgcttgtatttcctttttgcttcagaatatgtgattcagatatggagtttatcttgcatgcaagatttttattgtgtcattctgtgttttgtattgtactctgaatagaggtggcattttttttttttatgattatactgatcactgatgcagcaaatctcgaagctaagat

SEQ ID NO: 42888 - DNA, 389 bp, Manihot esculenta
  Intron number 3 from transcript cassava4.1_006779m (locus cassava4.1_006779m.g) derived from phytozome v7.0 (chr-ID scaffold04175; pos 42511 to 42899)
aggtatgtttcaatataccaatttacacagaagagaagaatactcaaaatattttcttctcttttcttttcttttctctattgttttctcttttgaagagtgccttaatcaactcaacaactgaaaagaaagtggtcaaacaaaattgtcgaataaggcctgctaattttctcttttttcatgccacttttctgaagacaactgttttatttttttttcttcaaatatataaaacaaagattaaaagagtaatgatacaaaaaactgctttttgaattgtgataaggttttttatttattaaactcaaccctaatgtttttcttcctttttttctcctccttgaatatttttttttctcattttgatgaatactctgttgggttacagc

SEQ ID NO: 42889 - DNA, 631 bp, Manihot esculenta
  Intron number 2 from transcript cassava4.1_008902m (locus cassava4.1_008582m.g) derived from phytozome v7.0 (chr-ID scaffold10241; pos 159715 to 160345)
tttcggcatcagcttttttctattctgaatcattggtaagtttatcttttttttttccctatttttcacagttgtttttaaatattttttgtttttaatttaggaaaagtaaaattaattttgcaaaattttccttcctgtttattaagaattttttttcgttctcaattttgactgaaattctgtagcaattatgtaaaatattttcaggaattttttaattttgtttaattaaatttcacttttgcagtcattagggctttgattttgcgtttactgaaatttatacccgagatttatggggaaagcttgagtttccaggctagggttgagtaaaattctgcgagttatttatagaaaaaaatggaagatctcttagtgtttttttcccctttttttataaaaaaaaaaaaaattcagtcagctagcgtgtagcgacccaagtcactgaggcttgtttggacctcggtctttcaagtctcggtaggagtggaaaatcttagcatttgagacttccagattttgttagatttctgcgtaaattttggtctccatactgatctggaacagtaacttcagtttttttcttcaatttttttaattgttgattcgtatggaattttagagcagg

SEQ ID NO: 42890 - DNA, 746 bp, Manihot esculenta
  Intron number 3 from transcript cassava4.1_009513m (locus cassava4.1_009513m.g) derived from phytozome v7.0 (chr-ID scaffold11746; pos 343587 to 344332)
ttggaagagtttcaaatacaggtgtgtgcttgggacgtttgtatttgttgatactatttaaatataatgttggttttgtcactttggatgaacttgataattgatattgtcaaaaggcttctcttgtcattctggcatcaattattgggtgcatgctactcatctgtagaagctatataggagttactatgttttaaatttaaccaagtgacaccaattgctatacctaagaagttaacagtcaattgggattggctccattagtgcatatgcaggtgattgtagctcagtaaaagagtttaatggcatattttcttatccgattattgaggttaaattactatttggatgtctcaagcctccttaaagtatacaatattttgttggttccaacgcagttctacttgccacacattggcggtatctcatctaattgaatttcccattagttaatataggggattcacatgcacatgttttttgagcatgcaaaatgacttcctctttggggttttgatatggtaaatggtttttgtttatattgctgtagtgacttaattctagcaaagaattttcattctagttgtccatgaggatcttctccttttattagtttcttaatgattttaacaactctcggctattcctttcaaattcacatatggaatcactctattagtgaatgctcctctttgttggcaccttgattttacatcaatagttggtctttacaggttttcagccaa

SEQ ID NO: 42891 - DNA, 430 bp, Manihot esculenta; identical to SEQ ID NO: 42223
  Intron number 1 from transcript cassava4.1_012388m (locus cassava4.1_012388m.g) derived from phytozome v7.0 (chr-ID scaffold07991; pos 256448 to 256877)

SEQ ID NO: 42892 - DNA, 615 bp, Manihot esculenta
  Intron number 2 from transcript cassava4.1_016579m (locus cassava4.1_016579m.g) derived from phytozome v7.0 (chr-ID scaffold02906; pos 246987 to 247601)
gtgcatccacatacgtggtatgttggaactatttttccaagtgcagtacttgatctctctttgtttatttttcatctttttactattatattaagctctcagttggctgtttaattcattattcatttttttctcagataataggattgacttacaaattataagagtaaataaagcattctcaacccatgtaattgatggaaggtttgagaacactacacaaaatatgctcagtgttttagttaaggtgatatggaatctagaatctctattaggttaataaagcttaaatttcctcttaatgtctagtaggaattgtgaccctttgaaatagttttagtaatcagaaatgttgtttctggagctaagtgaatgaatttggagatattgagcaacgtgtattttgctatacattttagtttggacaggcggcagattaggctcttgaattttattatctatcagtcacccttggtgtattgcttaggtgataattgcaccacatggtatgatgttcttttgattggattagtttattttgccagtagttccttaatcattcttagtgcttatcataatcttcatattttgttatcctggcaggttgaatttaga

SEQ ID NO: 42893 - DNA, 325 bp, Manihot esculenta
  Intron number 4 from transcript cassava4.1_030040m (locus cassava4.1_030040m.g) derived from phytozome v7.0 (chr-ID scaffold06968; pos 112264 to 112588)
actcgtgccttaaagcaggtgaggaaaccattagtggtactatcttttgtttgtctaagattaattattgagcttgattgctgaaaagttagttgtatatatgttgcatcaaacacctctgaggatgaaatgggagatacctattgtttgaattgttaggctagctattgtactttgctaatggtagcagcatgtacattaagttctttttaatgctattaattctgatgcaaacattcaaattgagctagtgttctgtattaacatgcttgtttcttcgataattgcagtctggtcttcatcctaatcaagtggattatataaa

SEQ ID NO: 42894 - DNA, 919 bp, Manihot esculenta
  Intron number 1 from transcript cassava4.1_016123m (locus cassava4.1_016123m.g) derived from phytozome v7.0 (chr-ID scaffold03777; pos 199559 to 200477)
tgtcctttctctgtctatcgccaaaatcagacgttgtaagtttctgtatttggatgtaaaaatagttgaaatttgttgatttgtttatgattattgtgatattggattatctttgtggtcctcaagtttgatttcttttgttccccgtctagggtttgttagtcgtctttttatttgatgctttcgtgttaattccattgcatcttcgatttcgaaagtaggaaaacgagggaaattttttgttagtttttgtaatttcaaattttgcttctgggtatttaacatgtgagattgtttttgcatatttatattttctggggctaatcaagatccttgttctgagattaaaaggaaaagcaatatattttatggctaatcgtgcctcagcagaatattcttcttctacttctcttgggtgggcagactgttgaaattcttgatggaaagaggatttgtgcatagccttttacataaagcgttctcatttgcttatgaattgcttctttagcttaaacaaatcaaacaacatttttacactatgcttgataggtagtttttggaatttaggtatgggtttttagaagaactggttttgtttgggaagaggattttgtaagggaggtattcaacatactaaatttgttgattgttgaggctttgataccttaccatgcattagtacgacctcctttttctccatccaaacacaagtaaagtgcagataaaattttgggtaatttacttctggtgcatatctagtgttaattgtccctcctactttttccccaaagaaatccttcgttagtccatataaggctttccattccatgtagattgcgtttaaaaagacagtaaaggatcaccataaacatttttttttacagttgaggcatctcaaatcttcagatttcagtgatca

SEQ ID NO: 42895 - DNA, 746 bp, Manihot esculenta
  Intron number 1 from transcript cassava4.1_009137m (locus cassava4.1_009137m.g) derived from phytozome v7.0 (chr-ID scaffold00080; pos 219426 to 220171)
ctgtcgatttatctacccctcaagtggaactggtggtgagttttgttcccttttattgcgattctcttcgttgtttatcatgttttctttccaaggtttttcctttgtgaaattcacagggttatttttaatagctaattgcttcttgaattttgtgcccagatgccgaatcattatttctcgtgcttgtctagatcggatttgtgtttaaagatgagctgaattttacatggaaatttgctttatccataaagctgaagtacccccattccccatgggatcacatattggattgattgactaaaaagaatagtctaagtcagttttgcccttttactttagttaatttagagcatctgtatgatcatttttatctatgctgaacatgttatgactgatggaaatgatgtactattttgttgtagccgttggaagatctttgaactttgtcttgtgtgcataaagtatgattttaggatataattttagcccttgcaaactcaagcttcattatttagcaattcgataatttaataactttagaattgtttctccatgtatgtaataaaaaactggtaaattgctatgtacctctgttcaatgaactctgcatatttgtagactttagtgcttgtgagggatgaagtgttattgtgagcatcattgatactatgcaggaaacgaaaaacttaaaatcgatccacacccttttttgtaggattttaaatctgccgagaaaattccgg

SEQ ID NO: 42896 - DNA, 1017 bp, Manihot esculenta
  Intron number 4 from transcript cassava4.1_005685m (locus cassava4.1_005685m.g) derived from phytozome v7.0 (chr-ID scaffold02906; pos 332983 to 333999 reverse strand)
tttataatttgcctgagacggttagttatttatctgtactttagccttcaatatactttttctggaagagttgttctctgaaagtcagacttgttagacccacaaataattatgctatagctttctatgacttttttgtgctggatgcttggtatgctttatgattgagcaactcttttatcatagatgaaaagaatagccttctggataaaatttatcactagaatcaaagaaaatatttatttttaggcctattgctaaggaaatgctgaactttttgacatgtttctatatttagaaattttttttaataaattaattatgtgaacttccagattcctttcaatttttattcactgacaaaaattccaggggtacctgacatctgagagactttatttattaaaaaaaaaaaaaaacaccaaaaggattgacactcagcatgtacatttatgccagcccaaagcccacaatatgggagtccttaagcattggagtatggattttttctgtttgtactagaataccaattatgattttcaactaagggtactgtagccgaaaccataattcagttaataagcattttttactaccccatccaacatccactatttggtgtcctatttcttctcctagaaactgatggtgaatactgtaactttatattaacattttccattaaataattttgtgcgaacacactgtatattaattggtaactggaagtttgaaactagcagacctgtttacatatgagaatcctaacttttctttttgatctagactagctgtataacgaaaaacaaaacatgacatgtctatgcctttttttttatgtaggcaataatatctgacatttacaatttgctttcctaatgtgaggttataagtacaaggttattggcaatttgtcatcaagattctcattttagttaattcttttggcaatacttacatgtttgttccattgtctgtttagatccgagaagctgacatatcccgcctgtcatttgc

SEQ ID NO: 42897 - DNA, 848 bp, Manihot esculenta
  Intron number 1 from transcript cassava4.1_019586m (locus cassava4.1_019586m.g) derived from phytozome v7.0 (chr-ID scaffold06656; pos 941167 to 942014 reverse strand)
caaagaacaatttgcaggttagtgtatctctctctctctctctttctcttccgcccccccctcccccactccttgcgttccgattctcagtttgtttcgctggaaatttcaggtaacgaaagaaagagagcgagaaaaaaaaatgcggcttgtcaagttttacattgcttgtgcactataattgcctcaaaattctgttggtcgtacgggatgttcactgtctatctatattggtcttttttcccccacatttctcctggactggatctgtgagatttttatgaattagggtggatgtatatagaaagcttcgagtttttgccaacatgagatttgtttgattatagtgcttctttagtgaaatgtgttgctgtgttaatatagaatgattttgaaaatctctttcacacacatcagtcttttctccccttttcttgccgctggaagttgcctaaaagtaaataatgtcaatgtttgcaattggtattaagaacttctaaggcatggggacggtaaatgttaaattaacaggccacagtgccatataaatccatgtccttgcaatctgcatgcgttaatgtctgaaagttcttgaatatcatttgcaattttgctttaaatatctttatctctatctgttagtaattcttttagaaaagtgaagttagatgcatactgaaatatttctccatcagtgttgctagttttgagaactgaaagttctctttaagcttctcctttgcacattttctagaaatttgtttgtttcaagtttgattctctgttgccccttttgatggataatatttgcagaacctaggttttctcgtacaacagttcgaattggt

SEQ ID NO: 42898 - DNA, 635 bp, Manihot esculenta
  Intron number 1 from transcript cassava4.1_003168m (locus cassava4.1_003168m.g) derived from phytozome v7.0 (chr-ID scaffold06286; pos 40765 to 41399 reverse strand)
agagagaggtaactactctgaaactttgcttggaggaagtttcttttgtttccttgaggtttaaattgaaataattgatttaaaagaatcaattctttgattttattttcttttcaatttagtttaatttttattttaaaaaattttaattattttgatttgattcggttcgtttttaactaaaaaccttttataaaatcaaactgaattgaatagttatttgtgtatgattttgaattgaatagttatttgtgtatgattttatataaagggtatgaaattaaatcttttcctttttaatttttgtaattttcaatttaaaatttgatattgtttagttcattattaggttagaagatgtaaattgaattttaaaatattaaaaataatatttaaaattaaaagcccactcaaactgaatccaactgagcagagagatttggttcgattcagttttttctccaattcaaaattgagtttcatatattcttaaaattctgttttcaatttattctgttaaatttggatcggaatcaaactagcagaatgctcaccttcctttctggatcttatattggaaaatttgtcattgtttttcaggtctacgcacaatccatttctgcagcctgtcagct

SEQ ID NO: 42899 - DNA, 781 bp, Manihot esculenta
  Intron number 1 from transcript cassava4.1_001809m (locus cassava4.1_001809m.g) derived from phytozome v7.0 (chr-ID scaffold03614; pos 3902385 to 3903165)
gtgaattttggcaaagaccggtttgatatctttaggttcgtagtttatatttttggtcttgctcttgtttttggtgaccttcttgctgtaatgaacagatttcatcacagcattttgttgtggatgtggagctggagtactggtgggagatgtgttccaatgatggaatgcctgtgattaactgcgagtgttctagaccatacgatcatatttatgtgcaattcaatagaataagacaaatgagtggaaattagttaaattactacgtggttgctttatttccgactaattccctctaatgttgttgcaacacagtattgcattgttctgtagtttgttttttgtgatccatggaagtttgtttatggcgcttgaagtatcttagatttcatttgaatttgggtaaaagaagttacttcattaagctatatattcaaagtttcgtcctttgaagtaagtgatattgtgcaggatcatctcttctaaaccaacctttttctctagtttcttttgagttctctgtcattctgaaagtaatgaagtattaaatgtatacaaaggttttaatgggtgcaaagaaagacttttgttttcatagtttatcttatatgcataatattgtagtgatctaaatgttttcaagcacgagactatttatctaagtttattgattttgcgtttttagcaatgttggtccaacttttacacttggcttgacatgtgatgagatagaaatttgatctcaggtcattgtcgagacaagatattcaaattttggttg

SEQ ID NO: 42900 - DNA, 679 bp, Manihot esculenta
  Intron number 1 from transcript cassava4.1_004701m (locus cassava4.1_004701m.g) derived from phytozome v7.0 (chr-ID scaffold04260; pos 147703 to 148381 reverse strand)
cgctcttgaacagctcaaaacctctgccgctgatagtgagtctaaaattttccattttgattttgtttttttgtaacatttggttgttaattgttaagtttgccaatgtcttgctaaatttccttattaagctgctttttgaagtataattagtctctgattgaacttgttttttgttctacatgaaaattgcaagcattttctagccaaaatttatcgtcttctttggaaaatgcttgatttgggtttattcaatccgtaattagtacaaccttttacaataattccagtaagaaatttaattgaaagatggaagctttcaaacaaactgtgcttgaagcagttctgctacgtttggtgtgctctgacattttaaaaacccgtaagcatctacataattgaagaatgttataatttagttacctggtttatcatatgttcgagcatctgattaattgttcaattgactggctgattgggattttcatctaagttctaatttagatgaaaagagttcccttacagtgtaatggactacaaggttcagcttgaagtcatctttgggttttactttaatggcagaattgcataaatttcgtatttggtattcttttgctgacaattttattactggtctccatcaggatatacaaaggaaagggccagcattgtggtcatt

SEQ ID NO: 42901 - DNA, 294 bp, Manihot esculenta
  Intron number 2 from transcript cassava4.1_012331m (locus cassava4.1_012331m.g) derived from phytozome v7.0 (chr-ID scaffold03049; pos 820271 to 820564 reverse strand)
agtggccgctccaggggtagctctggtcatcgcaggtaataagactatcttatgtttcctatattccattatccatgattctccttatttaactggtcaaatatgacatgatattctgaatgggttagtttcttttctttttaacattaattttgctagatttggcatatgtacatctttttttcttctcaaattaatagttgtgctactgttggtttgattgtgttactttcttataatttatgcctaatgtccctgaattccacagttcccgaaggcatcgatcccgcttct

SEQ ID NO: 42902 - DNA, 988 bp, Manihot esculenta
  Intron number 1 from transcript cassava4.1_012331m (locus cassava4.1_012331m.g) derived from phytozome v7.0 (chr-ID scaffold03049; pos 821574 to 822561 reverse strand)
tttccatttccaatccaattttatctttatacaaggtgagaaagtttcaatttttcttttcccccttttctagttcagcgtttctgctgctctaacttggcttattgaaattttgtgcgcataaatcatagaaaaggccttccgggttctggtttgagttgcttgttttattctactgcgaacccataactgtggttttatttcttttttcaaagtactgctgattttgatgtacgtttgcctcatatcgatcatttgttcatttttatcgtagacccttgactttaatttggtcaaaattttatttttatttttcttttagatgctttattgagcatgataggtattgaatctggtgggtctgttggttagtcggttctttaatttcagtgaatatggaggactaatctatttgcttgtaatttctttagattgtttgaattatttgatatcatccaacagccatcattttttacttgttaatccaattcattcttgagttcgattttgatgttgcttttttgggtatgattaaaatccctttattgttaacataaccttagacttgtaatcatataacgttgcctcttgaattttgggtgtctatcacttaaaggtatgtacaaaaaaggtggagcgtaatctcccttttggcttctgaagaagtgagattgaatatgattcttgattttctttatcttgtgcttcacacaaaaactttaattgatttatggctagtacagttatatataaatgaattgagctgaattttagtaatgaaattcaaatggatgctacttatttgtccaggtaagatatggcaatttatctgaaaggagttttggcaaagcaagtgtttgtcttataaattgagtgggatattttcaatgtcatgaacaacttgttattctttctagctgttttttcactgttacttactgcttacctacttttgctttttgttccatgtgcagctatttatatttgt

SEQ ID NO: 42903 - DNA, 675 bp, Manihot esculenta
  Intron number 1 from transcript cassava4.1_002770m (locus cassava4.1_002770m.g) derived from phytozome v7.0 (chr-ID scaffold03614; pos 1533111 to 1533785)
cacctaatcgtcgctgcatcaactgcaataccttggtaacggctctttatattactttgaatctttttaataaccccttttttctgtttttgttgttcatttcattttttgagtttgattagcttaagcttgaaacacaagtccttgtgtgtatacagtaggaaatgtcaattggaggctttttcttaaaaaaaaaacttttttttttctgaagtttctgggtttgcttcgtgattttctggacagtatcagtgggattggtttttgaagtaatattctagttgaaggcttgtttggtggaagaacgtgtggaaagaggaactgaaaagggtcttgataatttgctactggcgttttggattgccaagtgcactgggcatgctattgctagtggggtcaaagttctagctcagtgtttacttggggttgatcaatagctggaagagtgcagtttgaaagaggaaattgagattcttatttgtctttaaatccaccttttttttgagacctcagattgccaaaacatctcgattatcttaaggcgttaaaaaagaaactaaaagttccattttggcattagagagttaaggattttaattttgtttctcttttgcacacaggaatagtaatgattcatactaattttataagccttgtttgtgcagggtccacagt

SEQ ID NO: 42904 - DNA, 766 bp, Manihot esculenta
  Intron number 1 from transcript cassava4.1_006493m (locus cassava4.1_006493m.g) derived from phytozome v7.0 (chr-ID scaffold07519; pos 205243 to 206008)
tttttgttctcactggtaattttttcgtcgatttgttaaaatgggtttcctttcttggattatttttagctttgatttgatcagctgtggattttttttctcaatcggatctctgctgcttatctagttgaaggttgcaactaaatgtatttaagcttttagatatttgacagttgtggctatgggtattgtaatcaatgtatttaaactaattttgcctgcttctttattatgtttgttgtccataatttagttagcttggtgtttagttttggatgtgattcatatctgcacttaacagtgagcttggaaggatcccttggtgagtgctattgtcaattaaaacgatcaaatgatctgatgggctttcataattcaaagtgtctttggtgttatataattttgtttctggtttctctttattgtttgttcttatcttttatatgattagagttataaataaactgagcttgtttatttggagatttggcaattacatctggagaagtggctgcaatatcaaatgttttgctttacaaaatttaacctcatattttgttttttttttttttatctgatggtatttttggacctttgctgttctgtatgaatttatttgcaaacagtttcatacagtgatgcttttatttcacctgctgatgaagcaagaaatttgctctctgcatactttatcagcttatgatttagtctctggattgtcaggttatcttaaaacttgaagcattctttggcagaccctgttgca

SEQ ID NO: 42905 - DNA, 857 bp, Manihot esculenta
  Intron number 1 from transcript cassava4.1_011465m (locus cassava4.1_011465m.g) derived from phytozome v7.0 (chr-ID scaffold06914; pos 1110510 to 1111366 reverse strand)
attgggttccattctctccactttttgtttaattattattattactattattgctactattacaattggggctctatgtataggttgcatttttttttttttttgacaattttgaggttaaaaatctgttgcatactatctgtctgttacttctcttttcagtttctccctcaattaacaattttttgaatttggataaaggatttttgataattgggtttagtttatatgtgccaaattgagatatatttatgattggagctgaacaatttgtagattgagagtggaagttttcacattttataaatttataaacattatatttttcttaggaaccatgatagttaaaatataataataataatgaatctagaaatatctgtggtggtgggggtttgagactgaatctgttaattgggaagtgaaagataaatttgaaaaacagagatgcctgcaaattgggttttgtggtttatcatttaagctattataaggtctaatcctttccacatgttcttccatgcggatcctttgattcttagattgagtaaagtttgcatgtaatttgtcaatgaactgaaagattaaaagaagaatctaatcaaagggtcaagaggatttgttattgactaaagtgaaaattgagacaaatttcctagtcatttaaagaagttgcgtcaatgttaatctattccagagaccctttggcataggatataagaactagactagtatgttgaaattgatcatgaattcatgacttcttttataacatgcatgcaagtatttaaaagattaaattttgaatctagttgaaattgataatgaattcaactgaattttcagaactgttgaag

SEQ ID NO: 42906 - DNA, 656 bp, Manihot esculenta
  Intron number 2 from transcript cassava4.1_003348m (locus cassava4.1_003348m.g) derived from phytozome v7.0 (chr-ID scaffold06512; pos 1986766 to 1987421 reverse strand)
taccagtggtcctcaaaacattagtccccgaacaggtatgtagcccactcttactcttacatcattaaaataagttgaatgctacttagaatgttttttgctcggattatttcatagtgttgacgatataatgttattttacttttctctgtagatcttattggtttaatctaaatggtgtgtttaggttgttccatcaatcccattttcttcccgcttgtgattttacaattcaccaaggcatacaagggattaatcttataatttgctaatagatgtaagctcaaaattgcatgtatagcttcatattactattgtcgccaacatggtattgcaacctttcttttctcctcttgtttgcttcaaaagggaaaagactcgtaggaaggatctgcatcgttatttattctagtccattggaatttgagcaagttcagaagaattcaaactggttttcataaaattgtttactatcattcattatgctgtacttcttttctttcgtgtcttatcttcatagctaccctgccttccttttgtttcttggctatattttcgggcttagaatggttttgtgatgaagttgtttagtgaatctttttaatttgattgtttaaacaggacttcctaaactgcgtaaagactgggttgatagg

SEQ ID NO: 42907 - DNA, 689 bp, Manihot esculenta
  Intron number 2 from transcript cassava4.1_023784m (locus cassava4.1_023784m.g) derived from phytozome v7.0 (chr-ID scaffold01551; pos 1907943 to 1908631 reverse strand)
gttgtgtttattaaaggcctttcctaggttgcataaattttcgattcaggtgaatattcttaatttgcattgaaggaatcattatttattctgttctatttttggaatccaaatgagcctttgtatatttccttatatatttttcaaatatctcgaagctctactttgaagttgctggtagttatgtaaaatctacggagttcaatatttctttcgaattttgatcatatgtatcaaataaaactgtagtcaaatttatagctaccatttttctattttctaaaaattctatccttaatgggcttagttatgtgggccacaaacctcaggatatggtggatgtttattcaccgccggccttgattttcctatcatttcgctcctttccagagatataggaagtcaagaaatcaatatatatgtagattcttagtaatatgatcttcatttcaaattcattaacagttgtaaatgatggatgaaacataagctgctgcattctcgttcatgcactcctaaactttgcttgttctgggtattcaaacatttgtttgtatgtcttaacactaatttcttgtgggtaaggaattatgatatgattgttccatctatctgggcagtttaattatctatatcctactaggaatgagaaagcgaagtttctgaagtggaagttgaaagcaaaggtg

SEQ ID NO: 42908 - DNA, 660 bp, Manihot esculenta
  Intron number 1 from transcript cassava4.1_028081m (locus cassava4.1_028081m.g) derived from phytozome v7.0 (chr-ID scaffold08316; pos 966210 to 966869 reverse strand)
ctggtgctctttttgtcctcaaatccaaaggtatttgctactaaatttcataaacttcttcattaatcattcacagccttgattgtaatcttcatacttaagttagcaggaattaattctatgtaaatttcagttttgacttctttataaattcattaatcttaataaatatataatttcttttaaaaaaaattaaaaagaggagattaattaagttttcatttgtggtttctagtttgaatttctcctttgcaatgatcatatatgttttactggcaaaagattggtaggtagttgttatatcatttccttgcataaaaaagaaaaattgacatgtgctttgattttatgaaaatgagattaatagcaattaattcaaaacacatcaagtcaaaatatatcaattaaaatattagattttaaaaatgaaatgcaataccaattatgggaaacttgtgcatttttaaaattttatattaaattaaaaaattatattgaactatttagaaattaaaaaaaaattgatagtatacttattaaatcatattaaataaaatttattttactatttaattttaattttgaattttcattaagaattatactgaaatcaaatgtggcgtaggatcttggattcattgtggataccacttgacaaca

SEQ ID NO: 42909 - DNA, 167 bp, Manihot esculenta
  Intron number 1 from transcript cassava4.1_008619m (locus cassava4.1_008619m.g) derived from phytozome v7.0 (chr-ID scaffold05375; pos 125170 to 125336 reverse strand)
tgatcttccgaggtcggtttttctatctagaatttgcagttttttttaatgttgtttttgaatttgtatggtgactttgtgattatgtacaggttgtgtactttggctatgtttttgagttattgtggattttctttttcttcttctccttgttaagtaaaggttca

SEQ ID NO: 42910 - DNA, 534 bp, Manihot esculenta
  Intron number 1 from transcript cassava4.1_027127m (locus cassava4.1_027127m.g) derived from phytozome v7.0 (chr-ID scaffold09501; pos 245056 to 245589)
tttcctcgccatctcaagtcagtttctgttctcctctcttcatgcttgctttttaagattttctgcatctcataatttcagaatccaagtttttaaatcgttcttagatttcatatgaaaagctgacctctttctcttgttctgctctggaaacctcagagaaccagccattattttccaatgaaaattccctctgtgattgctttttttttactgttctatatcctcttgtagccgttgtatgggtactaaattttaaaactagttaattattcaatgcaaatatcatgattgttctccttcacttgctatgaagatgtcttcaaagatgaagcttggtgattctggctttacagccttggccctttttaattctttttaatcaatgaagtcagttcagtgtcctatcataaagcttcacaatcattgaaacccatttttatttgattgttgggatgttattttcttatggtaaagcgacaagattcattgaaatgctaagattgctgtccgaactttagctgtaggcctaac

SEQ ID NO: 42911 - DNA, 334 bp, Manihot esculenta
  Intron number 3 from transcript cassava4.1_030864m (locus cassava4.1_030864m.g) derived from phytozome v7.0 (chr-ID scaffold09876; pos 677055 to 677388)
tcatcctttctggtacgttttcttatttaatcgagtttgcgaagattgacctagtgacattacatggtagcgtgatttttcttgtttgattgattacatcattatatgggtttgtctgtcctttgtctaatttctctgtaattattatgataattatgatttataaaatttgaagtaattaattttctaagcaaactaattccttcttcaccttttatttttggttttattttctttcttcacctgtttccttcgcttctttaaattgagaaaacaggatgttttgattcccttggatgtgcttatccctcttctttggtttcagctcatagaa

SEQ ID NO: 42912 - DNA, 916 bp, Manihot esculenta
  Intron number 3 from transcript cassava4.1_014795m (locus cassava4.1_014795m.g) derived from phytozome v7.0 (chr-ID scaffold09761; pos 741524 to 742439)
ggcattggaggaggttacaatcattttgcagggaggttagtgttagcgtgtgtgtgtgcgcgtgtgttcttttaccccttagtatttttaatttctttttttttttttctttttctgcttgtttgaacatcggttgtggtcttctcttgcaagcaatatgttaaaatccaagttagattgcttttgattgtaaatcgatttcttagagattaattttactcgtagtccctcaacttatgtggttgtacaagtgatgtccaattttaatttgaatcataaaaatatctgaacttcaattcgagtttttcaatcatctcaatagctaaacatgtagcttaaaatactattgtgttcttcaatccaccgtgaacatgaaagtcagccatgttcttttacctctacacacaattgctctacttccaagcattcaacaatatattagttggtttcttctctttctttcctttgcttgttccaccttcctacaaatatttatctttttgttagggcttttaaatgcttgagtagtcgaccaccggaggttacaaattgtaaatttattcaaagttcagtgttcgaaataattaaattcatggcctaagtgggtttcaaatctcaggattgttaggcaaaaatttccatagtttatggcaatttttcttgcatatcctttgtttctttatagtccccatgacatttggcatttaatagtacctaaattaccgatttcaacttttacatgactctttagtttgtagaaggccgttgagctacgtatatagcaattagttgtatttttgtcctttatttgattgttatttaattatagaagaatactcatatactgacatttgattccattcttattgctgataacttagagacgcgtcacgggcatttgtttcaggaaacttta

SEQ ID NO: 42913 - DNA, 790 bp, Manihot esculenta
  Intron number 2 from transcript cassava4.1_014790m (locus cassava4.1_014790m.g) derived from phytozome v7.0 (chr-ID scaffold07012; pos 1398924 to 1399713)
ggcaggcctcggtatctttcactctggtgtggaaggtaatgcttacacgattatatttcgatgcatgataaggctaataaaaaggaagcaggagggagtgggaaggtgagaaaagagaattagtcttcagcaaaatgcttcaaaagaggaatggaaaagttaaaaaggaaagaaaacatgatagaaaatgaggataagacggagaagtcatggtttaaagtaatagaaaaggattgagcaactctaaagctttctgtaggtgtagccttgaaataattagaatagaagaagatgatcaatgtagccaacttcaactagattgtgattatttgttgagttgagtaacttgtgtagaattgtcaatattttttatacaaaatctccaatttctctcagataagtgcatcaccatattttccctcctttttgtttttccactttactgtatgaaatcctttattgcacctcttcttcctcctatcaaagcatggtataaataaaatgagttacaaaggaggggtacggggctggtttctttttccttgtttcccttgaacattttctttcattttatgtctccatatcatgcaaagtaccaaaaagaacaaaaaattaactgggatttagatttaatttttgttctcgtaatacattgattaactgacagaaataatattccagagaacagaggattcatatgctctttcttgttaaatttcttaattgtattgctttctatttccaagccaagttcaaattttctaattgcccaacatccattatgcagttc

SEQ ID NO: 42914 - DNA, 453 bp, Manihot esculenta
  Intron number 1 from transcript cassava4.1_013011m (locus cassava4.1_013011m.g) derived from phytozome v7.0 (chr-ID scaffold02960; pos 374651 to 375103 reverse strand)
ctggaaattctgctggtactgtcactgcctactatgtacgtatccaaaaacaccctcttttcattgattatttatttaaaaatcactcatttcaacctctctaagatgactgagttataagattattttgttttattatattcttttccctacttggaatgaatttttttggaaaaagtaactttaattagtgaatttttttattcttttggtcacgagaatattattagtgtgaccaacttttctttttctttctcgcgactgtgacttattttgagacatcacttcatgatgagattgcaaagagaaacatttccttgaaaatttaatttttattttaaaaattattttaatacattttgtttttcgtctctttctgttattatatataatgaactaaattcactttatcttctaaatatcaatggcagttgtcttctcaagggccaacac

SEQ ID NO: 42915 - DNA, 1044 bp, Manihot esculenta
  Intron number 3 from transcript cassava4.1_013139m (locus cassava4.1_013139m.g) derived from phytozome v7.0 (chr-ID scaffold03332; pos 604791 to 605834)
aggattccatcttagagaaactccaaaaggtcagattattgtaactcctgttttaattttgatttgtttcttacctcaagacgatcaattctattattgtattataattctagatgctgttttttttttctctcattatcttaggttttactttgccatctgctttggtcttcttaagagtgtatatttaggttataatagttattaatataattatgagatttagcagctctatcattaggtgatggcttattttacacatttgcagtttggattataaatgattcagcaaatcaattgatgcatctgtgtaaagttaagatgcagtaattaaaaggaaggttggctaagtggcttgcatataacaaagtttttataaatacttctgtatggacaagtgatttgattcaagttttatggttgggaaggaaaggccaaaacgcttgagatcagtattgtaattaaaaaaactctcactggcaacttaccttgtaggctagatatggcgtggatacttttctaacttctattaattaggacaaacctgcacagaactctattttgggctaactactttccatctttacatgttctttcattacttgtgttggtagaattgttgaaggttttgtggcttctaagtgaaggtagtgaagtcatttcttgggtgccaaaattttctctacaatttaatgatgatatttacatattgattaatcatgggaagctgtggattttaaagttatgatcatgatgttggtgctaaaatgtctagaagctctataagctgtttatttgctctgcatgatgaagttttaattggtaatggtaatactacatgatgaagttagatcattgcttttatgcacgtgaaagctagattgtcattgatgcagggcagcagataactgtttttctgcatatagtgtgtgattatggaggaaagtgactatatatcttgccatgcttaaattatttggtgtttgttgagtttctgattaagtttctctgctttaaacaggctgcagcagcaaaaaaccaaaa

SEQ ID NO: 42916 - DNA, 335 bp, Manihot esculenta
  Intron number 1 from transcript cassava4.1_033602m (locus cassava4.1_033602m.g) derived from phytozome v7.0 (chr-ID scaffold00080; pos 500943 to 501277 reverse strand)
acatagttgagaagattgaacacttcactcaagtagctatggcaaattacatataagtttttttttaaaataaacttggaaaggatacaaggcagatattttgtctgatttatcgtccccgtttgtaaattaccttctacctttctccaatcagttgaaatccccattggttttgaatgtttcaaatgggcccaagatcagagaagaagatctatagtttggaaaaatcctccttttaggcattattgtggatgtaggactttttgctcctcattaaatttttatgctgtcatttattcgtgtaggtatctgagcttctggaatcaggaaagaca

SEQ ID NO: 42917 - DNA, 979 bp, Manihot esculenta
  Intron number 1 from transcript cassava4.1_030778m (locus cassava4.1_030778m.g) derived from phytozome v7.0 (chr-ID scaffold10173; pos 574558 to 575536)
gaggagcttataaccaatctcacgttgctcttcaggtcataacataactctactcttaataagatttaacaaatatatttcttttatcccttttccttatacatttgcttgcgttaatttcttgagtttggattaagaatggttgtttatgatatttttgagttccaaaggttagcagtgggtgaattgtctatttagagtagtagatgaactactaataataactgtggatatgagatttttgaataatttaattttattgaattatttataaacatatttattattaaaattatttaaaaaatattaaataaaatatatggaaagatttaaaattaaataaaaataatataataaattgttttatcaaacatatttacaagtttaggttttatatttttttaatttataaatttagcttataatctcacaaaatattataaataaactggtaatcttatttttagaatttataagttagacggtggtgataccttcaactagcacgtaacagcggaggaaacttcgcagctggtgctgcgatgccaaggccaaaaatttcaaagtagaattaagttgggaaccaatgatgtgattttggatatccatccaatggatgtatgccaccacatcattttgattttatatatatattattgtgtttacttttattatagagtataattccatttggattcgaatataccaatcttttgaatttggatgtctttgccctttcatggaagaatatgagatcatagtcgcataggaaggcatctccttctctcacccaaaacaataatggcgttacacgttacctctacgtataaaatagcatctcttttatatatatatatataaccagaaattgacatttcagttcagctatttttgtttctttaaaaaaataatttttttaatatataattttattgaattattgatctactaagcttggcaattatgctgatgttgacag

SEQ ID NO: 42918 - DNA, 730 bp, Manihot esculenta
  Intron number 1 from transcript cassava4.1_032137m (locus cassava4.1_032137m.g) derived from phytozome v7.0 (chr-ID scaffold09565; pos 356930 to 357659)
cattaaaccaaagaagaactcttcgacaggtatgaatttatttgacagtggatttttaaaaaaatttaattagaagtttatataggttatatttagcttgtgacttgtgtaggatttggatgaattcattatagatgtagtaagaaatattatatgactaaatgctgatggttctttaatgtaaggacaagtgtattttctgggtatcttttttcctgtcgagtgttttttttattttttattttattttttttgggggaaggggcatgaaaaaactgaatgagttgcatttttgcatacattcttgttgggcagttttgctttatataaatgtttctcttttttgcatagaattctatgtggtgcttgtgcttatacgaatatctatcttcttttttgactagcaattgaaatgtatttatttatggtgattagaattatccttccaggatgcatttctttaacccctccctcttcccccaagccgacctgccttcttcctctgaggaaaaagacattgtaaagcattttctgtaaagtgactactttacaaaaaataaataccaattcacgtaaaattttattagatgaaacataagcatttcatgaattttattttattttttgaagcttgcttttcttgttttgaagtgtttgaatgtatgatttggttttgctgacatgcgttccttttctatcttaatacagctaattaggaaaggtgatattg

SEQ ID NO: 42919 - DNA, 824 bp, Manihot esculenta
  Intron number 1 from transcript cassava4.1_016001m (locus cassava4.1_016001m.g) derived from phytozome v7.0 (chr-ID scaffold00276; pos 97984 to 98807)
gagcttatcaaatacggtttccctgaagacatttggtaattctattaaataattgcaatctttaaacattttgcattatagcttctttgctttgtaatttatggaatttttacttctcaattaccttttcttttatggaaatttttatgtttgatgatgtattaatcttgattacattatcaagtttaataattcagtttaatgagatactgatgtaattgcccatttgtttttgtaagacatcgacgttaaatgtttaaccttttaatcatttatcatgattattaagaaattctggttttttggtaatagtttttagctggtcattctctttttaattagtgataagatataaaagagggtgaaggggacataatttaaaggaaagtaataactccatcaagccaatttcaagccttgcattttaaagaatccattatttgaaaagagaagtgattgaaggaaagaatcaagagaaggagattacaacattttccaaaagccagaaaacaaagtttcgagtaggaaaaattttggcttgtaattggaaagctgaaagccttagaagcaacagatgtctttctaacacatgggcttggatctcttatgcattttggactttcgagcatatgattttatgtatgttagaattacgagttgtatgttgagttcctgttatctggttcttttaatggctgctttcagaggaccttttgttaattatttgtccatatctgctctccctttgcacttggttcccatggctaaaagagtaggagcctttcttgatgttctttatttgtttcaggttccacgtggacaaa

SEQ ID NO: 42920 - DNA, 837 bp, Manihot esculenta
  Intron number 1 from transcript cassava4.1_027830m (locus cassava4.1_027830m.g) derived from phytozome v7.0 (chr-ID scaffold06853; pos 182673 to 183509 reverse strand)
gacttggggtttaccatttcaggtgattttcttgccatgctcttttttttattctattattattttttaaattttattttggataacgttaattgcctctactgtttcagaacttcccatgactgaccaaacagtcgaatttgtctttgtacttctgaagattatttttcattggttgtttgtggggtttgccatttcaggctaaataactgatttctgtttttctatttattattaaaaaaaattaaaatttttgggtactatcatgttggatatgggcgtactgtttagactgttcataattagtaaagctgtaagaattgtagttttacgaattacttttacaaatcccttggatatgcaaatgaaagttgttaattaatttcagatgatctattgataaaaggggttaccttgtttttgctttttccggttgtttatttcacttttcagtttggatctcttagtggtttgctttcaagggtgtgattaacaaaagcgtagacaatggtgtatgtgatgaatttcatgttatattttgttctctgctattatgtttatagtttgattaatgattgttttgaatattatagttggagttaataattttttaaccggttaatatctgaatggatgttgatgatcattatttgatcagttggatatacagttatggatgaaatttaattgtgcaagtccattttctttatgtattttaccgattgttattttgcaactcaatgctattgcattttgatgtagtggtgaaccaatgaacttgttgatttttttttatatatgatcggaagtaacgaggaaattgattgcattgcagaa

SEQ ID NO: 42921 - DNA, 604 bp, Manihot esculenta
  Intron number 2 from transcript cassava4.1_015192m (locus cassava4.1_015161m.g) derived from phytozome v7.0 (chr-ID scaffold06914; pos 346635 to 347238 reverse strand)
gaaattacatttcatacgctctttctcttcttcaggttttcgttttcgttcactcttgacttggttttttgctttctgtttaaacactgtcgtagctaaagtagctttgttgtttcgttttgctgttttaactattctttacactagtaattttgcctagttaaaatcttttcagtcaatgggcctgattcctgcgccattttctacttggacaatatgtgtttgtctttgtatgagtttagtctgatatatgttactcctttatataattatttatatatttttattatagtttttggtagaatacaacaaatgcgattacatcatagtttttcaggtggtagttaggggaagaggctgttgtcttagttagctgtgctcacgtttttatcatgcgtgtgatatgtttatgcacgtatacacattagtatatatttgtatacgtatatatgtattacgtgcgggggtggatgtaaatgtcaatgacttcattgtcctttcatttttttatttagtgtttatattgcatcaaattaatgtgtttttcagttattgagttgtatttgaatgtcttgttctatattcctacaggacaaaggcactg

SEQ ID NO: 42922 - DNA, 1015 bp, Manihot esculenta
  Intron number 2 from transcript cassava4.1_023875m (locus cassava4.1_023875m.g) derived from phytozome v7.0 (chr-ID scaffold06550; pos 844603 to 845617)
aagaatcatcctcttcaacttgtccaaatccagtggtgtgaactcttaaatcactaatagttttattggcattaagtgaattatgtttttggttcttcgcatgatttttagaagctagaaatattgttggctattgggtttcggaagtatctactaataagtaatctctcttattaataacaatcgattaggacctgtggttgataagatccttgaaaaaaacttataattatgtatttattattattataagcagaatattgattttattaatataatatccagtgaaacttatcatggatgagacctccctgttaaaccaacctgggacaaaacatggcaaatggaaacctagggtaatttgtctttgcactgagaatttcttcaagcctgattcttaggtcttcggtctacttttctactacttttctcatatgaactgataatgtaataatgttttcctttcttggagtgaatttgcagcagcagttatttaaaggggtctcagcagttttgtacaagtcattgttagttcaggaagggtttattagctaggttggccttttggcaaagatattactgcctgttggtttttctatttatacttggtaaaatttttattacttataaaaggaaactaggtctaatttgcaatgccattctagcacaaaactaagaaaagttgcaacctatgtaccatataggatatgcttgcatggcataacaaacaacaaatagaataaagacatttagacatttatacaaaagattttcttgatgactgctgctgatatgatcagttcattattgaatctgtttcaaagaacgttattgtataacaaaggagggcataaatcgtattgaagatttaaagctataattagaatttaactttatcaatctcgtaaacttacagaatattactgagctcacaagaatacttgatgataatcaaaatttgcaatcctacatgtttgcagataaggcaagaattttctttgtgccgagtatacaa

SEQ ID NO: 42923 - DNA, 564 bp, Manihot esculenta
  Intron number 2 from transcript cassava4.1_033681m (locus cassava4.1_033681m.g) derived from phytozome v7.0 (chr-ID scaffold00341; pos 440243 to 440806 reverse strand)
accaaagcaggtaatgagttcaattagtttaatctattcttcgtgtttctgtccttttgtgttttattatcttcaaaattgtgcttaaaagatgaaataagtagaatattagggccgaagaaaagttgaagatagaagaagaaggagattcgtttgtatcaagagaagaaaagaactctacgtttctagttgcctggaaaaatgaaaggaggtgttgtttattgcttatgcccttactccacaagattgtttgcttttggctgaagtctgcttcatctggtagtagaaatttaaaaacagaatagttttagaagcctggagtagatgattatttttctttttgggtcgaacctttttttttttttcgttggcactgtcgactttaaacagctagcgggaaaaatcttttgaattcagaattaaaagagcaatttacctggtttaggagcaatttattggtcacggcataagttagccgtttactatggcccggttctgtattcagggttttgattatttgtctgaacagacttggtaaacaatttgggtaccattgcaagatcc

SEQ ID NO: 42924 - DNA, 644 bp, Manihot esculenta
  Intron number 1 from transcript cassava4.1_008596m (locus cassava4.1_008596m.g) derived from phytozome v7.0 (chr-ID scaffold06512; pos 204584 to 205227 reverse strand)
gttgggtttgctatctggtccatcatctggttcaggtggtttttttttcaaaaacatttatttttttattattgtttgaatcagagttttaatccaatgggatgcattatttaggaaatcgtgatattctgttggatctaataatggcttttgtttaatggtgatatggggaggatatggttctctattttacgttggtatatgtgtatctgtgtgttttgttgcaaatggggaagtttttggttggggttgatgacagaactgtgaaaggtatgatttttttggggtgtttatttaaaattaggttgggtcgtttttttgtcatattgttccctgttagcatcttccctgattttacaggtgttaatggcttttcttggcttttatgtattttcgtttgattcttgtcctttgaactggatttcaaatcatgacatttaaaccgtgaaactgtagtagagtcccaatttacttacccatcaagcagaaaaaggtgtaatgaaggaaatttaatgagtttggtccgattttattcaaagtaatgagctgaatcctatttttattttttaaaactgattttatctatgtttctctctgtgtgttggctattgaagggaaggattgaaatccttctttgaattagg

SEQ ID NO: 42925 - DNA, 582 bp, Manihot esculenta
  Intron number 2 from transcript cassava4.1_004467m (locus cassava4.1_004392m.g) derived from phytozome v7.0 (chr-ID scaffold06914; pos 1325411 to 1325992 reverse strand)
gccactggaacggaactcgagaaacgtatcctttcgtattgggtttaccgtttgaatttgcttttgtttttctgttttgggcgtttttgtgtgtgcgctttttatgttcccccttctctcttgatacaagctcttatgtggatccctttttggtgtcttttgtgcaagttgtttttttttatttacttaaattggaaaatataatatttgttgttcattatatattgaagtttgcttgaaaggcaaattcttcttgttggggggttcaaagattttgattttatggaaaataaactgtttggcttgtttgattaatgcattttcttttcttcccttcctcctgctaaaattgcatattggatttattttggaaaaaagaaagttctttatggccgagtaatggtgtagagtaagatgagtattagtgacaagatatttcttagtatttataagatgattacttatttgttggcaactcgatgaaatcatagttcctggaggctttgatcagattgaatggggttgtattcttaactatgtaatacagctgaatctgtccctacaggattgaaggcagagccc

SEQ ID NO: 42926 - DNA, 836 bp, Manihot esculenta
  Intron number 1 from transcript cassava4.1_004467m (locus cassava4.1_004392m.g) derived from phytozome v7.0 (chr-ID scaffold06914; pos 1325996 to 1326831 reverse strand)
tcggttacgtatcggcctcgatccatcgcttttaggtccggttccgatttactctttcttcgtttagtctcactgttgattgagtgatttctgtttctagttcgattagaatggattttccatgttatgtagacttaaagtcttgataattttagtttctcacgttttcttagcaaccaagcagatatttttgttccttaaaagaaaacgaaaaatttgtggaggttctttgtttgctgtaagatatatattaaagttcgatttttcctcaaaatatcttctcttttttagcaaatttctgtatttatttgtatttggtttctaggttgagaatttccctctttttttatttatttataaattttccatgttctgtttgatttttatttgacaagacaaaaaaatcgctatcaaaataataaaatggaatcttatgcttttcaatcactagtaataaaagaggaatcgtattaaaaaaaagaaaaaagaatcggaatctcttttttttttttccattttcgtgtgggtttcaaacgtggcctggtggatagcttaaaaacaggctttttcccttttgttgttttgattttttgttgtttgatttaaattctattattataaaaggggaaaaaaaaatcaatgaggtaccttatcgtttaagtttttatgaaagaaataattaagttgttttctgaatagtagttgagttggaaaataagctagacttttggaataaaaagactggtgctttgtctttgactaacccttttgctattcccttctctctctgtctctctctgtttgtaggcgttaacttgggcttttattgatcgata

SEQ ID NO: 42927 - DNA, 795 bp, Manihot esculenta
  Intron number 2 from transcript cassava4.1_001914m (locus cassava4.1_001914m.g) derived from phytozome v7.0 (chr-ID scaffold01895; pos 168107 to 168901 reverse strand)
ctagatttctcttttcaagtaaggttgtcgtttggatctttactctacatatctgcctctttatttattttgttttcttggatttggttgtctcaatttcatttaataacattggagcacatggattcaaaagaacaggaatcagcttcacatacaggctgtctagttataatttcagtgtcatctgtttcaaataaatatggattttagcttaatttgaacagggtatctgattcttgcatttgctttcaaactttctttttttatccctccactttcccttttcccctccccttacatcctatatattattcctaatactaatacttgtttgcttgataagagagatgaagaaacaacgccaaatgaaaacttttgaagcatatggtatggtgttaaatttgtgttagaactaactcaccccaaagctaatttggagggagaggagtgcctaaaatgctaattcggagggagaggagtgcctaaacatattaccctattccaaaccaatatgggattcaacacatggatcgctgtgttctaacttggaatagatgaagcacaaatgattttattctatgatcagtgaattctatttccgattcttctcactagttttgttcagcaattaagaatgtattttcagcgattcttttagccatttaaacccagtgcttgcgcactttttttttttgttcttaggtattcccatagagggagcatagcatatatttatttagaaactatactgttaaaactgctgattaagttctggttttcatttccttagaatcc

SEQ ID NO: 42928 - DNA, 373 bp, Manihot esculenta
  Intron number 1 from transcript cassava4.1_001914m (locus cassava4.1_001914m.g) derived from phytozome v7.0 (chr-ID scaffold01895; pos 168906 to 169278 reverse strand)
tttcggcagccttgttgggacttagctttcatcaggtgattgcagcatctggatattttgtcttctttatacttatgtaaagataggctctcttcttttctccatttatttagcgaattcatggcatcaaattgcagatgactattgtttaaagaacattactttctagtggcaattgttttgtatttttgatattattctatcttttgtttcttacaaagtgaaaaatagtgaattcccacttctctgtgcctcgcttgaactttaaatttcttgttctttttctgatgaagaacacttccagatggatatttgaagcttatttgtcctttttacagggagaaggtggctgcttggtgctccactcagttcc

SEQ ID NO: 42929 - DNA, 763 bp, Manihot esculenta
  Intron number 2 from transcript cassava4.1_007949m (locus cassava4.1_007949m.g) derived from phytozome v7.0 (chr-ID scaffold07012; pos 1002841 to 1003603 reverse strand)
attgtaagttcttttttttctttttccttcttttgtctttgtgtgctctttctttggctatcatctatagaaatttacccttatttacaagagacctaaaagggaaactattgaaggtagagagcatggtgcagaaatgaaattgaagtcatgaatggatatcttagatagttagatgcttagtgcattgaaactatctaatcaatgctgataaaaattggaagtcgtccaaattccaattttctgctctgtttctgaatgttttaattgctttgtgcactggatggtaccttcatagccatcttttgatatcaatgtgttggccaagcataatgtgttggaggattcctgtgtccatctgcacataactcaacgatgcttttcccctgtccttatcatgtctagacaaaagatattagcagaaaaatatggtttgaagtttttttttttggtggaaacatccattccctattatcaaatatttctagcatagtagggaatatttaactaagcaatgcatcatgaattattatcaaaagaattcccaatactgaatttgttgctagactagtagactcagtttcaaaattcctattctgctattttgcatgttataattttcttcttgttgcaaaagattgagttgtttctcattttttttacttgtaaattcaatttaatgctttccataatcatccgatgaactgtttttcctgtatattttacattctgatttgacaatttctcttccaggattttggtt

SEQ ID NO: 42930 - DNA, 604 bp, Manihot esculenta
  Intron number 1 from transcript cassava4.1_007949m (locus cassava4.1_007949m.g) derived from phytozome v7.0 (chr-ID scaffold07012; pos 1003804 to 1004407 reverse strand)
aaggaggggacgctccacctgtatttgtaggtattctttttcctaatatttatattgggcatgcttattctatttgtatgtatgtggccatgcattccaggatgggactagcttcttattttcctaaattagtttctactatttctatttttggcacattagatatccagcacctgtaatacttgacatggctctcctagaacataactttgtttggtgaagctagtattgcagaaacatttgtagtttctattgcagcattttgcagagacatctgtaatacttgccatggcatcctttttttataaaaattgataacttattgatacttgtgttatcaattttactaagtaattactagtgctcaatagagcatcattttaatgattatagttagggtggttgccattctacttagtgggcacttattgaaatgttgtattcctatcaagaattaatgtaccgatatttgtcctgtagccatgttaaggaaggtactctgtcaagtgccatcttcagatatattagtttttgtgtttgaatctttattttctttcaccagcaaatgctaataacatctttacttatctttgttattgataga

SEQ ID NO: 42931 - DNA, 942 bp, Manihot esculenta
  Intron number 1 from transcript cassava4.1_005664m (locus cassava4.1_005646m.g) derived from phytozome v7.0 (chr-ID scaffold04374; pos 101624 to 102565)
agcatttggagaatagggtttccaattttctcccggtaattttgtccccttgctcatggattatattttgaattgaatgtttattttctttggttggtttgcgtgcttttgtgttttaggtttgatttgaatgatttctctctctctcgctctctgctcagaagtcttgataattcatttgctggttctgtcatttttggattgtttattataattttgagctgattatcgcaatgaaagcaatgttagaccttaattacacaatggaaaattctgggtataagttaatttgtacacggaaaagtgagaatttcatattaatatgtgggcttaataaaatttcttttaattttaaattgtggtgtcataattctattggaaggatgtacacagccggttcgtggtagaatttcccatcacacaatcaataacatcaactctgttgtttagttcagcgattttccgccttaaatggccttggaacctcactggtttgatataaatttgagacttttcatctccagtgaagagaaaagattatctatccgtgaaaatgttaaattcaattcggatgattcttctgatgcacttctatctatgcaattggatccatgagaaccatttctctgtccgtcgaacttatgggtgtttctgtatcctaaaataacaccatagcatcacttaaattgtctactctagattcttttatgcaatcaaattcgctaatgctgatttcctagacatcatcagaaccaagaactagcacataaatggcactcgttttcttggcaggaactagaataattgcatcctgagaatgagaagagaattgaacaaagacctggaatgatatgttattatctcctttctgctattattcatgctcctctcttcttatttctaattgataatttgctttagttatattccgatagcaggata

SEQ ID NO: 42932 - DNA, 643 bp, Manihot esculenta
  Intron number 1 from transcript cassava4.1_025278m (locus cassava4.1_025278m.g) derived from phytozome v7.0 (chr-ID scaffold08316; pos 186321 to 186963 reverse strand)
tctgttaaagcttggtcacaaggtcagaagttgttaatcggtcttaaatttggcaactttaccttctagcttcctgtatttttagtaattaatagaatgcagagacaaacaatgaagatttggaaatgtttatatttggtttggaaatgaactaatggggaatcagttgaacatacattatttttaaatcagtcagtctttaaatttggcaactttgccttataacttcctgtgtttttggtcataagtagaatgcagggataaaggatgaagatttggaaatgcttatatttggtttggaaatgaaataattgggaatcagttggacataaattattttcaaatatttttccttacgaattggtaaaatacagactaatttggtactttaaaaaaggttcttcctagatttcctttctctcctttttgtttgcatttacacccacgcaagtagaacttcattacaaattgctcccttatatttgtttcattatttgcataacttttctgttctgttttttcttatgattttgcttcgaatgtattgtatgttgagcctattttctgctttagtatccttgttggtgtttagatattgctgattttataaattatttgatatatgagttttcaggtggtggtt

SEQ ID NO: 42933 - DNA, 1013 bp, Manihot esculenta
  Intron number 1 from transcript cassava4.1_010031m (locus cassava4.1_005790m.g) derived from phytozome v7.0 (chr-ID scaffold09501; pos 577243 to 578255)
tttgttcctctctctctaaccgtcccttgattcaggtatttctttctactttcatcttttctcttgattcttaatctgcgtaggaggttctgatttattatagattctttccctctcctgtttgttgattgaatctgtgggaatttggtgaagattttcttgcgttatagtttgctgttgagtgtttctggattttattttgatttcggagctcattcgaacacgatatttgctgcttacagacatatgcttaatgggtactaaaattttctgtagtttttggtcttgcaatcgtaatttgatgggggacagatctgggttatcttttttacttgctgataagaaaataaaaggaaggtgacgaacaatgaaattttgggcccttcacttggagttaaaaatttagctcagctgagccacatgggttccgtctgttaatgaatattgagagatttagggtctttgcttgtcgattccttacttctttcttacacatactctcactcggcatggaaataggttctcttaatttgggtcctagttctaagttggtgttggagagagcttgtgtttgaagatagtttatttatgttccattctttggataattctgcataattgttatatccacagtttgtgtactgcttaaactaaaccactgcagtttccaaacgctatctataaacttgcatgagaattgagagcaccatgaatatgtcctctgcaaagtgtgtttgtgtgttttttttcctttgcaagttcagcatttttgtaaaacaaaagtctcacttgtaatgatttaaagtgaatcatgtgggatgttattagataccgtataaggttgaattggattgggatttaatgttcaattattcaaaaccttgtatttgaattaatgatttgtatgttgcatctactacaattttatatatcaaatctgtaggaatggagttttttcttcttctatctcacttacttgagtactattgacttttgtgctaggttattttgag

SEQ ID NO: 42934 - DNA, 701 bp, Manihot esculenta
  Intron number 3 from transcript cassava4.1_016286m (locus cassava4.1_016286m.g) derived from phytozome v7.0 (chr-ID scaffold05206; pos 137154 to 137854 reverse strand)
tagttaacaggtattttttcccagttaactgatctttccattcaaattgtgcttatgctaagttttagatttgtatgatgaatcatgcaagtttctttcaatgatatttggttcacgatgttttcctgccaattttttaccctttattttcatccccccccctttcaagtgatttaattgcaaagaataattgaatgtgtgagacaatcaaaatcagaacccttggatgtatattatatttagttgcaactaggccagtggactggtaattgaatgccatggtgttcaaattttacttcattcaaatttaaattgagcttgagtttatcacatatctagaaattattcagaattggcttgttaattttctgcaagttttagttcgttcattggcatggctgctttgattaaaaaatataaaaatcttatgcaaagtttatttattaatatcttccttttattctcaataaaataaagttattttcatttctttcgagaggaaaagcattagggccagggatttacaatgtctaggaaaagattgggatctctctctctctatctctctctctcttttaaatgggtaagattgaaggttaataagagagtgtgcactaactagtcaagtccttccttttttgtttaattagtcactactcactatgtaatattttctattttcatccaggtcatctttttca

SEQ ID NO: 42935 - DNA, 760 bp, Manihot esculenta
  Intron number 2 from transcript cassava4.1_020279m (locus cassava4.1_020289m.g) derived from phytozome v7.0 (chr-ID scaffold04538; pos 99768 to 100527)
ttgtaatttgttttctcagtaagttttttgtttgagtgatcttagtttttctttctcaatgcatagcattagcttaagttgctcctgcagtgatgctaggctttaagttttttgtttgagtgatcttaagttatttttcctatgcatagcattagcttaagttgctcctgcagtgctgctaagcttttgcgagaggaactgctagttctctaaattatggattcagcttaggaactgataaaatctgataactagcgcatacttatgtcttttcttttgaatgaaatcgaatgcattactagatattatattcttggtctcccaacttgaaattttagtgaaggacttgaattccatacctttccttgccttctaggtatgaaactgtagttttggttaatccgtgaaagcatggttatatttggctatggctgggtgacgctaaatacatgtgaagatgtggatacaatttaccaaggactacaatggatggaacattagttgatgaggcctccaattccaaaactatctagttattctaatattgatgttattattttggtagatataatccttaaaggtatattccagttgaattttatgcttaaatgtactgaaagtttacttgccgtttaatgtttgttgctatacttcactttgtaaaatattttgattttttttttcaattttgtgatacgagtttatggtccttccacaaattataggtgaaaggaagtttgattgatagccttgatcagcc

SEQ ID NO: 42936 - DNA, 882 bp, Manihot esculenta
  Intron number 2 from transcript cassava4.1_015460m (locus cassava4.1_015460m.g) derived from phytozome v7.0 (chr-ID scaffold08316; pos 416280 to 417161 reverse strand)
ggttctgcgaaggtactgctgcttttaccataatcaaaataaatccctttacttgttcatcgttaccataaaatgtttctggctttctgccgaggaacccttttgggtctttaatttggttggttgataaagttcatccctttgcttctacctgcactctggattgcatagttctgctttattattatagtaaagggaatatatatattgtgtgctaaatttacattcacactttctacttgcgctgcgtttgttgaaggttccataatttcttgtcccttaagaaatgcttaaatcagcaaaccttgaagatggtattgtttgtttgcttttgtggttttccatttgtacttgtagctgagtatgttattgaaggagcaaagtttctttcttttctttttttcccccccgagtgtgatcagtagtatttttgctttgtttataatttgtgctacggtacatttaattcccataacgttttcacttttgatttttgcttccttgaaatgcatttaatgttaagaaagttatagacttcatgttcttaaatgatctggttatagttaatgaattctggcccttttgatgaatgtgcattccatctccctaccttgcagtaagtttgttgatgttgattatgcatctggaaagtagaactcccaatggctgacctcttgtctatgtgccatttatttgagtgaatgtggtgctatatttaagttacatgaaaatgaatacccctttcttttgccatatgatttaattgtgtgctcattaaggatgttgaccactagcatgcaatacacaatggtcttatttcttcttttctatttgtaatttattgcaggccctcgctaaggaaattgtgcgatctagaagaac

SEQ ID NO: 42937 - DNA, 779 bp, Manihot esculenta
  Intron number 1 from transcript cassava4.1_003811m (locus cassava4.1_003811m.g) derived from phytozome v7.0 (chr-ID scaffold09151; pos 291357 to 292135)
agagctgcaacatttattcttggtacttctttatcttttgctctttctcacatatcttcatacatttttgtgtatctgtacataaaaaaacacaagaggtatgttcatagtttggcttgaatgatcttcttggcatggttttcttcttttttttttcaaaaaaaattatcatttagtccttgtagtaaaaaaaactcattaattggtctcttgattttaaaaaatacattagaactattaattaatttatccgctaagtattctattatttattcgtgatactgaaaaactcattactttgatttttcaaatttgtaaaaatatctactaattagtccttttatatcaaggacattttaaacttttttatgacacttaatagttaaaattaatagagtgatcaattactagactttttaaaattttagggatgtattaataaaaatcgataaactaactaataaatttttttatactacagggatgaaatggtaattttctcttttttattgttttgtaattgtgtgcatatgggtgaagtaattttacttaaattataacaaaaatcaagatgggaagtgtttggatgccatttgaaccatgagaccaagttgctttctccatttttgctcaagtgaaaggcttctttcactttttcaaattgggtaaaagcaaagtcaatatctttgaaactcttactcattatcttgtctagtctctttaagaaagagttaattatttgattattgtttgtttcagggcttcagacatttgagata

SEQ ID NO: 42938 - DNA, 582 bp, Manihot esculenta
  Intron number 1 from transcript cassava4.1_018759m (locus cassava4.1_018759m.g) derived from phytozome v7.0 (chr-ID scaffold09151; pos 1019309 to 1019890 reverse strand)
tggattaccttgacgaggtgatatttctttattctgttttacgttaaatatactattttccaatcttatcttaatataaaaatgaacaatcataagtatctgcatagacaaataagacattgcaaatgtaagtgatggacatctttgttccaagttgagattacataatttggtaaggtgtttttgagatggtgatttatgggggataggtggataggaaaaagaaaaaagctaaactacttcttaataataagactaaacaacaattattcctcattgagctaccttactggcatattgtcttgcgtagatcatttacttgatatgtaaggaaatactttctcctgatggctgctttggcaggcgtcttgtttagtttttgattattattattattattttccttcttcttcttctttcttcttcttcttcttcttctcctttcatgtgtcaactctcttggctttttttttaaatatttttgctggtttcttgtggcaggagcatcttttctatttgatagtatgatatatttttccagtttgacattctaatttttatgctaaaatacatactttcagg

SEQ ID NO: 42939 - DNA, 680 bp, Manihot esculenta
  Intron number 2 from transcript cassava4.1_010153m (locus cassava4.1_010153m.g) derived from phytozome v7.0 (chr-ID scaffold01828; pos 21784 to 22463 reverse strand)
gttccagggtgagttcataattatatatcccctttattatgaataattttatttattaaaaataaattaaattaattgagtttttttttggtagatctaacgtttgtttatcagtcttctttgtcttttatgaatttttgaataaaaaaaattaaaataagtgtttatttatctttaattttttatacaaattaatttgttttcattacttagttcaatttagaaaataaaaaaattaataaatttatatataatggtatcagtaaaattaatttggaaaataaattgaggcttgaaatttcttgaaaattgcaatgacattaatgaatttaagtggaagcagataagagagataaagtgtaggcccacaaagagacaaaatttagcaaaaaagggggaaatcaaattgcagcaggaaattaagggagggacagtttttatttcggttaagaaagtatcacatctcaggctcagcaagttaatgtctaaacaaccgataagggttgattggttttttttttaaattagatcagtaatttaatttttatatagagaataaatatttattaaaaatattttattttttaatgaattaaataggtgcgaatataatttaattttaatctattacaataacaaaatcccatttaattgaagtaaattgcattcgataagcaggc

SEQ ID NO: 42940 - DNA, 788 bp, Manihot esculenta
  Intron number 1 from transcript cassava4.1_001318m (locus cassava4.1_001318m.g) derived from phytozome v7.0 (chr-ID scaffold07488; pos 131792 to 132579)
gatctctccagcttagagtctcggtatctctctctaaccattctgtttctctggttttctttttctcttctgagttcttcttgctttgtctctttctgttgggttcctattgaatcatggaacaaaatgtgagaagggacagtggaattattggaacttgtttataatgggaaatgattgattttagttaaagaaagttcctttatggaaacccacaagcaaaagcattttttttattatgcttgattcaatcctcaatgacatctttgtataaattaatgaactcaaagctcactcttttctttttattctctaattttctggctttctcttgctatttacctgttagttgcattggttaacaagtgaacctcccataaagtttttcacaatttctgaagatttttttttgtcccttcttacgggtcaatgaagtctgatttggaaacttacggaaatttttatccccaaaaagaaaatctcttcttgtgcttccattgatggtaaactaatattgtcttcaatgaaattgcttctctgatatcttgcaaaattaaatttgtggaattagtactatgcaagcttcaaatacttgagcttctgtttgttcagttatagaacatttcgtgattggacatattccattggttgatagttggaagtactttcaaaggcttgatgcatgttgaattatggttctaatactctaaattatgttaattgccgatgcattgattactgaaacattttcttttttgatgctagctatcttgattcctgctgtaggc

SEQ ID NO: 42941 - DNA, 886 bp, Manihot esculenta
  Intron number 1 from transcript cassava4.1_025768m (locus cassava4.1_025768m.g) derived from phytozome v7.0 (chr-ID scaffold03332; pos 989555 to 990440 reverse strand)
ggaaccaagttcatgtaagcttcatctctttctttacatgtctattataagcctctacgttctagagatttttgtatattaaatggaaggatcctgctattttaaacctagggtaccaatttattgggtttgaaacaaaaaataataattttttttaaatctcgtttgtaaaccaaaatataggtttgctgaggggcaatgccttctttgtgcggggaaaaagaaaggatattttgattcttttttttttttttaaataacctatttagtgaaacgtgattggttacctatttgcaaatttgggcgccctatttatgctgaagagatcaaatgtctgttatattactctctcctccaacccccccaatctatttttattcacttcacttggctgtgttccttgttttggaatcttattctcaaataatgcaagcaatgtgactggcaaatcttgtgtaaaggtttcagtatttaattgtgagatattgcatctattaactctgttcataaacttgcctagcttggcagtttaattcagacttatagtacaattatggtacaaacaattgattggctcatctcaagaaatcacgcaccggctctgtttatggcctgcctaattttattccaattctgcttcaataatgggatttcaagtatttttgtttcaaattagacagttttggtgatgaactgatttgttattttagtagaggaattcacagagttgcctgtcatgtgcatcccctaaactgcgttgcattttttggaacactgttccatttttgacagggactctgtttcaagaagaggattagcaagttctaacctattatgcattccaattgcaggatccccattattgggggaagggagttggacttgc

SEQ ID NO: 42942 - DNA, 1031 bp, Manihot esculenta
  Intron number 1 from transcript cassava4.1_017792m (locus cassava4.1_017792m.g) derived from phytozome v7.0 (chr-ID scaffold01895; pos 140005 to 141035)
tttaacgagaaatcctgcggttcagctctcaactggtactgctcttcctcttcttcttcttttttttttttttttcttagttgatctatttctacttcatgggtaacatctgggttcacaatagctttaatttcttagttgtcttgctagattcagatgactataagtacttgcttttggaagatgttattagcatgttgagtgagagaagaagcaatttttaacaccatttgtttggtacgagtattgtctatgctgattcatgaactccgtcaacttgtagggcgcttgcattgagtttgacttttgggttgtttgccaaagctaaagatattgcatgtgacttagccccatgaatctaagaactgctctttacttttgatttttaagtaatcattgaatgcttagcttcttgaaaaataatagaattcgagtataagtcccaaatatggtccaatctttgtttggaaatgttatcctgggatatttgcctgttgggtcatctttttggttccaatttaatggatagaaacttggatcttaaatcagtagctacaagtaccttccccttgaaaattttaaggcctattgtctgcactaaatcatcaaattatccaggcattcatttagataaactaaatgtaaaacttgtatcacccaaaatctcgtgacactgagggtaagagactgtactggatgttatgtaatattgctcttctgaattagaaataatggagctatgcatcctcattgctgttatagacatgtagccgtgtttcactatgtgaaaccagaaactgagatttctttggaatgtaatagcactttgctatctaaatcattgctggggaataaatttcttccagcatttgtgaattttctgtccttgcaattcaatattcagtgtataactgattgcatataagttcaaggcttggtgcatcactgctcttgacaagttcgtgcatgtttaagttttgtattgtaaatttaatatactctttaattcttttgctaggaccactggaaaa

SEQ ID NO: 42943 - DNA, 594 bp, Manihot esculenta
  Intron number 2 from transcript cassava4.1_023189m (locus cassava4.1_023189m.g) derived from phytozome v7.0 (chr-ID scaffold03614; pos 1061450 to 1062043 reverse strand)
atgtatgttttattaatctttgttgggcacaaaatttaatttgtgtgtgtgtttgtggacttgtttagttgatgtagaggttgccttttggtccgtggaaacaattataggtctgcaccataagagtttagattcatagcttgtgagtagcttattcttgcagaatatgtctctaagattgtctttgatttctcccgcatggaactctctttgatgggaatgtaaataatgacctttgcaacaaattctttccttccttcataactgtggaaggtgttactgttcgtttgatgagtagtggaattatttaaagatgacatgacaaacaatgtggaattcctatatctggaatagcaactataactataactataactatatatatatatatataaaagctttagatgtaacttagaagtgcacaatcaatggtatttcttccttgtttgatttgaatacgtctgttgtttttttcttttgctatttaatactttagtactgatattcctcccttggtttccagaagctatgtaattctagtttcaatgcattactacaatttgaggagagttgcctgaatcttttgattacagg

SEQ ID NO: 42944 - DNA, 812 bp, Manihot esculenta
  Intron number 1 from transcript cassava4.1_009844m (locus cassava4.1_009844m.g) derived from phytozome v7.0 (chr-ID scaffold06446; pos 789830 to 790641)
ggtgctgctcctggctgcatcctctgtcattgcaggtttggatgggttttttgaaactttgatttcagatgtgtactttctgagatttgtgagatctatttgatgtggattgctgaaatttgtgaaaatattaaaatttatgggaatgttgaattggtgagattattgaaaattctttgtaataaagattattgtgaatggattgagagttgttttagtgagaataatgaaaaatttgaaataaacactaccattcagatttgtttttgtgagattgagctgtgttttagaattttgttgaaatgtgagattttgtgtgtatttcttatttcttttttgttgggatatgagttaatcggattaggttagtcaaatataatttttaaacgggttcagatagtgtatctataaatgtattgggtccggtatttaaaacttcacgggtacactacccactaacatccctgagtagtctctccctcacatccaagattcgttctcttagttggactaactcgaggtagaattcgtcactcaatcttttcatttctcctctatactttctccttcttcttcttgttgcagtcaatttggcttacatattgtgttctttcgccattcttgtaattttatttgacagattttgccagatttctaggtatttccctaatttggtttagggttttggcatggacactcattcaattgtttgaactctcctcttgggatttacagaaattgttcaatggttatatataaataatgatattgacttcgtatatgatgttaatgctgtgtaggtagttatattc

SEQ ID NO: 42945 - DNA, 893 bp, Manihot esculenta
  Intron number 4 from transcript cassava4.1_000210m (locus cassava4.1_000210m.g) derived from phytozome v7.0 (chr-ID scaffold03614; pos 2365493 to 2366385)
aactagagactgaaagtgcccacttgttggtctgcttcttccttcaatttgagtaaaatctttggttcttatgataaatttcaatgcctgcctgtatcttgattcttgaggctgcatttcctgttaaatcagttgaaacatctccttgtaatgttaagcaagaatgcttttcctttggagactgatatggtcccgggtcatggatcatgtcacgggatgattcataggaaaggagttcatcaaagggagctcttaacaccttaggcttattaaaggaagggagttttaaatatcaaatttgtttgtaattaatatgcttgctttattactcatgaaccccatatatataatgaatgttatacaatagcataaaaattcctaacaaattaaaagtcctgcagtactttataataactagaaagtttatcctaatctaaacaataataaagattgataataattaaaaagtctatcctaaatcctaatctaaacaataactaaggtttattgattttgaaaaaaaacttccccaatatttggactctaatggatttggtctatccattatccttaatagagacatattagaatcatggttattttgtccaaccttatccatgaacccttgtccaaccttattctgaacactgaacgacaattatcttcatccacttccttatagaattaaattgttgggtcaacataatggcttaggatgtggataaattgattgcttatggtgccataaattgcaattattagtgaaattatgtgattgcttcttgtgtcatgtgcaggtaactcccactgtctgattgttgttgttgttgtttttatgttccttttcatttgatatcttccatttgcaatcttctcttaacaggaacaacttg

SEQ ID NO: 42946 - DNA, 352 bp, Manihot esculenta
  Intron number 1 from transcript cassava4.1_003948m (locus cassava4.1_003948m.g) derived from phytozome v7.0 (chr-ID scaffold00522; pos 42290 to 42641)
aggtgcgctttgtaaagaccgtgattggaaacaaggtttttttctcattattcacaccgcttttggtataacttatctataatatctatgtctctatgacactatccttttttgattaaacatcttctttagtttttgttcacatttatccttcggttttatcagaaccaagaccttctctcactttataatcatatctatatctctatcactgatgctttcttgattttttcttgcatatttgtgtttttctctttgtgggttcagctttattttgttaattaccagtacccatttgttctcattgctctttttagttgagaaccacaccagaagcactatttagagagaa

SEQ ID NO: 42947 - DNA, 464 bp, Manihot esculenta
  Intron number 2 from transcript cassava4.1_003948m (locus cassava4.1_003948m.g) derived from phytozome v7.0 (chr-ID scaffold00522; pos 42747 to 43210)
agcttgtggcctccgtgtaacttctattaagattggtatacttctctctgtctctctctctgtctttaagcagttgaggttgttgtatttgaaggagatttgtcacatcaaccagtccaaatttctcattccttgttttcttttttttttttttttttttgtattacttgttgatttatacgctttatagttaggaagtttttggcttttgggtagcagatattgcatgtgaacatgttacttagtgtgagttatgcatatttctttttcgttttaacatcttctttgattacattaagctagaagtttgttggattttatttttatcctccttctatgtcttgtttgtttgtgcctcttctggacatacaaccaattcaaaatagcttttggacttgcatggttttgtcatcttaattccatttctgtttgttccatatttgcagacccttacctgaatactg

SEQ ID NO: 42948 - DNA, 903 bp, Manihot esculenta
  Intron number 2 from transcript cassava4.1_015276m (locus cassava4.1_013725m.g) derived from phytozome v7.0 (chr-ID scaffold06697; pos 335422 to 336324 reverse strand)
gctacggagaggtttgtgcttttgatttttgtgtttcagtcatattctacttgtaatttgttttactacggagaggtttgtgcttttgatttttgtgtttcagtcatattctactagtaatttgttttagtatttaaatcctctttttctgatcatgtgggaagaagggatattatcaaagtcttactttttttcagtttagatagtgttttgcttctgatcatttggtttagatgattattagactgagattttgaatcagaactatattgagagtttgtatcagagtccaacgtattcttagcttcgaatgtttaagttgaccctaaaacttggaggggacgacttgcctttgattaagatatcatgtcactgattccctgttgtttgtttttccctcaattggttctgtaagttaattttcctaaaaattggtttattgacataacatgcatccatgcatcatacatggaaatcttccaacttattcaggaaccaaagttatcaagattctatagttttaatttctctccctctttttttttaaaaaaaaaaccttcagtgaatgaccactttcctctaaatatttacaaaaaaagcaaaataaactttttgatttatcttttgtgtcctgtggtccattttggtgttatttttcaacattatattctaaagtatgggtttcaattaactggctcgatattagtttttatgcctcatcaactagcacactactgtcttgcattatgacatgctaggcataaacttgaagcacttctttcaaatatattgatttctgttgatttggtattcatgaatgtactatgatggagttaaatgtacagcatttggatattattatgctcattggtttttcgtgatttttcccccttcttattgcag

SEQ ID NO: 42949 - DNA, 538 bp, Manihot esculenta
  Intron number 1 from transcript cassava4.1_007427m (locus cassava4.1_007427m.g) derived from phytozome v7.0 (chr-ID scaffold06656; pos 891582 to 892119 reverse strand)
cttcttgctttcttgctccactttcactcctacaggtcagtcttttttgctttccgtgcttttaactttgtgttttctctaatgcttttgttgtttttttgaattgggcttggcttatttgcctcagattttgtctaattttcacactacttgactgtttaagattgagctgttgttttaattggtcaaatttgagattgtgtgttgttttgatttcaaatttggtgaaaaaaaatgaactgggtttcttcttatttaaaagttaagatcttgtagtctcattagttccattaatctgtaaagatattgctgtcagtgggtggtgaacagtgcttttcggcctctgtttaattaatttgtaatcagttaccgtaagatgattagccatccttttattcacctgatgcttgggtttggatgtgcattgatagctttttttgctgttaatctttgcaaggcaaacattttgttttcgctacagtattagttggacattttgaagatcttggaaaagtaattaaagttttcttatttgcag

SEQ ID NO: 42950 - DNA, 1030 bp, Manihot esculenta
  Intron number 2 from transcript cassava4.1_016866m (locus cassava4.1_016866m.g) derived from phytozome v7.0 (chr-ID scaffold09856; pos 111568 to 112597 reverse strand)
accattgttgggggagatcatcggcttaaggtatgaacgctttgatcttatttctcgtgtgtgtgtgtgtgtgtgtacgagcgtgtgtgaggacgcactgtttgagttttggttggccctcttaaatacttttgtatgattgaatcccttaatgtttgagttgtcaaactgagcattggtgggaacctgaatttatcatgaacttcatagcattgtactcgttgatatgctgcaaatttcatcagcttgtcttggctttgagaatttgcagtattgcattagtctatgcagatgcatgcggtttttatttttgttttttttaacccttcgctaatttataagttagtctccagtagccaggggtgcagttattcgtagattgatgtgtcctatttgctttatgttcaattttttgctaaaattgaatagcataatagttttctcttggatgaagaggggcttctaattattttctcgtggatgaattgccttttattttttgaaattcatccaatttgtatggttcattggagcttgtaaatgtatgattacatctctttcacatattcaggtcctttgaggagaaaatgattgaatagatttatatttttgttacctattttatatttactaggaaatgcaagagttcttgtgatactgaagaattctctgtatattcccctctgaaatgagcattttgagggtgctcattgaatcttctttaccagtagaacttgtacagcagattatttatttgcttttgtttgggccatcattgtaagtaggacaagtgtcttttgtcagtccatctgttgactactttttcctcccataccatcatctttagtatgaaatttgttgttccttattgctatatttgatactcaagctgcatattgttaggcctgcgtgaatgtctttgcaatattgatggcttgtacaattctttcacgggtcaaggttcttattgtccttaatttgctcaaaatttgcagaactactcttccatcattactgtccattcagaggt

SEQ ID NO: 42951 - DNA, 790 bp, Manihot esculenta
  Intron number 1 from transcript cassava4.1_017433m (locus cassava4.1_017433m.g) derived from phytozome v7.0 (chr-ID scaffold01551; pos 2503193 to 2503982 reverse strand)
ttggtagagttagctcaggtacttttctttttttttgaaaatcattttggtgaatagtttatggctcctttgaaggtttaatatgactgctgcaagtgtatgaattatgcgtttgtgggttttgtttcgagtgttttcttattttatttctgaataaagattttgctaatttgatctgttagtgttgctgaattgggttttttttagctgcagtgctacagttctttgatggatttattgtttgtgggattgcgtcttgtttgtgctctttcacttttgtgctaatgtaggggtgcctgtattatttagagatctgctcttagttttaggagttcctgtctcggagtttcttgtaaatatttcttctctaccataattgccaagttaagaaagaaatgatggtcagtacttggaaagttgtttgttcccctgcaagtacataacatattgaaggctatgtcaaaattgtctatactttttgtgcttgtttggagaatgtaaaataggaatctgtgaggtttaaatttgcaatgccaatttaataagaagtatgatgaatgatatcaccaagtgtagccattctatggaaataccatttagactgtttaggctgaagccgtcattagtgtacttgcacataagataaaaaagtctcctttatgcattttcagcctttacgctgttcaattatttttcatataatttgcacatatacatatttaccttttccttttgcatttctacattttgcctgatgcacttattcatgcagacaagtcaaaatctcaaa

SEQ ID NO: 42952 - DNA, 397 bp, Manihot esculenta
  Intron number 1 from transcript cassava4.1_024818m (locus cassava4.1_024818m.g) derived from phytozome v7.0 (chr-ID scaffold04175; pos 364960 to 365356 reverse strand)
tacctcgtccctcaaggaaattttccaagcttttggtaaaatcgcatggctttcttcttcttcttcttctacttctctgggttttatggaggttttagtgtttgattttgatgcattttagttggtttcagtttgtgtatggacttgtaagatctgcaagtgtttgattattacttttggatggatttgtcagttggttcaatgcgatgggtctctttcttcctctttatctgtctccataattgatatctttccacgagaaaggaacaaaaaacaaattcttcatagtttaattttgttatttactgtgcgagttcaattatttttattttttacttttttttctgcattgggtgttgcaggttctgttaaagaattgagagagacaccattaaag

SEQ ID NO: 42953 - DNA, 529 bp, Manihot esculenta
  Intron number 2 from transcript cassava4.1_010074m (locus cassava4.1_010089m.g) derived from phytozome v7.0 (chr-ID scaffold04260; pos 138685 to 139213)
agtctagcctgactctgtaatctatatttattcaggtaattcctgcagattcaaatttagatcatcgttggattagtaatcagcatttgataattaatcgatattttgaactctctgatttttttaataaatttttcctatgtttctttttaaaaaatagctactattgctgtgacttatcgaagtttcatgcggcatataatttttcaaatccctttttaactcttaatcattaagatctgttaatatttgcagttttcacgtctagtttgtccttattgcttttaggatggtccttcaaacacagtaatttgtgatccgaagggagtttggttaaattaggccaatcaactgtttgtgatttgagttgattgttattcacatatttgtcttttatttacagattcaatgtttttgtgtatgtgatgagcttctttgaattttcgaatggttatattttctgaggaagaatatttatgcaatgcttctagcaggttacagagaattctgagtgtttttcttcttcatt

SEQ ID NO: 42954 - DNA, 449 bp, Manihot esculenta
  Intron number 2 from transcript cassava4.1_004030m (locus cassava4.1_004030m.g) derived from phytozome v7.0 (chr-ID scaffold03332; pos 510182 to 510630)
gggccgtggcaccccactgaaagatatccctagtatgttctatatgtttagttcctcctcaattggttactgtggtagttgaacaagatattttcccttattgtttcttttttccaatctccattttggttttggttattaaaataataatatgatttagcttcagttggcagtttgatgtttgtttgtctattaatgtgacatattattttcctggttacccagaaccattaaagtggctggcttcctagtgctaaaactttgtgatctaaattcttctttaaaccactatcatgattacatacttgcttgttgcttctcttttgtacacttttcaattcagatgggtgtaccaaatctgtgtctgcactgcacaactttggataaagtaaatggcctctaatttcttttcccctcagttgcattcaagttatccagaaggaagactg

SEQ ID NO: 42955 - DNA, 879 bp, Manihot esculenta
  Intron number 1 from transcript cassava4.1_018095m (locus cassava4.1_018095m.g) derived from phytozome v7.0 (chr-ID scaffold06005; pos 226196 to 227074 reverse strand)
tccttagccctaaatcgggtactcttttccctttaatttttcttcacttcaatttgtttgtgatttctttctcttactataattaatttgctttctctctatacttttgtgtgattgattttctttttttctgtcccttttttaattctttaataactttctaatttgcgattatgatacaattatgaatcagctgtaacagctacgctagattttcagattcgaagctatgattggtgtaatctattacttattttgctgaattaagggtgttgaactttttgcagttcgtctcttttcaattagttatcttgacatttccgattctctttctttatctctcattcttaagcaggtattgttgggtatgtttaaaaatcttattgtttgttggcagagaagcttaattttggttttctagtggaaagtaaagtgataactgaatactgttgaaatttctcgtctactctgttgatattggctttatctatttaggagaatagtttgtatacattttaagctgaaagtggatagatgtatgctaatttgtgggttttcttctatattagttgtgatattatttaacttgttttgtatggaaaattagtggaatggaatctcttatttttattatctgctgaataaaattttgattcttttctttcagctttatgctttagatgttatatctgtttgatggtaaatttgattcgttctagttagtaactttgcatgatatctgcagagactagattgagagttgggtgggtagtcaatctctagagattctagtatacatattccttggtttgatttttgtttgtgtatataatttctgacttctgacacaggagacaagcattctctttctagaggacc

SEQ ID NO: 42956 - DNA, 848 bp, Manihot esculenta; identical to SEQ ID NO: 42473
  Intron number 2 from transcript cassava4.1_010379m (locus cassava4.1_010380m.g) derived from phytozome v7.0 (chr-ID scaffold03049; pos 506542 to 507389 reverse strand)

SEQ ID NO: 42957 - DNA, 627 bp, Manihot esculenta
  Intron number 2 from transcript cassava4.1_006619m (locus cassava4.1_006619m.g) derived from phytozome v7.0 (chr-ID scaffold06859; pos 10218 to 10844)
tagttgtcaaggagccttcgactggtggtcctctaaaccattaatatttttcttttactgttctcgctcttcttttttcattttctatgatttgctacttcatttataggctttgtttgtttatatcactcaaatcaaatgttgaattaaagctttatgcacaaaataaattgagatttaaaacttaacaaaaagtgagcattatgtttataactatgaaggatttcattcagcggttggaaagcttccagttatcgttttagtttctgtttgttttctgagaaatgaaaggtgagagctaggacatattttgcttattcttggtttgtttttggggcggcttcataattcaactgtctaatgctgaattatgttaatctaggcaccagcaatctctcttccttcatcttaactaaatcagactattgaaatcaagaattatgaaatttctggaaaaaaattctgaacttttgatgggtgatcaatgattcatttgcaattttttcccctctcttcctcttgttcttctggttttcaggtagcaaacagctgttgttgccttcaaatatagaacagtcgctaatgttgttataatttcttgttctgcagctgcttctgagaattgcc

SEQ ID NO: 42958 - DNA, 224 bp, Manihot esculenta
  Intron number 1 from transcript cassava4.1_029669m (locus cassava4.1_029669m.g) derived from phytozome v7.0 (chr-ID scaffold04151; pos 247584 to 247807)
ggtctctgagattcgtcacccattattgtacatttcaacaactctatatatacatatattcatctcttcttttgtttttttcagcttttgtagtgctgctctgtacttgattgttactgccatttcttggaataacaagggtctatttgattttcttgattaattaactattattggtttgttatataggaaaagaagggtgtggctgggaacttttcagacag

SEQ ID NO: 42959 - DNA, 381 bp, Manihot esculenta
  Intron number 1 from transcript cassava4.1_013206m (locus cassava4.1_012490m.g) derived from phytozome v7.0 (chr-ID scaffold04882; pos 517275 to 517655)
ctgctctcgctgtattgatcccatttcattgtttggtgagatttcctttttcttgtcagttttctgaatttttaggttttttattttctgccttttgattaagggaacttttctattacattgagcttttagttatacaatactgattcaaattttcttttcttgaaaaaattagaacctttttcttttcttggttaattttgttcgagtaatggaaatatggtaattttgcaattttcttggattgttaattaatttgcaaagggagccgagtgtcttatatttttcttttagcttcaaatagtgatagaacactatataattgtgtgtactaaaaaagggaactaaaagtggaaattttgattaaatttgcagttggtg

SEQ ID NO: 42960 - DNA, 781 bp, Manihot esculenta
  Intron number 1 from transcript cassava4.1_002871m (locus cassava4.1_002872m.g) derived from phytozome v7.0 (chr-ID scaffold04681; pos 374617 to 375397)
cttccagactttcgcttatacgagctgtatccacggtgggatttcttcgaattgccttccccctttctctgcttcaagcttttattcttaactttttggacttttcatggattgatatagttatctctgaattataaatcattttgatgatgaattaacactttctaacttaaaatcttttgtgggtgtctaattcttgtttgcgtatttgcattttggttgtaacaatgtgttggacgagagaatgattttgtttccttttatttttgagcgctgcaaatatgtattctaggagacagtgtggaagggaaaattatgtccaagtaaaaaagaagtcattatagaagccctgagcatgtttgcattagttttgctctgtggaaaccagaagaaagaaaagtttttgggttgggtgaaccggaagaaagaaaagattttaggttaggtaaaaagactacacttcaaaagaagtcgctgcagaagccctcagcatgtttgcattatttttgctctttggaaaccagaagaaagaaaagttttttggttgggtaaaaaggctaaaaaaagttttttggttgagtaaaaaggctgcacttcaccctttagttttctctgcttttcttttttttccccttccctgaatcataatgtatatcatatttggtttctccattcgatgtgatgaatatattattgtatatggtaagtttaacaaatttcatacattgggttatttttgttggcagccagtgaagccacagaccgaaactaagcgcagtaa

SEQ ID NO: 42961 - DNA, 1018 bp, Manihot esculenta
  Intron number 1 from transcript cassava4.1_010360m (locus cassava4.1_010297m.g) derived from phytozome v7.0 (chr-ID scaffold00080; pos 280786 to 281803)
ttcttgtctttaacgttacctgcaatattttctgtgtacggatcgatctctttgcttcttttaattatcagttatcttcttaatttttgggttttgtttatgttttgattaacatttaagcaatcaatttgatgacaatgttttacagttccttaatttgtacttgttgtgcctatgtaagctgcaaactaagttgtgaactttgattactttattgattatgttgagcttaatttctgtgttaattttttcatctcgatggtaatgattcgatggggttattggatggatgcactgcatttcttggttactataaattttatgatatgatcccttaattttggaattctgttactagcaattgctgcataggtatgaagcatcttattgttatttgcatatgtgatggatttttctaggtatgaaacactatagctgttattggattacccagtagatacctattaagcttgtgcctggtgtttaaagcgtggtaaaatagcggtgggccaccataaacccattcttgctctgataccatttgcaggactgggtaaaatttccatctccaaaaccaagctcatcagcatgagctctgaattatattaggatacaaaatctgcagtaccaatggcaaaaacttactatcttaccttttgggccaactctcgttcaataaggtgttatcttttgctagtgtctgcaaatgggtgtattttttaacatgtgtgttaattttgatgataatatcctttattggtagcaagattgcacatgcatgaaaaattttgtggagtgaaatgattcataaggcttgctgcaacaaaatttggataaggctttcttaagatgagttcagtatatatagaatggctactcataagcatctccttttaactcttgtatcttcattttgtcttcttctttttccccttgaattttatgtgtcaatattaacaaagcttattttggtgttgtttaactgatattttagaggtccattcttaaagtgtgaagc

SEQ ID NO: 42962 - DNA, 689 bp, Manihot esculenta
  Intron number 2 from transcript cassava4.1_015226m (locus cassava4.1_015226m.g) derived from phytozome v7.0 (chr-ID scaffold04175; pos 506290 to 506978 reverse strand)
cacttgctagaaaccttgcagcagttatttacagagtaagttcttttagcaattatttctgttgtgaactatcatctagctttgtatttgaggaaattccttcactgttcatgatttctccatcttttgtttcatcattgattgcggttgctaaagcctcctttatttttgctttacaaggccttgcttttgatgcaggattcttttttctctagattttgttggtttcaaaatctttacgcctccgtcaataagctgctgttaataatgtaatgggagctaaggctgattcctccttgaaagttttctcaaaccaaatagtatttagcatttatacaccgtttttagacaacttataccttgtattttcattggaatcatgttattgtagtcgcagagcacattcacatgcagaaaacagcatcttgcattcatttctttgatggtttcccttgctgttgtaaggcctttcatttcagcatggattctgatcaagcagaatgtttcttttgttgattaaacaactgtctgtttttatttgagaaaagggaaaagaagaagatacatcatactaatatttattcagccttgttccgtaacattttttggtgcctgtcatatcaccatcatttgttagttcagataatttttcccatgtgctactgactcgtggccttgatttgaatagg

SEQ ID NO: 42963 - DNA, 445 bp, Manihot esculenta
  Intron number 1 from transcript cassava4.1_015226m (locus cassava4.1_015226m.g) derived from phytozome v7.0 (chr-ID scaffold04175; pos 507047 to 507491 reverse strand)
gctaatgtttgttttctctccctttctttttcatttcctctttataccatagctgatctttctagttttgaagaattttctggctcctagctaattacaagtttgaattccaaattcatgggcaaaaaaaagctggttactttttgatagaattgtggattcctggtggtattgtatgtatttgatgaaataattgctttcatgggtaagcatttgctttgaattctcaagttgagtgtaaccattgaattttctagataagcttggtggcaataacttccatgaatttgtctttctgggttgtctgtgcatcttagtttttgagggatttaagtctatcttgttaacgttatccgtttaaattgaagaattaactagcgcaatttcacatttttgctttttgttgccaggtttatctttggtacccattaagtcttgtaacggg

SEQ ID NO: 42964 - DNA, 613 bp, Manihot esculenta
  Intron number 1 from transcript cassava4.1_010724m (locus cassava4.1_010724m.g) derived from phytozome v7.0 (chr-ID scaffold06314; pos 180527 to 181139)
aagggaaggctgcattgcccttgaagagagacagggtaaggctgtgatgttcgcttcttgttttcctaagattcgggttttgggatgatttgatttgaaaggtgttgtttggttggttccatattcaggtattgattttgtttattatggttgtttgattagtgaatttttgataggtgtatctttgtgttatcaaattagtattctacatgattgattattagtgtcttagaacagagactgataatgtatgattatgttgttaccattgttgggattttatgtgctcagtggattttgcttcgttttaagttagaaattaatctctgagaattttggtgcaagaaacttttcaatagaggagtctactgtaagtttttgattggtttttgtttgaattatcaatttgagatttttcagttatatagaaattattgccttgtgctggaggcagtatatgcatctcctcattctgttagttcttagtccacttgggttttactgaaacaattttatttttgaagattcttatacactttcaagaactcagcttcatgcccttttgttggaaattccagacaaggtctaagagattcttggaaattcaaaaatt

SEQ ID NO: 42965 - DNA, 1023 bp, Manihot esculenta
  Intron number 1 from transcript cassava4.1_002696m (locus cassava4.1_002696m.g) derived from phytozome v7.0 (chr-ID scaffold06512; pos 186650 to 187672)
gcttctgcttattgttgttgtttccacgttagtaggtgagcccttttcattcttcttcttcttcttcttcttcttcttctctcctctgtttcttgtgcttttttagtctgaacttatggtagctactagtcggtaagactcgaagaagacttcattttctgccgaatgttatgcctaggacaaaatcacaaaggtttgctcccagcaaaatccaaagatcctcacctttttatttctgagtacgctagttggctaattggtgttttcttttcattattattattattataatgctgaaaaggatcttaaagtatgcccaatacctcatgaagattgaatttaacactgtgtgtgtatattggttattcaaatgcttggggattccccggactggctatcgagaagcaaacccgccgccttaactaaccatttccttgactcaatctaacttcgaaagggcatagaattgagaagtgtatgaagatgatgaacctggttggatggtactgttacagttagaattttattagagcatgcagttctgttgcgtgtacttgaatctgacacccagacatagtttggaatgtaatggtggttccttgaaagttggtagaataaaagcttgggaactatcttgagatagcgtcctgccgctttgttttctgcagatctttggccatctgtcttatcatgatttcattccctagaagttaacataaacagttcttatccacttcatgtcagagattctgaatcaactgatctgaactcttcacagtgtagttgatgtatcaagtggcaattgggttatcctaatccttgctattctacaggtctgtttagataattgatcagtcttggttgtcaccacttctaaagccattacattttgatgttatattatgtgttttttcctttcttctagtaaatatcttatttgttaggtctacgacttttaagtaggtattactgacatttgtattactaattaatatgcagaccctgcgctgttcttccctttga

SEQ ID NO: 42966 - DNA, 359 bp, Manihot esculenta
  Intron number 3 from transcript cassava4.1_002696m (locus cassava4.1_002696m.g) derived from phytozome v7.0 (chr-ID scaffold06512; pos 188400 to 188758)
tccgatactgctgcgattctagcaagctatatttggtaggtatccttcattaatttgtgataaggaaaacggatggaataagaaactcatcactgatatatagatgtacatttttaatcttatcagtgggagatgatacatacactttttgattggtcctctccttgttttcttctatccttaagagttgtaatctctacctaaatgtcacaaaatatatgttttgagacagatttcctgcattttagtgttactgggatatttattttctgcctttcactctccagtaatggtagtatgaaagacattaatctttggttgatacttgttcttgcattactttcaggtattaactgggg

SEQ ID NO: 42967 - DNA, 962 bp, Manihot esculenta
  Intron number 1 from transcript cassava4.1_026445m (locus cassava4.1_026445m.g) derived from phytozome v7.0 (chr-ID scaffold01551; pos 235497 to 236458)
tggtgctcatagaataccttatattcttatcgggggtcagttaacatctctctttttcccttgtttccttgatatggtcctttttgtattctttcttcattgagcttatactatcaagtttaccatgtttgttcctcttcttttttatttttccactcttttttttttgttattttaactttatgcgtctcatgtcttttgtgatttatattattgttgcatcctctgttctgaattttgtctgcatagcttctttggtttctgtatgggccccgtattatcctagctccgagactctgtttgtctatttcaatgtccagttccccaaacgttctgctgataggttatgtaaacttagcttgacattttcggtttttcgataaagtgagataactataacttttgaaatcaagaatttggcaagaatggatttttttttttccttctaactattctcttttgtttggagcaaataagttgaaatcttacatgattttacaaaaattcatttgaattcttttcttgcaaaataatcaagccaaataaagatgcgcttattttacttgatccacgatgctaatcctcaatgggttgctcaagttctaaacaagctgttttaattgtgatcctttattcttaccattggctttttggaaaagtgaaaagttcctgtaaccttccagaacatggtaaaaacagagaattaaatctataatgtaaaatgattgataatttgatttataaactgcatgttgtttttgtttttttggaaaagaaaaatcaatttcttagctggaaattgtgctgtcttttctgcttctgtgtttcaagttgacttggtaatcttatagttctgcttgtgaagactttgatagtaaatctgatcaatcaaagcaaagaaggttctgatagaaatcaatttctcagtcttgttgcaggccctatcttgggggcctttggga

SEQ ID NO: 42968 - DNA, 793 bp, Manihot esculenta
  Intron number 2 from transcript cassava4.1_009516m (locus cassava4.1_009516m.g) derived from phytozome v7.0 (chr-ID scaffold03332; pos 123387 to 124179 reverse strand)
ttcactcagcattttccttgcattggctctctcaggttagcttcctttttttttttttaattcttaatatttttagaagttagtttgagatggattaaaaaggaaacgaccatcttcatttatgtttactccaatttctcttaattttaagacatgtgaaataatatattttgttggtgtattttagggaaaaaaataaataaaaatgttatatatatatatagtatatttttgttacaagtcaattacattatacaaattgtcttctatatttggccggcttagaggtggtcaaagtcatccaacaatatcatggtcctgacacttttgaaaggagtgttcggatcgaccattggatggatgcatcttcatggttttaatatttgtcgtttctttctcattttgaaatttcatgggttgaaattttccttttcttagtgtcctttttgaggtggtgggtgggtggaagtgtatttggaccaagtgaatgtattaaaaggacaggaaaatcagatgcatctattacatgaggattagcctgcaatagcaaactcaaaaaagtgagccaatgcatgcttgttgacttaatgtattcattagttgttaaaattcatgaaattcttaaaactaggttggtgggataattaaagaagagaactttagttttcccatgcaagcagttgatgattatttgtgacattatcttttgtggattttgttttatttaattttatgtttttgtgtgtaaaattataaaggtgccggagagtgtggtagacaagagatcaggcgc

SEQ ID NO: 42969 - DNA, 503 bp, Manihot esculenta
  Intron number 1 from transcript cassava4.1_016829m (locus cassava4.1_016829m.g) derived from phytozome v7.0 (chr-ID scaffold07012; pos 1175881 to 1176383)
gctgggacctgccctgactgcgacgtttcttaaaggttggcctttttttttttttctggcgtagcttcgtttattcagcatccttttctcgataccatattatcatactcacagcttaattaagaaaaatagaaactaaatctagctttttgatgcattttatttcatattatattaattttatgttctgggtagagcaaatgtgggtttgtgaaaattaattcatatagtgggtaaagcaaagtgggtttgttcatgttttatttggtttatggcagaagaaaataaaataaaggaaacgataagatgctagcaatttggatttttctatgtaatttattctagaaatgaagccatggttaaaccttgtgctcgtgtgagatctttgctttgtggagaagataataggcagtgtaatatggacaatataaaatcagctttttaattgacatcccttagttacttatttgattttggttccttattagaagatataataattc

SEQ ID NO: 42970 - DNA, 696 bp, Manihot esculenta
  Intron number 1 from transcript cassava4.1_025315m (locus cassava4.1_025315m.g) derived from phytozome v7.0 (chr-ID scaffold09501; pos 255287 to 255982 reverse strand)
ttcctcacttgacagattaccttcctcatattcctgtacgttttttttttaaatttcctattagacgagtatgatgagaaaatgtcaacggagtttgtacatatgtcgttgttgattgcttgatctttttgctgtttggtttctgggaaatgcggggtaaaggaacagaaaatgagagcttgattgtttcgcgcttcctgaaaataacgatcttagctcagttaattgtgattgtggtgttaattacaatctaaatgtagtcgcatttcttctttgtacgattgctgcgtcttgtgggtagaggagagattctgtttttggatccatttaaatctgttgctttctttctctctgttttttctttgctagtgtgtgaaattaatacttttttttattatttatattttattgttttgaacagctataaaattcatacctgggttataaagaatcggagttttcaactttaaagctctttaatggatgtttgatcgttattaattaaggggaagcaattaaatttaaaccacaagatcacatttaattcagatcatcagagattgatggattaagaattgatttgatgctgttcgtttgtttgtcttttgattctaaatgtaaaccatacttaaatttgttttaatttctggttttgttgtagacttattcaaatcctctacaagacaatcctgcata

SEQ ID NO: 42971 - DNA, 737 bp, Manihot esculenta
  Intron number 3 from transcript cassava4.1_013514m (locus cassava4.1_013514m.g) derived from phytozome v7.0 (chr-ID scaffold08316; pos 497852 to 498588 reverse strand)
ttactaaggtttgctttttcttattcatttctacttcaatgaattttctgaattttaaatttgatgagggtctgactctcaagtctactgtaatgtagaaaattttaggattctttaaaaaaatttttatgtgcaagagatggatgaaactgtagccaatggtcttgatgattgaaaattttgaacagaaggttctaagaacttggtttgtcataaaaaagggagcattgcttagcatagtacccatgtttttaggcatttctaaattccagatatgaccaaaagaaaaaaaaaactatatgtgggcttttgctttgttgaattgaatcttccactttttgagatattttctctttggatatccattttatctcaaaaaagtaggtgagcttttgcaactggttgtggtctcaagaatctagtttatttctttagttaagtagacaattctatggagaaagcgagcaggataacattcggatcgaatttggaatcactcagaaaatgtcctgttaggcctcttgagatatattttatccttgaatgaagtgcaatgttttgagacaaaaggcatcatttgtccatatcagacattcattagatgtttatttagcggattcgaaaatatgttgtcagttaatgtctgattatgatggtcattttgcccttttgattgttctccggggcatgttcttctctaattgtatctcacccacttcatttgattttcaggtcat

SEQ ID NO: 42972 - DNA, 811 bp, Manihot esculenta
  Intron number 1 from transcript cassava4.1_023307m (locus cassava4.1_023307m.g) derived from phytozome v7.0 (chr-ID scaffold06711; pos 76414 to 77224)
aggtagtgttttctagatttatattataccaattaacctggggagcaatgctagtatttgacttgggagttgggaacctcaaacattgattctgtcgtcttggattggatttttctcttttcctatgtaatgatttgctttggatatgccctgtacttttctatctttgattttgtcctattggacaatttcttggttctaaagtctcattccttccaaatctcttgtcaaccaggctactgtttgtgttatctgaaatccagttcagacatatgatgtgctataactgtcaaaaacagttctaaataatgtttttaaagttattgattgggttgctgatgattgttatggatgattagtgctgggtgtgggttatacataaatcacatggttataatcttcatagtatctcttttactgcttctatgtggataatttgtgactatgctccagttatttcatatatgtactttgggcttttagaacatggaatcattcataattcattcagcaaagcgagccatatagtctatactaagacttcttaaaaacctttagtcctctttttataatatctagttacacctctacttcaagaaattgtgatggttgttgattctaattttatttaaattttaatataaatattattgtcatattgtgagttctatttgggaagtggttaatgactacatgcttgcgatatggtcctcgttttgacggcaacttgtataatttgtaacattgcctttgagtggtatatatactagaaccgacattttttaatttaatacattttcaggtgcttgtg

SEQ ID NO: 42973 - DNA, 987 bp, Manihot esculenta
  Intron number 1 from transcript cassava4.1_029551m (locus cassava4.1_029551m.g) derived from phytozome v7.0 (chr-ID scaffold03614; pos 644079 to 645065 reverse strand)
gcaccggatctaaggaagaggtgaggtttgctttctttgtttcttcctgcttggttcctgtgaaagtgagcaactcaatggcggaaaattgaacttttcagtctttttacggggtttgcaaatgcttgagcagtctctttccagttctgcttgagggtcaattcgttgactgtgatgtaaaagtccggcttcttaatcttagggtttttgaaatgcatgaagatttgcatttgtttccatttgcgcgttgctctctctctctctcctcccctcccccccccccccttcttttctttcaaccggtgttgtttggctgctgacaaagtgggaatggtttcagaaaatggtttttgggtttaaagggcttgaaattttggtgaaggctttaattttctttttatcttcttatgctctatttgttacccttggaagtgcgaggaatgctgtgaaaattaaattgctcaaccctaggttttccaaagcaactttgttgatgcattgtcggagtattactgagacattttctgcgatgccttttctaattagaaatcagtgaacagttgttattgccttaggtgtgagcttggcgcttgctccactctgattttgcatcatgcttttgctgtaattcagtgtcactccgaaccagaaattttggtttctgcttatcaaactaaatagttgtgctgatttcgttctgagattcttaattattccagttctgctttgctgttgaacatcttcaatttagagctattttttactgaaggcttaatttaattgtcattgtcatgggaattttgagcttttggattctcggcgtgtttttatgataacgtggttgctggatcaattgttagtctagattgtggcatgtgcattgaatttgtttcatcacgtggttaatttttctccctattttttgttttaatttttacccttgtggtgatagagggctgctgcagacaggatattgcagaatttaca

SEQ ID NO: 42974 - DNA, 933 bp, Manihot esculenta
  Intron number 1 from transcript cassava4.1_023780m (locus cassava4.1_023780m.g) derived from phytozome v7.0 (chr-ID scaffold03332; pos 454436 to 455368)
gctgggacaccctttgcttctaggttcttattcgggtatcatcacttccttcactccatgtgacctatgtatggatatgtgcattgatgcgtgagctctctgtgatacagtagctattgctacaattggatagtgggcattggagtattcacttgtatacagcttgtgataattgatatgctatgttcatatatatcaaagaaagctgatttcgcatttgttatttagcttggctgttcatagttactctcagaactatggtttgatgtggatatgctaatgggtggatactagcagttcagctttttgagaagtaggttatggtgtgagttattgggattaatttttaaaatggttagcctttcttatttagcttaataaaatgttcatattttactggcagaacaatggtttgctaattttgggattatttttagaattgttgatatggtctagatgatcttgtccaattaggagagtctgtcatgctcaatgtttgacatagttgttggagattctagtatctgttggggccatgagcaagcgtgtaaatttttgctttgatagaaagggggaagttatatcaaccatcttcctgtttttttctctagtcgctaggtgtttaaacttgctctagttgtggttgtctgtagttcattcttaacactcttaacacttcaatgctatttatttgtttgtaatcattattttggagaaaaagtaggggaaggagaagatgagcttcttcagtctggaccttctgcttggagttgttttctgttttccttttcatctttctttcatttcataacttcttttctaatctggtaacacccacataacttgcctgtttttagctttctcttggcaatattaaccttctccattgtcatgccagttattctgggacacgagttagtcattgtgacgctg

SEQ ID NO: 42975 - DNA, 675 bp, Manihot esculenta
  Intron number 1 from transcript cassava4.1_020566m (locus cassava4.1_020566m.g) derived from phytozome v7.0 (chr-ID scaffold08379; pos 44698 to 45372)
agttcagtttcatcgattgcttcttctcgactctggtgagaggccttatcatctcttttttgcttttttttctttagtgaaaatcagggaagatcatctcttttttgctttggttactttctactttaccaacatgtttgccagatattggcaccacaaattgaatgatgaaggcaagagtttgtattttgattgtgccaattgaagattcataagcaaaccagccatttattttttgctaaaaaaaataaaataaaataaaaaagagcccatctttacttagacacaagaaatcaaaagggtcccatgagattttaattgtgttgattctctgcaagtttaatttggtaatgaactgcaatttgttggtatcagtgttgttaactggttggcatgacggaatctgcaattgtgtttctgagttttttttgttcatttattattattataaaactattcaggatcactcggttatcttagcggcctgctgttgatttgatatggaaatgagattttatggaagaatcagctcggagatcatctctcttggtttgattgttgattaagattttagctgctgttgtgtgacgctattttcttttgcttccttcaaattatatgcgaaaccttcattatgccatcttaactttataggtttgaacaatttaaaaagat

SEQ ID NO: 42976 - DNA, 517 bp, Manihot esculenta
  Intron number 1 from transcript cassava4.1_003604m (locus cassava4.1_003604m.g) derived from phytozome v7.0 (chr-ID scaffold04151; pos 392002 to 392518 reverse strand)
gaactgtcaaagtaagtgctctctcctattgctcataatttacatttgatccttttgatattgcttagttgacagcctttctctgattctttcggttttgtttcttggttgtttctttgacaatgagtgaattggttctgggttgtataggcatggattggttaataatacctgtgtcgttttcaggaagtgaattgtgagctgatttctgcctggaaacaacatacttgctttgcgaatttgagctatctattgtcctataacttttagaaagtagttggcacggtaaattggtaactataacctcgatatgttctacatgctgtggcctttatttactgcttcctgccaaggaaatggttatcctataaccaaccataatcctaaagattgtttgctgcttcctgcctaggaaatgttttcccaccctgctactcttttgccattataaatgggtgcatgtgttctttcttgaacttaaaattttcttctattctgcagatctggaatactggca

SEQ ID NO: 42977 - DNA, 429 bp, Manihot esculenta
  Intron number 2 from transcript cassava4.1_001992m (locus cassava4.1_001992m.g) derived from phytozome v7.0 (chr-ID scaffold06656; pos 305640 to 306068)
caccatcacttgcggtacgttaaaatttataaccatttcaagaaacattactcattttctttaatcttgtctcaaatataattctcttacagtagttttgtaacatataattaaaagatatatgtcacattttcttgtcctcgcttagttgctaagcaatacttggtgctttttgctttttggcaaaacatgtctctttacaaataagaaatttcaagagagttcgtatcagattgcaagtgtaaaattgagttgtagcagccaaaaaaaaaagaagaatttacgtttatactatataaggaccagccctcttcctcgtatcttgctttaagagacactgattaagtaagttgatgatgactctggactgtaatttttttttccatggctacagaggaagactctgtaaaagacagaacagaagaagat

SEQ ID NO: 42978 - DNA, 887 bp, Manihot esculenta
  Intron number 3 from transcript cassava4.1_014471m (locus cassava4.1_014471m.g) derived from phytozome v7.0 (chr-ID scaffold07778; pos 210956 to 211842 reverse strand)
ctatatactttatattgggccttctcaggaagcaggtcaatttatttaatcttgtaaagggtaaaaaattaaaatttactttgtgctttttgtgtggctgtgcctgccaagttcaatatgaaagcaatatgtggtctaatacagattttcgctgctgaactttttaaatgatgaaaattgtaaaatgccgattgacaaaaaatgaaaaaaaaattgtaaaaagttttacagtgccagtcaccactatggtcatcagattttaagcgctgaaatctcattcttcagcctttaccttcttatttgcattacatttctagaatgatatgcttccactgattctggacataatgaggtgggtcttgcatcttgtcatggaaattcatcacatcttacaatgaattactttggttatattattggaattctaatctattggaagttcatgtttagcctctgctgcagtttcatttgacgtttcacaataaatttcctgaatgatagctactattctctctcaaactactataaggtgaaagcacaatgctttggcatgaatgaacgatcagttagattgcgtgcactttgatttcgataattcatcctccttttatgcatcacaatatttcctctcaccttgtcattctgttttcatccctactaggacgtaactttcctgatatatatgcatgtcagcaccaggttttgtttttgtttgtcaatcactgttttcctataagtagattatttttactttttttggattggcttttttccatttttttttcttttgtatgcatcttgccattacactttacctgcacttcggctttgttttgctacttttcgtaggaacttattgcatcactaatttgtgttatgattacaga

SEQ ID NO: 42979 - DNA, 868 bp, Manihot esculenta
  Intron number 1 from transcript cassava4.1_009046m (locus cassava4.1_009046m.g) derived from phytozome v7.0 (chr-ID scaffold08895; pos 10731 to 11598 reverse strand)
ctcttcactgataggtaatatttgtctgctttatatgatttttttttcagctggcaatatccttcggctggtaatttagttaacaggattttgattcaattcaggcgagtttatgcttgtttctcaatgagtgcaagttaatttctcaaactctgagtctttagcagagtatcaggatagtattccttttcgagatctgtgtatttagctgattctttattgtatggacatgtatgaactggttttctaggcaaatgggttattaatcaaatgggttccttttaaattatctggatacttattatgtaaaatatattttcagacttgtatttcttggtctcagatggatccatattgagattgtgtggaggaagctaaccattcaaagtttgtggttttaattttcttttttttttttctattgctcctttgagattatgttttgttggcaagtcaattcaagtcttaacaacaatttgcagccttctttcaatgctatcttaagtcgtattcaataaatgctttgtcatagtttaccttatgtcttatttaataaatgctttgtcatagtttttctaactggtttgtgattttactgaggtggtggtttcaagtgctgtttatatgttggaaccatgcacatgaagaatgacctatactcattaaaccagcttccccattaatttatggggatacctctcattcattcactgccataatttttattctatatatatagcaatggttactggaagtccccactgctttttccttaaacaaatttaattgtgatcagaatttctttaagggttcctgttcttggcatttaggctataatgacatgctaatgaggtaaaatggtgatagg

SEQ ID NO: 42980 - DNA, 482 bp, Manihot esculenta
  Intron number 1 from transcript cassava4.1_011471m (locus cassava4.1_011471m.g) derived from phytozome v7.0 (chr-ID scaffold03614; pos 3204722 to 3205203)
cgcactagggctcagcaactcgaagatctgattcagtaagagcgctctctctctctctctctctctaaagggtaaatgtatatagtgttgtgtgttttgttttggctgattaggttttatgtgggtgtcaaaaaaggtggggtttttagatttatccgcatgccaatctccatgaaccatggaagaatgctgctactggtttgagtttagctaatctgtctgttctgttttttggaagtgtataacattttgttttactctgattagcttttacatttctctcacttgctgggtaattgaatcattgggttatggacctaaaattctttaagctaatgtttgtgttctgattatgtgagatttctcttttaactggtgtacataatgatattacaaattaaaactacatgataatttctggttaggggaattgttttgaattgattggactatgttttccaggtacaagggcatatcacact

SEQ ID NO: 42981 - DNA, 716 bp, Manihot esculenta
  Intron number 1 from transcript cassava4.1_019565m (locus cassava4.1_019548m.g) derived from phytozome v7.0 (chr-ID scaffold05618; pos 271983 to 272698 reverse strand)
aagctgtttctagaattattggcaagcctgaatccgttcggtccccttctcttttttctcctttctttgcttgctttcttttgttctcttgattcttttgatgggtttgtttctttttgttattttcgtctatgactttttagtgttcgatgaaataactcaatgaatcttggttaccatggttcttataatttccgcattttcagtgttctttgattgctaacgaaagcaaaaactagctttgttggatttaacctggtattttttgggggtttcctgtgccatgtctacatatctgggctcgaggcttggaagttatctattttcaatggctgttttgcccacagaatttcaagctcttatgtcattaactattaaatttatcttgttttcctttgggtgcttcgaggctattagtaaattcaagaatttcacctgggagtattaaggcactccatcctatggaaaaatcctcattcacattctcatgcagaagtagaaaattagatgaataagaaaggtactaagtattgaaattactttgtttctccatgcgacgtatcatcaaaaggcctagatgccttggacaagatgtgtttgttaaatagaaaaaaaaatggtaatataggatatattaggaatttgtatggaaaagttcttgtaaatattaatacacatatagttgtatattgattttcccctccttattcttcagt

SEQ ID NO: 42982 - DNA, 948 bp, Manihot esculenta
  Intron number 1 from transcript cassava4.1_017126m (locus cassava4.1_017126m.g) derived from phytozome v7.0 (chr-ID scaffold03614; pos 3101931 to 3102878)
gaggaagccaacggtaaaattctttcttttgtcgcctttgcctgctcctactctctattgatcttaattttccgttctgatatatcatttccttgattatttcttgtttcgtaattaagatttctgtctccaggttttcccctaattttgtttttatgttttttttgttatttttttaggcgctggttcagattataagttaaatggttttgtgtattttttttcttttcttgattaattcttgcttctgttcttcctaatttcttggtgggtgtgtttgattgtagcttggtcctttttacagggataagtcaggctagctggtgtttccagaaacacatacaaggacatgagactttaaaagcttttcatacaaaattttcgtgtcaagtcttttcccagaattttatagactgagatttgtctttgtgcattttgtgcccattaatttgtggctgggtatcttgatctactattagagaatgttgttttaatttgagtcttgtgatggtgatgtcgaactgctcacgcggtccttaacacacaaatccatcaggtgctaattgctatggaagtcaccaattctagatctaataattatgctctttgatcaaacttgaagccaattatctaccatagcacagctcatggctccacggagctaaatattgatggtttggttgttatattttaattttgtgcaagacgtagtaaaacaactgcccaggacttatctttatagcttcaatagtatacttttggttcagctattaattatttaaattgtttttggaagtgcgagtatacttggtcatggaagaattggtcttgatcttctaatcctatatactgatgtgttttcttgcatttgttcaagtaaaaggaccttatgtatgactactttttttcttttgccttctttcttttcaatagtgatagaagctaaag

SEQ ID NO: 42983 - DNA, 1033 bp, Manihot esculenta
  Intron number 2 from transcript cassava4.1_019230m (locus cassava4.1_019099m.g) derived from phytozome v7.0 (chr-ID scaffold03614; pos 4085757 to 4086789)
tgccggctctactcctccggtatctcccttctctggtaaggtttgctttcgatccaatcgaatgataatcatggccctggtctttttacaaaatgcctaaaatgacctctcctaagaaaccggagatgggcgttgctactagaaatatccaaagggcagtaggtttgcaaatttaatagagtgaggctaattttgtcatttagcggtgtgggtctgcccagcaattggataatgataatacacctctctatttaagtgaattattgatcttgccgccttggataatgacattttaggtcgttgtttgacgtactttttatgcatgggtgttggccagctcaggctaaccatacttaaccatgcgtggttacttgacctgttagtttaacccaattgcgatattacctttccttttttgacatgcaattgcgatattatcattattaacaatattgcaatagagtatctttaaaaaaaataaataagggataaagcaccagttgattttgtatgaaattatcttgaacaaattcttatgaagagtgatctagtgtacccaaatttagttatgacaagcaggtgtctgtagtagttgattttgaggcaaaatataaagccaaatgaatgaaaaaatttatagaatacaaattgaaaatttctattgtgtattgggatggcaagtgatgatgctagctcctctattaatcttgactaggtggaactgaactttgctttgtgtttgtctattgtatcgcaaatgggttgtgtacttgctatgcatagacgtacgttttactcatctcatagtaattataaaagaaagaatgaggccagtagaataatagtattgatggtacgctgagccatgtgtgggacaagtagtatatgatcatgagctcattttatgctcataagctgcatgtatttgtatttacttaagatgagacgattgtatataaatgctgatgagctgttttgttatgatatgaaggaggcagagagtcctttcggtttcgaagaagatcaacatcgg

SEQ ID NO: 42984 - DNA, 526 bp, Manihot esculenta
  Intron number 4 from transcript cassava4.1_015275m (locus cassava4.1_012853m.g) derived from phytozome v7.0 (chr-ID scaffold03332; pos 1026431 to 1026956)
gagtatggtttattaattttgaatttattcttctttttggggattatttctgactaagctttatttccatttctatgcataattcaataaacataactgacatagtgtactaaaaaaccatgctgggattacaatattttgaggaactgatggccatccatttccatttatcgatagtattattaaactcattgcatgtgattaacacctagattactggctcctttccggagtatcccttatccgttggcaatctcatgtgcagctcggataggccccatactgttggggctctatggaaaaagcttcttctagagatatcatactccataacatactccaaatcctagaaagcagactgctttattgcacaataagagaattgattttgtttacttttatctatatcaatctttcaagagtcactctgtggagaaggagatgcacttgtggattatgttgcttttagttttgatatagttataaggttattcaagtgtgcttatagtttcttttttaacagggg

SEQ ID NO: 42985 - DNA, 1029 bp, Manihot esculenta; identical to SEQ ID NO: 42717
  Intron number 1 from transcript cassava4.1_001549m (locus cassava4.1_001525m.g) derived from phytozome v7.0 (chr-ID scaffold09120; pos 176583 to 177611 reverse strand)

SEQ ID NO: 42986 - DNA, 734 bp, Manihot esculenta
  Intron number 1 from transcript cassava4.1_004580m (locus cassava4.1_004580m.g) derived from phytozome v7.0 (chr-ID scaffold09151; pos 762172 to 762905)
tcaacaactgctagaacagctctccccagtacccagtgagttctattttgttcctattttcctctttttcgttattttgttgaaattttgattgtttaacatgttataacgcttttgggttttcatgttattggataaaattttcaattttcttttctttctttgatttccctattcgttaatttccagtcaatggtttctttctttgattcattcgttcttctgtgatgatgaatggtcaatggtcatcaaatttagtattgttggatcagcttagcttttgttacctcatggtgtgttttattagattaaacattttcatgaagtttactttagaagaagaatttctagaaaggatatgaacggagcttgcttgatattttgctcaagcaacgagctgttcctgttttggttggcaatggctaaaattatttattttatgaacagtttggaaaacaatcaatcctccaagtatttgcacttatcttgtgacttcatcattgataatagtttttgttctcgcaaatttgatttagtttttgaaaaaagattgttgatatatcatatatgtatgttcctgtgagaattatggtcaactgatttagcttagcttcatgaattttgttctacaactgctactagattccttctcctattgtttattattttagacaataaaatgttttttaccccttcctttttacatagggcacggaggaacttcaaatttttca

SEQ ID NO: 42987 - DNA, 621 bp, Manihot esculenta
  Intron number 1 from transcript cassava4.1_018683m (locus cassava4.1_018683m.g) derived from phytozome v7.0 (chr-ID scaffold09549; pos 24705 to 25325 reverse strand)
gttctctctcttttctttcttctaccctttacaaggtatctttctccctctgattctcaagttatgatttatttcactaataatagttcatgaactcccaatcccttctcccctttatatgcttaataatcttctgttaagctttttacttaccattatttgttttttcttcttcatcttctttctctctctctctctctctctccctctctctttaaggttatgaattcattcgataggttttttgtgaatgattctaggaaaaagagtgttaattttgctaacatgctttcaattttaaggggaaataaaatagctttaattgttcaggagtggaagggctttgtgtttattaattttctactttattttgttgatattagatgtatttcttgcgttatcttctcatcattagtcgaaagcagactgtattttgcatcaggccagttatgataatccagcatttgataaagtacaaagggcatgaatagtttgtaaactagagtttgttcttttggcaagtcaaaaattgatgtttagataaatacatacataaagtttgatgttttcctttctgactcggatgtttctgtatcttgcatattttattgttttctagac

SEQ ID NO: 42988 - DNA, 707 bp, Manihot esculenta
  Intron number 1 from transcript cassava4.1_030309m (locus cassava4.1_030309m.g) derived from phytozome v7.0 (chr-ID scaffold09501; pos 460370 to 461076 reverse strand)
aagaggaggaaactcgagccaccaccgcgtcgcaggtatgtctcctggttattcagatctatgatttctcttttcgtttaatattctctgcttttgaatgctctgtgaactgggttttaatatagagttgtggaaattggtgatgtgtctatgtgtatcttcatctaattaggctgatttatgattcatttcgttgaaattaataattgcaactaatttgatgcttctcccaattcctattattttgatctggagctgaaaaagaattctctgttgattaaccaattgctttccatccatggacgattttgttagggttggtttatggttcagagaattttcaattctttgatttgggcttgtggatgaatgattcaatctgaatatatagtctttcttaacttaggaggtctaaattcattagttatgatttgatttggagcttctaaccccagcaatgacaaagtccatatttgctttcctttttgttcgagtagctcagtgtttgagtcttcataacattatgtttcttcctgatatgtctcgacaaatgaatcattctgctgtacatcccaccaacatttcatccaaggactcagtaaatgagaatttgtgatccatatttgaaatagtgataggatttgaagtgttgaaccctctctgttattgcaggacaggcttttcaccagcagaaaagaaacccgtag

SEQ ID NO: 42989 - DNA, 293 bp, Manihot esculenta
  Intron number 2 from transcript cassava4.1_002022m (locus cassava4.1_002022m.g) derived from phytozome v7.0 (chr-ID scaffold10831; pos 33532 to 33824 reverse strand)
ataaggtgcttaaataactccaaaatgataattacaatttttaggaaaatcagaagggatattgaaggttatgctgtttgctgtaaattattactggatcaattgactttgacctatgtttatgggagagatgatagctgcaatggaaaagaatatattgatattgctgctaacaaaatatataacccacacagaaaaaaattgtgacaaccacattattgtgatctctgtgcagtctttgctctgtttatattagctattttgattattggattattcatttttttgccaga

SEQ ID NO: 42990 - DNA, 778 bp, Manihot esculenta
  Intron number 1 from transcript cassava4.1_004314m (locus cassava4.1_004314m.g) derived from phytozome v7.0 (chr-ID scaffold01551; pos 1127376 to 1128153 reverse strand)
gtgatcttggtggagcttcttctgccaaagctgaggtgacttttagactcaaaagattgccttcttttttttcggtgcctagttgcgtgtgttttgttggatattcatgtgaactccattgacgctttttgtgagtgacagtcatttgagtatttattgttttatatcttattatctccaatcgtgattttttgtgttgttattttgtttagcaaagtaataaataaagaacggctgactcaatcgaattcctttgttttcagtcatttggagctatgattatgcattttaggatgaactatgaaggctagcgatcatctctttaattaggacattcggtttttcttcgttcactgtggtttcatatatatttatatagtttttcccacattcattggcatctataaatgcattgtatggaaattttgttttgcacacttggttaacttgataccttatcattgttgacgaatacagctctgctgtgtttttgttatttatttatttattttctgaagtggctttgactgtaaaaggaatacttttgaaatgaaatagattcagcttttgtttcatctttcattagcttccacttggacagacggcactactgtgctgacagaattacattctaatgatatttctagtgctgctatcaaaatctagcattgttatgaatcatttctaaaagttcttgcgagaaaaatcttgttgaattaagcaggttgttgttgacaagtttggaacttgttgtaacaagtctctttgcatgggcagg

SEQ ID NO: 42991 - DNA, 590 bp, Manihot esculenta
  Intron number 1 from transcript cassava4.1_008999m (locus cassava4.1_008999m.g) derived from phytozome v7.0 (chr-ID scaffold07991; pos 422840 to 423429 reverse strand)
aaggaaaatccccttcttggtccttcctcttccacgtgagtgccttttcttttgcttgctatttcatgttttcatttggaggttacttgaaactttaaagattttgagttgtgggatttgaatattatgaatctctatatttgaattttcattgcttgttctctttatgtttagtgggtgaatatttggggatcttgatttttcctttgctgggcaggaagcgtagttgcaattattgtgaacttaggtgcattagttactgtgaacttccgctagattttccgatttatttggctggaatgctaaaactagatgaagcatttcccaattattgggctcgtattttgttaacttagcacaaaaatcttggaatcttgcagggttttcaggtagtttatccaattatgcgtttaaagacgtgccctttagagtttttcatggtttactatactgtttatcgacaacagatggagttatattctctttttttggtttgggtctgagatagcagagacattagttttttatcttattttcttttcccgggtctaatgtgttattgtgttgttcgtttcttcaggttagagaag

SEQ ID NO: 42992 - DNA, 965 bp, Manihot esculenta
  Intron number 1 from transcript cassava4.1_012341m (locus cassava4.1_012341m.g) derived from phytozome v7.0 (chr-ID scaffold00341; pos 425845 to 426809)
cctgaacacgacaagttcctcgaagctcttcaactgtaatgtcctcatcgttccttgaattaattgaaattgtttattttatatttcaattagggtgtagttcgctattttagcatgttataattaattttggtagctgatttttctagttgtttgaatcgtatttgaattcttatttggaggataggaaaattaaagttaagaatgctgttggttgatcatttctgagatggagtgtaaatgtatattgggattatttcttttgccaattaattgctccgacaaatttttttttttcgttttggattttgtctgtttcagttagtagatatggttatgcgtttgaacaagtagtcactaactaacaataaggtacgtgttggtggttcctcataaatttgcctaaaaagtaagaaaatgactcttttgagctgaactgctgaacactggaatggaagagtggggttatggagacgccctctagatatcattagtaaatattccattattagttcagtatgggaaaattgctttagtaaaacatcagtaaagaaattgggaagaaataataattctaatgttggacgtacgcttttcaaaggaaagctagactagagtggcctcttcacagtgttggaatttagtgatgtatttcaaatgagttatgatttcatatattaatatagaaaatgatgacagctgaccgatttagaggattgatgccatatatcaattgttgcagaattacttcggaagatgcatctcatttttgcaatacaatctcctgaattttggacttaaatgtgttggaaacttttatctaaaattgtatgaacccttcctatcagtacggattttatgcatagtaagattctctttatcctgttttcttcatgcatatccttatgtgtttacttcattccttttcagctttgatcgtgactggaaaaagattgaagcatttg

SEQ ID NO: 42993 - DNA, 749 bp, Manihot esculenta
  Intron number 4 from transcript cassava4.1_005082m (locus cassava4.1_004990m.g) derived from phytozome v7.0 (chr-ID scaffold03614; pos 1197833 to 1198581 reverse strand)
gtccctacaggcctcttccagaatcccctcgcgtaggtagatggaaagcactgtattcatcatccagtttttcctgatgcttggagatatgtgaaaagaattttcttggaccagcataagctttgcactattctttggcttgttattctcctgaattactacttgtaactgattagtgactaagcactttcatttaatctgattttgatacattttatccctcttttatgtgtgttatttacttcttcctatggttgacatttttctttcccaaataattaagaaacatgagataacttaggttgcacttggtgcttgacacttggcaattttactgaagattatgaataggctctcacctgtggcttcattcttctttctttttttttttttgttgggggggggcagggaccagctcctatgtaagattggcatattgtttattttctggttacaacttaaaattttttaatccttttaaccaaaattcaaaaaagaggactaattggcctatttttttttacaaaaaaaaaaaaaaaccaatttcccctttctcgaccccccttctattctttattggattaagctcagttgctgtattttttaggtacttggttatgtcatgggttacttgcattgtgggggtttaggctcatttgtggactattgttattctttttaaattgctattgatctctgtttctattttctcagcctgttacacaaaattttaaggtggaccatcaccc

SEQ ID NO: 42994 - DNA, 523 bp, Manihot esculenta; identical to SEQ ID NO: 42261
  Intron number 1 from transcript cassava4.1_017841m (locus cassava4.1_017764m.g) derived from phytozome v7.0 (chr-ID scaffold04151; pos 437376 to 437898 reverse strand)

SEQ ID NO: 42995 - DNA, 592 bp, Manihot esculenta
  Intron number 1 from transcript cassava4.1_007400m (locus cassava4.1_007372m.g) derived from phytozome v7.0 (chr-ID scaffold10015; pos 333695 to 334286)
atctcaagagcaacgacaattctcttctaagaaaggtacctttttcccttaatttccttttacattttccttttattatcaatcgtggaaatgatttttcatgtttattcatattttctttttcccatggaaatcaaatgggcacacaagccagcattatatcaaactttattgtaaatctgaagtttttagtagtataatggtggttttgatcaacgtgcaattgtaagtaatcagtttaattgtgacaaagttgacatctcttagctattgtaaaaccgaatgcaaaaatttgttcttgaactaacgattaagaacttatacatgctagtgaagatgaacctttttccaaatttgaaaggaagctggttcagtgagaaaaaaaaagaacaaatttctgatgtatttatatcaacttgagatcaacaaagcaaaattaaagttgaagggaagttttacaagttttaagggtaaatttagatagttaatagtgagtaaatttgtttagctggataatatgtggtagcttaatactgtttctggggaaatggaagcaggacaagacttggatcagtctgcaggtaaaagtagg

SEQ ID NO: 42996 - DNA, 561 bp, Manihot esculenta
  Intron number 1 from transcript cassava4.1_005611m (locus cassava4.1_005611m.g) derived from phytozome v7.0 (chr-ID scaffold03614; pos 2720981 to 2721541 reverse strand)
actgcaaccgttaaatcattttctttccattacatgtatgtgttttcttctgttattctttccatgcagatgcagttgtgttcgtcttctccgttcttatattctttgcaattgttatgttctttatttttaattatgagcttttgttattttctttgcaattgttatgttgttctttatttttaattatgagcttttgttttttgttttttgtttttttgttgtttttgtttcccgtcgctgttcattttgctttcgtacttccgtaattatatgtgcttttcacttgtgggatttgtggtgccttataaggcatagatgttcatggtgttctcaaacccttttttttcctggattagtgtggccattgaaataaattttttactttcattacaaacaagataatatataaaaatgaaattaattgaattaaatttgcaaaattcttgattccaaacaggggaggtgttttaatgagaaatgcgataggtagggttcttcattcctgttttagtttcaaagttatgattctatttttttttctggcccagtgcaagaatt

SEQ ID NO: 42997 - DNA, 460 bp, Manihot esculenta
  Intron number 3 from transcript cassava4.1_009413m (locus cassava4.1_009413m.g) derived from phytozome v7.0 (chr-ID scaffold06261; pos 27316 to 27775 reverse strand)
gcagttcaggaaacggtttcggcaactcttaataggtaggtgtgctcctgccaaaatgctattatatctgctatgttctttgaagtcgttgcatttgtaggtgaacaagttaaacacctattgttagtggtttctcatatcaatgcttgttctaccattcgtcctatttacagtcgtatcttatgattaattgtttatttttctcgcttttatcaacgcttgcatatgccaagaacctctgcttttacattaccgatttctgaacctgtgaaaattttcatttgtatatctgtatgcttttgtttttttgtaagcttaagcattctatcaaatttacctgagttgaaatgcagtgagatctcttaattcaaagacttttaatccttaacatgctagatgttaacttagcttcattgttgttgcagaacagtttctagtggtattagcggtgcaagttact

SEQ ID NO: 42998 - DNA, 523 bp, Manihot esculenta
  Intron number 3 from transcript cassava4.1_008710m (locus cassava4.1_008710m.g) derived from phytozome v7.0 (chr-ID scaffold04607; pos 15952 to 16474 reverse strand)
agttgaaggttgttgtctttgtgcacggatttcaggcaagccttccttttctctgacttcatttgaataactaatttctgttacttctattttactttcctcttcactttttttttgtttgtcattctctttttctttaaagtggttatttttattttgttacaagaattattgtcatcgctttattgcttattggttccttgcttaaattatttaaccatttgagtctcttctataactatacgttaatcctttttctctcttaccctgaattcattgagctgcctgaaatttaacatcactatgctttatggttaacaaatttcccatttgttcatccatgttttactgtctgccaagtgctatttattctctttatttgtcaatatttattctctttctttgtcaagataatcttttacaaagtccaccttgcagttttaagcatatttgagttaattttatttgtatcaaactcaacacattagggacatcatctggatttaaggcttgttcgaaatca

SEQ ID NO: 42999 - DNA, 758 bp, Manihot esculenta
  Intron number 2 from transcript cassava4.1_027240m (locus cassava4.1_027240m.g) derived from phytozome v7.0 (chr-ID scaffold12370; pos 25277 to 26034)
agaatcaagaggacaccgttactagtcaactcgacgtaagataaaccaattctcttctgcacttggtctttaatttatttcttaaaaaaatttaaatgaatctttataaaatcaagacttctacgtcatttaaaaaaaaattcaaattaaaaaaattgattttttttttcaatttacagaagggatagattctaattaaattaatttaagtcaatctgcatttagtggcaaaattgcaaaatgaaatgctattggctctctaaaaatcttcttaattttccccatccaatctcactgcaaaacactatcgacaatccttaatactctctaaaaatcttcttaattttccccatccaatctcgctgcaaaaaactatcggcaatccttaataaattagcaattttaaaaggtctcttgtacgtgaactaataccacagcagctgcacaatcatattgaaatttaattttcttccgccctctttcccaagccaatcttaaagtaccgtaaatccttcataactctgcttccaaatgatcatgtccatccaaagcaagcgtaaattgaaatggtctaattttaaaatcatgaatgacaaatgttcataatgttattgcccatttagaaaagggtcgacagatattttcttttgaattttcaagcaatacttcatttctagttctttatttttttttccttttttctctaaattaaattaactaatttgtttttgctgatcaaaattgtattctcttgcaga

SEQ ID NO: 43000 - DNA, 733 bp, Manihot esculenta
  Intron number 1 from transcript cassava4.1_005443m (locus cassava4.1_005443m.g) derived from phytozome v7.0 (chr-ID scaffold03667; pos 70917 to 71649 reverse strand)
ccttgagtactgtatagactcgaaccctccttggggtacgtgccttctctttttctttgtttcttcttcttcattttttctttttaactaactgttctcaacctgctcattctcacaatcttctgttttcttcgatatcgttggtaggttacgctgataattatatatgagttcaggaactgtcgcattatataaacttttaatacactgaaaagaggcgagggaaagaaaaacaaactgaagggaaaacaaaaaagaggaaaaacaaacaaggaatgagaaagaatgtgtttgtttatgtgtatgtgcgtgtgtttgtggttttttttattgttgttattatttgaattttgaagtgggtatatgcagaaattgtggatgagaaaattatggaacgatcaacctcttgaactaaaccaaaattagatgcttcgtagtcattggcttgcctagttcctctggtttttaaattttgaattttaaaggctgtgtttggctactaacagaatggtcctatggtaaaacagaagtttatatggcatttgagacgataagactttcagttcgtattgttttttgttcgtttttaatgaagctcgaaatcgaaaactcatctgtagacaagtctatttgaattattaaatttcccatttgtatctatgtgctaagatgtctaaaatattttttttgtgttgcagctgaaaccatcacattggcatttcaaaactacatc

SEQ ID NO: 43001 - DNA, 227 bp, Manihot esculenta
  Intron number 2 from transcript cassava4.1_002486m (locus cassava4.1_002486m.g) derived from phytozome v7.0 (chr-ID scaffold03614; pos 3360775 to 3361001 reverse strand)
aacgcaacgtggtgggtttatttctctgcttgaacttcgatgtcaagattttaatgctgtttattttgattacgcttgaatttcttatatgttaagtgttggtaaggtctaatagctattgagattcttttctattagatgtttttatttgttctctgcaaggttctgatcattcttattttgcctttgaagatacacggtgattttgtccttgttagtggggatac

SEQ ID NO: 43002 - DNA, 993 bp, Manihot esculenta
  Intron number 2 from transcript cassava4.1_015280m (locus cassava4.1_015280m.g) derived from phytozome v7.0 (chr-ID scaffold10400; pos 160612 to 161604)
gaatctctccagaaccctcctcgtcagtatgttcccacattctctttctgtttttgtgtttgtaattgtatacatgccactgcagatctggcttcaaagagcatcggttctgggttttgtagaatttaatagttaagaggaatttaaagcttcttttctttagtatgtttgtgcttaaagattgtagtagtttgcacgtaacagtgggaaatttatcttcacttgctttgctaggttttgaattcgatgggtactaaagctttcattttagggattacttgtggcaagtggagtactatcagtattacagcttagaattcagatgtaaccatgggaagagaatttgatatgcgtggattttggcgagtttatgttatctgtatctgaatagtggtcttagattatggtttagatttggatatctcagtgatggattgttaatggtcaagaaacttaatttaatgtgtaaattcatagcattttcttcatttcttattcttgaaagagaacatccctactccgaatctgggatatgtatagtctagttttcttacacaatctggcatgatagagtatttgatcaacgtggctctaggcggatgtattgtatatatgtagctggtgcatggaatatgaactcatttatgagaatggagttaatgagtcatgtttaattttgctttgtttattgaatggcgtgattcctaatatctaaattcaaatcatgctttgagatgtgccaataggcagatgctgtatgctttgagttcattctgttctgattgaattgacactaatttgacctaatagtgtgttgaagtcacaccttatgttcatgcttgttgatggattagttcacacaggtgaactagaacaggaagatgaattcaatttgcatttttatctctcaaatatttgtacttaaagggtaatgagcatatccatctgcctttctttctttcctttatgcagcggcatttggggcagttttgc

SEQ ID NO: 43003 - DNA, 494 bp, Manihot esculenta
  Intron number 1 from transcript cassava4.1_018250m (locus cassava4.1_018250m.g) derived from phytozome v7.0 (chr-ID scaffold01551; pos 460567 to 461060)
tccttcagttccttcttttcaacctgttgttgcccgtaattttactcttccccctcttcttggtttttacttgctttgcttctgattttctttaattgacctctatagctgttcctaggagttgtatgtaataggaaaggatttggtcatgatgggttctgggaaaagtttggaacttcctgcattttattacattttcaatcatttttgtagacattgcttttataggtttgaatgcaaataacagatgccctctttgaaggtgatatttgattcggtttgtatggtgcacaatcattttttgaagatcttaagatgctagtctttatcctccccccccccccctccccccaatcaaatccttgcttatttagctctgttttgtgcataacttgctattaacctttctgctgacctttactgaagttgtttaatcttggaacgtgatttgggttccaggtagagtgtgtccctttactgggaagagagcaaac

SEQ ID NO: 43004 - DNA, 517 bp, Manihot esculenta
  Intron number 4 from transcript cassava4.1_026737m (locus cassava4.1_026737m.g) derived from phytozome v7.0 (chr-ID scaffold07571; pos 176064 to 176580 reverse strand)
cttccagctttcccggaccaacaaccgaggaggtatcttttttttttttttcatagaatttaaagatcaaattgtgaaatatttttatctaattcgctggatttctggtttttggccgttccctgctgcaagctgactttgccactcagtagctcagaatgtttaaggaacatatcttgtctgctgtttagatcaaatttccttttgcccatatattgtgtatatttgaattgtattctctcattttatcttaagtttcctcggttggatgctttgttacttgtgattaactttcaaattgaaagttcaactatacaagtatctatcacttttcctatcaccatatcaagttaagctttttaatttcttcttgctccgtggcttagaagtttgtttcctgaaaaatgatctgcgatccaattagaatctttgttgttttgcacataagtaaaacatccaaaatctttctttatctttatatagcatattctttatacaggcctgctaactgctgtac

SEQ ID NO: 43005 - DNA, 566 bp, Manihot esculenta
  Intron number 1 from transcript cassava4.1_012624m (locus cassava4.1_012624m.g) derived from phytozome v7.0 (chr-ID scaffold03400; pos 32965 to 33530)
ggagtagaaggaaaaaggtttcgtcctacggtatgtacaattaatgttattgctatttgggttctttctcaattgtgcttgttacttgggagaattgatcaagatatttatgatgccaatattgggctaactgtactttgtatgttcacttggtagtatttcataatgtaattgtagcagttcaaaatggcttttcagggtttttttgagaagatgctccagaaaacatctatagttccatactcatggctagcatagcttgctccataaagtctgtatctgttgataaccttgtctcttgaaacttgcctcctgtttgcaatatctgcctgttatcaaatatctgatgatgtttattctttttcttgatagttttttctgggctttaattagttatctatttatctcacactttttaataagtttacatctaagaaaaattatgaagtgcttggccatagccatatacgtttatgacatctactgttttgagtgtttttgttcctcatcattcattgaattctgatatggagcaaggggcacatcatgtgcaggttttgttgctg

SEQ ID NO: 43006 - DNA, 836 bp, Manihot esculenta
  Intron number 2 from transcript cassava4.1_003171m (locus cassava4.1_003171m.g) derived from phytozome v7.0 (chr-ID scaffold06914; pos 694569 to 695404)
atctttcgcaggtgattctgacacttcaatttgatatgccaatgatatgccaattattgttagtttatcactgttgactggctaatgcatagagttgtctagtatatcatgtggatgaatggatatgtcttgtgcacgtgcttctttcagtttttcaaatttacaattttcaaaatgtcttccttatatgctgatttgcatgtgatgttagtcagtgttttttcttattctttgattttttttatctgatacgatttgaaaattcaatgtagccgatctcaactaatttggaattaaggctctgttgatttgattttgaaaataagattgagccccttatttacctgggcttaataaattcaagattctggtttggaacaccttttactacaaattcttacttctctctgtaagactactttggttcagatgtacccatttctgtttgatgtttgaaattcaaatggcatgttaggcataaacattttagaattcatttgaataatttctttctatatactggcctagatatattaattatttcatgaggaataagtgttaataagaacacatttaggtaatgtcaaacagtagcttttgtagtaggcttgttctgcatgtgattatgtttgtgaataataaattgctacttcattggggtagccataacattttatggtttgataacaatgataagaaattaaattgaatggacaaatttctgcaatatcacatcttcacattacaacttaacattttgagctttcagtgggtaattatcatgagataattcttagtttattttacttttgaaattattgcagctctttgattgg

SEQ ID NO: 43007 - DNA, 772 bp, Manihot esculenta
  Intron number 1 from transcript cassava4.1_027372m (locus cassava4.1_027372m.g) derived from phytozome v7.0 (chr-ID scaffold07519; pos 217972 to 218743 reverse strand)
gtaagttttgtgtatgaaatctcggctctctgatggataatcataatgagcattacgaatgtttatctacttgccattttggagtttctaagattgatttggtgagctttctataactagtagaccagtgttggctatttaagtcttgtgggtttgttcaaaacttactggaatgcttcggacttcttgttgagttcttcttgggtgtttgataattcaatatttgggtatttttttctctgtccttgaattgcttaattgatctagatttttgcaaagtggggtattcgacttcacattagtgatgaatattctgggctcataattagaacacttttagcaaattattattgtttcagataactttcatcctatactttttgttttattgatcttggtagataaagactctttttaatcgtttgagtgggggagaatctaaccaaagaaacaccttagactggaattttattctttcttttagttttaagtctcagtaatatctgacaggttgaactgttggtttcctcggtatgagttcttttaatgaaatggtttgtgacaaatggaaagttttatgactacatctctatctgatataactaacgatgaggaaacattgttcatctgtttgtttctaaattttgattatgattatgtgtcctggaaatatcttatgcctgagaaatacggattgacatgttcataattaaattgatctctttgcttctaccaagcaggtgacagaaatcaaatccggaagctccagtaa

SEQ ID NO: 43008 - DNA, 484 bp, Manihot esculenta
  Intron number 1 from transcript cassava4.1_008685m (locus cassava4.1_008685m.g) derived from phytozome v7.0 (chr-ID scaffold06711; pos 237702 to 238185 reverse strand)
aggtaccttcgctccctttttcttttctatctctttgcaaggatcaatttgatatgcttatttgcctgtacttgcggatattttcatctcatcgctgcaactagttatggatctggttctttggaactcgattttcttaaaatgatcaatttttaatgattttaacctcaattcttgtttctttcacgttttggctttgttggtcagtgataaattttgtttttttagataatttatgtgacctttgcatgttattctagagttttattcgtttttcttatgataatcaattggtttattttttttttattcattttgtaaattatcaaatttagatcatctttttgtgaaggtacctactttttttttttctttcaaaattatggggaaaagttaacaatacttactaattgccctttttctattattctttttttcttcattcgcagctcaaaggagagacccactcttgggtaagtcgtta

SEQ ID NO: 43009 - DNA, 756 bp, Manihot esculenta
  Intron number 3 from transcript cassava4.1_006665m (locus cassava4.1_006665m.g) derived from phytozome v7.0 (chr-ID scaffold10173; pos 174867 to 175622)
catttctggtgcctactccttattatccagggtaattttctattcttatttatgccaatatattttatttgtggattatatggccttaatttccaacccacaagagagatggagagacaatattaattattgtattgagattaggatactgtattgatcgttttcagttgagcactgcttgtcaaaccaatgaagctttcagtcgttgaaatgtcacaatcctaatagctagcaaagcaacctgtattattggtgggggcattaaattcttgggatttcccacaagagtccttgagcactcaggatttttcatgaagaccaaacaaatagtagctaggtctatttatttatttaatttttcagagttgaaaggattgaaaaactgagagagttagaatctggaacctcctagttcaatcttactcggtggttttttggattttagtttccattttgcttttggctgcagtagcgtatgtcttgtcatttaaacttttacttggtgataggaactgtagaattaatgatcacttgactagtacagaaactgccaatatgtcacagtgaagccatcttcccttttcacctaaattcatctctggttaattaatttgtgtttatctttatttatttgattaactaggcaatttaagataaaattaaacccaaaatctgatttttttaatattagtattcattaagaattattctaaagtttttatatcccgcctattgcagattcgatcgagacttgag

SEQ ID NO: 43010 - DNA, 409 bp, Manihot esculenta
  Intron number 3 from transcript cassava4.1_031302m (locus cassava4.1_031302m.g) derived from phytozome v7.0 (chr-ID scaffold01778; pos 168528 to 168936)
cattggatccagccccaagaatcaaatcaattgaggtatgcttttctctgtgtttggaggtgacatctttctcagatgcagatgcatagctatacgtaaagctggtataactttgatgcttgtggcatttgagctcaatgattctgcaaatgcttgcatgtggttttgttgattttttttgaactacatagacttataaacaacattgtccatgatatgtcgacatatgattcttgttcgccttagattttcattcctctgttatttagtttgtcttctatctttcattttcagatttcaggtatcaatgtatatgctgtttcttagtcctaataatataattttcatgtcgaagttttgaaggagtttactgcctagatttattcttcaaatctgtcttctaggtatt

SEQ ID NO: 43011 - DNA, 934 bp, Manihot esculenta
  Intron number 1 from transcript cassava4.1_013058m (locus cassava4.1_013058m.g) derived from phytozome v7.0 (chr-ID scaffold07762; pos 232827 to 233760)
ttccccagctatccgcaagctctgttctcttctgggtatttttctttttgtgctgtttgttgatttaaatgtgtaaattttcatttttggctcgattcctagatgggtttctcgaattatgtggaagtttggagagctttctctgatttaatgttgaaactgaggaaatgaaacttgacggtaattgggattcgtttcattgtttggggaagctctccgcttcaaatttttttttaaggctgttttgatcaaatggtttatgatttctactgatttattttatctattgcgaaatcaacttgctattttggacgataatgtccaactacacaaatggttgatagcaagatattcatattatcacttatctattttcagcaaaattggtgtatattcaattcctatttaaaaactgattatagctagcaacaagagttgaaggactaatgacattgtatttgagttgctgataagaaaaaaaaaagctatttcaaaaatattattaaatattttaaaaattttaaatttaatttgacatattgtagttataagaactttaaaacagtgaagtaactttttcaaactgtttttttctcatagtgtctaatttattttattattgttattattacatttttaagaaaaaagttgcaaataacctttttggcctccaaccgcaattcaaatgaagccttagttttgtttaccgtttaaaaactgtttacagcaattgatgcgtcttagctaaatggtatcagagttgtattgaagtctttgactttaaatcccagaatgagccaaatttcaacaacaaaagaatgtttctagcaagagggatgttttgcttttctgaagtatgatgaagtcacaaaacagatttatcatatgttgcctctttggctatgatacatctgctgttctgcagacacaattc

SEQ ID NO: 43012 - DNA, 721 bp, Manihot esculenta
  Intron number 2 from transcript cassava4.1_001470m (locus cassava4.1_001470m.g) derived from phytozome v7.0 (chr-ID scaffold03009; pos 61781 to 62501)
aggtaattcaaagatgtgaacttgcaccatgttattactataaattgtcccttctattctgttggccttataaatcattgtttcttctggatatttgtactcattcagcgtactctttttttgttttttttgggcgctaaaccaatttagatttgtttaaggagagcctctccatcgtaaaggagctatgttaatgaaccagttgtcgttccattttattcaattttttttaatcatgcctgtgattgcatggtggaattagaagtgaagatgatacctttgtgttatgatttaatgttcacactcactaaagaagaaaagaggcaaaaagacctaaattttccattttgttatcgtttaagaaggaattaaatgaagtgaacatctgacgtatatgtaactataccaatgtgtctgtagttaatttgcatgattgaatgtgtgctataagaaattaatggcttcaagttgaaaaggccatttagaaaatggcttgattgattataccaatctgtaccagggatagtggccctgcagttttactggaacaacatttggtttgtgcatggcaaaccgttacagatatggatatgttttcatattgcattactcgttaatagtggtgaagattcaaggtatcaaacttgtggtgcatatggaatgactgtgggacttaaagatattttctttcaggcaggaaattcgaacatcaacaagctca

SEQ ID NO: 43013 - DNA, 769 bp, Manihot esculenta
  Intron number 2 from transcript cassava4.1_015571m (locus cassava4.1_015571m.g) derived from phytozome v7.0 (chr-ID scaffold06711; pos 637464 to 638232 reverse strand)
atcttctagtttttctagataagaaggtaatttagtacgatccttttgcttggaactcgaaattcctgacctttttttggtttatgtagcatttcctaattagagacggtgattgttgttttccccctagattgttcagtttccgattcttgaagtttacggccaatatttctcttctgtttttttttcttttcttttttcttcttattattcgacggttactgtaatctttagaattgaaacggaacgacttcctagtgagttgcttaatgtttctatttatttataaatttccgcggagatgatttcccagcgagcggttcgattagccgctaaatggattcactagcctttttctgtcgatctgcctcataatcttttagactttagtgtttatagctatgtttccagatcggttgagtcgatttatttatttatcttttttttttttcctgaactaacccacccaagcaaaaactgaactattctttgttgcttggtggttttttgagctggaagtgcatttttcataactgactctaattcattagtgactttttgctcagggtgttctgttctatgttgttgtatctaaccttgactcttttatgcctttaaaataaactataggttgataacgttatactcaatggtttttttttattttggattgagaatgagcccagatgaaacaattattttgttttttttactactttggtcatgtgactgaagaaaagctaatgaactgtttggcttccgcaggtag

SEQ ID NO: 43014 - DNA, 832 bp, Manihot esculenta
  Intron number 2 from transcript cassava4.1_033194m (locus cassava4.1_033194m.g) derived from phytozome v7.0 (chr-ID scaffold06512; pos 1954631 to 1955462)
gcacaatcatttgcgccctgatatcaaggttccttctttccctttcattttctttagggtttgctattttactgatctcacatcttttgttcatgttgcaatttccataaattaagttagatatatgtctgctttattttttcagggatttttttatatgaaatctgtttgatggatatccaagaacgaaggatcttggcttatactttcggattctttgattttaatatcaagtagtttgataagattaagaaaaatctaaaattaaccttatatatattcatatttttcttgtataatttagggtcaaggtaatactttagattgttttgaactaataagttcctttttcttctcccccttatatttccttttaaattcttttttctttccatttccatttacatatggcagaaaaaaaggacctagctagggcttttagtttcacatcacatgcaaataggttaatttccattcgttccaaatcttctctttttttttttttctttctgaaatgtattttaactcgaccattgcaatgcaaaatgcacgatttgttcagcaggacccagctgttatatattcttcttcatcgactgtctttttcatgtgattttgtaatttttccttgcaaagcatcatcttgacataaaagttgatgacttttctctctccatgaataagttcccattggcttttcaataaaaaccatttatgttaattgtttgtaatcttttgccttgttattaatcatacatgtgcttttttttttcttcttgatgggttttcttttatagaaagaaagctggagcgaagaagaggagaggatttt

SEQ ID NO: 43015 - DNA, 463 bp, Manihot esculenta
  Intron number 1 from transcript cassava4.1_006617m (locus cassava4.1_006626m.g) derived from phytozome v7.0 (chr-ID scaffold04175; pos 112606 to 113068)
ggacaacggtcaaattgggttgtaacgacttccaggttttgagttttctgggttgtgtaatatttgtattactaattctggattgtttgattttgtagtatttatattaaacgccgaaaagggtagataggatatgcagagattattcatcatttatccattcattgccttttttattgatttgattgttcttcagtctgattctaaaaaaaagttataatcttgaaaatttatactacttattggatatgagctctctccgattctgtgtgatttcagttttagttatttgaggaatttgagtttttgcaattcgatgattgttttatattattgggtcatttgcttatgtttgatagtggtgtgaccatctttatgtttcattgatggcttggttttaatcctttgccttccaatggaattgtcaggttgataactgagttcattttctcaaaaagaaggc

SEQ ID NO: 43016 - DNA, 835 bp, Manihot esculenta
  Intron number 2 from transcript cassava4.1_006617m (locus cassava4.1_006626m.g) derived from phytozome v7.0 (chr-ID scaffold04175; pos 113166 to 114000)
ttcgagcttctgagcttcagaaggaagggaagaaggtatatgtagttgctttgcttgagttttctccaggaatattgtgctttatgtctgtcttgcaccttagtcaattttttctttggaaaaattagtcagccctgtttttcataaagcttttgatgatgttacttgagattgttattaactataatatgtggaattttctgctggtttacgaaagaaaaggatactttattatgattatttgccccttgttcttagattttgaagaattcttaatttgaaatttaattcattctagcgcttattgaatatttgtgatttgggttttttgtttaatgactttcaagtaatagtagatgccaccagctattcctttagtgcaacttttgtttgtagctacaattttctttggaacatttaatgaccaagcactttgtggcttgatatgtttgtaaaccttttgaccagggaatctgattacctcctaacttgaaaaataggaaacttgatcacacaagacataggcattcaatcatatgtcgtgcaatttactgatgtttttaactttggcagaaaacttgattgcatatatttatattcccatacatggaatataaaatcaagttttagccaaaattctaatataacatagaacattcctgcctgtgctatttagctccttgtaaagatgcgaaatgacaccactatcactgaacttatttgaggttgattactcgaataatttgataaactatcatattgaattgttggtatcccattatatggtcatctgtgtctcactctttgactttatgttcatagattattttcacaa

SEQ ID NO: 43017 - DNA, 937 bp, Manihot esculenta
  Intron number 2 from transcript cassava4.1_008618m (locus cassava4.1_008618m.g) derived from phytozome v7.0 (chr-ID scaffold07012; pos 1526929 to 1527865)
aggtgatctctaaagattctctattggctgcacaggtaaaattttctactattagtagaggttgcgttacctagttctatatgtgtttttattgcttttattaacagaaggatactgtgggcgttaaattttgtagagggaggacatttatagactaatggacttgctatcattggaggagcaccaggcacggtgcttactcattcatcatcgctgggatgttgataaggtgcttcagttactcatagaagatgggaaagataaactgtatgctgaagctggcgtgacaatcgtagatcattatggcattatcttgccccagttatcatctgtggtggagtgcaatgtttgctttgataatatttctcccagtgaggtcactaccatggactgtggtcacttgttttgcaacagctgtaagtgcactgctagattttatcggtttctccatttcagtacataaagccctatacactgaggctttcttaacctgaatttcatcaatttgaagaaccttcaagaacaaatgaaccataatttttttatttcatagttcagcagccactatttttttgctagatgttactgttgatggttacaaaggtgtcagcatgatcatgatgcccaaaatgatgaagatgcaactagcaaaaagcattttaaattatcatttccatggttgttgtttttggtattctcgtgaatattgaatcatttatccttaatagcaaatgttggcaaaatttgttatttttgatattgcttcagtacacaatttagagttctccaggtcctagatcctttcatacgctttgtcctcaagcaggaggctacattctcttatattctgtagtctgcaaatgtatgttatttagttttctggtgattggaaaaaactatgggaatatcctgcttagtatgctacctgtatataggt

SEQ ID NO: 43018 - DNA, 563 bp, Manihot esculenta
  Intron number 2 from transcript cassava4.1_006076m (locus cassava4.1_006076m.g) derived from phytozome v7.0 (chr-ID scaffold03329; pos 176983 to 177545 reverse strand)
ttggtcttgccagtcttcttactcattcttttcaggtactctaaacatgtgaatcctgcttttttttcttcttccacttatatatttactttgtttcatgtatgaattgccccctgttgttttttctgtttttgttcaaagatgaaaacttcatccctgtttagtttacaggagattcatatctacttggatccagaagagttagcaaatcaatggtttgaaattggaatctatgtcactcaattttgctgcgtgatattggcagccaaatagagcatagttagcatgtatacacaatcacacacacattggtgatgttgcttctttttatatatatatatgtatatattcaattctccaagcagttatgctgcaactcttcattgatttattaattttttatattaacatgatgagatcatgctatatgagctctagtaaaaatgtcatgtgaaagtcaaattatcttatttaaaagtagataattgaagtgagtggttaacattatgacttctatttaacatgcagctatctgtaataaagaaagcaaggtatatagcgtt

SEQ ID NO: 43019 - DNA, 684 bp, Manihot esculenta
  Intron number 1 from transcript cassava4.1_000750m (locus cassava4.1_000735m.g) derived from phytozome v7.0 (chr-ID scaffold04314; pos 89568 to 90251 reverse strand)
gactgagcttgcatttatctcttactttgtctcaggtacattaaaatctttgccaaattcttagtatggcttataatagctcagattgaacccaaaaattcctcactcccaattctgtgggtttacaatccaaagtcgtccctgcttcactttagtgtgagatttttgctaataaactattttctgtatcactaattcataggatttttttttattgaattaccaatagatttatgatcttgatagtaaattaccaatagacttattgaattgcctaagctacctattttggtttttggtttccatcacatttgtggtttggttggacaaaagttctgagcttccatttcgtatgtgttttgagtgtatttatttgtggttagacagaagctctgagcttcctttttatctgtgttttgagtttattcatttgtgttttcaattggagctcgacctctagcttcttaattctcgagctcaagctttgttgttgagctcagggagtcaattatgtttttgagccaagctacaacttgagctcagaaagatgttaacaagtttcaattgaacctacctctaataaaggtttttataaacgagcctgatcttcataaaactctacttagctagttttattacaccctaaatgatctcctcttctttgcagaataggtcggtggtaca

SEQ ID NO: 43020 - DNA, 585 bp, Manihot esculenta
  Intron number 1 from transcript cassava4.1_002008m (locus cassava4.1_002008m.g) derived from phytozome v7.0 (chr-ID scaffold04151; pos 114790 to 115374)
ggtatgattttagttttggattttatttttcctggtaggttttttaatagttctggttcccttttatctatggttatgtggatggctatgttcgtttgattattgctgctgttaagatgtaattggagcagattgttgtagctcaaacattgtggcgtttatcgctgatgtgacatttgtgcgaattcagaagtaacactgtgatttgctccttaatactgcggttttttagaggtgtatggcaaagtgcaagtggaagaaatttttttgggtgataacatgaacttgtaattagtaatgcagatatgtgcttggaacttaatgcgagtattggtttaatattgtattcttggttacctgaagcttctagcgattcaaagaacttcgtgaaggagggatactgatatggtttagggataggataagaaacttggctattgcttatacatatccacataagacaatatgttgaatgatctagaaacatacacacgcacacacagaattttagcataaatctgttttcacttttgggcttttattcagttggtcttgttttataatatttctagcactcaatgtagg

SEQ ID NO: 43021 - DNA, 421 bp, Manihot esculenta
  Intron number 1 from transcript cassava4.1_016480m (locus cassava4.1_016480m.g) derived from phytozome v7.0 (chr-ID scaffold01127; pos 85899 to 86319)
aatcccgaatagtaagccctctagatcttaagctctctttcagtttccacttttaatttctcgagatctgcgtttccttatcttctgaattatgctatggttcggttgatttatctgtttcgtccttcctttggatctgtaattttcgaaatatttaatagtcacttttatgtttaatttttggttttgtactccaattcaattacatgattttgattcccccaattgctgaagtagctaacctaatggtttacttttaattgtaactaaatttgaacttgtgtaagatctcaaataattttcgattacaattattcacctctgatggactacgtagaaattacttgcaccttttattaatatgttgtttttgaactgtcgcgcagtgattatcttttcaagcttttgctgattggagact

SEQ ID NO: 43022 - DNA, 491 bp, Manihot esculenta
  Intron number 1 from transcript cassava4.1_028675m (locus cassava4.1_028675m.g) derived from phytozome v7.0 (chr-ID scaffold06914; pos 994774 to 995264 reverse strand)
tcattgttgaacgctccatctacagatttggaaaggtagagaatgattgtttgtttcttggtttttcttgcaaggaagactgagggaggtggtgatttgctttccttgaataagtttcaggaagttagagagcatagcagttttgtaagaatgattttgctttgctttttttcctgagaaactgccggaaaatgcaatgcactggaataactgttaattcattggggattacctgaaaacatataagattcaaatgttgaagaacggagcaaatttctttacaatgtcctgtttggttgccaggaaaatgtgggttcgatgaatgaaacaaagcctggatatagaaattttgtcatactcctttattgatacatagcaattagcaaatagctagacttttcattttgctcataaaaagaagagaaaataatcatttttctccgattctctctacagtggttgaacaagacaaggaggaaggctctgtttgc

SEQ ID NO: 43023 - DNA, 671 bp, Manihot esculenta
  Intron number 2 from transcript cassava4.1_027829m (locus cassava4.1_027829m.g) derived from phytozome v7.0 (chr-ID scaffold10015; pos 44057 to 44727)
ttattgtcgccgtagacatgtgagtttgcatttcttctttaattctaatagcataaatcgatttggataaaaaatcgaatcgaattgattaattttaatttaataattcggttaatcagaatatttaatacagttcgattaatatttttcaatttattcagttttcgattcgtttaaacatattaaataattaataaactaaataattaattatatatatatatttattatatgtaacactaaatttatacatatttttaaattttatatgaatttatatagattttttaaatattattattattatgtattcaaataatattgattgataaatttatgtgaaatatttattaaattattttattaaaattaaaagtagaaaattaaaaaaattataaatttcaatttgaaataactaaattgaactgagttgatttttatcaattcgattcagttcaattatatctttagaatcgatttttttaatttttaatatttttataatttaaattttaattttttcagtttgatttcattcgaaatcgaaccgatggattgcaccgtagtagtctaacgtgaatataaaatatttttttattttcttatataaatttagttgtattttttttttggaattaattaggtgcggtgtgagcctgttgtgattgagg

SEQ ID NO: 43024 - DNA, 817 bp, Manihot esculenta
  Intron number 1 from transcript cassava4.1_030408m (locus cassava4.1_030408m.g) derived from phytozome v7.0 (chr-ID scaffold11668; pos 137403 to 138219 reverse strand)
attcctcctctgattcttactactcaaggttcctcctgcaaaccctaagtctcttagctctcttattatttcttgtattcatattctaccatttagatattttatgtttcacgtggcttatggatttttgcaatacctaattttcttgttacaacaatttaggcatcctctggttatttctaatttttaataggtgcaattttatgcaattttttttgaggtaataattgtgtttatttgagttaaatccgtttggttccatgattaaagaaattgtacaaattctgaattgaaactaattttctctgccaaactctttttccaagctttaattttttactatttatttgtatattctcttagatctctcaactaaatttattttgagaattcctatattttcttgtgattactatttattttaagaatactatcctttttatttactctgagtgtaacagcatagacgggcctcagtcttgtctgaacatacttatggagtaagctgagaatggtgcttcctgtagctagaatattttaaaattatgggacacagaaaaattggcattaagatttttgcagaagtttagttttatatacatattatgcatttactgagttagctgtgttcttcaattgaatttgtcgtagagatttggtgagaaatgtcataaagacgcaaattattataagcatcaatatttattaaggatgtcttttccccaattgatactaatttaaaattgaggatgaattcctgcttgacatcttgtattattgagtttctgtaggagtgggagttcatctgacagtgagc

SEQ ID NO: 43025 - DNA, 521 bp, Manihot esculenta
  Intron number 1 from transcript cassava4.1_013955m (locus cassava4.1_013955m.g) derived from phytozome v7.0 (chr-ID scaffold01127; pos 154203 to 154723 reverse strand)
ggtaagcactattttgggatttttgattgtgctgaatgttgattgcttgcttggttgcagataaatgtaggaaacgcatagcgaaatggaatattagatttagaacttacatttcaagtcatgtcaagcctgaagaaattgctagtttgaatttctcttccaatactgtgtatattatgtgtaaattctatttagctgctgtgagaatacgaggaagaaaaggggaagataaatttggaacttcaaatccttattatttgggagttgggaaagacaaaacatgtaagaaattgggtctaatgaaacttatatgagctgaatttaaactattattgtaaggaaaccgaagtctgtagagcataagattcgtaagtaattttctctcaatggcctaatagctttttattgaactagaatgagtgcaatgggcattttgcaacaaaattttatttctttttttctttgttctaattatggcaatatcagcttggagatttttgatccagtggaatttgacaagt

SEQ ID NO: 43026 - DNA, 571 bp, Manihot esculenta
  Intron number 3 from transcript cassava4.1_002722m (locus cassava4.1_002722m.g) derived from phytozome v7.0 (chr-ID scaffold10173; pos 929164 to 929734)
tagggttgacaacagaagcagcccaacatctcgaggtaaatcgctgttcatttgaaacttctctttcctcccctttctgtagcgtagttcagatactttgttttagttaatttatatggcacaaattcatcacactaaattcagtagaaccatttcaattatctgcttcttgaattttcatattttctgtttgactttagaggttgacatggatgcaatgttttatgatgttggtgctactttgaatgggaagtgggaactgttgactctcttaaatgattgaaaatatttcattggaagtgggctttggcataaattctttactctctttgggaattcactcttctgaaataatttaagatgttttttgctaatgaaatactgctattagaggttcaagaacgagattttgtgagaaaaaaggtattgaaggatgtgctgtcctattatattttggtgtgtttctattcagaattttaaagcattgatgaaaatttcccctctgcttatcttttgctttgagtgcatctcaccagcaaatcgtgccgcctgtgcttaattctttttctga

SEQ ID NO: 43027 - DNA, 726 bp, Manihot esculenta
  Intron number 1 from transcript cassava4.1_033187m (locus cassava4.1_033187m.g) derived from phytozome v7.0 (chr-ID scaffold01098; pos 97730 to 98455 reverse strand)
ataatcagtcttgtctctggtgttgggaggtaattgctttttgtgcatttcgtgatttcattgttcgtttttttcctttgtttttattaggcctttttaaaaaaaatggaagtttttatttttttattttatcgcaatcttttatgtaaatattgggtattattaactttccctatttttttgaagatattaattttccaaattgctatagtttttgaactcaagtaatttagatagcaggtgtgctttatctttaatattattctttagttgtggctttgctaagattttatgtctatatgttgcatagagtttttactgccatggatttcttcggtttaatgaatctcatttcttgtggttggagggttagtccattgttttcagcactaggatgcgatggatttatcatccatttgtcgctgttttttttggttatagaacttttctaaacttgaagtcaagtttacgaggattttcaatatcttccatatgtcctgtagtttttggagtgtatatttgttatatatatataatttatttgtgttctatgatccatcctgtaaatggacttgcttgatttgattgggatgctatttttatgtttatattaataattaaatttttatcctttggcaactttctatgtctattggttctgtttcatcttaatagtcagcaatgtgattcttgtacttaccattgcagactagagatctaaagctg

SEQ ID NO: 43028 - DNA, 980 bp, Manihot esculenta
  Intron number 1 from transcript cassava4.1_014122m (locus cassava4.1_014122m.g) derived from phytozome v7.0 (chr-ID scaffold03896; pos 68484 to 69463)
aggagttgtacaaggtaatagcttgtttgagtttccaagatttgtggtttagggttatttttattagatctggggttgttttagatttccttttgcgggtggtgttaatatttttgttggttttctataacttgcgtttccctatgcttgtttggtttctaggaaaaaatcaaaaagagggtaattaaccttttgatctttgatttcgccttgtttcaaaattatgtatatcttgcccttactatgtttgaattattttcttcccagtgagtctctccttttgtttctgagaaaaactgggtagaaagtggaagaaactgaaactttgttgttaagttttgtgaacacaacttgataggttttccttacatatttgaggctcgcctgaggaggaatatttttggggtttctggagtctttgcttgttctttgttgtttcctgtctttgctcaacatccaaacagatcagctgtgttcttattgggcaagtcatctacccttggtttgtttgaaattgtccatttgctggttccttgtcttgagaattttatagaattatcctttcggttccgcctgggatattatcctcgtctattagaaactttccatgtgttgaacttgtgaattcctctttttttattaatctctttgattcaaatgttttcacgctgcacttgtttctcaagtcttgtgcaaattcttgaggatttatgtggtttgtgaagttcagtatgtcgtaagttccatacatggtttcttagcttgctgagaacttcgacagaaaaccttttgtgcccatgttgaaacatagatgttcatgcccatggttttaaaattttttaaaaggtgtatttatttggttttcttaagtggttaagagttctcccaaggttttaaatcaatagcttcaatttgttgtttctggacttatagctttaaacatttctcaggaaacagaatctcagaaaaggaagttggag

SEQ ID NO: 43029 - DNA, 590 bp, Manihot esculenta
  Intron number 1 from transcript cassava4.1_020696m (locus cassava4.1_020696m.g) derived from phytozome v7.0 (chr-ID scaffold06550; pos 666244 to 666833)
ccttcgtcattgccggagctttcgccggtgaacgggtaagcattcggaattttttaatctgaatctcttatttcgctatatttgatcatcccgattttacatgagctaatcttgatttctaaagggagttgggcggtcttgtgtttgttgttgttaattatggtacttggatttcattatatttagtaagtgtctcttaggttggctatgtgctttgttaatttgaaacctcggatcagaaatgttggacattatggttgtttccgtgtatccaaaatcatataatagacttttacagattgatggatatggacatcctgtttacagagattatcttccaccagttctctgttttctaatggaggttttggtctttttttcttttttcagtattttagaataggattcaaaatttagaaaagaaattgaataatattgatgctgaataaggttgcttgtttgtaagaggaataaagagagccttattatgtacttaatttagctaaatatttgtggcagtacattatccagcactagtttcttttgaattctaacttatgttgcaatttgctggttgtaggctgttgatt

SEQ ID NO: 43030 - DNA, 936 bp, Manihot esculenta
  Intron number 2 from transcript cassava4.1_020696m (locus cassava4.1_020696m.g) derived from phytozome v7.0 (chr-ID scaffold06550; pos 666867 to 667802)
ttggggtatttcacctctcctatatgcattatttgtgtttaattttgttgatttcacgtgaatgtgtgaaccgcctaagctttgtatttaccagttaactacttgaattatagatcaatcatcaatgtaattttatagatgatatgtaaaagttttcatggctatctaaacttatacagctcatccgttctaattaatctctagtttcggatgaaactatttcctgatttcatgaatttaagagtttggttatattgccacatgagtatttccctatattgtagtctcataactgcttataattatgtgaataggtcgtatcctgtttaattccatggaggcaaaaaaactgttgctgatccattttagttgcttagagaagtggctgtattccatttgaaatttcccaataaacttcaatttaagctgtagtttttattttctttgtaccttttgtattcctatcttccccttgcttcttgcaatcagttgcatatgttgtcacgtcttttgccgatatgaaattccaactaggaattcttttatctgtcattttctgctacttagttttgtgagttccgacacaacatttgacactgtttgtgactgcatagtctatttgttttaaatatcatgctaaattgatgagttcacatctacatacgcacatggacgatatttgctcaatttgtgttgcaatttgatttgagttgttatgtgcatgcacatgcacggtttttatccaatttgtatcatcggtcacatcagacaactcacaacctcctggatccaactactaggctaaaggaaactcagcttacgaaccctgactgcaatacttgattaccctggctgcaatgtttgattgctgctcattctcattacttgtgttatgcctgatatgaattttgatgcttttattcttacagaaacgtt

SEQ ID NO: 43031 - DNA, 424 bp, Manihot esculenta
  Intron number 3 from transcript cassava4.1_006482m (locus cassava4.1_006482m.g) derived from phytozome v7.0 (chr-ID scaffold07088; pos 134106 to 134529 reverse strand)
ggaaagtccaggttagtgactgtgataattagttttgtttgtatgcatattttgcagcatatgcgttgttatgtgcctgtagaaatggactaacaacaatattgaaaatacagaaaggaaactgagaaacaatttgacattcgaaaaagcagtctttggttaatatgatgttaattagatttcattctttttaaagatttgagttaggccaagaaattataactagtccctagaagaatcaggcaattgtattaaattgaagcaactgacgttcaagagttttttatgttactaagttggttgtgttcttcttcctaaggagacataccatgtttttaccacacttttgtggaacactcccatggtgttgttattggatttttgcattatttcaattatccctcgtgtcatctcatttatagat

SEQ ID NO: 43032 - DNA, 381 bp, Manihot esculenta
  Intron number 1 from transcript cassava4.1_022946m (locus cassava4.1_022946m.g) derived from phytozome v7.0 (chr-ID scaffold01701; pos 770590 to 770970)
attgctttgttaatgtaagtttatgcttctattctacatgcattttttaaaaagatctaataacaattgaaaaaaaaaaaaaagaagaaacttcaagcatgtttgctcataacaattaaaggctaagcattcatgaaccaggaataatcccatgtggcaagaatcgtggatgatgtagtggttggtaagcaagctttgtgtgcacttacttcacttctctcaagtacaagctcatgtgttttgtttggttttaagtgcacatgcatgagcccattttctaaaaattctaataattagtgtacccaaataacagcatgtcatttttttttcctcaaaaaattgttaattgactggccatttgattgtggaaataggggtgtg

SEQ ID NO: 43033 - DNA, 832 bp, Manihot esculenta
  Intron number 1 from transcript cassava4.1_012863m (locus cassava4.1_012863m.g) derived from phytozome v7.0 (chr-ID scaffold05335; pos 342106 to 342937)
ttggcagaggttattcaaagtgaagtggtaagtctatgattatcgaactttattgatatttgtttcctaatctcttcattactataaagttgaagccttatatataaacagttacacaaggaaattacagagactgatgcaagtgagatgcttgccaagcatataatcacagagaaaggaatagttgagaatcttcaccaagttgttgttgacaacatctcaagtgaagaagcaactgaagaggtccaacaagaacatgagatcaagggtgaggaaagtccaggagagaatatattagcaaaggaaatgcagaaagaagctgtaagaccataagcactgaattttgtttttatttatatgctaacttcttcattactataaagctgaagcctttatctaaaaatacagttacacaaggaaattcaaaagaccgatgcaagtgagacaattgaaaaacatatcagcacaaaaatagtaatagttgagaactttcaccaagctgttcagaatgagaatgctgaagtgcattttccagatgaaacagaatgtagaaagactgagaatgcagaaaggaagctaaacattgaaagtcagggtgatgagacaatatctagagattgcataacagatgccacaactgcaactgaaaaggttagatatagtcctagtcaatctgagctttctgaatttttttatttttattttttccctttgatattccttaatatttggaagaaccaaatagagcctaaagatcaaactggatgagaaaaaaaaattccacttaaaaattcaaattaagaatcttcatatttttccctgtaggaattgg

SEQ ID NO: 43034 - DNA, 616 bp, Manihot esculenta
  Intron number 1 from transcript cassava4.1_000985m (locus cassava4.1_000985m.g) derived from phytozome v7.0 (chr-ID scaffold01551; pos 2729676 to 2730291 reverse strand)
caggtaatgttttgggtgctttctaatgatttttgtttgcattatcttctcttttgttttgggttatagagtggttctggtactgggagttaggatgtttgttttgttgcgtgtgatagatatcttgtatggtccggatggtggttttgattatgggtatttccatatttgaattgatgattttgctctggaaggagtttggagaagtttactgggttcattgctgagttttcgtagtggacataattgtttcaaatacgagcatgtttatctttgggctgactgcttcatacatgattaatctttgagtgctttagtgaaaaactaatgctcctttgttttggttaacatgtatgtaagttttcaatcagcatttcaagttaagtttatgtaaaatggattgttagtctggataataagtttggtctcatttatgtaaccatagaacaaggtttgtctctgataattttatgcctggttttccatctgcaaattttgtggacaatccataaatactgtcaatttttcctaatgtctaatatggattttacaatgtgcatgagtttgtacttctagtaatgtgggtatcatatacttttgtctttcttaaagggtt

SEQ ID NO: 43035 - DNA, 573 bp, Manihot esculenta
  Intron number 1 from transcript cassava4.1_013441m (locus cassava4.1_013441m.g) derived from phytozome v7.0 (chr-ID scaffold12686; pos 54164 to 54736)
cctgttcacattatatatcagaaaacaaaacggaggtatatatctgctaattatactttgaagtttttaatcgacggatttgtagatcaagtgtgtggttccaactcacttctgagctcgattgataatgttggatatacgttttttgtttctttggatttggctatattcttcatcttcttgtgcataatttatagtttcagtggcaagatctttaattttcttctgggttttgtgtataaatgatacaacattcatattcatgttgtagtccaagtggcatacttgagaattttcatttccatgtgttgcatctaaagttttaccatgttatggttgatgctctgtgattagcttccaattcccattcctcttcagcttaatttgattgtctgttgcaaaaaaatatatatatatgctcgttttggaatgcgaacttaatacaatggagaaaacaaatattaatatcacccatttttccctgccattgtattgtcactgcacttcttgtaaatgatatgtgtgcaaattttgctagatcgtcatcttataagacaatagtcgttccacgag

SEQ ID NO: 43036 - DNA, 972 bp, Manihot esculenta
  Intron number 1 from transcript cassava4.1_027459m (locus cassava4.1_027459m.g) derived from phytozome v7.0 (chr-ID scaffold06631; pos 317827 to 318798 reverse strand)
gtgggtgctccaagtgcttaaacagcctctattcggtaaatttcatatctttttctctctctttttaaggtatttgataaaatttccatttccaattcatgagtattagttgaagaataaagaaaaagcagctgatatagttttctctcttcttcttggctatggtaaattgaaatggttgatcttgttttgggttttacacaaacaatctttctttgctatgttagtaaaaatgtttactttgaagtaaacgcacaattttaggtacacaagcactcttaatagcaaaattagagaaagaaaatagaaaacacacacaaaaaaaaaaacttgattcaaccataagacatacgggtaagattgagacaaaatttcatgtgatagatgaaaaagagtgtctcaaaaccctaacccatcacaaaatattctgtggtcctgcgaaccaactgtgtctgcaatagggtcatgcatggttctatttctgtaaagtgtgtctctttatttatgctgggttggtttaaaattttcccatctttaaatttctgattttctcttttttattgccaatttggaaacatacaattcaacaatggacttcaaagggcttgccctttacatttgtttttctttttctatttccttcttaaaaaacaagtactggagtacaatgaaagaaaatgattggtatagctgactccgactagctcaagatgaagacataatttttgctgagtatgttttcactggttcttttgcattgttggaatgtgactgaaaatttaagagttctattaaccagtgttgagataagtgttttattccaaacaaagcatctaattttgattagatacaacagcaaatagttaggagtttaacatttgatgcaccaaactatgtgttaatctcatcattgacaaataactttttacttatgcagcttaacaacaaggctttgaactcaagcaaatcaga

SEQ ID NO: 43037 - DNA, 628 bp, Manihot esculenta
  Intron number 1 from transcript cassava4.1_030868m (locus cassava4.1_030868m.g) derived from phytozome v7.0 (chr-ID scaffold09360; pos 45054 to 45681)
ccgacggaggagattcctcccctcagagatctaaggttcataaaattgctaaactactatttttctacttctgtttattaagttgcctcttcacaaattgaagattgattattcgtaaatgattaaatattttgtttggatcttattttcctatttcgagattcatgtctcttcacactgttttggtttggatccttcattttatgtagtaagattaatttgtagttattttaataaaattgtgatattgtttgtacttcatgcacacacatgacgctatagataaattgattgggagttgcatatcccatccatcaaattcagaacgtttatatcttttgagttttaattcagtatatgtgttgtaatgaaatattatttggcaaaagcgaaaaactaattttgccattgctctagatgaatacattattgatgaattcgtctatcatcaatgttattgactttgattaagtggcattatcttttgtagcactacgtatatgtttttctcatcttcctctctagttaatggtatctgtaaatttctgttgtgcatttatgtatatatggtgggaatttattctcgtttccttcaaatatgatgtagtgcttgaaatgtaggtctttg

SEQ ID NO: 43038 - DNA, 576 bp, Manihot esculenta
  Intron number 1 from transcript cassava4.1_008354m (locus cassava4.1_008354m.g) derived from phytozome v7.0 (chr-ID scaffold06914; pos 1438860 to 1439435 reverse strand)
tgcttccgctttttcttgaatcgtttccaggttagcgtgatttcaagatgaagataattgcttatcgatctgttttgaatttgtaacaatgcatttttcttttcttgattgtttgtttactaaatgaatcgattactgatttttatttttcaatttttatatgttgttttttcaattgttcatagtatttttggtgggtttaatttgaatttgggtttgatattttactaagaaatttttaattattttcgacttagatctgatcagtctcgtacaacagttgaattcaatttcagtgcatgatttctctctcactctctctctaaagctttattgagtttaaacctattgctgatatttttggtaattatttaactgcatagtaacgttgattaggaattttatgatttgaaatctacctgaattatggagttctatgattatattttacttcccccttttttttgttgacgtgcaatgctatgtgaatgcatccctatccatcttcttaattttcgttctgtttctgacttggaattttgtaattctattaggaagataggtgtttggatttgg

SEQ ID NO: 43039 - DNA, 929 bp, Manihot esculenta
  Intron number 1 from transcript cassava4.1_004732m (locus cassava4.1_004732m.g) derived from phytozome v7.0 (chr-ID scaffold04882; pos 194097 to 195025 reverse strand)
ttgaggagagtcaaatcaatttgaggtattttttttagtgttttgatttgtcttacgatagttagtggggttggtccattgattccatcttgataaatttaaatgcactcgacatgtatacaactgttgatagagacttctgtcgtctcttcgaagggaagtctctctttctctctcacaacctggctttacctatatttacgaggataaaattgggaatacggctaagaatcctgtcttgtcttcaccccaatactgtccagaaaacaaacctgttgccatgctctagctctaccttcttcactgttgaagagtaaagttgcagaatttcctctttcacttcccatcatacccttattagccggcaaaatacctgcagtgatattcaaaagggtattttgggtatttggaagaaaagcattagccgacagttttgttaattgagcagccgagttaaaaaagtaacttgttctatttacatgattggatccatgatttttttattttctttgtgaaagttgtttagtattgtcattatagtagatttaattttggttggcatttaatgatcacttaaaaagaagcaatgggcatgactcgtgtgggcacctttataaggcccttttgattttgttggtcgcttcttgttttcaatgaaacaaagctttgtgtgatcataccagattctcgaagctcttgatgttggcctatttgtttttttgtttcagtttaatttaaaaccagtacccctctgtttatgagttatacctgatgattgcaacttcttctctgcttttcaattttctatgcaaatattgtatctttctcttctctccttagttgagtcatcacttctgagagttgtttttttcctataattcagttggtgcagctttcttgaccaatctgatccttaccgtatagaaatc

SEQ ID NO: 43040 - DNA, 343 bp, Manihot esculenta
  Intron number 2 from transcript cassava4.1_000362m (locus cassava4.1_000362m.g) derived from phytozome v7.0 (chr-ID scaffold03614; pos 310993 to 311335 reverse strand)
cttgattcaattggcgaagaggcttgcaaacagaagtacgtgttttaatctttgtctatgtaagtgtagcaggtagaggttcttttgactcgaggttttactgtaactctatgacatttggtcaacaacatcctttgattttctttcctttttaaaataatgttaacatttgtgtttgtttttaagttaatgtcagttatcaatgtgattggtctgatttctatgacatttggttggttagaatgctagataagaagtatgttatactatttcatatttaatcaccctactttaactgtggagttcatgctctgctggctttgtaggataataaaatctgttg

SEQ ID NO: 43041 - DNA, 687 bp, Manihot esculenta
  Intron number 3 from transcript cassava4.1_013742m (locus cassava4.1_013721m.g) derived from phytozome v7.0 (chr-ID scaffold08003; pos 1327 to 2013)
ctgctgtaagttcagtttagccttcaatcattatgtttttgtgattaaagaacttggatttgttgaggatattgttttttcaatttataaatttcttttttcaaaaaatggataatttaggtgttttttcttaattaataataaaaaaaagtggtctcttctaagttctatacccccttgtaacttaactgaaagcaggagctaagggcattgttatgggatttatattgtggctgtagtaaagttttgatgaaactttcattttcatcagaattagctttctaatttcctttttgctggtaatcgtttagaatctactgcattaatctattatgctgacgctaaaaattgaagaaggatttggttgtatcttgtgaagttgtttcttatccttttcttgtgattaaggacctcattgttattaacatttttcaaaattttcctatagttcccacttccttgacaatccaaatatactctattttgtttcatttttcatattcttatatgtcaatgcattctttaagtttgaattttcctgcatttcatcttttctccagttgcaaacattagttgattttttggattgcttacgcgagctggttgaagataggaacaagactgatgttccttatgtacaactgttactgatttgtatttgattttatcagggaaagagaattgaaa

SEQ ID NO: 43042 - DNA, 632 bp, Manihot esculenta
  Intron number 1 from transcript cassava4.1_011879m (locus cassava4.1_011879m.g) derived from phytozome v7.0 (chr-ID scaffold06656; pos 791413 to 792044)
ttgtcgaactcgtggtatgtgatctgcataaaccctaactacagtcggtatccgtgcacatgtttctacataacctctataacgatcggcttgcataagcttcgtatactttgagttgatattctagttacttaatggtgatggtttctaattgcgattttattttcttggataaaaatgaagtttctgttctgatctgagctgacagagctgtgtgtagctttaaccagcaatggcagccgtcgcgactagctactgtatcatacagttgcagaaaatgtattgttcaaccagtgaaatactttcatttgtgtcatatattgtctcctcttcattaaccaattagatcagggggctactattgattgtattactaaaattctagtacattctattctgatagtttgttaatgtggaatgatcctgttcctgtatataataatgagagagtgaatgcaaggaaactgtatttagcttcgaggaagctcaatcaagtggtatatcctgaaaaaccattaatgtttcctgttgcatgattatggtgaaggttcttgatttttgtccaatttctaatcttttgtagctaatcttctttatttaggttcgtgaattagaaaaccatccaaacttta

SEQ ID NO: 43043 - DNA, 1004 bp, Manihot esculenta
  Intron number 2 from transcript cassava4.1_011879m (locus cassava4.1_011879m.g) derived from phytozome v7.0 (chr-ID scaffold06656; pos 792222 to 793225)
gtgctgagcattttgcaagggagcaggtgatgatgttctaactctacttgtgcaatatttccacctgtgtagaagtgacattgtttatgaagtttgcttttgtttgccttgattatagatactgccaaaagaaaaaaaactaaatttagattttttttttttcaaaatttcatcttaaaattaataattttggtttctatatttacaaaatttcatctggaggtaatatttttattatttgagaattttgttattatttaacaacaactaaaaaagctcttttaggttagtattttcttaattaatattgctttaatgttttcttattttggcagttctaatcctaacactagtgtcactagttactagactataaatacctatgtaatttagtgttctagtgggcttattatgattattattgacgattgagaattttattccttttccttttggttgttctattgtttctatagcaattatattatgccatctttcattttcttctcttttatatgcttagtgaatctttactgtaatcataattaccctttcttttccttggtttatggagctagatgtgttgaatcctctgatgattaatcattattaacaccccaatgcatttttttgttttaaatatgtttattaacaatggaagttcttgaaattttaaatttaaagcgtatcccatattagtctggatttcatttctaatctaggtccgagttcactgttacaatgttaatgttaccaaattgatgcccattatttcttctttttgtgtgaattaagagaaaatttgttctaattatttgtggactgccattatcttaaccctgtcaccacagatctctgtcagggaatccttttgagcttgatatgcattttagtatctgattctcgccataatactgttatcttaactgggatttcttatacctaagtatgtcttcttgaatttatcagggtgttgagactgttaactcaagtcattttgtgac

SEQ ID NO: 43044 - DNA, 972 bp, Manihot esculenta
  Intron number 1 from transcript cassava4.1_005548m (locus cassava4.1_005548m.g) derived from phytozome v7.0 (chr-ID scaffold01127; pos 358373 to 359344)
gctatcaagtgagagtgagctcatataatcaagaggtaattatgttacttcagtttattttcatatatggttgataattacgtttttattttcatatttgtttcctttgatttagtttttaattgggttacacaacatttatttcaaaagttatggatatttcttaaaatattaatttgtgggaactcttgggtttgtctctgattgtttagaaagttttgcttttctctatgaattttgttctttaatcctgttttttcggtgaatacttgagattttattgattttcctttttctggtttttactcggtgaagtagcttttgtttgatcgtcaagtcgttgatggtttttatggattctgtactttttgcttgactttcaatcatcttcaagatctagaggtcttatggctatttcttttgatgactttcctgagttccttggggaaatttcttttctgggattgagtttctctgttttcttctttagtactattattaattgattcgatttgactcgactctgaagacgatttttggcattttggaatattatgaaagctttttgctgttttcggaggaattgtggattctttcctccccaactcctcgtttcaattaatttcacttattctgcttgatgttaattgagacttaagaggtaaaattgaacttgccctgttcatttttaatcaaatttgagctactctctcagtagcggtcatatattactgtcagaagtaaataattttgtcaactgatttttttttttttggcttgatttctgatattgttttaaacttgtttgtgatacacatattacttatttaatttagcagtctctatattgttaagatgctgtactaatgtgctgaatctggagcttttttctttaaatgcaatctcatctgaaatattccgcttgtgtgctttacagattgttgcatttggtttaagaaaggaaagttgaag

SEQ ID NO: 43045 - DNA, 668 bp, Manihot esculenta
  Intron number 2 from transcript cassava4.1_019183m (locus cassava4.1_019183m.g) derived from phytozome v7.0 (chr-ID scaffold03614; pos 2791231 to 2791898 reverse strand)
aaattaagatcgccaaggctagctctctctctctctctctctctcctgcgcagccacattatcagtgttttaatgcttgttgatttattacccaattgaatgttatgtgcataaaatgcatttggttaattcaagtggtcagaagctggtaatcgaatttgaaactaattagctatgtttaattttgattatgaatagtcagtccttacccaagagatggagatggtttgggttaagtttgagcagctgaagcggttaggtaattttgaatctctaaataacctatgcttgtgagctgattgagctcatcttgaattgttaactagtattgagattgtgttgtttacttgcaaataagcttgatctaatggcaaataaagtggcaacaactataaataagaatgggattagggcttgatttctgaaatatgtcaagtgttttatcttgttgatctggctaagcttgagtggactgttttgttctatggaactaaatctcgacggctagtttgttatacaactttgagatatctattgatattttctttcctcctttcttgccaattggatgggcaaaataaccctactttactgatttatatttggttaagctgtgtcaagttgtttcttctccactaatttagtggctgtttcactttaggaaacca

SEQ ID NO: 43046 - DNA, 278 bp, Manihot esculenta
  Intron number 1 from transcript cassava4.1_001133m (locus cassava4.1_001133m.g) derived from phytozome v7.0 (chr-ID scaffold03975; pos 212529 to 212806 reverse strand)
agaagccatcaacaccgtacacttttggtatattgaacatgactttctggtttcttgtgcttgtgcttctattatttgctactagtttgagccaaagtttgtgcaactttgtttagtaatagtgagagttttatcttctaagaaagtatagatgtccatgtaagatattatgatttttgtttttcctttttttaagtttgcctctgattttctttcccttgtatttataactgttggttacagataaagtttttgatcctacttgctcatctcaaagg

SEQ ID NO: 43047 - DNA, 654 bp, Manihot esculenta
  Intron number 2 from transcript cassava4.1_003966m (locus cassava4.1_003720m.g) derived from phytozome v7.0 (chr-ID scaffold06914; pos 1372929 to 1373582 reverse strand)
tcctctcattccagcaggtatttgtttattgtttgtcattaccttttaattttaatccccagttatatggattgactttttattgctcttatgcacggttggctactaattgataggaaattatatgcattcttattctaaaatgcatggcttccttggattgatggattttcttatactttttaataaagcactctgttttttctcctgcaccatttgcatcaactgtcactatagccccatcattgaactgatgcattttattgttttgtttatcctgtgtcaactctttgcacttgactaagtattctctctgttatgtgcactgctttgtatggtattgctatgtcatgattgacaagcaatcactatgaaatctaaatttctactacttgcaatttttagagtacgttgttcatttttgtttgaatttgtatagagttggtaaaatatttaaatgctgaggattcttggatagtaaactattgtttaagatgctgtgtggctgtgtgaagggacaaatttaccctcttccatgagttgcatgcattatgtttccaaaaaactaatagtaatcatacatatatatggattaatcatgttttgagtatctcttaccttcactttctcttatcttttcttcttttctcacag

SEQ ID NO: 43048 - DNA, 948 bp, Manihot esculenta
  Intron number 1 from transcript cassava4.1_003966m (locus cassava4.1_003720m.g) derived from phytozome v7.0 (chr-ID scaffold06914; pos 1373866 to 1374813 reverse strand)
tcgttgcgaagtttttgattctcggcgtgagcaatgtatggagtttgcgtctatatgtggttatgtatgcatgtgttagtttgcatgaaagagcttagatctgttttcgagtcaaaaattgcgtggattttgatttatgttagttaaacaagtttgatttgatgcactgtgcaagttggatcagcttgatgatgaaattttcagggaatttagtttaatttgagctaaatatatgcgtttgtagtcatatgtgattattttgtttctgctcttctttattttgtttattttttgttaaataaatgcgtgaactttgtgattgtctagctacaaatctgagagaaattttatgtagttctcttatgcttagaattgctcgttttcgtgttgattgagcaaacaattcatatcctgtattgctatgggttttgggtttgctcttcgactaaggatgttgaattttagctacattaagttaaatatgttttttatgaactaggtgtcgagtttctattagatttaccgaatagtgtgatttttttcttaatttgagctattcatgtgtattaactttgaagatttctttgtttaaaatgtaccaaaatatagatgtctttggtctcatatattataatttgctctatttttaaaatgtttatttataatgcgcgtgtaagtttgtgcatgtgtagctgcagctgatactcagaatagaatttatgtattcctttacacgtaaaacgtgcgtgttttcatgttgaattgatacaagaatgggcgtcctgtattaaatatggaattcagatttggtatttgactaagaaaaattgaatttatttattttgagatttgcacatgtattttatatacttagaaacgtgtttattttgatttagctagtggtccagcattagggctaaatttgtgtttaattaatttatgtagggt

SEQ ID NO: 43049 - DNA, 820 bp, Manihot esculenta
  Intron number 1 from transcript cassava4.1_004823m (locus cassava4.1_004823m.g) derived from phytozome v7.0 (chr-ID scaffold06512; pos 1040964 to 1041783 reverse strand)
gaaaaaaaaagtgaaaactccatatattagcattaattaaggaatgaataatttagtgctgccacaaaattgtttaatggttaattactcccttatcagaaaaaacacattattaaaaaacgggattaggttggccaccagattagtgggcaatattcaacccatttttcataaagaatcaaaatcaaaatataaaattctgcaacttagtcatgccaaatgttgtcatttgcaaatctttctttggttgttgtcgactaaatccatcatgcaaagatcataaaagaacaaaacctacgtgatcagtaattacaaactaactatattatcttaatcgacatgaaacttaattattggtttatactgtaatattttcgaccgtttaataaacaaataattttatgttagaagttcctagtcaggtgtcatatgaatatgatctccaatcaaacaccgcacaggaaagatcaaaatcagaagacagaggcacgttggttccttcttaacgtgcatgattcggtcttggaggtgttgtcaaagtgggacccatcatgttcattaggttcataacacccttggcatggtctcttaaatgctctgtggatacagtccccgattcatggttgcaactggcaaaaaaactccccacatgttgccattaatggccctgaaatgagctttcagtaagaaacattgaaagaaattgatgggtttgtgtttttgcttttggagctgacggttctatatattgaatgcctggaaattcaagtgaatcagattttacgagtttctgtttagcaaatggatgaagtagagattg

SEQ ID NO: 43050 - DNA, 948 bp, Manihot esculenta
  Intron number 1 from transcript cassava4.1_000920m (locus cassava4.1_000920m.g) derived from phytozome v7.0 (chr-ID scaffold02165; pos 182032 to 182979 reverse strand)
tccctgaatcagggcctgctgtatctggtaaaggtctctctcacttgcattcatttattgtgctggaaattttattcattttcatttttcagtcaattcccatctggctgataaaatagtcattcaagtgtccttggtgaatgtgtcgaatttgaaatcaaatgatttaatttttctacgagttttatatatctttttaaaattctcatttctcactttttctttgaagtatttgcattacagaatctctatgatatggggtgttcaaggaaattattgcctattccaatggagcatttgtttatatttacttgctttagtcttgaacttttagtacgttatcattggatgttttccgtttttctatttttgttttttttgttcttttttgttctttccttttgttaaatgaggatgaaatttatccaatctctgattacagctatgacaaggagtttctgaaattggtggggggttgttggattgatcctaccaattactggatttataaacgagtctaatatgggccaattcttcttagttttgttggtttcagtagcgtacaacaatggattaagaaatcgtgatctttattaggtgtattgctgttggcgatctttattgacaaattggtgggtgcaaccaagaagctattcagattgagccttcttttttaattaatattgaaatttgagatgatttcagaaaaattgttatttttggctaggaatactccatactgcaatcaagtattgatgcgggcaaaaccacataaacatgatatctatgtctatcctttgtgcaaataatttttagttacatcaaatgatgttacaactagttttatgctttgcctttgtgggaattgtttgccttggtgagaaatgttctcattcatttgctgattctataggtcctagcactcgacctgtgaatatttcacaacat

SEQ ID NO: 43051 - DNA, 628 bp, Manihot esculenta
  Intron number 1 from transcript cassava4.1_007676m (locus cassava4.1_007676m.g) derived from phytozome v7.0 (chr-ID scaffold03049; pos 882958 to 883585 reverse strand)
accttggttcgtttgcttcccataccttgctttatttaaatcgaagctattgttggagaaaaaaaaaatgaatggcaagtttgaattttcaaaatttcaacacttctccgtatattttaagactcggtgttgcttaacttcgtttcttccctttccctattgcattggtacccatttatagaatttttcattttgctccttattcaaggttcaataactgagagtgatatttcagaaccatgaaataccgctctgtgttcaccttagatttaatccatgacttgagagaggctagttatgtgttcttgtaggaaaaggtatttattcaatttcttttttttttaacgtacaattccattacccattgtgagttttacaatataatcagtttgccgcttcaagctggacactgtggctgtataagatgggcagggcatgtggtactagactaactaaagcaaattaaatgtaacaactgtgtgaagaatatttacttttttaactattcacatgtgaatttgttcccaattctgcaatgtttttattcaaggaaggttctaacctaatttgttggggttctatatatggcaattgcgttgataattggaatataaagaatcccgtgttg

SEQ ID NO: 43052 - DNA, 894 bp, Manihot esculenta
  Intron number 3 from transcript cassava4.1_006142m (locus cassava4.1_003941m.g) derived from phytozome v7.0 (chr-ID scaffold09151; pos 406872 to 407765)
agctgttgcatctgagcttgtggattttgctctgggtacgttcatctgtttagttgttgaatgtagtagtaaatcagtaaacttgtttaagtacattagcaaagaaggttcaaacattttagggtgttaatggctgatgatgtggcgggtaaagaaatagctcctatttcggcagccaattttggtgttcgggagttatgaccttctctgctaatggacttacctaaggctactgattcgtgaaaactcaaatcacagcatcttatttaaaaatggctcaaaccatatggcaattttttgtcttttgccctaatttaaattcagtgagttgtccaaatacatggctaatggagcctcaatgtaagttcagggttatgatagatgtagatcactcttttgaatgttatgcgattagaggtctgtttgataatgttaaatttttcaaagaacttatttgactttggaatatcgtagtttttgtattaaaattagtagtgggaatatcaatctatttggtaggagtaatctctgtttttttggttgctatgaaaaaatattgaggaacttgtgctattgctaatacaataattcttaacagcatttgttatcacagtacgttacagtatacaactagaggcgtttagggtttagttgagaatttaaaatcataggacattgttcatttatagtttcccatatgttaaactaccaaatactgacacgtcacattttggaggttgatgagttgccttcccttcttctagctagaaggcttattcctccgtgtataagtagcagaggtattttttcttctaaattatccaatctgatattctgaggctcttaatcatttttacaggtactgatacaattggttgcattagaattccagca

SEQ ID NO: 43053 - DNA, 671 bp, Manihot esculenta
  Intron number 1 from transcript cassava4.1_015390m (locus cassava4.1_015390m.g) derived from phytozome v7.0 (chr-ID scaffold07991; pos 43616 to 44286 reverse strand)
taatacagtttcgcataattcccgaattagatcctgtaagttttttcattattattaccaatgtctctgtttggtttctgaggaaaatatttatctccctctttgagttagccatctaggctttcttgataataattattaggaacaagtcttttgagcagaaaccgaactgcaaattggaatcacatgggtttttctatattaacgcacgaagaaattttttatgattctgcattttcctctgtggttgatcttttgtgaaatttgagaataaatacaaggaaaataatattttaggattatagatcatgttaaggtgtttcattatcataaaattcaggatgttcgccttccttggatcgtgaaaattttttattcgattgttttcccacccatgtacggcatgtaggagtttgatttattaatctcattctgatggtaaattcttccattcctaactgtagattttgcttgatgaagatttgtgccgaagattttgttttctatcattaaaacatatcgtggagtgtatgcatcatcactttttgatattattcgtcgtttatgcatgacagttttgttcgatgagcaattttgtggtggctgaaaattcttctttcataccttgtgtttgttaacaaagaatttcaggtgtctgtgtcacacaccat

SEQ ID NO: 43054 - DNA, 1045 bp, Manihot esculenta
  Intron number 1 from transcript cassava4.1_008359m (locus cassava4.1_008355m.g) derived from phytozome v7.0 (chr-ID scaffold04314; pos 145307 to 146351)
cacgatttcatcgtcgtcgaattctacgctccttggtattgaaatttgatattgtttttgtcttttaattgattaaatgttatccattgaatttggtcctatgtgagatcagtttccccctaccgatatgcttttagatttttttttttctgttcagctgtgtgttttttatttgttggagatctgttctttaattaaatttgatttttttttgttttgtatattaagctagagatggagattgtgaatcgtattggtatcaagtgtttatgtttttatttatattcctatgttgtcttgaccagttgattgtaatctgaatttggatctatacctggaaatgatgcatgccattaatataatgaaggaattttgggagtttttgctttgactattctattttttaggtctgatatgggattgaagtgttaaataaaattgatccatgaaaaaacttaagcttttagttgttttaacgtcaactgcgacaccctccatcatttaactaatgctgccaatggaacaacaccattgaccaccagtgcaccgctgctgcttttactgtgcctccaccatctctaccactgcccctaccattatgataggcatattgctgagtaatttgtttttgtgttagcaattttactgcaccaaaaataaaggtgacttttttccatgatgtttaacctgaatgctgagctattcaaaggcgaagcccaagttgagcttgatttgggcagagttaagtagttaactggagcatcttgagggcaattaatttatttttagagctgaatgctgcattgtttagagtatatgatactaaagttggaagagaagtttgtgaactgtaacaggcctttctcgacatgtgactttaacttagtgttatagcattttcagaagattctgttttggcttttttacctaggcttttgattgatggtcatttaaattcctttaaccaaaccatggttaagatgaaattctgagcttgtgttttctgtcaggtgtggtcactgcaagaagcttgctcctgaggtaa

SEQ ID NO: 43055 - DNA, 464 bp, Manihot esculenta
  Intron number 1 from transcript cassava4.1_029154m (locus cassava4.1_029154m.g) derived from phytozome v7.0 (chr-ID scaffold06550; pos 816219 to 816682)
agttcaatccctggcaacttcctcgtaaaaactcttctcttttctgtttttgcatttttttctttgatttttttgggtttttaatctcttcatcttttgataaatgggtctggaaaatggttgtttcttgattatcatccatgtctaatgattacttgcttgttttatattatttaatagcttgaaaatcctttttttttcttgtgccttttcgatattattattaagttgcactaaaacttgagcatattattctttcacactacagaagtaaaattcttgtttaatgtctcctcaagttggtaaatatcaagagatgggagagactagagaagatatatagatagactgtaagaaattagatttttaatttcgtcatagagaatttaatttgtgataatgatgaaagtgcaatcccatgtttttttttctatttattatatgaatttgtgtttgttcagaac

SEQ ID NO: 43056 - DNA, 606 bp, Manihot esculenta
  Intron number 2 from transcript cassava4.1_025128m (locus cassava4.1_025128m.g) derived from phytozome v7.0 (chr-ID scaffold07762; pos 283180 to 283785 reverse strand)
gcattgatacgcagccagttgtttctgctgctaaggtttcgcttttcagtttttcatcttctttctgttttcccctcaattttggagtctagattttcttgtatttctttggaggattggaaattgaaacccatttcattgcctgtttgaagttgtcatccaggcagtagttgaacatttcttaggttttcaaatgattgctctgcgcattattatttgtaattgacctaattgcaatttttatcatgaaaaaaaaattgaaattataatgactgcataattgattgttgattcgacaaagagttgaaatgcccacattggacaaccgctgcaattctgaatttctgatctgtttggtatccctggcttggacttgtgaataattcaaaatcaactgaattttaatgaattgtttgctttggaccatcttaatatttttaaattttttttttttgtaaaccttcaacatgttattcagacaatgctgtttaagaatttcaattttgtagttttgtagattttatcataagtaattatgcaaatttggcaaaatttgtctagttacattcatgaatgtctgacccctttgaacacagacagctgctg

SEQ ID NO: 43057 - DNA, 516 bp, Manihot esculenta
  Intron number 1 from transcript cassava4.1_005173m (locus cassava4.1_005173m.g) derived from phytozome v7.0 (chr-ID scaffold06550; pos 419336 to 419851 reverse strand)
ctccggccacctcacctagtcaccataaaacagaggtctatatccttctccttttattctcattttaattacttgttgatatatacacatacgcattaatgtgactcagctaagcaattcgtgacatgactgagtttgactttatcgaactgtcggcaatagggtctcttcctgcaattttggctggaagtttgaccttaaatggcaaatatagcccttcaatttgggtgaattgggtagaagattggattgttttgagggctataagcgtcatttggtacgtttaatgtcattagcattctgtttataaatacttattataacgagagtctggctctgccatgcaaatctttaagcattttaaaagattggtgtcaagaaaagtaatttttccagtaatggacaaatacctcagtaaaattgctatattcagttgtatattcttagctcattaacgttaatgatgtcctaatcaaggttgttgtgtaattttttttcagggaaaagagaataacg

SEQ ID NO: 43058 - DNA, 598 bp, Manihot esculenta
  Intron number 2 from transcript cassava4.1_000313m (locus cassava4.1_000313m.g) derived from phytozome v7.0 (chr-ID scaffold09565; pos 436486 to 437083 reverse strand)
gatatatccaggtcatattcatggtttctttctagaattgcccagttctttgtgaaatttttagttgggactaggttttgggctagtatctaagtggaatttttgaagaaagtatctttttttttttttagtacaattattattatctacttccgggtttgattcttcagaggtgggtttcggacaggattgcactgtaaattgggtttgaaaaatattttcaaattttattctttgttctttcttttttgtggtttttgccaaacagttgttctcctttcctgtaaactgtgacaattatagtgagtatcgaattagttcttacattgttgaaaagaatagggaacaaatgttaaagtcctaataggttatgtttgtttgcatacttaaattatcttgtgaattattacacttctttagtttgtgccaggagcttttaccttttcctctctttctgttattattattatacttttttgaatgtgctttgagtttgatcttgtgaactgagagtaacttttattttgcgtggaaaataagtgccttgacgataaacttatacatctcccctcctctttgtaatcctattttgcagtta

SEQ ID NO: 43059 - DNA, 804 bp, Manihot esculenta
  Intron number 2 from transcript cassava4.1_012646m (locus cassava4.1_012646m.g) derived from phytozome v7.0 (chr-ID scaffold04345; pos 196847 to 197650 reverse strand)
aatacaagaggttgcggtgagtcatgtgttatcttgattcctgagtttccatgagccacattgtcattaggaactttgttctttgctaaacctgccattgcaccttcataatgttttgattttactttctgaaataggaaaataagtaaaggtgaaaacatttgctgataattcaagtgaacatcatccattcaatatccttttttcgcagatgagactgactccaaactgaatagcaaccaatatttttctttgggacagtcagaattttgtcaggttgataatgactaaaaaatgacatggttccttcatcctgtttttttataaatagattataaacataaattctttgaatttcctagacggcaaaaaccatctcatgaaattcactcctgttgttatgctactgaaatatttgaagcgctcttgagtcctgatggctataatatgtcattctttagtgcataaattggttattttcattgaaactcaattattcaaaatgataagggagatctttaaatctttgcttggggttgggaggataataatcacaacaaaattttcatcagtgtaaaatttttgggattataggatgaaaggaatgctgtttccatctctaatatctttttctttttacctgaattcaaatttttcatgttgaactcttcaccttgatctgtagtaggcagtttatccatatgttttaatgtatctgagaatatatatatatatatatttgtatattaaacatgcaatctgggtatagggctacatttgagtacgagagaggtgaaaacatag

SEQ ID NO: 43060 - DNA, 764 bp, Manihot esculenta
  Intron number 1 from transcript cassava4.1_012646m (locus cassava4.1_012646m.g) derived from phytozome v7.0 (chr-ID scaffold04345; pos 198233 to 198996 reverse strand)
cacatgtaattatgtacactgggaagcctctgtttctttcgctttctcctgcatcgttttagcatctgttctgacttcttaggcctgtgagattccaattttgattttttacttggattttgatatttggagcaaaacaaaaataaaattgtactgacaaatggtaatctgtttcttcattcaattatgcttatgagattcttcgtttcctacatttttttttcaaaaaaaaaaaattgatcttcacattgatataaggttgactgaagctaggttttttttttttttttttttaataaaaagatttagtacaatttgttcatgtaggtgtacgactgttttgatgaaggaactatagaaattgtgtgcataacaagttgaacagtctatcgatttggattgtgcactgttcgcataattgcaatctgaggattatgtttttatttatttataattgaagttagataatacttttgtatttatttaaatttgaagttagataatacttattattggtatttttattgattaccaaaagtatttgctgaaattgtttatgaactctaagaacaaaaaataggttgaatttgctgtggtagatacatttttgtggtaattatgttgtctagtgacctggttgtaatcagtatatgatgctcccctgaaggagtttaatttatctttgtgacagaaattgaattgttgaaataggatgcttattctctagttttagggtaatgattttttacgttcttaaaacagga

SEQ ID NO: 43061 - DNA, 258 bp, Manihot esculenta
  Intron number 2 from transcript cassava4.1_003768m (locus cassava4.1_003768m.g) derived from phytozome v7.0 (chr-ID scaffold01701; pos 16817 to 17074 reverse strand)
gattgggttggagtgttctctcctgccaaattcaagtaatgctcatccgtgttctactattaactgcgtagcatttgcaaaatatttatgagagtgcttattatttaattggcacttcctagagctaaagctgtaaaaacatcaacaattttcttcatcgtgatagctgtaggcccacaggggcgatcatctaagacattttgtacattattgtctaaaaatcagtagtttattgttttgatgtgtcagctcatcaac

SEQ ID NO: 43062 - DNA, 518 bp, Manihot esculenta
  Intron number 1 from transcript cassava4.1_033736m (locus cassava4.1_033736m.g) derived from phytozome v7.0 (chr-ID scaffold06697; pos 44953 to 45470 reverse strand)
aagcggtactgttctcttgtttcctttcaatttattattgttggttgactcgtctggaagcttacttgatgaaccttactagaattgctggataaattattagatgaggtccagagacagaattctatgatactgcttattttcattatttaatgctattaagtctttgccatatgatttagctacggggagcagcctctttcaacaaccatcttgttaaattagacacacactcacaaggaaggaagaagaacacaagtctttatttgaaatctcaaatgacttgatgcttcatacaattggctttggttgcatatttatgtattgtactcggtgctcaaatagatatataactctggattcagttgtaacaccaaacgaaactcaattaatagcgtcaagtgaaattcatcaagccataaagaataaatataaattcaaaaaaaacagaaattaaggttaagtacctttcaattttggtaatacatttaagctaagcattagaattggattgcaga

SEQ ID NO: 43063 - DNA, 456 bp, Manihot esculenta
  Intron number 3 from transcript cassava4.1_007962m (locus cassava4.1_007962m.g) derived from phytozome v7.0 (chr-ID scaffold00080; pos 427572 to 428027 reverse strand)
tggaagatagtgtcattcttacagctttattgaaggtgtgccattcgaagttgctttatcctttgtttcatcatctggtttcaatttcttcttttcatctctgttgtcttgggctgagtcggttcttatttttatatcgttagaaaaataatatatttcatccaaattcatccggcttaggtacttgattgaccctttgatgtcacttttggagttgtattcattttccttaattgtcatctcgtttcatgatatttaatcggtgttttttcctgatctctgcaccattaagtgtcactttttttttttcaaacttccaatctctatttttttttatattactttgatgtttgattattgaagttatgtgattgtgtgaaattcttttttttttttctttttttccttatttgatatataggaaaaagctactgaaattatcaaacttttatctca

SEQ ID NO: 43064 - DNA, 770 bp, Manihot esculenta
  Intron number 2 from transcript cassava4.1_019720m (locus cassava4.1_019721m.g) derived from phytozome v7.0 (chr-ID scaffold04151; pos 512897 to 513666)
ataagcccacaactgttcgcctctaaattgtgagggtaatagacctcaccttttatcttgctagttttcttccaaatggaaatttgctggggattgcatctcagtctattttatggatttaaatagtttggtattatgggtgctgcatcccagcaattttagtgcacgttagtgtttggttgtgttcctgttaaattggatcgttggaaacatgccgagctaagcaatttctaatctttcatctcagcttggtaatgtattcttcttgtggtttgtaatcctagaactctcttgtttaaaattggttgagtatttacaccttgaaatccatttcatgcgtgtccattatgttttagaaagttgtaaaaacatattaatttgagtagaacatgtaatcagcaaaattaaatgaaatggtttttaggtgttcattagttggttcaatgttattggcatatgattttgcagttctgtttgaactcaaaagacgcctattcatttttgggatgagtgcgctgtgttatgttgaaaattttcttgcctaaagacagaaatgatactatgttgtttttgcaccaaatgggagcaaagtacaaaattcaaaattcacatgctagcaaatatgttaagatggcgagttcttttccaacttctgtttcataagaagcttaattataatgaagcaagtcctattgattatataagcttatttattcaatttgatgaacaatgtagctgtagccaaggagactggaggagagagaggaagc

SEQ ID NO: 43065 - DNA, 977 bp, Manihot esculenta
  Intron number 1 from transcript cassava4.1_003661m (locus cassava4.1_003661m.g) derived from phytozome v7.0 (chr-ID scaffold07519; pos 241778 to 242754 reverse strand)
gaaggtttgttgccttttctcagtactatatttttttgggtttcttttcctttttcaaaagtgttcgagtttgatcttggtttttgcttgctttgttgatttgtggaaattggttcctttttttcttattatttatttagggtaatgaataatggctagttgtagttcagtacaggtactcatttgataatggttatcggtgatctcattgaattcttcattatttgctagcttttattgctcttcttactctgtttttaataatgttatgtggtgactttgatgatgctcttttagttcagcaaagaattattggtcgttcgttttatttatgacttgaaactgggacttcactggaaatggcttttgcagattaattagagtatctctcaagaaactatttattttatttcttttatctctcaataatgccttagtgaatgctcgtaatattttccatgggttttagaggaaacataatccattacatttttgggatgtagaacaccggaagttgtaaattgtatcttacatgccaaatatgggttttagaggaaacataatccattacatttttgggatgtagaacaccggaagttgtaaattgtatcttacatgccaaattcttttaaaccgttcctgtatgctggagaaagccttaaacttcatcctattatattcaaagaatcttgtcttttcttttcttttcttcttaccattcatttctaaagatagcttgcctgaaccattgatttcatttaatagggaaacatgatgtacacagtcatgtcaaaatcagtggcattgagaattagtattgcaggaacctatcatgagtctaatataatgcttttgggtgcagcgcattctactgtatttgttccttgttggttcattcttatctgtcctacttgttaagtggtatcttgttggttactgtgactgtcaaatatctaagtgtttcaatggaacaggtg

SEQ ID NO: 43066 - DNA, 804 bp, Manihot esculenta
  Intron number 2 from transcript cassava4.1_002296m (locus cassava4.1_002296m.g) derived from phytozome v7.0 (chr-ID scaffold06512; pos 335081 to 335884)
gaatctcttgttagagagggattcataaaggtaatattcttctcgattcattctaattgtgaagtcttagtcctacatgaagtgtaattttaaaacattgctttttttttttccaaaaaaaaaataattatgctagcatgatcaaattccaaatagaattcttttgagtggaactgatatcagctagtacttttttatttactagaggattcttttaacatgagtaagttggcaaggttcaaaactaaataaagagatgaacataaatataatattctgagctagagggattcactaaaattttcgttatatatatataattccgcctctttcgattgactgtatgcaaataatcatagaattcaatcaagcctttatcatcaaaaggaaaaatatggttctgttggtctttaagcatccaaacttctatttgttcctggttttctatggaagttcttaaaaccattatatttttatcccaaaagtcttagatggtactgttcacataccaattgactcctttcctatcatggcaacttattacatataaatattctttcaatttattcataattttataattttataattttatttttctgattccttccgctaagtagtgcctgcctgcctgcctttggcataggccagtttgatgtgggtcgagatttccgttcatgacttaaagagagttttacttttcttactttgtgctaacttgtttctgtattgtgtttcctatcattttttacctgttggcttcacatagggtgttttggacatcactacaacagaggttgcaga

SEQ ID NO: 43067 - DNA, 783 bp, Manihot esculenta
  Intron number 1 from transcript cassava4.1_010533m (locus cassava4.1_010533m.g) derived from phytozome v7.0 (chr-ID scaffold04175; pos 542874 to 543656 reverse strand)
cggaaagataaacaacgaatttgaattctgactctgtaagtatctgcttgtagtgaataattccttctaatttctattacaatcttcctttttatcttgggtttctccttttctcttctctaaaactctctgttcacttgcatgtgcatcttttccccaatcttttttattgctatccatattttcactcgagaaattttgctgatgaatgttgtaattaattcagggaagctatagataagggaatgtggtgcatgagttgtattttcagttgaatttcatgtggaaagttgcttgctgatctcgagtttaggatgactttaaacttttgggttttccaattctagtcgcaaagttgggtttttttgataccgggagagtgagaaagcataaagttgaataagggttctgtttttggtttgactcggattggagaaatcatggattgcgttaatgtgtggatcgagaagtgagtgctcttttggctttgtggatgaggaggggagttttggcccctttctttgctttgttcttggaagtgaagacattgaatgagctttttggttgagttgaaaacactagttctatgctagcacttctcttcaagtagcgctttatggttatggcaaattttttatttggtattatttgaaggattctgattagtgggcagttaaatttttggattccttttcctggttctcttagtaggtagattgtttgtttatgtaaaattatgttcaaacagatactcagtaagcttccaaggaagtcgtctaaatc

SEQ ID NO: 43068 - DNA, 512 bp, Manihot esculenta
  Intron number 1 from transcript cassava4.1_010025m (locus cassava4.1_010025m.g) derived from phytozome v7.0 (chr-ID scaffold02906; pos 184337 to 184848)
gaacagttatctgcttccccacctgataaggtttgctcttttttgcttctccgtgttaaacttctatctgtttgatcgtttcccctaatatcttcttctctttcagcgatgtttttgtaaactaaataatgtaaccgacattaatttttatccggatatctttacaacgcagaacgcagaggaaaatgaaaaattttatggtcatatcagcatattaagaacaattgagatatgcatggtacaataaccaaggtttctggatgatattcatattctatccacgatcaccctctgcatggttattgtcttgtttgatgtggagacatttatctgattactagatgtaaacattgtaggaaaagcaatccgtttagagatcagaaaaaataatcaaatgaaatacaatgattgtatttcataaaatttttagtgttctaacaatgtatatcagctattaatttgttcggttgattatatgttttagcaatactgggaagctggtggtaactgca

SEQ ID NO: 43069 - DNA, 390 bp, Manihot esculenta
  Intron number 1 from transcript cassava4.1_011442m (locus cassava4.1_011442m.g) derived from phytozome v7.0 (chr-ID scaffold03049; pos 873708 to 874097)
gtaagtaagaaaaggtttcatcatctcttacagcttcattatcacccatacttttgttcaaaataatgatataagaaaaagcaagacaacctattcgaagaattctaatcttgtccatgcaagtaagctgcaactactttacgaacgaaaattttaattagatcccagaagagttctttgctataacttgagaagatagtactttcatgcagctagggtttatctgtaaaacaaagcaaaccctaagcagaggccacatatggaagcattcatttttcagtttctttaatgagtttaagggttttgttgtttttacttttgaggaattcattcatgccgtttatttgcagtgcagaagcatacgggtgagaaaggaaagaaggagaaagt

SEQ ID NO: 43070 - DNA, 825 bp, Manihot esculenta
  Intron number 1 from transcript cassava4.1_021145m (locus cassava4.1_021145m.g) derived from phytozome v7.0 (chr-ID scaffold03896; pos 216443 to 217267)
ccgaccattgaggagtggctcaacggaacttttaggtgttttatcacaaaaattgatgcccttaagtggcaagaaaatatgagatatttgactcattcgtgattgtatctcaagaaaagattttttgtaacattatcatcaatgaactgcttcagaagaggaagaccaacagtgaaacatcccaccattgtttgtgactttaagttagtcatccagctaaacagtctgctgtgaagttcacgtgagatattccctacattcagagtcccatcacactggatgcttgaggcatgtccctcctgtaaagagaaaaggaaaagaaaagaaattgaaaaagtcaggatttttgcttaacttatataattaaaatgaacctgtcaaactctactcaatttcaagtggatcttttagtactccctggaagtggaaggtcatagtgttccacagaaacgaaaatcggtgagtcagttcttcattattgatgatttggttgaagacaaaaccatgtgatccttgatgagcatctccattatatatacataaccatctagtttgaaaggcaacacaagtccttgcattctcaaacatcagaagctccttcctttcggaaatccttattgatttttctgttgttcatcaataccaaattatgggttttcgtttgccccttgttcttcgggctaagcaaatttttcagaggtcttctcctactgcaaaccaaacagcttcagcagcaatggatgtaccaaagggctaccttgctgtctacgttggagaaaagcaaacaaagcgatttgtgatcccaaatcatatttgaacaagcct

SEQ ID NO: 43071 - DNA, 643 bp, Manihot esculenta; identical to SEQ ID NO: 42453
  Intron number 1 from transcript cassava4.1_001526m (locus cassava4.1_001526m.g) derived from phytozome v7.0 (chr-ID scaffold09460; pos 162593 to 163235 reverse strand)

SEQ ID NO: 43072 - DNA, 780 bp, Manihot esculenta
  Intron number 1 from transcript cassava4.1_015822m (locus cassava4.1_015822m.g) derived from phytozome v7.0 (chr-ID scaffold03333; pos 298995 to 299774)
gatcctgataagttgatcgccaaggccgataagctgtgagaccccttctctgtaaatgcagggtccaatctttttctttatgacaatacatgaatctgtttcttgatcttcgtttttaattattagagaattaatgcattgaagaatgacattcttccggttttattcttttgaatttatgtgagcagcaataatttcgtttgatttttgcactcttgtttagtggattatctgttaagttgcgctttgcctcggatttttttcccagttgttttttttttgaatttttttttatttctgatttctctcaaggaaaacctaatattcaatgcttgaagatatttgatttggaagtctataatttggtattgttattagcttgaaatgtttcgatcatggatgctatgtgaattaggaactgtaaaagtaaatgggataaagaatgaaggtcagactgcttgattgatcgttggttactagtagagattgtacatgttgcttgaacaataggttctatggtagttttaagtttccatctgcatgcatatatacatataccaattttaattttattgttatttgcgactaagcatgggagttacaagtctttcttgtttcaaatcagaagaacagcaacaaaatgttcttaatttagagttataaactttttattattattattattattggtgaaaatacttctatgattttgttaaagttagttgttttacttgtctttttttagaacaaaactgagtctcacaaggtggagtgctgatt

SEQ ID NO: 43073 - DNA, 398 bp, Manihot esculenta
  Intron number 3 from transcript cassava4.1_014796m (locus cassava4.1_014796m.g) derived from phytozome v7.0 (chr-ID scaffold06853; pos 318710 to 319107 reverse strand)
ccaaaaggtgctgaggtaaagcatacctttcttggccattattctttgcaaattaactgtagaagtgcagaggttgctgttcatttgacaaccatgaaaaatacttgatcatcctgaagattttgtgagatttggttggtggtcactttaagttatttgatatacaattttttatcttattatgctctctctcttttttttttgagttctttccaagattcaaccaacttcattctcagtctatttgaaaatatgatgttgtttataatgcttctgtattctaaaattactttagagtgttcaatgccacttcaatattctgtttcatgtcaattttggaatgaatttttggttatgttttaggtgttgattagttacatagagactgctggaagtac

SEQ ID NO: 43074 - DNA, 977 bp, Manihot esculenta
  Intron number 1 from transcript cassava4.1_025309m (locus cassava4.1_025309m.g) derived from phytozome v7.0 (chr-ID scaffold08204; pos 66322 to 67298)
caaaggaaaaaggaggtactctcattggtgctcttctgagttagggatttatagcttatgaactataaactcacctataagacattttcttgttctactgaactattacatcttataagcataaataaaacttaacgtcactgtacttgaactgagcgggttttaagtatccattctttagctgctacgaagttatgaaatagagtaaaagtattggtgatgatagtgaataacttaggtgtttgatttgttgtagtgcacatgcacaccagatccatttctgtccttgttatatgaattagcatggggaaaatactttaaaggtcctcaggtgttcacaatgtaatttttacttattattttcttcatcattgtcaccatgtaggcgttgttagcatatatattgaaacagttgtgaaagtagaaaaagaacaaaaagagaaaaggattatgggagaatttttagaacttgattatttccctcaagctaattaaggtatttaaattatttataagaatgcaaagtaggaagaatagttatagccttgataatagtatgagatattagcacctaattatgcaaacaatcactgcaaatgtagtctacttatggcaagaatctcaacatagatgttgactgcttttgaatggtcaaagcattaaaagtttcttgtggtttgatccactttcattacagtcaaatgttttggcttttagaaagtagaaaccatacctgtgctcaaatccattattagcaaagaagatcctgacaccctaacactctcagtagctgctaatgtggtgttatatttctgctcaccacattagcagccatgaacggtgttagggtgtttataccttctttgctaacaaattaatcatagagtactgatttgtgctttcctcttttcaaatccttcttctttttggtgatgtgagcagcattgaagaagtcattgcaaaatttgctcagttaa

SEQ ID NO: 43075 - DNA, 641 bp, Manihot esculenta
  Intron number 1 from transcript cassava4.1_022267m (locus cassava4.1_022267m.g) derived from phytozome v7.0 (chr-ID scaffold12043; pos 66335 to 66975 reverse strand)
ttagttcacccttgatctcagaggtgacgattaatcccaaatccatagaaaatcaaaccttagcttctgtcccctttaatttggaaatttctaacctgcaagatcattaatcagaggttccttcatcgcaagcaaatccatgcatagagataaatgctgctattagtcttcccactattgaccgaaacccttccgtccagattaagccaaccggcaaagaagaaccaagctaagtgaacaaacagctctttccacatttggaatatcgatctgtgatgccaaaagatatctaaaaattacatgcttcatgaatcctcgagctccgagcctgacaaatgcccacctaccattgaaaaagcaaaaatatatcctgaccaccagatacccatactcttcaaggaatatctgaaataatagggtctgaatcatgagggagctagcaagatccttgaagccatgcctttcttaatagaccattttcaaacggttagccacaacctcgtggtctctcaaacctcctcaggcacttggacacctgtaaactttgcagagctggagtcagtggaaaacacaatgcaaaatcaaaattctactacatacaaatagagttcacatcttgagacgagctctcttactgacaa

SEQ ID NO: 43076 - DNA, 1027 bp, Manihot esculenta
  Intron number 1 from transcript cassava4.1_020540m (locus cassava4.1_020540m.g) derived from phytozome v7.0 (chr-ID scaffold01701; pos 358318 to 359344 reverse strand)
cagcaattcctcaacgtaagcgaaattcattttcactgcttggagctcttattttgttttcaattttaattttgtttgatatattgttgttagctattgataagttcaaagattgagcgcttgaatcgagtgaattaattgatttatacttgtttgggtagttggtttctgcaattattggatctcaaattgagatatcaatgtatttctaagaaaagatgtttgtagttagagttatgtttcgagtgcagaacagaagggaagatagcaattaagtttttaatttgatgaaactttaactcacaagctctatatttggttgaaatggaatctacctgtaatttcttcctgtcctaagtccagctgtactaattaggataatgtatgaagtgaacaatatggagattaaaaaatgattatatattctttatatcatgtgctattatgttattacatttttgtttacaccttgtttaaacacgctgtttgtcattgttggcttagttgttaaagaagtcctaatggttacatgttgaatttgaggttggtgactttgcttagaaaggggaatcaacagggtaaatttcacctgcagcaattaagctttgcttctaaacctagcctctaaatcccactaatatcactaaattaatagatttaagagtgttgtcttggatagccactaacataataattatgttgagtatttttctgtatcgttctagtttcaaatttcaagttgatttggaattttccgaagtgatcttagtgttacagaaaggtaagtttagtgatttttaagaatgaaatatgataaattcaaggactgcaggtgaaagcaatctggataaacatgaaaagtgtttaattgaaaatagtatcatgtctaatattaatgttttatggatgcaatacgttgatatttgttgttttggcatgcttgacaaagaattttgataccttcgccattacgctattctcatttcccaatttcttcatggttatgcagcaagaaaaggaaaaggcc

SEQ ID NO: 43077 - DNA, 812 bp, Manihot esculenta
  Intron number 1 from transcript cassava4.1_013336m (locus cassava4.1_012598m.g) derived from phytozome v7.0 (chr-ID scaffold06512; pos 2081686 to 2082497 reverse strand)
ttctctgcagcgccttcgctgcttgttttgccgaggtctcaactctcttcttctttatatttcttacctatttttttttatttgaattgaatttttaacttatctcttctggtgcttaatgatgacaatggaatcataattttgggatttttctcgtttccgttattgtagctgcctcctcctattaatttcgtctttgatgatctaagagtctgctctcccaaagtgtgaaatgcggtttggggattttacgaatgagagctgaccatgattttttgaacgcttaatgcaacatctaacttgatgagctccatttaaaatggaatataggtcaaattgtatcgtagacataagttgattgaacgtaatttgggtaaaaaaacggaagttattgttccattttcgtatctgttcttcccatttgttactggcgggcttcagctttagttaacttcattttgtagttttgagactcactaagatgccattatcttagtcatttgatagtgtagttcataggtattacttagtagatttgaaagtagaaaatataggcattgcagtctcagatctcaactacttaacgagctccattgcagatgagtagtggcttttagattaaaatagctcttacggggttttaattgctagaatagttacaatttgttttgataaagtggctgattatacttgctcaatctctttcattttcgttttttctttctcctgatcttgtttgctattgtcatattttatatctgttgtcgggtttcacagttctgtaccattcctttggacactgccaaagttag

SEQ ID NO: 43078 - DNA, 366 bp, Manihot esculenta
  Intron number 2 from transcript cassava4.1_002138m (locus cassava4.1_002022m.g) derived from phytozome v7.0 (chr-ID scaffold10831; pos 33459 to 33824 reverse strand)
ataaggtgcttaaataactccaaaatgataattacaatttttaggaaaatcagaagggatattgaaggttatgctgtttgctgtaaattattactggatcaattgactttgacctatgtttatgggagagatgatagctgcaatggaaaagaatatattgatattgctgctaacaaaatatataacccacacagaaaaaaattgtgacaaccacattattgtgatctctgtgcagtctttgctctgtttatattagctattttgattattggattattcatttttttgccagaatgaatttggcagatgttttataaatgctgccttgcaggttggagttcttattggaaagggtggagatacaat

SEQ ID NO: 43079 - DNA, 978 bp, Manihot esculenta
  Intron number 1 from transcript cassava4.1_030545m (locus cassava4.1_030545m.g) derived from phytozome v7.0 (chr-ID scaffold01551; pos 2400238 to 2401215)
caaagagtatgtgtatatccacttaatttgctttcgtagagtttagcctatcctgtaatgatacatgattccccccccctccccccctctttttctcctgtaatgctccatgattcttttgcctatgacatgctccctcggttgacataataatgatgccacttttatggggttgggtctgtaacttgtcagtgttgactctaagatatccttaatattttgagatcctctgttcttcattgatactaaggcaagtgcccttgctggtatcaaccttgatctatgagttcacactcaatccacttgaaacaaatttcatgttttgcaccatctccgtattgcactacccttgtctgggtgttcattccaacttaattgctcagttcttcaaactttggattgcaatcctttcatctcaaacaaaagaagtataacccgtgcctgactcacactgttctgtaattgcattttgtggcggtggtcatttacatctactatacaggtttgatccctcacttcaatcatggatttctagtggggttcagtgatgaactccagtgagaaatcaatcctgttttgaagagattggatgtagttttcaatgaagatgttgtttttttttcctttcgtagtttcgtttgttagttgttacagaaaagtaatttggtcctcagttttttccatgtgatacaaaagtttggttggaattttgtatggcagagtagtgtggtagtgatatatttcattatttccagcaattgagattgcaatcacaaagaaatcatggaaagtcttttttttaggatacagacgttttttctctattgacataaatttatgattgctttgtaccaaatccttatgttttggtgaattaaattgaacagataggtttgtatttgcccaaaaatactttgaatgcatcttgattctttgatttcctggtgtcaattaggaaatccttcctgtgtggcattt

SEQ ID NO: 43080 - DNA, 774 bp, Manihot esculenta
  Intron number 1 from transcript cassava4.1_003005m (locus cassava4.1_002778m.g) derived from phytozome v7.0 (chr-ID scaffold08613; pos 7924 to 8697)
ctctctttcatttctcatagttttgggagtctcaggtaactcaaattctttctcccctttaactcattctattttattttattattattttttcctggtccatgtaaattttgatcttttctaccaaactattgaaagttcagttgatctcattcatttgcatgtcattttgttctttgagagggaaaaattagggaagtaattaagaaatcaacacagatcatgaatggagtgtgttatttactatgacccagaaacaaaatcaatttattctgatctattccttttgggtagtcatcaaaacgttagaaaatagacttatacctagattcaagagttcttaataatttcttcaaatccagcaactgtatcctgggattgagcttcctcatcttcactagaactggtgtttcagtctagtcctggtaaatgcatgcagcaggtgaagtgaccttaagaaatccaagttaccaagtttttattttctctgctcagaattgcagattcccagtttctgatgtagtgctaggaacaaaatcttctaggaagtaagccatagaaggtgatacttagtttcagtaaggtcaaaagaactataagaaagtaaaaaggtagctacgaaatggtcgatgtttataatgttgggtaaaagttttttattttactttaccaaccatttttcataatttcattagtaaatttcgtagctgtttttctcttttcctgcaattgctatgttatattttatattttcagaggaggtatttcctgtga

SEQ ID NO: 43081 - DNA, 978 bp, Manihot esculenta
  Intron number 2 from transcript cassava4.1_022065m (locus cassava4.1_022065m.g) derived from phytozome v7.0 (chr-ID scaffold03203; pos 22240 to 23217 reverse strand)
gaggctctgcggcaactcaatgcaagtccctctctcatcttcatctttatctacccatctaggcatctatccattattagtaaatccacagaccttaaactagtcaggctttgtaatctgattggataagtgatccggtgtgaatagcttgaaatggccagttggatctgtgaacttgtgatccatttgacccgatcagtttgatcatcaataagagcaaaaaaattttctcgacttggcaagagcaattgaatccaagacctcatgagatatctttaaagtcaaaactaattgagctaaattagtaattgtgtatttcttttgtctcataaatgtcttattccgtaataattatttattacataattcacatattaaattattttacatcaattaaactatcatattaacatatgttagaattcttctgaaaaaatatttttgttttacttgaaataaataaagctagctaactatttcttatattatacaacatcagtaatttcataagtatagttcacatatagaattcttttctatggattactcattagtgttacaaaaaatttaatagtaatatttaaaaaataatacttttgtatgaccttcaagaaccccattaaaatatatttgaatattacctaataattattgataattaaaattatcgaattttatctttttatattaattggtgttgtgtgtaattaactttttgataacccactgatcaagtctgtgactgatggtcctggacctcctggtccctccaatgggtcaaaccctgtgcagggttcaatagcacctatctatttgtttgttctataaacatcattatacttgctttttctttacttgaaaggaagaaagtacgaattagtacagctgaaatagtatgcatctataatacatactaatgtaggttagtttcatttatctgcagtggctgctcatcttactggtttgcatagtgccatc

SEQ ID NO: 43082 - DNA, 503 bp, Manihot esculenta
  Intron number 1 from transcript cassava4.1_007601m (locus cassava4.1_007601m.g) derived from phytozome v7.0 (chr-ID scaffold07762; pos 23442 to 23944 reverse strand)
ggtaggtgctaaattttgttctctttgagttccgtgctctgttttcgtttctggatttgtgttctgatactgggtgccagtgattttatttgttggtttgaatttgtgggttttggtcaatttatgtgattttggtttgttatgcggtcttcttgatcttaattgaagcttttcgttctgtgctctggtttctgtgcttgattttcctctctctccttctgcctgcttttgctcgtgtttcaatggcgttgtgggtttttttttccttctttttggaaataaaattctttctgctgttgtttggggatgatttatagcagtcattaaggattcagttataattgctggaattttccctgtgctctttttggatttgggtatctgttttctcattggtcatggttattccctacggaactcctttacgtttttattggctattttcattctattagcttttcatctattttgtatttctacagagcttaacacgagcttttcac

SEQ ID NO: 43083 - DNA, 746 bp, Manihot esculenta
  Intron number 1 from transcript cassava4.1_003302m (locus cassava4.1_003302m.g) derived from phytozome v7.0 (chr-ID scaffold05474; pos 112411 to 113156 reverse strand)
gcggactttttttgtttgaatctgtatttatttcggtatattttgattcctgaagctgagggatctgttatttatccgcaatgttattattactggttctctgaagttttatctttttgtttttggtaattagatttccacagtgggttcacgattttatgatatctatatacgatttttctagtttttcatcgcatttaggcagtggctgttctaatttttttctgggtaattttgtattattgtatacgtttttctctttcgttttcattgtttttatggagcaaatgctcgaatttacgtgttcttagcttttcaacgacatgggtaagtgaaatttgccgtgatttatgagtttttgcgaggttggctgccgtattaaggttaggtaattggttatcttcttgattctagagtctgtagtagctggtagctaatgtttcataattagttatttttcatctttgctttgacgttgatctccgttattgtcttttggttgcttaaaatttcaattctcttattctcaagatgctttctgaatttactttttcatgaacatattatgttttctaaatattggtgttgtttctgtggttatatttgactttcaccagttgtttgtcttgtttatgtgcggtattgagattgatttgttgttgctcttttttatgaactttgttttcaaataggttgacctagagagaatttattttgatatgtctttgccagtttgaacagatcca

SEQ ID NO: 43084 - DNA, 806 bp, Manihot esculenta
  Intron number 1 from transcript cassava4.1_025019m (locus cassava4.1_025019m.g) derived from phytozome v7.0 (chr-ID scaffold03812; pos 130377 to 131182 reverse strand)
ttaaccaagctctttcagctctcaaattggtaaaattatgttatatcaatttatcagctcaaaaaaaaaaaatctattttgtttagtgctctccttcttggactagctttgaaattttcttcgctaatttttttgggaatatcctcccatgattgttttgtttctgtacgttagcgtacaattaagtggaaatgaactccaaattaattctttatgtgtatagggaaggccagtcccttacctttgtttgggaggaggttttttaaggtcatgaaaggttttaaataaaaaccttaaatttttgtttccgagaaagtgaagttttttaaggtctttcttccaaacaataaaaactaattaaaatttaaaaaccgtgaaaaaggtaccttataatatcatactctagaaaactttactttacctctttccaagcagagtgcagattttattgttagtactactggttgctagctgctttacctctaaatgtcttctgcctatgttatgttaatcttaaattcagccccgtggattcacaatttggttttcttttgcatgatttacacaacaaaacaaattattctgctgtttctgattgcttgccgaaattgttttagaaaacgtaatctacttgcgtggtccattttttgtggctcatttactttcttgtattccatattcttggaacttttggcagaagttgtgtgtttttaagttgtgactttattaataatgaaaatataaaagtaatttttgctttttgtcatgcagcttgttgcatctgcagattgtgctggagctttgga

SEQ ID NO: 43085 - DNA, 977 bp, Manihot esculenta
  Intron number 3 from transcript cassava4.1_023195m (locus cassava4.1_023195m.g) derived from phytozome v7.0 (chr-ID scaffold09570; pos 155018 to 155994)
gaattctgagctggacaagcttttggatcagactagtgtctcccaccttttccctattgcttagtaccttggattgctggccaccggcatgacagatctgcgtctcttcctctctcttgtgaaattgcactgaggtattctatggagatttaggtctgtgttagtgatgcacttacatgtcactgacaattgatgttgatactgtttaagaaaaggttatctgagatgtacacattacaacgagtcataaattactagctcggaaaagttaacaatcaagtataggtatttactagaatgtgggagagattgtgtgtcgatctatatgcaaagttaatatctggatggacactcttgcttttctctctgtttccttgtaaattatgaggcggcctatgtttagaatttagacgttgctattggttgccttagcttaaaagttgattttctgtgccattgtgctctgatgcaaggacttcagttcaacaagcacggaatgaggcagttgagtgtcttttcgtttcagatatggatatgaaatgcctgtggatgtattggccaaatggtactgagtttctatatcatttgactatgttcctagttgttactcctcactatttttgtttttatatacatatatattttgccccggggaggggggagagggggcgctgttgggagtacgcattttgtgcctttttatggttaaatttgctagtcaaaacacatctttcaagatgtactttgatattgtctgaaatctttagtgccttttaaatattcctattgttgatttgagatcgtcatttcagtttgtgatataacactgtggcttcctgatacagctcatattatattctctgttacaggcttcttttggatccatatgattgttttccatcatcatttatttctccacaattattatgtgcaatgatgtagatggatttctttttaacctttagtttttacttcaa

SEQ ID NO: 43086 - DNA, 870 bp, Manihot esculenta
  Intron number 2 from transcript cassava4.1_014523m (locus cassava4.1_014523m.g) derived from phytozome v7.0 (chr-ID scaffold01127; pos 220711 to 221580)
acaaggctcgccgtttgggttacaaggcgaagcaggtaaaagcaaaccttttagttttgaaccaatactctctctctctctctccattcacgttgcgttctgctttttagcttgttcagacggattattttttatgttattgggataacagttgtcgtgttcatgagtgcacactatgtatctgcttgatccgcaatgcatgtattttatctgtacctgtcaagtctggatggctgatcttttaattattagacttcaaataaatttttgctgataattatttactgtgttagccattttgtttattctatttaggccttgtgtccttgtgatacaatctctttgctgttaccatatgtttggataggagactttgaaatatgagttctgaatttaataaaaataattgttctcttcaacaggttagagagatgaatatgttaggcttataaccatggaaaatttgaaattaatttttgttgacaatcatatactgttgttgccattttattttattccattgaggccttgtttcttgtgatacaatctctttgctgttaccttatgtttggatgggagaatttgatatatgagtttttaatttaataaaaatatgtcttcttcaacagattagagagatgaatatattaggcttataaagatggagaattgaaatttataatttattataatctatattaaaaaaaaatccaatcctgaatttcaaatgttggtatctaaacatagcattaagttaagttgctgcttgtaataagtgttttttttttcttctagtgctatgctgctttctagttctctttgcattattaaactgatacacttgacttgactgaaatacttgccagggtt

SEQ ID NO: 43087 - DNA, 677 bp, Manihot esculenta
  Intron number 1 from transcript cassava4.1_004393m (locus cassava4.1_004393m.g) derived from phytozome v7.0 (chr-ID scaffold00276; pos 47378 to 48054)
ggtacaaaaatcatcaattatctaataatatactgaatactgatatgctatctatgatgcatcatatgtttgtggggtatacttttactaagttggatctttgactcgaagaaatcaaatttttattcagttgcttgctcattatcagtttgacaatacccagatttaagtgatgaggaatcctcaacgcggatcaaagtttcggcccttgttcctctactgctggcaaggcctctagtactgaccataatctaatatagaacttactagaattcagttacatgataagataaatttattcctcattattggatgatatgtttctcatcattggattatttctatttacggcattctgttttctgttaatctgctggatcaaacagaggcttagtctgcctgaaatggaaaagttagaccagagataatgcctaatatttcatggttttctacgtaaactgaatcaacaattaggataagcacgaaaagttaaagcttagatgctttagtgagccatgacctgtgatccgtaattcctatttgtcctactgatcattagttttcatagctgcagttcataagaaactatgaaaaagtttgtgttgaaaaatgataatatttttgtatctttttttttcccaggagaataatccagattataagaacaaatttcctcc

SEQ ID NO: 43088 - DNA, 423 bp, Manihot esculenta
  Intron number 1 from transcript cassava4.1_002674m (locus cassava4.1_002674m.g) derived from phytozome v7.0 (chr-ID scaffold05474; pos 127743 to 128165)
tacctcgtccttgaaggaaattttccaagcttttggtaaaaatcacatgggtttcttttctagtttcttcttctgtgggttttattgaggttttagtgtctctgatttttgatacgttgtagtttgtttttgtttggccataggcttataagatctgcgagtgtttgattattacttttggatggatttgtcagtttgttcaatgcgatgggtctctttcttcctcttttatctgtctccataattgacatctttccacgagaaaccaacaaagaacaacttcttcatagtttaattttgttatttactttgcgagttcaattattattattctgggttttctccatttttatttatttatttattttgcttcccttgggagttgcaggttctgtcaaggaattaagggagactccattgaag

SEQ ID NO: 43089 - DNA, 816 bp, Manihot esculenta
  Intron number 1 from transcript cassava4.1_023885m (locus cassava4.1_023885m.g) derived from phytozome v7.0 (chr-ID scaffold06914; pos 927124 to 927939)
ccggtggaatccaggatatcggaatctttagaagggtaagagttatgtttttctaagctctagtcaggggtacagagtagtgcatgcacagattaagtcttggtccagagaaaagtttttattttcacagaaaatgtatgaccatgtatgagattttacaggtacttagagggtatagcaggcttgctacgggttctggcggtcttaagccgatctgaatcctagcgccggtgacggtccattttggagtcgttacatttcaggctattgactgactttattctcaaacgtgaatttatctgagaaaaaagttgagatattattgtaataaactaatttttggctctataggcttgaacagtctccattattactatttacaaaaccgcttaaaacattattatttttcaaaatgaagaaaatgtttagaatgaaacttgatttaaaggaggtaatgtaggaaagtaaatcaagttccaccacctcactttcttacatgttaagaatagccattgtccaatcaaaaccttttgcttaaccttgtttttcttttcccttttgtttcaggatgcttaaccatgttaatcagagagtcagttgacgactcctttgcatttgtattgcctttgttccaaatctcagcatttgaaacacatgtttgtctgaataaattaagttcacttggtttcttaggcaattagccaacattcgacaatttcaaggccaagttccaagacaaggaaggaattccaccccattgttgatattttccgacaagcagcttgaaagacagccgccccttggctgcctacaaca

SEQ ID NO: 43090 - DNA, 769 bp, Manihot esculenta
  Intron number 1 from transcript cassava4.1_001691m (locus cassava4.1_001691m.g) derived from phytozome v7.0 (chr-ID scaffold03614; pos 1982800 to 1983568)
tttctaaggaagggctgggccaacaaccaaaaactgtaagcattggacagtttactgttttgttaatcaaagtgctacaatgtgaatggtaattatgaggttgactaagcctcagatttgttccttgttcatttcaggaattgctacttattataacattctcttaatttcatgttattgccttgactgttggtacttaatctgatccactcaaagagtttaggacttttcttgtatacagttattttttttttggttttttctgttcaatgtcttttctaaatatggtttatcggctctcactccgtcactcggcactgtcttcctatggttttgatgggaagaagaggaagcagaacttaagagatattgagttatgacttatcagcaggcaatgttgagggcatactgcatagaactgggtgaagcatttttttttcttttgatttgtatgattggtgagtatcattgtcttggtatttgccaaagaattgttagttgattattggccttggctttctttctttaatttttttcaatgagtagttttttttttcaattctaaaaaattggcttttgaatgtggggtgattttcatggtgattctactcatcatctttctctgttatttctgagatcaagtaaatttattacttttgacctctggaaaatatattgttgtagtcaaaatattgttgtagtcaaattctaataattgaatcttcttttgataggatccaaaggagaaggctaaatcagagacaaggga

SEQ ID NO: 43091 - DNA, 936 bp, Manihot esculenta
  Intron number 2 from transcript cassava4.1_005027m (locus cassava4.1_005027m.g) derived from phytozome v7.0 (chr-ID scaffold05375; pos 52546 to 53481)
cctatctgaacaactctttggtcagtcatttactttgtcacttccatgtttagctttttctcattaggctttctcttttagtgttttctggcattctcaagtaaaatgatttcaggtcctcctatgacatcatagtcttctgttttgggatataaaccctaacaattcagttgttgtagaaaagaaatagttacagaatggaagagaagaaaggattaggaaactgggagagaaaggagagaaaatacagagaatttgagagaagaatttagcaagaattcaattcaatttatttcttttttatcaattttcttatttgaaatgaattgaatcatgcataatttcttaaggatttatttgaattcttttcttataaaatgaatcctttcaaatgaagggtgtatgattgtggaatacataagttagagctcttcagatcttttatacactgataattgccacttcctaccagatctaatacgctactctactataactgctcctaacagacttcctctaacagctttgacaaacttcctagaattaaccactttttgtccccatctaactgtgctctctgtttatttttaatgcctattccttctaatataacacacatttcctccctttgtttctctatgtgagtacataatgaattaatggtaactgtttgtacaactttgcctatcttctttttagactccacatctgtaaatatgaaaacgtaagaatgagcaagaaaatatgtgagttaggcacaaatatatttcttagatttgtaaatctttaattcattgagcagaaatttgtcttactcaactcatgaaatttttgtatcaacttaatcaggtttaccagctgcacacttttcttatgtaaaaaatattgatcctggcttgccactgttccttttcaactacagcgataggaagcttc

SEQ ID NO: 43092 - DNA, 365 bp, Manihot esculenta
  Intron number 2 from transcript cassava4.1_017994m (locus cassava4.1_017994m.g) derived from phytozome v7.0 (chr-ID scaffold06512; pos 433582 to 433946 reverse strand)
ggcttcaaacacaaacccaccgataatctccaaaggtttgcttctttttgattgaggatttaactcttcctccttctgtttaatccttattcaattgcttttttttcttcttttttggtcttcgtttggttgctgagaaaaccaaggtaaacagacacaggaaagggaaaaaaaagagggtttctaggcagccaaatagtattagagatgatatttatgcttcaattagtttttttcttctttactccctaattttatgcttcttcccccccccccccccttctccttatgctgtttgcctgcgtgggcgtgtttggattcgaattaaaggtgggtaattgaagtaagtggtgcttctggaaccc

SEQ ID NO: 43093 - DNA, 489 bp, Manihot esculenta
  Intron number 1 from transcript cassava4.1_004519m (locus cassava4.1_004519m.g) derived from phytozome v7.0 (chr-ID scaffold03303; pos 215273 to 215761)
gatttgtctggtacatgattcagattctgattcttactattatatttttctctttttttttattaaaaaaaaattttggtcatgttatttcactttgatgttatttttgtgaatccgatggataggagtgagattttaggtcaaattttggaagctgtttgatttgcttccgttttttccggcagtcaattttatggagatcacttgtttggttgctgagaaaagcgacgaaatcatgaaaattgagttcttaggattttgtttcttctgagtttggaggaaataggagaacttaacctttaatttgtcaaatttttaggcttcttttttatttccatttagtgtttttctcctcaaggtttctttacaaccaataggccattataactccaaattatagataactttttgtcatttagggattatccgttttaatcatttctctgtttaatactttctttttatgtacacatttttgtagaagttgaa

SEQ ID NO: 43094 - DNA, 672 bp, Manihot esculenta
  Intron number 1 from transcript cassava4.1_000308m (locus cassava4.1_000308m.g) derived from phytozome v7.0 (chr-ID scaffold05848; pos 26403 to 27074 reverse strand)
tcttcgtcctcctgagctcgaagagttagtcaaaggtcagttctctccccctcaaaatcccaacattttcttccatccctctcctttcccaaggaaattgtgtgattttaacttttaatttcattgggtttctgaggaattgaattttgatgccggttatatccctagtcaattccgaaaattccacatgtgtcctaattctttggtctttactattgaatttaaaaagctgtttggttaagctcttcatttttctaagaatttaactttttaaataaaaatttagtcgttctgtgagacattgtttggtaaatgggaagttgtgggaaaagagaacaagatacacttcagcaagctccgaaaaagaatgttaaagaattcacctgcgtttgcatcagtttgatttttctttatctttgggtttctctagtttctttatcttagaatccctccttcttctctttatctttctatggggatcaggctgatatgaggtaaagcttatgaagtttggaaggttgcttctcttgtttaataaacaaaatataccctttgttcctattgtttttgtttccaagtgggcatgaaaggaaataatcttaatcttcttttgttcacaaaatgaattatgagaagaaaataattaattttgatttttttttctgtatacag

SEQ ID NO: 43095 - DNA, 939 bp, Manihot esculenta
  Intron number 1 from transcript cassava4.1_005560m (locus cassava4.1_005560m.g) derived from phytozome v7.0 (chr-ID scaffold06512; pos 1236512 to 1237450 reverse strand)
gggaacgaaactattcggatcagttctctgggattgtaagacttctttgtttttaataatcttacttcttcagttcttatctagataggactgttttattgtacatgatgcttgggaattggacgtttggttggtctgaattgtttttactgtgtttggtctctgagaaaaactggatgaaactggaaggaaaaataatgataaggctaaattatttaaaaaggaaaaataatgataaggttaaaatttttcagtcttattgctcaaaatcatttaattttgttaatttaacctttaatttttaaataattttaatttcaatatttaaataatttattaatgacaatcattaatgttaattaattttttgaattttagtaattttttacttttataattatcctcaaatgaataaaaatatttttaaaataattctattcaaaattaagcctatttttttattataaatgttttcttttacagtatgttgaaaataaataactttaagaaatgttaattattaaattaaatattagtcaattaaattttcctttctatatataaagtaaaaataaattattttttaccaattaattagtttaatttaatttaatataaaattgaaaacaatattacaaattatgatcaattgggaaaactaaaaatatatattcttttttccttttatcatttagcctcggaataataataataataataataaagaaatagagcaggcaatcaataatcattttagtggccaatatgctgaaagttctgtttagaaactcgtctttctcctttttttttcctcttgtgcgtgcgcgcgcactaattgttgcacttaaattttctgggcaaccaaacatgggatcaagataattaattctttttcattttgcagtttacattacgcagaagttttggttgggacgccaa

SEQ ID NO: 43096 - DNA, 315 bp, Manihot esculenta
  Intron number 1 from transcript cassava4.1_026238m (locus cassava4.1_026238m.g) derived from phytozome v7.0 (chr-ID scaffold11236; pos 171996 to 172310 reverse strand)
tctttggtgccagcaacatcatcaagttcttgcaggtatatatattacatttcttttttttttctttctttcttttcatgtcaaatggagaataaagcacactccacacctgctttattatgataaagagaaattatttgatatataataattgtattgaaaaaattcatgaggtggaattgggtttcatctgctttcatccatatctaggtcaatagtcctaccaatcaaatgattatttctttaaatttgcagaattaattaattattcttaaaaaaattattttcaggaaatcccagagtctcatagagcag

SEQ ID NO: 43097 - DNA, 965 bp, Manihot esculenta
  Intron number 1 from transcript cassava4.1_003640m (locus cassava4.1_003640m.g) derived from phytozome v7.0 (chr-ID scaffold04151; pos 146313 to 147277 reverse strand)
aatttataacaggctcggaaattttctctccactggtaagctgatacccttttgtttggttcccaagaaaatcaaacaaaagaattgaaaattatttatttagcctggattcaggttcttctcttgatcttagatattttcttccttcttttcgtgcttgccaaactggggaaattactctattctatatatgcttgttgtttgagaatacacgtacctcgttatgtagaaatttttttatgaagtggtagaatttgatcaatcatgttccatgtacttagtacatgagatgtgagataatgaatttgattttgaaaaaaaaataagaaaagcatcgaattttcatctaccctagacaacgacaatacaaaactatacgcaatcatgaaacacaactagtactctgaccggcagaatggaataaatattccacttatttgtttggatataaatgtggatctattgtttgcacatgttttttatcaatcggtgtttctgaagataattttgacagagatcgtaaacaacaaggctagacgctaaggttttctaaagtttctctttttgtgtgagtatttgaatttaggatttgagactaatataattggatactttacggttatgatgatcaaggtaacagggtaaagggaggcaagtttcagatgtgttgcctctgtaattggcctgaatcgcttaattatttgataatgggtgttaaagaacttttggtcacgctagcagtcattatatcattagttgaatatagctttgaaaagtttgaaatcatttaacaggactaaagcttgccttacttaagattcatgtctcagttgttcctttctagtttattattgataaatatagatcaccattataggatctttccttttataattttcagctatgtatgggtggtttattgagaatattagtaaattcctgattgtcatttcaatgccagggca

SEQ ID NO: 43098 - DNA, 654 bp, Manihot esculenta
  Intron number 2 from transcript cassava4.1_007010m (locus cassava4.1_007010m.g) derived from phytozome v7.0 (chr-ID scaffold08420; pos 129716 to 130369)
ccatcggagctggtaagcttcagtttcttcattccttaagtttggatttcatagatcataatgctcatgtcattcacaccttataagcaatggttgagctctttacagcatgacagactgaaaatgtaggttggatctagatgaggttgctataatatttgagttgattccactctgactcataaactgctttcagattctgtaggctcctaaaggaatgcaacatccattaccaagaagctgcatgttggaaagtgtgttagtcttttggttaggctttaaacctaataggatgcatatcagaaattgtatagaacttatcaatatgagaagtgatattatctcttctatgcaattgatttaatttgttacagatgtaattgttaatagtggcttgtgtttggacaaatcttttataattgagttgtcaagtgagaagaacaatggatcttttggcactagagagaagttaatgactgcatcatgactaagagttaaattttttgctgtgtgatattgtaatgtgactacagttttgttgctattagttctttaatatattaaaggaaatttttcattaggttagcagaatgttgagtgacagtttcaaatctttaatctgtgtttttaactttcagtcatgcttctacagga

SEQ ID NO: 43099 - DNA, 792 bp, Manihot esculenta
  Intron number 1 from transcript cassava4.1_004148m (locus cassava4.1_004148m.g) derived from phytozome v7.0 (chr-ID scaffold07519; pos 324154 to 324945 reverse strand)
tctacaagtgggatccagaggaattacctggtataatactatgatttttacaggttttgattttagcccattctggatgtacgttgacttgtttttttaaaattttttcctgtttcagtcgtatagcctattcattggagtttgtttctttttctagtttattgtttgtttggttttgtttagttggatagtaataatagatctttggttatgttctatccaattttgtggggtttgcataattgggaatttagtgcattgactttaatggttgaatatgattcggttcccctttttgttcttattaattggatattgataattatgagattgtttctgtggcaaaaatatgttttctttcattttctagagattctagtgcaataaaaatgttcttagttgaattgtgcttgctttggctccttgggttctggctttgttataagaatcgttttttttttgggtgttttagtgaatatttaggtgattttattgttatgttaacatagtttggatttgtattattttgagcgggtgtgctttgtattaaaattgctcgagtaattggattgaatggatgattttgatgaagcccttttggctttgcctgctggtttagggcatgtgaagaaatctgcttcgatagtgttttgtttttcaatggtgatgaatagttttgatgattcaaagaattttgttttaagtaagattgtggaatcaattttgtgttaattatacgttacaaactgtaatattttcaggccaatccttattgaagactggtgataggca

SEQ ID NO: 43100 - DNA, 467 bp, Manihot esculenta
  Intron number 1 from transcript cassava4.1_031027m (locus cassava4.1_031027m.g) derived from phytozome v7.0 (chr-ID scaffold06914; pos 941 to 1407)
tagtgtctgggacagatttactcacgaatatcctggtatatttttgtgtgtttgtgtgttttgagattatattaatatgtaaaatgttaatgatttctatataatcttgtagaaagaataaaggataatagtaacggggatgtcgcagttgatttctatcatcgctatcaagtataacatatctccattcttttactgtggaaatccatatttgttattaactattaaattaaacaagaaatgaattaaaattgatgttgcaggaggatatacaaaacgtcaaaaatatgggttttaacgctttcagattttccatttcgtggtccagagttatacctagtaagttaatttattaaatttaatttttttattaacatgtgttgagatcataaaatttttttaatataactcttctttattttacttttaatttgaatatttaggtggaagaagacgagaaggagtaa

SEQ ID NO: 43101 - DNA, 947 bp, Manihot esculenta
  Intron number 1 from transcript cassava4.1_020826m (locus cassava4.1_020826m.g) derived from phytozome v7.0 (chr-ID scaffold05554; pos 1992 to 2938)
cgtgctcaataaggtctccatatctcctgtttttaattgctttcgttctttgtttctatttaggtttttgtattataggttctggaatccggctgtatttgttcattgaggtttgttgtggattgtatggaaagcatgaaactgatttttctgataggagagaatagcaatggcatttggcatttatcattttctactgtattattgatgagacgtttgaaactgaattaggccaagttttgcaggaaatttttgatgttagcattgcagtttttgggtctttttccttttgttttagattgttggatcaatattctaagagacctgttttctttcttgctactctagtgctccacttctactcttaagtttttcttcttaaatctgaaacacaaatgggtattggttatgcgagagcgcttaacttgtgctaagatggtctgttgattcctctttttgcttaatcttgccttctttggaatttttttcctttgttttgtctaattagaatcctcattcttaggcatcttagacaattcaagtaatctccagtccacctgtgttgttatgcccattggtaacagaaaagtgaaaattcaagagattttgatttttgcattcctcacactaaacatgaaggtttctttcaaaataatgctcatttccattaaatgttgaacctaattctcattttgaattgagttgtcactatgaagaaaaacatgcaattgacaaaatattgcaatgtcttttgcctgactttatctagccaattcccttattttatgtcttgatatggttggatattgctcatatgggcgtatacacatctgtgttaaactctcatgcttcctcctttttgcagtttcaaaactgatctaaatgttttattttgttttattttgtccgcagaaagtgaagaagttctctctagccgatcaggatca

SEQ ID NO: 43102 - DNA, 854 bp, Manihot esculenta
  Intron number 1 from transcript cassava4.1_033488m (locus cassava4.1_033488m.g) derived from phytozome v7.0 (chr-ID scaffold04175; pos 656086 to 656939)
gttatagcccaatcctccaagctcttcatttattggtattgctttttacacttctctcaattttaggaaaattttcaattctttgcgtttcaacaaatctctgatgttttgggatctgtgttgtgtttcttggcttctaagtctttttcccctctcaatgacattattggttatttgtttcttttctcagctaggttttcaaaagaatgtgaattaattagtttatgcacgactctttagagtcaattcaaaagtagacttcagtagccatattcttaattgggagtttattatctaaatatatttgttttctctaccaataatacgaatcatatgtgttcatttgcttttacaaacctaaaaggaaacttgccccttgatgacttctttcacaacaatgcagtaggtcaagttatcaactttcgttaatgaggagagtgtggagtattatgaaaggtgaggactctacaatgagcccactggacctccagagtccttgtgaatctgaccaataaaatgtgggcagtaacatgctcttccttggactggttgtcttgaccagcgggtggctcttcttgactggaattaagattttagtgtctctatctcttagttatgttgatgttttccttgaaaattgaatagcaatatacaatttcagttgagggtactgtgtatgggaactagtttgattgtaaatgtccacctatgaagctgaaggcctttctagcccatcattgatttgtgttcttatgatattggagaacagcgcggccaaattttctgatcctttgttaggttactgatcctaagagccttaagctttcctagatttgcaggtataaggaaaggag

SEQ ID NO: 43103 - DNA, 565 bp, Manihot esculenta
  Intron number 1 from transcript cassava4.1_003550m (locus cassava4.1_003550m.g) derived from phytozome v7.0 (chr-ID scaffold06656; pos 1244107 to 1244671 reverse strand)
cctctgtagtaatctctatccctatccgctctaatgcctctacgtgcacactcgcttgctgtactcttttgttgctaggttctgtgtgtgtgtgtatgttttcgtctccacaggatttgaagcgtgcatgttggcttatgagttcattttttttgcttgtttttgcctcattgcgctggtggatcggagcgtggagctgctaagcgccagttgtgtgtgtattttttttatatggttttgtggggatgttgtgttcattagggttgtttatgtggtagtggaattgaaaagtggacaactttttagaactagttttgcataagatcaaagcattattttgcaatgtgcaatttgtttcatttttgtcttggattaatggaatatatagcttgagaaagctgattcttacattaggatcaaattcaaactattttctaaaataaatattttattttaaatgaggaagaacaagaagaagaagggcggcaggggcctgagtgtaaggtggtcaatcacaataaactgcttcttcttacaactttatttttgtgatgatttctccagg

SEQ ID NO: 43104 - DNA, 593 bp, Manihot esculenta
  Intron number 1 from transcript cassava4.1_008566m (locus cassava4.1_008566m.g) derived from phytozome v7.0 (chr-ID scaffold00977; pos 239312 to 239904)
aacattatctgaactgcctgattactcctctcaaggtatttttctttctctaattttatctctttttaatccatgctttcttttcgacatctttatactttcttagatcctatagaatattatttctggtgtcttagcagtttagaaagtttgatctctttttcgctttttcccccctttcttttggccttggtatatttttgcgtattgggggtctcgtgaatttttgcttttttcgattttcctttttctttttaaaggatctttttatctgggtttgtgtaatttcaaggtttgtgaaggtttgttgcccaagactgttaaggactaatgatacagtatgttggttttctggttgatgctagttgttggggtttttgaagaattattgatatttttttttagacttaaggcagtagtcggcttatatgactattgtaaagggtgagatttgaacttcccagagtgatacttgattttcttttccatttatatataaccagataatagaccattctattgatttgttgtgttcattctttaattacatacttgaatgaagattttgatttcgtgttgtttgttaaattcag

SEQ ID NO: 43105 - DNA, 517 bp, Manihot esculenta
  Intron number 1 from transcript cassava4.1_030811m (locus cassava4.1_030811m.g) derived from phytozome v7.0 (chr-ID scaffold06708; pos 248336 to 248852 reverse strand)
gaatccaggtttttcttcctttaaactattatttgttaattttgtctctttttatttgtttctgataaaaaccacagagataagacgattacacatcattttcaaattggggttacttaggttttctttatcagtttccatcggcaagcctgcccttaaagctaactttgttcctttcattcctttaaaatacaatacgaagtagcctttgggattttcgaatgctaaaatgggttggcgatttaggagacaagcccattatcatatatacattttctaaccttccaaacacttataatatctcaattcttatacccattttcttattaatttctctgcaaaatccttatgcccattgatccaaattccaaggtcccaccccaactcaaaactgcatctgaccgttgattcccacattattcttgaccgttttaatgcaaaaaaacaagggggccataccccattaatgtatttcaaatttgcagggcctgttgcagtattttaatctcgtagaggg

SEQ ID NO: 43106 - DNA, 973 bp, Manihot esculenta
  Intron number 2 from transcript cassava4.1_008461m (locus cassava4.1_004914m.g) derived from phytozome v7.0 (chr-ID scaffold08420; pos 107777 to 108749 reverse strand)
atattcccaatagcttatcaggaagaccaaggtttgtttttttgctttgtcagtactacttttcagtctccgcaaaaatattagagatgaacctaacttttcttatcacaaagtttttcatgctgaaataatcaatttagttctgttgtgtatgacatgggcatatggaggcagatatggtagttttgggtgctgcaaatgttaaccaaaccgaattaattcaatccaatccaaaccaaaagcattggttttgacacatagtttagattggttttagaatatgattgaatggacttttgggtttgcttttggttttaggacatgaaaaaccaattgcaaccaaatcaaactgagctgaaccaagaatgtattaaagctactctgtcttgaattatatataaacatttcttttatatattaatttgctttcttctacatgatctaaaatttctataagcataaaatgaaatttttcgttttttggttcttgatacatctgttcatgttattatgtttaaaatacatgttatttgaatgttctcaattttttgaagatttttatttttctcatttactgttataacctaccaaactgaacttaaatggtttggtttagataattagtttctttgttttgattgtggttttatttgttgacaaacgactttgtatgtttggtttgaatatctagctcaaattgaccaaaccaaaccatgaacacccatagttttgggagctttgttacatctatttcttatgaagattgtaggaatggaaattgtgccttatgaatgaatgtgatatccaactgcatatgcaatgatgcttgtgatacttgtaatgaataagagtgttgatatttgttgcacacccaaagattggtagtcctcttgatagtcttgatatttggtgctataatacttgtaatgaatatgagtctagttccctgatacatttgtttacaggcaggagg

SEQ ID NO: 43107 - DNA, 539 bp, Manihot esculenta
  Intron number 1 from transcript cassava4.1_023187m (locus cassava4.1_023187m.g) derived from phytozome v7.0 (chr-ID scaffold00080; pos 413808 to 414346)
gaggttgataaacgacagaatttacaagatgtaagtagtgaaaattccagtcttaagattttgctgctgatgggaagtctttctgcttcttggccaatgttgtgctgtcaagtttcttatctacatgttacaatgtattatatccatttgcggttgaatctgaacagtgtcttgtttattttattaactctaatggtataatcttcagctcataagtggtgtagctttcatctatataaatttcttgtcgaagaataatattgtttcatttcgaatagtcagctgcatgtggcatatatagttggatttaattaggaatttccatgttggtgcaattttgaagtctttgaaatttgttagttttgaaaaccttgaaattaaatagcttaagatcttcatcaagaaaggaagaaagttgaaataatcaaagattcactgaattatcaagcgagcagttgaatgcaattggattttctaggcaagtttgcaacttagtatatagatatttgaggccttcttaaaacacatttcaggatcga

SEQ ID NO: 43108 - DNA, 1042 bp, Manihot esculenta
  Intron number 1 from transcript cassava4.1_008594m (locus cassava4.1_008594m.g) derived from phytozome v7.0 (chr-ID scaffold04260; pos 173686 to 174727 reverse strand)
tcgtttgagctgttcgaaagcctgagagaaatcaggtaattttgggctttcatgtaggttaacttggttttatctcttcagaaagacgctaaattagaatcttgtttagaaatattttgatttattgtccttatataacttggtttctttgtgtctgtaacttcattatacagtaacatgacagttatgggttaaagtaaagtctagagggtgcccacatttgcgtggtgcgggaatgaaatcagcatttatggaattagattgtgctgtcaattagctagtttctcgtgtgcttgttgcttgtggttaacatacgcttattagctttagttcaaaatggttctgttgctctgcttgttttgttgtagactgcatataactcagcatctatttgtaccattacttgagttagtcgatctaattcctttatatcatgtgcctgaggctttctgaatctaagtttttaaaagagtacaaaatgtacttgaaaagttttgttgacatcgagttggtcattgttgtgatcttgagattaagaatagtagtctcacagtcaataacttggcatcattgaaatgtaagccttggtaattttagtttgatgttctgcgctcactttattttatttaaccctgactataagtattgtgtaagaaatgcggcatccacaaattggttaaccctgcattcttcccccttttgggaaaaaggtaacaagaaaaactgacagatactttataattagggtcttattctttgaagaaatttttgtagagggcaattgaagatgactcgattatccttaaaaacaatgagatatatattgtcttgttggattgatgaaagttgcttaaattgcatatagagtttatgcatttcattggtgttatgaagtggattttgcatatttagacagttattttgatttgttagacattagagatcaattttataattttttgccatctcccctttatgtttcacttggtaaattcctgatattatcgtactttatagccgatttggtacttggcctgttgca

SEQ ID NO: 43109 - DNA, 999 bp, Manihot esculenta
  Intron number 1 from transcript cassava4.1_020604m (locus cassava4.1_020604m.g) derived from phytozome v7.0 (chr-ID scaffold01551; pos 1053868 to 1054866)
ggcaatgtactctctccctccctctgtccccccctatttctagtcatatctattcgaaacttcattattttgttgattgagaatgctatctagattttggttcggaaaggtttttgagtttatctgtttctagggtttagagatttattaatcgtgctggaggaattagaaacgtgaattaatagtattatgttgtggttcaggtatttgttcgtgagcttatgaatgaaatttctgttgtaaaagaataagaatttcatttactatgttagttcctagaatggcctagctgtctggatgacaactgagaagtgggtgattaggttttatcctgtgatctcatataactaagtcacaaacaaacatttcaatatgtttttaattgtgaaggttatctgtatctactagaaaccacaaattaagtgcttggagattttattggttcggtgaatggaaagaggtttaatttcccaattttgtgttctccaatttgttgtttgatacaatctggatatgttttgagttgtttaagaggtcgtattgttgccttttggaagttggttttggtgttcgtatttcttaacaatttctcttgctaatagaatgggcttcagtataaacttgcagcaattcacatggttagggggaggtaagcaatggataataaagtcatatctctgttttctcatgcagtatttcttgaatttggctctattatttcattatgcagtgtaacagttatttttccttctgcaatgtcgtttaaatcatgttatcgtccttaaattttaaatcttaaggccctcttttcttttatatgatagcaactgatcatttgttccaaactagttggaattggttctatggataattcttcgccattcagctttgtttatgtttatttccccctcctacgtttgtatttatttttttcgtaaccaatgagtttttttttttaatgaagcggccatacattgtttatcccccagagggaccaag

SEQ ID NO: 43110 - DNA, 758 bp, Manihot esculenta
  Intron number 3 from transcript cassava4.1_002548m (locus cassava4.1_002548m.g) derived from phytozome v7.0 (chr-ID scaffold05335; pos 304075 to 304832)
agtggcttgaatttgggactcgaggacacaggcatgtatgtgcaatttcaaatgctttagtttcatttcacctcttgatgcatcgaaacttcagttgagtagcataagccgctgtgttcaaaatcacagttatttgcatgatttaatgtttgattttttaggagcgtccaaatggggtatgagattcttagccaattttgataaatctgaagtctgagcatgtgaatgtgcaagttttatgtacatgcttaaattgttagaagataatttttggtctgggtatgagaaggctatttaagccctgtttgccgaatttatgggatgctttggagtaggacttagataggcttctttatctagtatctgataagggaaaaattacaagtctcctcttgtgcaactcctaggctgagcaagagtatctaagagaatttaactagtaaaatctcatcatggtggctagggttggataatccagaaagctaactgcaatattctttatctgctactatggaaacttttatagtttttctttttttaaatctttgcatcatgaagtggcattttacggttcattttctgtatgactactgcatcttgttttattcttttcctgattcattacatctatattttgtgtcttctgttctaggcccataatatgtagaagaaacaaagaaataatcttctgatattatttgtacttctcacttttgtatttagagaaagtcgaaggatcctggcaagatatctttcag

SEQ ID NO: 43111 - DNA, 770 bp, Manihot esculenta
  Intron number 1 from transcript cassava4.1_011074m (locus cassava4.1_011074m.g) derived from phytozome v7.0 (chr-ID scaffold03614; pos 3483054 to 3483823)
aaagcaaggtactcttctctcctcctctttcttccctcattttttggttgtcctttatgcaatcgacttgtttggtgtagatagagtcttctcatgggtctgtggtagttttctaggagaatgcgtgaaagttgaaaatcagcttgttgtagttcggatttgagatcaaatatgggtgtgttgatgggttctgggtcgtgattctgttgtcaaacgaggttggtttggaccagtgtgggtgcactaactaattaatcccttctgctttctgagttccttgcaagttgggtttttgcattttatggttttagttttttgaaggatttgaagcttgttggttggtttttggtgtttggagtagtttttcctcaggctctggttggatttcaagatcatggaagaggatttagttgataatcttcttattggtcgtctgatttgctgctttgatattttctttcggttgtctgaagattgaattagtttgacttctctcggggattaattttacttggtgaatatgatttggttattactaattatattgcttgggcgtattattgttgactttgtacccccttatcaaattgcatacttgtaaaattttcgagttcagaatagtttagtttttcaacttgttaatcagtttgtagttgctgccaaaaaaactacgtttcaaagatgtttgcggttttcttcatgccactatatttgatgagatggaaaattgatccttgctgttttgtttagagggtggttccacttaatac

SEQ ID NO: 43112 - DNA, 689 bp, Manihot esculenta
  Intron number 1 from transcript cassava4.1_009834m (locus cassava4.1_009834m.g) derived from phytozome v7.0 (chr-ID scaffold06550; pos 725688 to 726376)
gcggggaggaagagaagaaagctgaattcgtaagtggatttttgttgctgctaattcagttttattgcaattagggttttgtgaatttattttttaagggctctgactggtttttataattagggttttagtataatgcattgcattttgtggattttagttggtagtgaagcttgttcttatgggaaattggaacccaagttttagacagtttgatgtgtgttttgaaatgggtttcactgtgtcgatgcaattggaaatgatgctttggaggagttgagaaatggctgatgaatttgaaaatttgaacttcggaacgccaaatttgaacgctttgatgggttttcctcccatttgttatgtctcggtttgagattcaatattgtttcaaaagttgcatttttccgtaagatttccaatctctgtaggtcttaacattaaagttagaggttctttcttttcttaatagttattcaatgggttgcaagctgttgaaaaacaaattagaattggatgtaaaagcaataaatgtttcaggaagtgcttttgtgtaaagttgtgctccatttccataccttttcatttttcaatcttgatttgagttcccaagtccatctaaaaattactctcttttctttttgttgatttgtcattttataatcattgttttgatcaactgtaggttggct

SEQ ID NO: 43113 - DNA, 549 bp, Manihot esculenta
  Intron number 1 from transcript cassava4.1_007516m (locus cassava4.1_007516m.g) derived from phytozome v7.0 (chr-ID scaffold01551; pos 92687 to 93235)
acggttcggaacgacgagatctctggccttaccaggtatatacatgcatatttatattcgtgtatgcctgtattttgtaaatagctgtcacttgattctttgattttactggcttgtgcgtatgcaaaacagagtatcctcttttttactgtattcagtttccacttgttctttttggccactttgattcttcagtttttcttttcatttcagacacaaaattttacctgcattatctcattgccagtgagttttcacgattacttctgttttgttcttgaatttttttcattttttttctcaaaaaaagctacgtaatgctgctttgctgtgcttcctgagcttgctcagttggtagttattaattatttgagtttcttgccgtgacatttcctgatttatgtaagaaaaaactagctgcattatttggtttttaggtgaaatgacacttagtgaaactaagcgcttactgaaatccagaatttcttttgtttctcctggtgaccttgttcatgtcctctaattttcgtttattgctattttacagga

SEQ ID NO: 43114 - DNA, 533 bp, Manihot esculenta
  Intron number 1 from transcript cassava4.1_013019m (locus cassava4.1_013019m.g) derived from phytozome v7.0 (chr-ID scaffold10015; pos 346204 to 346736 reverse strand)
cctctttctctaagaacaagagattcctgtacttggtagctctatttttctctctctgcccctccttgccttggccgtctttgtagatttccttggattgtttcttttcgtttcgatcttcgatctcttatctattcaaagataagcgtgattggtttttgagttctgattgttgcattgtcatttttaatttgtttattcaataacccctaaagtgcccatttcatgtgatctctgccatacgaataatcatgtaaattctctccttctgagaaccctaaccatctcctccatcatccaaagtgcccatttcatgagattgtagaaatagttttctttctctttttgtttgtttgtgctttttttttaacttttcaatggagttgtaatttttcaaatatgaaagcaaaatgaaattggaaaatagaaaattgttttccacaagtaaactgccctttaattttcttgggtcagaatcctcaaggataattatataagccttttgcattttctactctgttttcaggtactgt

SEQ ID NO: 43115 - DNA, 378 bp, Manihot esculenta
  Intron number 1 from transcript cassava4.1_003635m (locus cassava4.1_003635m.g) derived from phytozome v7.0 (chr-ID scaffold03055; pos 173604 to 173981)
aaggtcagtttatttctccaagatctttgctctctcctctctctcgctctctctctgtaaacttcagctgctaaatggttctgcaacttaaatatttctgaatgttcttgttttatcttgtacctaatgctattaatgcccctacagggttagctgaactacctcataaaaccgtgtttgttctttaaaacttcatttcagctgcttccattaatctatccacagataaataagaagagtagcttcaagattttcttttttgggtatatataagctttcatgtatcctcttcatacattttttcatggtagtgatccttgttatttgaattgaatttgagcagtggtagctttggtgaacataaaaaatactttacat

SEQ ID NO: 43116 - DNA, 1022 bp, Manihot esculenta
  Intron number 1 from transcript cassava4.1_019867m (locus cassava4.1_019867m.g) derived from phytozome v7.0 (chr-ID scaffold01701; pos 102502 to 103523)
gttccctaagcaactggaacttccacaacttggtaaagacactctcagctgggtaaccagagctgagcattactttgagatgaatggcactcatgatgacctcaaagtttccatggctctcacatgcacgcaaggcagcatgctccattggttactgtgtctctgccaacacatgccgccagcatgccaatgatcacctgggcacaattctatctgagctgctgtcaaattatggatctgatacgatggcaagccccttcaaggattggaggcaattaaaccaactaggtctattgatgagtttattgctcgcgggtctcatgccaacatcccagatttgcactatgttggctatttcttgaatggattaagagagcacatctgtattcgattacaaagccatgagatcactgttttgggataagctgtggcttccacaagagaggtggaacttgagttacaagtaacacatcctcctcttttttctggcttagagtacttggggaagaaagcatatacataggggcttggaccccaggccactactcctagggccaaatcttggccttccaccatcacttctcactcttctagctgtttgcttcaacctcagcccactgagaaagtcttgaattcttcagcccagccatcaacaccactttcttctttccataaaattccaatggcattagtcacttcccatgtgaagaacattcaccagtattcacattaggagcaccaagatctacatgctaagggcatttgtttccactataaacaaccacactcttcacttcaccaatgcccaaataagaccctttgcatgattatagctgaagaacatgatgaatggattaacctatgcaagttagcagcaatggatgagaaaggacctttcctcaccagagctgattgagacccatttgattcaaatggatcttccactttattcggttggcggcatttctcaccctcacaccataaaatttcaaggtaccatccattctttccctgtgatttta

SEQ ID NO: 43117 - DNA, 456 bp, Manihot esculenta
  Intron number 1 from transcript cassava4.1_018682m (locus cassava4.1_018682m.g) derived from phytozome v7.0 (chr-ID scaffold11236; pos 208232 to 208687)
gggttagattatcttctattttatcttttatttgttattttctatgttctttttattcgtttttaattgatttttgcatatgcgtatggcgtatttggtgtattctttacaaacttctttcttttgatctctttacttatgtttggtttctgggaaaactgcggaaaacagaagaaaaacacagttgcaaacagcttgagtcgtttaaattgattaatatttgctattatatcaatgtcagtgtggttttaggcgattatccttcctagaaattagtcattttcgtccatagattttgattacttaatagtatccttcatagattttttattttcatggcaaattacatattcagttgaataagctttgtggtttaccttttttgttgtctcgttatttactatgggcaagtagagtctcatgatatgtgcatttaattgcaggaaaactcgtgga

SEQ ID NO: 43118 - DNA, 319 bp, Manihot esculenta
  Intron number 3 from transcript cassava4.1_018682m (locus cassava4.1_018682m.g) derived from phytozome v7.0 (chr-ID scaffold11236; pos 209012 to 209330)
gttgcttaaactacatcgaggaaaatgtaagctttcaatgtctgaaaggggtagaaagtttatacaggaacaaagtgaaaaattttaattacacattgaacatcttaacaatgtcacgttctaaattttcagttgttctggggaggagaatctagataccttatgcattattccctgttcaattttagtaccattagtgtggcggatttttcttttccctatgtttttactttaattgcatgtgcacgggtttgaatcctgctagattattgttgtgtttccctttcgtgctatcctgatgaacgttgattggtacagg

SEQ ID NO: 43119 - DNA, 1020 bp, Manihot esculenta
  Intron number 1 from transcript cassava4.1_024020m (locus cassava4.1_024020m.g) derived from phytozome v7.0 (chr-ID scaffold08551; pos 1140 to 2159)
acctgcttcactcttctttcttggttctcttttgggtactccctttaccaaattttagtgagataatatattttacaattttaaaaaaaattataataattttttttatctgcagttaattaaataaatttagtttttgtggtttatctttgaatatttttaattttaatttaaattttatgattgataactaaataatttatataaatttagataggaatttgtcgatcaaataaagtagagaaaatagtgaatataaatatttatttgttggactattttaagaatagtagatttgaataagaaatttaattaaaattttgtaaaagtttgagaattttaaagttaattgacaaaatagttgtttaatataattttagtgtttcagatcatgattacactaccacattttttagattgaggtaaaaatgttgtcctgatatcattaaaataataattttaaaatagttttaaattattgtaataatttttaatttttatataaccgtaatttttttttattatgaaaatttaattgtactgctgctttacgtttcgataataaagatggatgtaataatttttaattgttaatacaatttaagatacttttattcattttgtaatagtaattacttctacacatgtttatttgatgttgtaaattttgttttatgaaattatgaaatttttaagaaaataattcattttgagaaacaaaaagtatatttcttttggattgaattagttttttatttaaaattatcaaaaaatccacattacgtttttgaagaaaacattcactttttgcttatcttttaatctcattaatattaatgtttgatttttttttaaaaaaaatttcctttaaaatatttttaaattaagaaaaaaaatttataattatattatatatttatatgagatgaatatgttgcgcgtcaaatgatgcttacatgttaaaataattatatattttgaattcttatgcagggtcaggtgtttttgggttcctagccg

SEQ ID NO: 43120 - DNA, 566 bp, Manihot esculenta
  Intron number 1 from transcript cassava4.1_014170m (locus cassava4.1_014170m.g) derived from phytozome v7.0 (chr-ID scaffold09761; pos 754427 to 754992)
ggccactcctaaagacacccctgctcttcgtgcaggttgttatctataaattctatccaagaatatatatatatatatatattttaagttttcgcttttgggttactctagtatttaggacatctttggttttattgtgaatttgggtatgaaaaagaaatgcaattactggattgggtttgcattttcttgtttggcatgcaagaaaccttaaatatttgtgagatttttatgtttgtgtatttgaattatatttttaacaataattggaatttaggtagaaatgggatctaactgttaagtgcaatttctacttttagcattgagtatttgaattatatttaattgtctcagataaaatttatacgagattttttgaataggatgtccagagtacatctattccaattactttgtcatgtgtgaaccaaacatctccttgatattacagaaaaattaagtagggggctgagaagattatacactacagaggaatctataaggtacttaatttatgttcttttatcatactctaatgatatttgaaatttagtttcttgcaggaa

SEQ ID NO: 43121 - DNA, 562 bp, Manihot esculenta
  Intron number 1 from transcript cassava4.1_000654m (locus cassava4.1_000654m.g) derived from phytozome v7.0 (chr-ID scaffold06914; pos 1498880 to 1499441)
cccttcgccaatcggtcgtgaagcagaggtaattgctttatgatccatcatctatgtaattttttaaatcagtgatgttttatatggattgttaattgattatttagtggttttaattggaaattgttcttcattttctgatatttagctttattgatgtgtgtttagacgagaaggaaaatgaattattttgggttgtcaaaatcgttggttagtttgcttctatatctcgttttgacttacaaaatgaatcgtttggatgtgaagtttgatagtttggccttcaattttgtatgattcaggaggaatctaatgtaatttactgtattaagtttgaaaagttccctataatataagcatatttaagttaatttattagaaaaatttgttagtttgatgtatgccaaaattgatcacatgaatgcttgttttattagtgagggagttgattactggtttgcacttagctgtaccttcaatgccaaaatttatttgtttttggcttacatactgatcttagtatatatatatttttaattgcagtgcccatcaattttgtgaa

SEQ ID NO: 43122 - DNA, 481 bp, Manihot esculenta
  Intron number 4 from transcript cassava4.1_007033m (locus cassava4.1_007033m.g) derived from phytozome v7.0 (chr-ID scaffold00080; pos 547771 to 548251)
cttccagcttgcccggacgaacaaccgaggaggtaaatgttcttctttcattccttggtttgaattttcattttttggcccttgcttgagcaaactgtttctttgcacctattcatggaatttaaacaataaaagctgtaaaaccttttcatccaatagcaggatttgtgttttttatccgttcctttccacaatcgggctttacattccatagacgatgaattgcaaacctattttttctgcaacttgaattaacgttttccttttgctcttcatttttccaatttacctaatgtttgctcggtggttgttttcttacttatgattaaatttttaaattgaagatacagctacttaagtgtatactccctagtactatacccatctcaagttaagcttttattctcttcttgctctgtcttacaatttttgtttcctctgaacagggttgctaactgctgtgcataaggactacttcagg

SEQ ID NO: 43123 - DNA, 697 bp, Manihot esculenta
  Intron number 2 from transcript cassava4.1_032619m (locus cassava4.1_032619m.g) derived from phytozome v7.0 (chr-ID scaffold00926; pos 119153 to 119849 reverse strand)
tactaggtatacattgctcactttctttcttatgttccttcccctccaaagaaaaaaaagaagaataaaggggcaaatgtaaaccaactgaagtagtagaaggatgaattttgatatgaaactggaatcactgatcatgtcatactagtgattatcaaatttatgatttatggtaaatttgtttcaggatgatgagaatagtatctttcatatccaatttataaattctagtgggatgctcaattttaagaagacaagtaatctcacttcgtgaaaggggtctttggcttatttaccttttgggatgttgatgagcagtggctttgtccaacttgttatgaattgtatattgacagattaaaacattctaactactgatgaactagactttaacagtagtattagtatattagagatgttttttagtttctgcactctactaactcgaatgggttttggtctcctttcgatattgggaagtacaatctaaaggagtaaaagtggtcaaaagctgaaacaagggttatctttcaattcgtttattacagaataatgccgtttaatttaactacatacaacaatgtgttgctttgtctttacttcgctatgtatttccttgctagttctattcctagagattttcaagattgatgaatgaaaccatatattctggtcttgccttgtaggggtgaaggga

SEQ ID NO: 43124 - DNA, 529 bp, Manihot esculenta
  Intron number 1 from transcript cassava4.1_032619m (locus cassava4.1_032619m.g) derived from phytozome v7.0 (chr-ID scaffold00926; pos 119952 to 120480 reverse strand)
tagtaccgtttctctttccacgcctcctcgggctggtaatttgctgctctcctctttgattggagtttcatttgtgggttctcaactgggattttctattgtagttgaattgtttgtttgtttgatccacattactacgaacttatgggttttggtaatttggcattatttgcttcccggagtcgcgtttgagatttgttatttgatgtgtctggtgttagtatagatgtaagctatcgataattgatttattgtatgggccattatacgtttaaaccattctagtttaatttatgttcttctgggattgcttagtagaaaattggatggtctgttttcagggcctggatatttgagatacaaatgacatttaaattgatgcttgcttgttttagatggcctgtttctcgagtaattttgtattcttattgttcaatttgccttctctatatatatgtttcaattttctcctcatgagcatgttttgtgacttgaggttaggtactgccagtcataaggtttctgagcc

SEQ ID NO: 43125 - DNA, 371 bp, Manihot esculenta
  Intron number 1 from transcript cassava4.1_017649m (locus cassava4.1_017658m.g) derived from phytozome v7.0 (chr-ID scaffold04151; pos 397740 to 398110)
cgcgccaccgctctctctcgaagggtttgatcgaggtaaggaccgactcgccgtttatctttcgactggtattgactgagttctttctctctcctagggttttcatcagttctatttcttgttcctcattttactatactttattttgttaacttcttagagaattaaagataagatatacctgtagtgaaatacttagatatcagagtttgaattcttttgctcttgttttgcagttataattatttgaatttttttacttaattttgttttaactgtgattagatgctatatttctgataccctgttatttcttctccatttttttttctaaaagtttctggccttttgacattggcataggtattagc

SEQ ID NO: 43126 - DNA, 579 bp, Manihot esculenta
  Intron number 1 from transcript cassava4.1_006130m (locus cassava4.1_006130m.g) derived from phytozome v7.0 (chr-ID scaffold04300; pos 151354 to 151932)
ttagagtctgtttattgaagtttctgtttatagaggtatagtgaagcaacaagtctctctaatctcttgctctgtctctgtcttttatttttaaacaagtttgcattctcttatgtgggtttcgattattttgattaattcttctcaaagttttaagcttttcggttgttgtattcttgtttgagtttgtattgactgaacgggttttggttatttttaacaattttttttgttcaaattgcgattacctgagaagggaagagtattgaagcattaagatttcttcgtatataatggttctctttccgcaagttttttccttttcttctgctccacaagtaatatcttaattctcagtttcttttggtgttggctgttttctttccttctttctttttctttttctttttctttttttaaatcttgacttttggaaccccgagtatttcttggtctttgcatgaggagaaagcatagagatctaactatctagggttgtgtacttcttgaacaatggagttgtacagaaattaattggtggtttttggtagaaaaacagtaatattcttaaaacagtaa

SEQ ID NO: 43127 - DNA, 755 bp, Manihot esculenta
  Intron number 3 from transcript cassava4.1_011728m (locus cassava4.1_011728m.g) derived from phytozome v7.0 (chr-ID scaffold06550; pos 756473 to 757227 reverse strand)
ggctcgtgccttggttcgcacaaccattgccagatgtacttgtctgatttattctttcttccttgtttctttttctgtatgctaatttttgttcttaagttgcatagagaccaagagcggatcaattctgtgaccttactgatatatgccaacttagatgtttttagttgtggatacttgatttgaagtgcatattttctgcttcatgcttcatctgttaatcaacaagtcactgattcgatcatagtgtgaagcattgatgtcaagatggtatctgttagacagacctgaaagcacataatttgcaacttatcatagtcaacagccattagttatccttcaatgtaaactttttgttggataggcattgctgatcccaattggcaattgcattcctacactactctggctcatgcaactttgattaccttgacactatgcttcgagttgcaagatttaccaaaggataagctaaatggaatgcttcaagtctttcaatatatggttatgatgactatgtgcttatataaagtgctttatgttttacaatgagtagggatatcaaatataagttctttacaagactccaattacacttttatttatgttgaaactatagtctatccattttcagtatcattagacattgttctcctcagtatgatctgtttacttttaatgttaggaagttttgtatgcaaaggttatatgggtttttgaacaatatgtttccttactagatcagataaattgcc

SEQ ID NO: 43128 - DNA, 777 bp, Manihot esculenta
  Intron number 2 from transcript cassava4.1_011022m (locus cassava4.1_011022m.g) derived from phytozome v7.0 (chr-ID scaffold01895; pos 154797 to 155573)
atctgcaattgctatcagaatctaaaatacacccagtttttcatgtttctcaactgaaaaaaacaattggccaacacccggttttaactgaggtaagggattgtaaatgatggaagaaaattatgaacccgaggctatccttaagaatcacattcaatctgatcaaggccaagccatacagcaactcttagttaaatgtaagaacagaacttgtgaggatgcttcttggatgaactatttcgattttgttcatcaattttctgatttcagccttaaggacaaggctgtttctcatggggacggtattgtcagagatcaaattatgaacccaaacccaaaagtcattccactaaagggtctattacatgaaacgatttagaaacaacaagacaagggatggggaatttgatgaagaagaacacttggcagaatattagaaatcagttaccgggaatcggacaggaggacagctggcggggttatgtataaataagtatagtgagaggagagagatatgcaatgtattttcttcttcttcttcctgcttaggctgggctaaccttgttagtcgggaggtactcctggaattgagttcttcattaatagaaaactcaatacaaatatttttcccatttgtgtctctagcagccattaattaagttcctaactctatcaccttattaagaaaatgcatggtctgcagttttttcttttgtactgtaaagccattaagttaacctcatctaaaacgcttgggtgtcttttatttcttcaggg

SEQ ID NO: 43129 - DNA, 666 bp, Manihot esculenta
  Intron number 1 from transcript cassava4.1_020652m (locus cassava4.1_020652m.g) derived from phytozome v7.0 (chr-ID scaffold08316; pos 110620 to 111285)
gattttgggttaagaggacattgttctcataatcaaaatccacacatccataaagattgagctaaataaagtgtagattgagccaagtgtcttcctacaaatgattgattaactcctaaaaagcaaagcaatgattaacaagtaaaaatatcttctaaatccaagcaaaggctttccaaatgtctccacttcatagtgtggtagctacctacaaagtttctcaagaaacttcctaatacccaaaagttacttgctactaattaagcttttgacatcaaattgaaattaaatttgttgcatccaaatccaccactaagggtggagttttcctatttatagtgcttatttttaggaataaattaattaaataattcctaaatctcatcaatttttgaatgtgatagcttggccatcccacttaatcttgtcccattttagtggacatcccatatatattttcattaaaattattttaaaaaaaaatctcataaggtgtgccaatgccattcctctctatataaaacaggttaatccctctccttcctccctaatctcttccacaaaaaaaaaaaaaaaaatactctaaagcttacaaacaggttattgttcacaggaagaattaagcagatgggtgttgtgaggctaaggcttgccctagtcctcctt

SEQ ID NO: 43130 - DNA, 583 bp, Manihot esculenta
  Intron number 1 from transcript cassava4.1_020725m (locus cassava4.1_020725m.g) derived from phytozome v7.0 (chr-ID scaffold08316; pos 605228 to 605810 reverse strand)
taactcggtgaatcggaatcgagtttaattttcaggtattggaattcattggattgggatattttgttcgtgttagggttttgtgcagttgtgtttttcctctaattgaaaagttcaggtcatatataactttcatacatgtaattgtaagctattcctctcttaaacagccgagattcatctcctatatagctattattcatgattttgattatctatttgttcattgattgaaaatttacaacttttttctcatacgaatgagatctcaatgttatgcaaattgcactactaaatgctttatcatgaaccaccaattatattggaatagtaattttcttttagcaagtgtcttcggactttttggatggttcatggttgtgtcagttgactgtaaatgacatcactttaagcttgcaagtcataacgtgtgcggtgctggggtttagagtccagagccattaaccagtacctatgtaatgaattcatttccagatggctttttcaagtaagatggcattgaccttattttgttgttcgtggttgtatagatcaccccttaaattgatctgaactgatctca

SEQ ID NO: 43131 - DNA, 995 bp, Manihot esculenta
  Intron number 1 from transcript cassava4.1_020900m (locus cassava4.1_020900m.g) derived from phytozome v7.0 (chr-ID scaffold03614; pos 3150440 to 3151434)
ccattttaaaggttagtgttcgcattttccgctacctttacgtttatttctgtgtaatggttactcgtgcttgctatttgtgcagtcacttaatgtgcttatttctaatgtgaagtgctaatcgtgcgctttgtttgtttggaaaatgcaataagattgtgtagtgtctaggtgaatatatttaaatgattggtgtcagtctagttagtgttgaagtgtttggtggatcagggagctgaattttgttgaatttgaaaggaatttatagcaaagaggctcagtttgggattagcatttagttgtctcaacatagctaaatgatgaaaaggataggtatagaaaacccactaatttgacattaaggcttagttgttgttgtcgtcattgaaaagcttgtgtttgcttagagcaagtggaggatgagaaatgggtatagaaacttagctttattgagcttctgtacgtaactcagttaagatggtatgctatggatgttattctcgttgttaaacttttttgttgagaaaaaagttggggacggagaagggtggaaaaattgaatatattctcattgttattttcttagaagtgatctgagttgatttaaataggttcctggaaagtgttgtgtgaaagttttagcttaggtgggcatctgaacttaattcagagttttgatatttcattaagtccttgcaaatcaaatggagtctgacttgctggaagcttggaaacatttacattgatattattagtatccttgttgtccaaaatttacacacattgatatttaactctgagttattagtcattacttgcataattatttaagatctattttggtgtgatgctgtgggagccatgaatttcgaaagctaatatcattgttcatgggcattggattggcagctgaatttatgattatgcatttcttgtctattttggcatggccttttgcagcttcgttcattgtcaagtcctagtgaaattgcaca

SEQ ID NO: 43132 - DNA, 1040 bp, Manihot esculenta
  Intron number 3 from transcript cassava4.1_022166m (locus cassava4.1_022166m.g) derived from phytozome v7.0 (chr-ID scaffold06914; pos 1397125 to 1398164 reverse strand)
tgtggtgcaggacagaaaagcctgtttggaactcagtgagtacttctaccaaaaatattttttgtggtcgctaaaactgatcagttcacttattttccactttctttccatatccactagattgattaaggcatgttatcatgtgatattgttaaatagcaatttggtcggcacatactgcattctgcattcagcattcacattaactgtgcttcagctccagcattaaattttaatttatatatattcaatttgatggtgtagttttgaggcttgaaaatgtttttgccatttaaccacattttttgggacactaatagaaggagtgctactttgacccaaaaagtcaggattagaaaaagcatctagctattcaatttatactataattccatgaaaagattatcagaaagtggatgttagcctgtaaagagattgtattgcattttgaataacattcctattgattgaagaagagaaactgctgtgactagaaatgtgtccagcaacccaagctaatcttgttactgattttccattttctaaaaacttagaaggcaggcaatgcacagctctttgacctcaggggaacaacagttagcataagtttgctaacgttttgtatctgataggcattatgtgacattaatgctgatgtataatttcatagttgttgaagtgaactagtaatcttttagccacattatgttcagtggtttacgctgctcctaccttggctcattttttcaaatctaagttctgttaaaatcactttataatcttgatgaattaaaaattaatttcacgttttcttgatggttttttctttatggcatgagaaagatatttttttcaaaatttgtctttccattcaatctcttaacttctcctttagtgtgttaatcagcaaccttttcgaagatacaagtaatgtattgtcaatgaattaataaactgcggagattttagtgattgtgttgcatgtttgaaagtagctctcttatttcttgcacaggagaagaagcttcttttggaaaaga

SEQ ID NO: 43133 - DNA, 771 bp, Manihot esculenta
  Intron number 1 from transcript cassava4.1_029628m (locus cassava4.1_029628m.g) derived from phytozome v7.0 (chr-ID scaffold10173; pos 562356 to 563126)
acgccacccaactgcaccgtgctttcaaaggttttcttttttctttttttcctgtgactgttttttgattaattgctcaattttttcaatttcattgcgtattatgggttgatcttgattatcaattaattattagagcttgagctttctcgaattgtttattcgtaacaatttctttgtgtttcagtttcaatgtcgttttctctatctttctttccccttattcaaagtaaaagaattatttaggccctgttgttaaataatgttttcttgctgctaactggacaaactgccaaattatcaacctttttgaatttgtgtattctggaaattcttaaagggggagggatgacagaaactaattgtgggaatcccacaaaggaggatttttgagatttatataagctagcatgaaattatatttcttttgttaagtgaaaaatggatctaaagttatttaacccactttagccgggtcgatatataaatcacaaaatgtgctagtggactcgcaaagggctccaccttgtccatggagccatccgagatattagtcaaccacaaccacgataccataaactatggaataaccttttctaaaatatttggggagaagaatggttctttgagcaatctgtagagtgtagacttgtatctaagtgcatttctgggcttaaacagataatttttaaatagttcaagaatataatgcaaggaaaaaagttgctgataatacagatctttaatttacattaattgaacaggaatcgg

SEQ ID NO: 43134 - DNA, 811 bp, Manihot esculenta
  Intron number 1 from transcript cassava4.1_000931m (locus cassava4.1_000931m.g) derived from phytozome v7.0 (chr-ID scaffold06711; pos 95462 to 96272)
aggtagtgttttctagatttatattataccaattaacctgaggagcaatgctagtatttgacttgggagttgggaacctgaaacattgattctgtcgtcttggattggatttttctcttttcctatgtaatgatttgctttggatatgccctgtacttttctatctttgattttgtcctattggacaatttcttggttctatagtctcattccttccaaatcttttgtcaaccaggctactgtttgtgttatctgaaatccagttcagacatatgatgtgctataactgtcaaaaacagttctaaataatgtttttaaagttattgattgggttgctgatgattgttatggatgattagtgctgggtgtgggttatacataaatcacatggttataatcttcatagtatcccttttactgcttctatgtggataatttgtgactatgctccagttatttcatatgtgtactttgggcttttagaacatggtattattcataattcattcagcaaagcgagccatatagtctatactaagacttctaaaaaacctttagtcctctttttataatatctagttacacctctacttcaagaaattgtgatggttgttgatgctaatttaatttgaattttaatataaatattattgtcatattgtcagttctatttgggaagtggttaatgactacatgcttgtgatatggtcctcatttggacagcaactggtataatttgtaacattgcctttgagtggtgtatatactagaaccaacattctttaatttaatacattttcaggtgcttgtg

SEQ ID NO: 43135 - DNA, 840 bp, Manihot esculenta
  Intron number 5 from transcript cassava4.1_018029m (locus cassava4.1_018029m.g) derived from phytozome v7.0 (chr-ID scaffold04233; pos 353507 to 354346)
aaggaccacttgaagctctgcgcccaaaattgcaggtacctttgctttcttgtggtgatgattcctaaataaacatattttttctgtatttgaatggaaaaatcagagcttgacgtcggagcgagggagttaggggggcactccgtcccccaactagaaaaaaaatagtaacctcttataaattgcatcctttttaggctttgtgtagaaaaattatttgcaagaaaaaaaaattaaaatgaattcaactgcaattatggatgattcatatttcttttaaaataatttttttaagtttaaactcataataaaaaataaatatttcaatccattaaaataacaaatcacaattatttaggtttacgtgtatactcttaaaagctcaagatctcaaaactcaagacttcaaaactaactcaagtcatagaatttgggagaattttgttgtcgccacatatttgcagtatttttctctatacagttactcaatttcttctctcttttctctcatccattctatattattatctttaataaaatttgaagttaataaaatactaaagttaacatcaagagtaaagaattaggaagataatttctcaaaagctagaagttactatttcaactcccattgaaagggaaaaaatatggaaaaagaaagaaaaaaggtaaccccctacagcagtttatctgtgcttatgcattcttgataagcatagtgccgaaatttcaaaaatagcctaggcttgaactcgaccattatacaacgtgtgtgatggcctaacatgtttttggggcgttgcagccctctccacagcaccaagtgcggtcaaggcgctc

SEQ ID NO: 43136 - DNA, 577 bp, Manihot esculenta
  Intron number 1 from transcript cassava4.1_007681m (locus cassava4.1_007681m.g) derived from phytozome v7.0 (chr-ID scaffold07012; pos 898909 to 899485)
tcaaggatcaaggaagctgtggtgtgttaatcttacttttttaattttaatctttttaatttttttagtattgaggctgtgtgttagctaaataaaaatgtatgagcattctgaataaccaatttcaaactttgatggtttttcttgtcatcttagcaagtacccattagtattgtttctctttcctttttttaaaaaaaaaacgaaggaatttaggaatcacctgcagttacagcattccacgagccatcttattagaccttgtgtcttgttttaggcactgaatgtttgttttttctatgatgcatgagatcttgtgtcttgttttaggcatttgatgattgttttatctatgaaacatgcatctctttgcaattttattcttgtaatctttaataacttcataattttagttctgaattttgccaaaattctgttcttcaaattttggatttctcagttaaaagaatctataattgtagttactcatctgtttctattaggtctatgctcgggaataaacaagttattgtattttgcaggtgcttgttgggctttctcagctacaggagctatt

SEQ ID NO: 43137 - DNA, 965 bp, Manihot esculenta
  Intron number 1 from transcript cassava4.1_006643m (locus cassava4.1_006643m.g) derived from phytozome v7.0 (chr-ID scaffold10173; pos 526644 to 527608 reverse strand)
atcctgatttgaaactcactgttctaggtattttttttctttctaattctattcaattttggcttcaaatgaagttaatttttggtttctgaatccgttttattcttcatggatgctacattttctttttctttttaaaaaataagttttatcaagtctcaagggcattgaactcctcactaaaagttagctaaaatgaaaaaggatgctccttttgtattttggaagttcaattcagcaggttaagcctgtaaagttgtagtattgaaggttcatcgttgttgggctcagttttgtgggaggtgcctaagctaattctcagttgatcaacttggtttattattactgattagagcttaggttttccttctcgcactgtggtcctgcagaaaggatttgcctttgtagttaatggtagcagtacagcattgttcaggcattttggaaactgaattcttttgggttcatagttgaatcaaattgctttgttctattttgtgatgttgaatgataacacccaaaaggcaactttttggatgacttggaaattgcagaatgatgacaatctcaatagggatttttagtttttcctagtcctatagttgaatctgtaaagaaatttaaacaaaattttatgtgtagttagacttcgaatgatatgaatattggacataatttcccacttgtgttctggtgcccacatatttcatgcttgagaaaaagaatcttagacatgtctatttgaactcttacaatttgattactccccttcctttcttgttgtcaagctgcttgtgtgtttcatttgaaaaaatttgcatcagctatggttagttttttgaatttttgaagggtatgtgatcccagtgtctatctaactatcttatctggtgggtcacattgaccattttgaatgcatgattttgctgattctgattgttgtttctttgtaggtctttggttac

SEQ ID NO: 43138 - DNA, 762 bp, Manihot esculenta
  Intron number 1 from transcript cassava4.1_030765m (locus cassava4.1_030765m.g) derived from phytozome v7.0 (chr-ID scaffold07012; pos 1043732 to 1044493 reverse strand)
gcagcacaaggagttggaatccagagtacgagctggtcagtcgagcagattactaaaacactatacatcagttttgcgattgcttaatcgatctgatattaccttgtttttaactattttattgttatttcttcaacttctgcgatcaattagttagattagggtttattggtcgtcaatttgcgtataatgattcggtttagttttgcgttttattggaatttttggtctgtatatgaaaaggttccaagtcttgttcgtgtatgctaattcgattagtgaggaatttagggttctcaatttggcagttgcaattccgaatatattgtcatttacgaggaaagaaaaaaaagtcgcgacttcatgggatggtagctcaattaaagttcatcactcttgtaattttaatgtttcaataaaaataaggagctgaaatgcttcctgttaggatattctctgtaggcaccttagttaatttttttttttttttttactttttatccttgattgattcattaggaaccattatttgattgtgcattctgttcttgtttctggactgtcacaacaatgaaatgatggtttctttacttgtttctgttcattacatatgtcaaaagactgtgaatgggctacctgatcttatttcattgctttgggagctgatagtcttggactgatggtaaagtttttatgtggtattgagttggatatcatgttcttgcagtgagggacaatttgagatctgctaagaaagaattc

SEQ ID NO: 43139 - DNA, 625 bp, Manihot esculenta
  Intron number 1 from transcript cassava4.1_004653m (locus cassava4.1_004676m.g) derived from phytozome v7.0 (chr-ID scaffold06656; pos 585750 to 586374)
ggtatctatctcttgctacttttagctgggttttctctccctgcttctcaactctgactagggttttggatgggctatttgtagtcctgaaatcaatgttcttttgtttgtttatttgactgcttctactggaaccttttgcagctttgtttgaactttatctttctgagtatcttttgtcttgaaggtgcttgttttcttgtaattttggtcccttcaatttcacttcttgtaggctgatagcaattcaatttctgtgatctttgaaacatattctggaacctggggattttagttacagcattattgggtttagataatttctttataatttgatgggaattgagcttttgaaggactatcttgacctcactgtgaatcgttaagtttcttgtatcctaagttcacactttgtggtatcagttgaagcttgtttatgaagttgtttttataataatttttagataagctcttcttttgatttatttttccttttgtacttttcccttctttgatcatttttagcaattaggatatcttgtgggtgattaattttgaaatttacttttggttgtttcttgaatttatagactgttactggtagctcaaacacaattttgaagga

SEQ ID NO: 43140 - DNA, 649 bp, Manihot esculenta
  Intron number 1 from transcript cassava4.1_001718m (locus cassava4.1_001718m.g) derived from phytozome v7.0 (chr-ID scaffold03718; pos 186474 to 187122)
atcgatatttgcgattctgttaattcaaatatttggtaaagcttttttttactttttcttatcatttgcaaacctcttgctgttccttttggatttgactttttatgtttttgtgtttttatttataatttcattatttgctatattatcttatcatatggttacagataaaaataggcgagttgccatctgtgtgtttatgttgttcttcttgatatgtatgttcgcaaaattgcagggttgtagtgttgatttaatttattctgatgaattaaattcgaatttcatttttttttttaagtttcttctttatccagtctaagaaattaggaaacctagaagggagaagaaatctcttgcataagttttgaactttttcatggttaacaagtttccccaagctttattgtaaagactgcttatattgaagggagaggatcgattaaacctgtaatagagtttgcgtttatttgaggacagatcacttggtgaatagagccctagtctgctggtggtggtggtggtggatttcaattaaatttctcttattaattattttttgaaaagttgactgccttttaggaacataaaatgagttttgttttgctttgctgattagtagattttggatttcttaggcaagcaaaag

SEQ ID NO: 43141 - DNA, 764 bp, Manihot esculenta
  Intron number 1 from transcript cassava4.1_016739m (locus cassava4.1_016739m.g) derived from phytozome v7.0 (chr-ID scaffold04681; pos 439315 to 440078 reverse strand)
gtggccctggtccccagcgatgttagtattcttatctttttctaatatgtatacatattcttcctctagtgttttttggtgtgaattttgacttcggtggttcctatatttaagaagaacctagttgatatcataaataacaattgatttccgttagatacctagctgttataattcaggtatttggtttaggtcacaatgtgaagcgataacgatgattcaaggttttgatgggttttactaggtgactgtaagaggaaatgactacaatgaattggaagtgatttccctaatagaaatataatggaacagatgttctagatcagctatgcaagtttgctgagtcatccacatgatctatctaccagaagcctagcacccacttgcattaaaaatgttgtgctgcttgaattttaggatttgccctcccacttgggaaagttgcgaacggatgtgtgtagcctgtgtacaagaccatgaaactcttcaattaaaactttagaaaatactgcatcctcaaaattagtggtgcaaaaacctacccaaatttcccttctaatcagaagttctatacatccatgaatcctgaattagtcttaaatggtcatactagaaagcccttgccctgttataaaaatataaggcttacttgttattcatcctgttgttaggctaatatctcttactttcaattaaatttctctttttcactttcatagtgaaccaaaagactgtttcttgtaaaaccgtgtagctattgaagg

SEQ ID NO: 43142 - DNA, 945 bp, Manihot esculenta
  Intron number 1 from transcript cassava4.1_011713m (locus cassava4.1_011713m.g) derived from phytozome v7.0 (chr-ID scaffold06155; pos 212286 to 213230)
gcttccattccttgctcaagggtttgcttttgctctatctgtttttcttttaattcttcgtaggaaatttacttgcacatttctatttgaattttcccctcctttgaagaatttggtagtctgtggtcggttttttatgttaattttcctgggaaatgtatgatctgagaatttgaagccatgtggtgaattgggtattttttaaaattaattttttttaatatttgacctgtctgggtttgaagcagtttcgcttatgtgaaggaactgcggatttgtttctttgttttgtatattttccccctttaggcaagtgcgtgtactgctatactggttttgctttcaatagcaatgatctgcgtttagttttgtgcccctcaaaatgaatggttatcatatatattttcctgggatgaaaacgtatcatgaataattgtaatatacactttgcttaggcgaaatatgtatgatatgtcagagattattgtgatgaatgggtgggtttattgtcaattattaggatgcctacgtattagaggttatttgttatgttgcaatccaggacttgaatgtgaggttgggggacataatctaggcttacagattcaagaaccatacaatctcccatgacctgtaatcgtggaacttagtttatttgccaattattacgtgcacccatcaaattagaatggtataacatatgaccatacaaaagcaaatcctccattatgattcatgagatttgctttagtgcatggtacctccccattatcttttagtgcttgccatttttgcatacaaggtttggcctatgtaaagaaaaatgattactttgatcttacttacaatctgatgctatgtttagaattagtagtgatgctaattaattgacattgcaaatattgtttagaatcttacttttgcttctcgtactttaggtgagga

SEQ ID NO: 43143 - DNA, 895 bp, Manihot esculenta
  Intron number 2 from transcript cassava4.1_013142m (locus cassava4.1_013142m.g) derived from phytozome v7.0 (chr-ID scaffold07012; pos 133842 to 134736)
gggagcctcgagcatttctttatcacaatttcttggttagtctctaaaattgtaattatttttctgtcttaatttgaatttttatctggaatatatttttctcaattaaatcacaacgtgtaatgtatatgagcttttgggcgtttgttgacattgttagccgcatacttgaatcattgcgattaaattgctttacaaaatgttgttttcttttttagattgtgagaagctactcagtttatgtgaaatctggtgatgctctgttccccacacaatataatatcgatggattgacatttcactgctgaggctttcaaagttcttgcaaaataattctataactatagattttttaaattgccttgatatggttgaattagtaggagtggcatatgcttgataacacatttgaagtgttgtacatatgctatttattaactaattatttgggggggaggggggcgcaaaagaccatcagacacctatagttatgctttatgatgcaaatatcacttcctaggatgtagattacattttttaagctttagcataacatccttacaaaaaatcatgcccataattggctgtacactcgcttatttttgtaaataatatgacaatttggagtgtgtcagattaatgatttttatggttcatcttcatgtgacatttaactaattctaccatggtgtatctgttaggatgtagcagtgaacagaaaagcttatacttagttggttttgaggtttaaaaatcttcctttgtagtcttaaaaataaagttcagttatgtatcaaatggagtgcttcttgggcgtgtttgttggatggaagcatgatttagttggtcattaatatcttgaccttggatgatcatgttaacagtcaaaagaaga

SEQ ID NO: 43144 - DNA, 612 bp, Manihot esculenta
  Intron number 1 from transcript cassava4.1_003781m (locus cassava4.1_003781m.g) derived from phytozome v7.0 (chr-ID scaffold07519; pos 820367 to 820978 reverse strand)
agtgtaaagggtcccttgtgggaagagatttccaggtgatttcagtgtttttcttgggattttcattgttgttggtggagatctgagagttttcaaatctttctctcaatttctctttttttttttctccacccttttctggctagtttttcttttagcccttttataatttatacttatgcagacaaattacacttttttctgtgattttgattagaagacagtaccctgttgctttatacccactccatttctctatctcaccatcaattcagcttctgcaagaacagaaatttattttctttaatgcattcttaatatctgagttttttttcattatctcatttctgacttcacctgcctttttacagcaattcagatggaaaagctaatgattcttcgttagatcccatcatttgctgctttaaactttttctttgaatttatctggttgatgttcattctcttaattatggatttatgggttcttgcatgcttattttatgtgccaagaatttgctgaatttaattaaaaaagaagttttttttttcttttcttggaaactggagctttcaggaagctagcagagcttggttataatcgaagtgcca

SEQ ID NO: 43145 - DNA, 918 bp, Manihot esculenta
  Intron number 1 from transcript cassava4.1_005935m (locus cassava4.1_005890m.g) derived from phytozome v7.0 (chr-ID scaffold01284; pos 48887 to 49804 reverse strand)
aattcgttaaaattcctggtaaattaaatgattacactgtatatattcatttacatatgcacacacactaaattgtcagcatttatttctacttttgtaatttccttttttgaaatttaatcaaaattttaattgttttacatttatttctgtttatttcagtaatactaaaatcattaaaaatgtattactttttgcgtaatagatttagaatctgtttatttagctgttgaaaactaatgttaggaatatatttttataatatattactttaaatatattaatttgacagtattaaaattcaatttaaaattcaatttaatattgtattaataaaatggatcaaataatttttttcaaacttcttaaataataatcaaaattattttagatatgttttttattgttaacgaaattttactgtatttaaaattactttggaaaaaaaaaagacgaactttagcaaattctcaagtacgtttgggtcacatacgttcatttaatataaaattgacatatcgttttaaaattatagtaaattttatttaaaatagcttgtatataaatataatttttaattaatttaataaattaattaatttatatgccccaaaaaaaaaagctgtagtggagttaagaaaccacttatcaaaaaagatgttggttggtaagaatcagattctcaatctaagcagacaggactctaatgaactgaaccaacctttattggttagacaatgtattgtgtatacatatatatatatatatatattattttttttttttttcttcttttaaaaaaaaatattgtatatatacttatgtaataaaacccatttaacataatagtaaaataaataataatttcatataacatgacatgtgattgtcatggtgggtcagggattattgccaata

SEQ ID NO: 43146 - DNA, 881 bp, Manihot esculenta
  Intron number 2 from transcript cassava4.1_021394m (locus cassava4.1_021394m.g) derived from phytozome v7.0 (chr-ID scaffold06711; pos 646803 to 647683 reverse strand)
aaacggagatcaccgagcaggactctcttcttctggtatcgacggcgagctaaaccgtttctacattatagatatcatcactctgttctttatcattctcctttaatttgtttagtttatgtttaattcatagtttttcgcatttgttagagctttcagttctaagttaattctgaaaagtgagctcgctttggctaaatattaaatatagccttaatcatgttgttgcttcctttttttttttataaaaaaaaactcctatttaaacaccgcaatggaatgctagttagataaaatttgagctctctctcgtgtctaaattttcaaatagatgaaaatttttggatacagaatactatgttttctcgaatgtgtatttgatgtgaaagtttcagctcaatgccgtttaagactgatctggttagctcattattttatagcaacctgttcacgcgttgaacttcaatctaatgcctgaatatttgttgattgtttgctgacactactaatcccgctactcgacctctgattttctaaataattttttttgcatcctcatggttagagctgctctggtttacgatctcgacatgagttttggtaaaaaaaaaaaaacggtgtctcgtatttccgtaatttcggtgaagcctagagtctttaaagcttcctgaagttatttcataatttctgtgctcataaatttgtttactgtaagctgctttcatttttatgtcaatagatctgtaaaatcttttaaaattaatggtcacttgaaatcgacttagtaatacttccttgttttctctccactcaaacttgatcttctgttgtatgatgtttgaatagacaaggaaccttctccgtattgccatattcaatat

SEQ ID NO: 43147 - DNA, 846 bp, Manihot esculenta
  Intron number 2 from transcript cassava4.1_009170m (locus cassava4.1_009170m.g) derived from phytozome v7.0 (chr-ID scaffold03049; pos 546218 to 547063 reverse strand)
tcttgctccaatctggtttgtaacagaggtaatttggttcattcattatctatcctttgggagacattggtcttgcaaaggagcttgatggggtaaccaatgcttattgctcatagttaccagaaagaaaaagaaaagtcattgccatttgaagcccatggaattaatcttcccaactaagtgcatatgttattttttcttgttatttatgggtttaaagatatagatactttacttcttttggtagtgaggagtcttacagatttaaataaaactccttgatctggaaaatcatggtatttctattgataacttagtattgcaacagatgggaaaggtttccaatcgccaatgatctgcaatttgaaatcatctgatagcccttctgattttgtaaggtttctggggattcaacagtagtttccatcataatctagtgattggtggtgtattgctgactggttatgtgagaatggctgctggattggctaagctgattataatagagaattcttaatagacctgataattcaatgatttgatcatactgtatgagaagtatatgctcctaaataatctgttcaattgtttgcagtgagtcagttgtgctttttatattttaatatgcatgtgtcatatgtgattggagaagcggcaacctgatctgggtttgatgtcttaaatgtagtgtgaatcctctttggctgtctttcttttttacttcagtttcatagttttctttgagatggcattcatcaaggtcgcctttttaaacatgttgtataattattttagttactttgaaatgcagtatctttcaaactccgctttagcaaatacaagtgt

SEQ ID NO: 43148 - DNA, 360 bp, Manihot esculenta
  Intron number 1 from transcript cassava4.1_009170m (locus cassava4.1_009170m.g) derived from phytozome v7.0 (chr-ID scaffold03049; pos 547397 to 547756 reverse strand)
ggttgcttctgcggaggtcactcaggtaattggctttaatcgcgtcttctctcttttctatctttgattcttcttattctgtttgtttgccaagagggcaggaaaaacgagagggcatttgctaaattattcttattttgtattctcattgatgggaacaagaacaatttaatcttgaattcacatgtccttgttctttttcttctgcattcttttcagttctcatgtttcttttcttttatcagtgacaactctgggatttgttctgtgattgttatatatctactaattataaatatggaatttcatttcttgttttctacagaacatctttgaaacgtataaacagccatttgcact

SEQ ID NO: 43149 - DNA, 625 bp, Manihot esculenta
  Intron number 1 from transcript cassava4.1_031244m (locus cassava4.1_031244m.g) derived from phytozome v7.0 (chr-ID scaffold00247; pos 129666 to 130290 reverse strand)
aagaggataaagaaattgataatagtaagagaaggtaggttttttatttatgaggaggatgttttcgttcatttcttgtgattaaaatatgaaaaatatttttattatccttttttaaataaaaattaaaaattaagattttctctattttcctttctctattcaaatttaaacatttcaattctttattttttaacgtgaaataacacttaaatctccattaacttttatccagattattatattcaactaaaatttaactctttttgttcttcaatttcccttcattaaaattctccggcacttgataattttaaaattttaataaaaatacttacaatttcagtcatttttaaaatgtgtgatgaatcagttctgcattcttaaaccacaggtttaaaattttccctgtactgccacctgtgtccatcaattaccatgtataagatgtatatcacatgtaatggttaactgcacaaaatcattccatccatagttctgttggtcaacagatcaaagggtggataaacattatgatcaaaatacttcattatgatcaaaatctattaattgccactaattatgggtttttatccttttccatttcttttacagccttgtaaag

SEQ ID NO: 43150 - DNA, 865 bp, Manihot esculenta
  Intron number 2 from transcript cassava4.1_008310m (locus cassava4.1_008310m.g) derived from phytozome v7.0 (chr-ID scaffold11110; pos 226517 to 227381)
agcagttgccttacctggttggcaacatcgttgaggtaaatttagtaatttattgatttcttctttgaatgttaatgctgaaaataaatacatatgtagaaataaaccgttaaatgtgatagtggcttcaatttgttctgaatgttttgttttgttttgttcttgtggtgtttaagaacactaagctaagttgaattgcatttttaacggtccaaaaggactgatgtgaccaatccctgcagttcgtttctgaactctttaggttgctttatcttagtataaaatttgaagagagggagagaccctattttttcatgtgcacaagcgtgtacgagaatagcgtctggaactaattaaatataaaatgtagcataacatagaaagctcacaataacacaataatttcagaacctatttttgctagacttttgacttaagggcataaagtcaatgtattagaagataattgcccagagtatcgtttaacccttttgtttgaatagaaaaaatttgtttgtttattcactttttaagcttattaatgtttgtagaggatattgggtttatgtttcccaagagagtacaaagttttgtttaactgactgacatgtgtgaaacaaaatgtctctctgcaatagcctttttcgctgctgcttaactagtcataaacatggatcttagtatagataatttaggggtgtgtgccttattcgtcttttcgcacctcctgaaaaatgaaaaagcaagctagttcctaaccttttaggctttaaggaaggccatgtaattggttgttctgaattgaatttctagtggcttttgggctctaactccatatattgtggtctatatgtagattttggaa

SEQ ID NO: 43151 - DNA, 887 bp, Manihot esculenta
  Intron number 1 from transcript cassava4.1_011250m (locus cassava4.1_009974m.g) derived from phytozome v7.0 (chr-ID scaffold02994; pos 308192 to 309078)
caaagcttcgagaacaggtcgctaagcaacaacaggtaccctctaaaattctaaccctaaattcagatccattcagatccaagtttttcatttttttgtttatcatctccatttcgttgatggcttctaattttttttctcctttagtttctcatttgtggaagtttttgtgatatctttgttgtttttctggcttagatagcctccaatcctgaaaaagaaataattctaataatagaaaccaagggcttgattggtttgttcaaatttgttcagcaaacattaaggcattgggttgatttaggagaattgaagctatgtttataatgtatgatgtatttagttttggactggattagttacctagttttccagtttctagaaattgcctttatgctatctgtggtcctctacataaatcttatagaaacatgattaggctattcaattgacttcagacttttggacatatccttaaaaaggatttggttttaagttacaaaagagtttatctatgctttgcttatttctgggatttttttaaaaaaaatttctggtgtgaatctaataattatgcttatacggttatactcaatccaccagttattgttctctgcctgcaattgctgctttttgaattctgggttttatttgttcatcataggttcgattcaatccatgaatctggagctcaatgtcttttgtctactcaatttcccattatcatgagttcatatgtctaccatttttcttgcatgactaaatcctttgtattcttgtcttcatgaatagcctttttgttttgtatttagttcagaactttgaggtgttttaattaacttggatgttacttcaggctgttctcaaacagtttggggctggtggat

SEQ ID NO: 43152 - DNA, 418 bp, Manihot esculenta
  Intron number 1 from transcript cassava4.1_026725m (locus cassava4.1_026725m.g) derived from phytozome v7.0 (chr-ID scaffold12078; pos 22564 to 22981 reverse strand)
attgggaattcatttcacacatccaaaatattaaagttgatggacaaacaattcaaaaggagggccggtatctactggatcatgaagcttcggtaagttggtcctttttctctccaatgcaaattgaacttacatgagaaaatcttcactctatgattctatttacacagatcagtgaaggataatttttgaagtgctggatgtgtttcttccaaaatgagcaatgtattacttttgagttcgtaagtatccttttgtcattatttctttacaatcaagatcaatatacagagtaccaattttttctattatttttcttttttataattgagaatttatttgctttatgatgaaattttaaccctgttttcccacatatacaggctcatcaagctaaaggaatcatttatttgttttt

SEQ ID NO: 43153 - DNA, 794 bp, Manihot esculenta
  Intron number 2 from transcript cassava4.1_004356m (locus cassava4.1_004356m.g) derived from phytozome v7.0 (chr-ID scaffold00926; pos 106735 to 107528 reverse strand)
tcgtaaattatcattgcctcctccactaagctcttttatatatatatttttaattatttttgtcttctaaaaggtctaatctagaagcccattacttgtggaggaaaaagttcaaattttctcttgaaatgaatctttctgtcctatcatgaggttcatattcaaaatctctatcttaatagacagcttacacttgtttggaccatgtattggattacctacttcaaggtggtcaattggtttctttatttttggttgtgggaccctccaggaattgctagtttcatttattggccatcagcttgaatcaatataatttatttgctgcaaaaatttgttctccacaagcttaagattcacattaggcccacaagaccaatagctttcctgcatcattttgcactattcttagggaacttaagccattgtagcggttcaattagttgaaaatgagttgcaactgattgaagtggactcttatttttttgcactaatcatcaataataacaacaaatcatggttaatatatagataccatatatttccttttttctttttttttctgtttttttcctttgtcttccaaacccatatgtccttgaatcatcatcaacaacaactgggttactttaatatgcttattcaaaaagaaaacaacaaacgggtcacaatttaataggatgattttctttccacatgatggaaaaagtacatattgggtttgaatttttttatgctattcttctttctactaaaagcaaagattaattaacatggaattttctctgcaggga

SEQ ID NO: 43154 - DNA, 524 bp, Manihot esculenta
  Intron number 1 from transcript cassava4.1_004356m (locus cassava4.1_004356m.g) derived from phytozome v7.0 (chr-ID scaffold00926; pos 107742 to 108265 reverse strand)
gaaagcttgtgcctttctagttggtaaataatcaaacatcttttcttctcttgtcaatcttgaagtttgcattcattttctaattatcttctttcttgcaagctaaactttctgttcttttttttttttctgggtacttaagtcctcattaattggttatgtttcatgagagaatctctctttaatcacaatgattaattattctacagaatatatactgagtagatgttttcaagattgaacctaagcttcagtatcttctctttgaatttcttccccaattctccccttatcttttttgcttttactgctctctgtgtataaaaaaactacaagtgtgtctgcatgatgatgtaaatttaagctgaagactagagcaaatctggaagaaagttgttagcttttaacaatatattctttcaagtgatcggatcaaaataatggtatattttatgtaatcaagaacttgaaaaagaagtctacgtttgtttagttgcttatataaaagtaaaattgaacagggt

SEQ ID NO: 43155 - DNA, 910 bp, Manihot esculenta
  Intron number 1 from transcript cassava4.1_020076m (locus cassava4.1_020076m.g) derived from phytozome v7.0 (chr-ID scaffold09570; pos 39652 to 40561)
actaggcctaacaggtattttcaatttccatacttgggttccttgaaattttccattttgcctttaaatcgatcaactcttcgtggtaattcttgaattgtatgcttggttttggacagtgattttttttaggtgcgtgtggtaaagctcatagtattgcaggattaagtaatgcaaatgctatgtttggaagttggtagttaggtaaaatcaatgcattgctcatttggtcttgaattttgcaatgcctcaactaatttcttgtttatttttgacaattggagagttcagaatcatttggcaagtttcatgatataaggtgcatgggtttgtgattttcctcaatgttagtgcaagcaaaacagccaaattgttcttgaaaatagtacttctcaaattggttatgtgcttgatacaaatctttggccttggtgccttttcccaacctgtcattacaatcctgaaggggctggttcaatttattagcagtttgattgttacgtagttaaattaacagtgttggaacttggaaccaaatgttattgctgattaaatttcagataatttctgggcacttgttatataagcgacacaaaaagtatttacaacagatcaagaaggaagaataacaagtcggaaacacacatatatgtcagctgctagccagccattgttgatttgattaactaagctaactgaactaactaatctttaaattgtagttgtaatttttaactgttaagctgaagttccatgaggtatcattgagatttctgcaaagacttgttgacaggctgtgtgaatgtttcattgcaaattgaattgtaattctattccctcatacctgtcatcctctttttctgcgctttcttcattggtcattgttgctaattttcccatttgcagacat

SEQ ID NO: 43156 - DNA, 426 bp, Manihot esculenta
  Intron number 2 from transcript cassava4.1_010328m (locus cassava4.1_010328m.g) derived from phytozome v7.0 (chr-ID scaffold03961; pos 17242 to 17667 reverse strand)
gattggggagggtctatctaccctttcttgcctgggtgagctctctgttctatctcttaaatttattgaaaatgacacttgtggacaataattaatatagagatagatttctttcaaactcaaaaatgaagggtagatcggtaatttttgtggttctgattttgtcataaggcaaatcataccatacaaagacccaactgtcacatggtgcatgttgtggtggaactacaactaatttatcattttaaattaaaccttcaaaattaaagaaattagaaaaaaaaaaaattctttagagaggttaatttaaaaaaaaattaaaaaattattgattgtcgaaataaagtgtctgaatcagaaagaaacagccaagaaatttaatttaatttaatttaatttgtttatattattcatgcatgtacagtc

SEQ ID NO: 43157 - DNA, 613 bp, Manihot esculenta
  Intron number 1 from transcript cassava4.1_031102m (locus cassava4.1_031102m.g) derived from phytozome v7.0 (chr-ID scaffold02906; pos 240743 to 241355 reverse strand)
tcttcatacgtgtcagtctttctatctttctcttaagaatttcatttgtttcaatcttttttctttacttccaaaactttcatactttcgattcatcttgtattttgcgtcgttgattatctgggtgggttagtttcttctttcaagcgttttctttatcttgatttggtttggtttgtctgtactttgacgtggtcgtttcgtaattctactgtggaactatgggcatttagtacttgccggctaaccggcatctttgttttcacctcttacttacattctagacgctggaaggccagaaagctaaagaatagtaaacaagctttcccgtttcattctttgcttgctgggattaaaagtcatgcaacagtttcttttctcttctttttctttatttcccccaatggaatatatacgggttctttttatgaatgagatattcactggatggttgctagttggttgcaacttaatgcttactgagttcagatattaaagtctaaactgcataagtttcagtgctctttcttcaattttgtgtttgattaaatgagaagctataaaatgtctgatttcagtttcttttcttgaaatttcgttcagtctgcaggaa

SEQ ID NO: 43158 - DNA, 937 bp, Manihot esculenta
  Intron number 1 from transcript cassava4.1_018909m (locus cassava4.1_018909m.g) derived from phytozome v7.0 (chr-ID scaffold03614; pos 1352321 to 1353257 reverse strand)
atatctggacctatatcaagcatcataacttgcaggtcttccacttaatctcattctctagttttttttatttatttttatttatttattttgtgttaaacctttgtattacatttgatttacccattagggttttagcacctatgtatattaacgtgtttgttagaccctggctttatttttttcgcctctagggttttagcatctacgcgtgattttcttatttcaaagatcaaattttcattcttttgccatacatttgtaaaaacgattgagaagatgattaaaaatactcgactgaaaaataaataatcggacaaaattgaaaagaagctgaaatcaacatctcaaatactttcagcattctgtttgctaccagaaaaggaagtttatttctgcagttccttttttctgctgtgttgggattttgtttatgatgttcagcttagattttatccatgctttctggaaggctagaagtggggaaatttcgtgggtgagaattgggccgatgctgtttaaggtcttccaatttattatctctcatattttttatccattgccattcatttgaaacacaaaaatttgacctcaaagcgtatggaccgttgagcttggtgtaattggaacccattaaatcgtacaatagggattgttcacttacagggatgagtatgggccgttgtaagtatagctttatgtgttgcatgatttgaattttctacatgggctaaggaggtttaggcatttatttttttaaaaaatataaattgtattcactgttcagctatacccactgatcttttgggttatcaaattagtggatttattagactggggagctgttattgataaatgttgatactgtgatgccatgtataactatgtggatgcttttacatgcagaaccctgctgataagaaggagatcttttgtg

SEQ ID NO: 43159 - DNA, 675 bp, Manihot esculenta
  Intron number 2 from transcript cassava4.1_020277m (locus cassava4.1_020277m.g) derived from phytozome v7.0 (chr-ID scaffold08316; pos 608779 to 609453 reverse strand)
caaagctactcccaaagaatcgtcttctcactgaagtaagtttaattagggttttctatggtgcttttgactcttccttaataggttatggttttcattatttatttgaattttgcggttgattagggaatgctgatcttttacatgagtttttgtgttatttgagttttctttcttcatttttttggggaggttggggtggaggtggggtgttgattgttcttaattgcaatctaattagatcaaagtgaagagagaaggggaaaaaatctgggttttggtttttggtacttaattccatctttcagaagaatgaatgtagggttaaaaattaatatttgggggaaaaatcaattcatattgcgtatgaactggaactaagatatgaatggagaacaataaataatgtgattcaggagaacatggaaaagttattgaatgtggaattttaggagtatgggttttcattttatcatcctccctgtcattctgttactctacatttggttttgaatcacatgttcacattgagtgaattcaaggtgttttataggcagtgttccttgataatttcaaggtgtttctttgcactgtgtgtatggtgttcataagcatttaagtgttgaaatacttagaaattttgtttttagtggttgtggtatttgttcatgcaga

SEQ ID NO: 43160 - DNA, 1037 bp, Manihot esculenta
  Intron number 1 from transcript cassava4.1_018808m (locus cassava4.1_018808m.g) derived from phytozome v7.0 (chr-ID scaffold03614; pos 468712 to 469748)
actggtgaagtttacatctatactaattccttcttctcctttgagaattacaatcatgttagatgcaaatacagaaaactgtatttcattttccatttaaaaaaaaaaattagtagtttatttttataaaaataatataaaacaataatacagaaaagtaatgtttttttttttaaatggaattggatataaaaaaatagaatatgagatcttttatatttatttagatgtatttatcacaggattaaggtttgagtgtaaacaatcatgtttgaaattaaaataaataaaaaatgctaataactttcatcattaataataaattattttaaataaaatatttaattttataattttttactcttactaatttattttataatagtataattaattttaaatatttttaaaaacacttatttaattttagtgataaaaaagttataatatttttgtaatacaagagttatagtttttcatttttagaacaattagaaaataaaagctttattataaataaaaaatagtgggaaatattttagcgttattttctaaatcttagttaaatgtttaaaaaaactataaaactggaaaaatgacacgtgtagccataaaattccattttctaattttcttaaaaaaatatttcagaaaattggttcattttttttttttggcgagtggacatggcatcaaggttttggtttgattttgatcaattttagaaggtgtctattcagatttcagattttggtctgatttaaaaatttttaaaaataaataaataaatagtatatatatatatatatactctttccaaaaattaataaaactctcgaaattttcttaaagaaaatgacttgtgaatttatcattggaatataatatactctttttaattttttttttataaatgaagttttcattgatgcattatcaaaattaatgaaaaagattaagtattaatttgtttattaaattgctgactttgattgaaccaagggaaaccgatcgctcaacttcggcgtctacaagaa

SEQ ID NO: 43161 - DNA, 889 bp, Manihot esculenta
  Intron number 3 from transcript cassava4.1_034244m (locus cassava4.1_034244m.g) derived from phytozome v7.0 (chr-ID scaffold04379; pos 2685 to 3573)
gcttcccttctgaggtctgccgatttttccctcattaatttttttaaatattgtgcctctgcatttgtgctttctttatatctttctgcatatgatttaaatttctaaactttaataatcaatatttgctttttatggcataggagcatcatattttaaaagtattctctattagattatagtgcttgtatctttttatttggcataaacatactgcacatgatctttatgacttatagtaaagaggtgtcaccgaaattaccttacacagttatatcaattgtcatttgcaatttctgatatcccgaattggagcattatggaagctctcttcatgaaaacttcttattgacaaaatagttaagataaattcctgtgaatacagtgatggagacagcaataactaagtcttatcacaaagtagttggggttgctaagctatagggatcctattatgtcattgtgaatacaatgacatacttttagcatttctcatgtctgtattgtactttattgagagcgtgtgtttattgcatgtgttgctcattcaaacatcatgaaacaatagcagattttgatggcttaattttatccatggtctttgaacttacaatcaagttcagcctactcactaaacttcaatttttatcaacagtttatatctcaagaaattcactaatgctagttttaggtagaattttagtcaaaaccttaacatgataatccagtaaaaattttccaatatatttctacaaattaaaccataagcaacatggtaataaacaactttgagtcatattaagtctatcttttaaatcagacttgaaatttatacattttgttcattctagcaggttttcagtcatttcttgtttggtttcccacctta

SEQ ID NO: 43162 - DNA, 818 bp, Manihot esculenta
  Intron number 2 from transcript cassava4.1_020457m (locus cassava4.1_020463m.g) derived from phytozome v7.0 (chr-ID scaffold03614; pos 4021557 to 4022374 reverse strand)
ccacttttgccctctgtggtttcgtccgagctcaggttattgttcttgctttatcttttcatccttacaagaattaattttggtttcgaggtttttcgattttttgttttgctttgcattgctactctaaggtatagcctagtttctggatgttgttgtgtcattattggtgagcactttggatagatttactagtttaattttaactatgactacattaattttgatgtctggaaaaggattgcttgcattatgcaaatagattgggtcttcttagaatgtcgggttccaatctatttagagaagggtagattacattggtcagtcattgtgtatgaacagtaggtgtttgtgcctgacgagatatctcactggtgtaattgtattatgtgcctgatatgcagacttttgaattacacttgtttatattgatgaataatttgtcttttcattgtatttattatggtgatccaacacttaattgtacttgagcttgagaaatcatgttttatagtataggatatttggatttgttgccatttaagtattatgctatgatctgcactgttgtgcatgatacaatgtttggcacagatctagcttttgattgtcatgtttttgttttatcactacccttttggatattatgttggttgccactgatattgttaatgttggttttattttattttattttattttatttttttcttattaatgcagtcataggcttcaagtttctaatcttagttactggatttttgtgctaaacttgcatgctgatcatggggattttggttgtgcaacattacagggtg

SEQ ID NO: 43163 - DNA, 674 bp, Manihot esculenta
  Intron number 1 from transcript cassava4.1_011290m (locus cassava4.1_011290m.g) derived from phytozome v7.0 (chr-ID scaffold01551; pos 1602272 to 1602945)
gaagagaacttgagattttgttttgctctcaataggtatatatgtccatacatttctattattatcatactctaagtaactctcgtctggcttgactatattcttacacaatccaataggggagtctcatatagaagttggaagccacaagctaaagtctgatctttctccttgttccttcttcattggtttcatctcatttccttcgttttgctcctgtagtgtagattcaccatcacttcttaccattcactgtttttttttccttttgccccttaattacccttttccctctaggacggttcagctcttagttagtggcggttttgttggtagatatgtgttcctttattttgacaaacttgaagaaataatccagcagacaatataatgaagagaaacatcgttatggtttttatttatgcgagacaagtccataatctttcggctgatcctgttaagtaagtaaaaaagatagtaagagtcaaagccctggtcatgaaaaagatagacaagcttcaataaagaaatgttaaaaccaagtgctttattgatgaaaaaaaaaaagaaaagacttcaccacctctatatgtcatttcaaatatttaatcaatcttttttttttgttttttattgcagcattttgcacacaggagctactcaatatcaggaaa

SEQ ID NO: 43164 - DNA, 700 bp, Manihot esculenta
  Intron number 2 from transcript cassava4.1_019121m (locus cassava4.1_019121m.g) derived from phytozome v7.0 (chr-ID scaffold11668; pos 40683 to 41382)
gctctactcctccggtatcccctttctctggtgtttgtcctcgatctatagaatgacaattaagtccctggtctttttaccaaatgcctaaaatgccctctcctaagaaactggagctaggtgtatctagaaatgtctacagtcagttttgtcattttgggctgcttggcaattgggtaatgacaattaggtaaattattgctttgctgctttggaatttggatagtgacattttagctaggtcgtcgttgacgtgcacttatgctttgtctatgcatgggttttggccggctcaggataaccataccccttttaaaccaagtatggttacttgaattgttaattaatttttttttaattattttttgaaaaaagaaaagatttaaccctgttgaaactatatgataatatgaaattatctagatcaaattacttttgagagtcaattagttggtttatcccagtcttctgtagtttggtacaaatgtaatccatggtgttcaatggatgagatgacaacttatgatgctaatttttttttagtcttaggtactataatctcgacctaaattgatgaaacttgttacaaattgtaaccttgtttaagatgatttactcgtcatatagctgatgagcttttcttttggtgtttataaaaaaaaaaggaggcagagagtcatttcggtttcgaagaagatcg

SEQ ID NO: 43165 - DNA, 697 bp, Manihot esculenta
  Intron number 1 from transcript cassava4.1_004289m (locus cassava4.1_004289m.g) derived from phytozome v7.0 (chr-ID scaffold01127; pos 372917 to 373613)
agttcgttattgacctccttctccgatcgattcaggttcttaattttcttgtcattttgcaatttatttcaacaagttctatgccgattgagaaactttggtattactcctgtcacttaataatatccttatttaattcttcattgattttctctcatctgttggctacgttttcgttttgatttcaaatctagggtttatttttccttttctccatttttttaaaaaaatattttgagctgtgtatgggtttatatcttgattgagctattaattttattggaattgacatgctgcagttaattgttcgctttctatgtaactgtttgctctatgtttatatatatattctgacaattcattggatttagattaatttggttcgtgacagcggagaaattgccctcaattgagaagctaattaaacgctttaattgtcaattcgtttattttcttctttgtttgtaaaatgtgtagagttatctttttctttttatcattgttgttgttgtttttgttattattgttattaatattattattattattattctggttttcaccgtaaatggttgctatttacgatcatgataggcctatttgatgactaatcattcctaatatatgtgtatattttcccccctccagttatttactctaaaatatgttggttttggacagtctaagctcacttgac

SEQ ID NO: 43166 - DNA, 700 bp, Manihot esculenta
  Intron number 2 from transcript cassava4.1_004289m (locus cassava4.1_004289m.g) derived from phytozome v7.0 (chr-ID scaffold01127; pos 373938 to 374637)
cattcattctacttaatctttgtcttaaggttagtttgatattttaccaaaggatttattggtttcaagtattataaattcacaattttgtcttcttggcatattgagttgatttactagctttctctcattagttaaggcaagcaacttcagtaaaaaccagatataatttttgccaattcaaacattagaaatcttcccttaaggccctacctatcttgtgttcaattttgacaactggaaacagtagtgatcatttgtaactgtgaacacccctatttcagatgttctgatcttaataagatttcatattttacccgtacaagccctaaaatcaacatacacacaatcgttggctttggctttagtttgctgctatgaaagaagtttcatgttgctgttaacattggtttaggatgtccattccctttcctactcccatcctatgtggaatctataactgatctgtaatttgcacttgagccttagcctatggaaacaggccttaactatcattcctagcctatttgctagagaagcttataaaaaatttcatgtttgcattataatgtggggttccccactttggaattgtcaagatgttgcatttgctatctatgtatctgttcactttgatggttattgtgtttgtattcaatatgcagactatattctttgtggaactttacccttctgaaac

SEQ ID NO: 43167 - DNA, 489 bp, Manihot esculenta
  Intron number 3 from transcript cassava4.1_004289m (locus cassava4.1_004289m.g) derived from phytozome v7.0 (chr-ID scaffold01127; pos 374670 to 375158)
ttatttacaaggtaacatttcttcctgatcgactgagtggaacatatttgattctcattcatagtacattgatgtgctaatttgtttcagtttaatgcattgtgttaataagttcttttgtttggtcaacaataaggatttgttgaacaagcaaaaagtataaatgagaaaccacttaagaggataagctcttcctttaagtgttatttgggcgttccatttctcaaattcttgatcacctagaatggcttttatgccccttattttttcccattgttttggtaccaatttgatgggattggcaacaatgtgggctattggtgttgtcagattttatttttgaagcttaaatcttttatgtttgaaatgctgcttgtctgttgagattctacacctcttctttctgatggtatggttgcggaattccatatttttgttgatgagtgttgaacaggggacatttcttccattggttattccagcaacagt

SEQ ID NO: 43168 - DNA, 655 bp, Manihot esculenta
  Intron number 2 from transcript cassava4.1_009097m (locus cassava4.1_009097m.g) derived from phytozome v7.0 (chr-ID scaffold04681; pos 509279 to 509933)
aggccatcaacgttattgattctgtatgttctttctctctctctctctctgtaccagttttcctcttcttctcgttttagttctaaaaaagggcgttacttcttgtttcattttccttgctgataaacatcggtatcctgtgttttctgtggccttttagcttggaattcgtgggctgaaatatcaataccgtgtgtgtgcatgtatgtgtgtatcgtgtatttattagaggaagataaatacaatagtgaattgaagaaaaggttggatattttgcctctgtaggactgaagtcagggctttcaaacgattcaataagtttgattggatcttgttgatttaatgaagagttttacaaagagaagtgcataatgaatttgaatggggtgaaatgtgggttcatggatgagggtttctgcaaaaaaaaaaagtgtctgatagcactatgttgataatgaggtggagcagaaaataccttttgccttgcagttatagaccatgtctttttctgcacttgtttgtaagccataagacatttgctcttttagctatttgatagaagcaatttttttgtaaattctctcttcctaatttttcaagatgaaatcaggttgttcatttagctgctggtatttctgttttctcttgcagtttt

SEQ ID NO: 43169 - DNA, 508 bp, Manihot esculenta
  Intron number 1 from transcript cassava4.1_021570m (locus cassava4.1_021570m.g) derived from phytozome v7.0 (chr-ID scaffold01551; pos 1651309 to 1651816)
tttggttacgacgttggagtttcaggttattattgttttttttttttgaaatggaggttgttattgttataatcattattattattttcgtttactttgatttttaaagtttttgaggttttaatggaaaagtattgtaaaataaggaagaaagtaactttcctcccgtcagaggggagctccacgatgccgacatggtcttgttgcctttaagattactatataattcctgtgcttatgagaatgacatatgggtagtctcggaatcagaaaaaatatacttggtcagaatatatgagaatccctgacccaaaaaaagctctctgtagctgctcgtttaagtcagaagttgatgaataatttgaatccatattgaagcttgttatgactgttatcgattacacttcaaccaagaaatttaaaaaaaagaaaacctcaaaattgttatttaaagattttatatgaaactaattacttatcgatgtatgatgcagggggagttacgtcg

SEQ ID NO: 43170 - DNA, 734 bp, Manihot esculenta
  Intron number 1 from transcript cassava4.1_018411m (locus cassava4.1_018411m.g) derived from phytozome v7.0 (chr-ID scaffold06512; pos 1745992 to 1746725 reverse strand)
catatccaaaatcgattaaggtttgctttctatttctacattttttcccctttatctgtttccctgtatatttttcaagtattgccttcgacctgctctccgaccctgtccccgccaatagcttactgacttcacagatttatccctgtttctcatgaattttgttgttatctggcaacgcctaattggtggatttgtttggtcttctttaattctaggtatttcttttattttactgtttgttatagttattgtcaatagcattaccgtattcttcaactttgaatcactgtgaatgaaaagaaattacagatacaaatattcattataatttataagagaacgatctgaattctataataggattgtgagtgacttgacgaatcagatcaactaatttcatgaacaagatgaaggtatattttcattttagcatctactgatgttttcaatactaataatctttatgggttcctgtatgatgaagcttatctgaaatacgaagatatgttacaagctaactcatattctatctcctgatagattcaaacatattcacctggtattttcctgtaagtcaatctgtatgttttgtgatgttaataggctgcatattttggtttacatcatgctttaatttagcaacgagtattgtgattagctttgatgggaaatagttgaaattctccttgagctcttctgcttttgatctcgtagtactgctgggtaaaatt

SEQ ID NO: 43171 - DNA, 566 bp, Manihot esculenta
  Intron number 1 from transcript cassava4.1_011503m (locus cassava4.1_011503m.g) derived from phytozome v7.0 (chr-ID scaffold00341; pos 195632 to 196197 reverse strand)
tcaagagagtaagttttctatttttatacttcttcctaagtatggatatcgaagctttcccttaatttactcttcctttgggagtattcgtcgactcgatcgatcttaccgctgattatagacgagaagagaacaaaaagtccttaaataaaaaaataaaaagaagtaaaagtttcaatatctaactctacaaactatactggctcagattgttttgccaatggacgaagttttttatcactaaaccaatgaaataattttctcaccaaacaaagcaaaagaaaaatagaagttcttttgcccagatgtctttcttttctctatcttgtctttcctttttgtaatttctttggccaagttcgatttgggtagacctcctacctcttgctaatgatgattcaaaagttgaattccttaagttgaaacgtgaaattcaatttcgttttctttagaaaaaaccatgatgattaaaaactaaatttttttatatttatttttcccttagtttccctaatctctattatgcattagggagaccaagcatcaataatcggaggtgttgttga

SEQ ID NO: 43172 - DNA, 641 bp, Manihot esculenta
  Intron number 1 from transcript cassava4.1_025772m (locus cassava4.1_025772m.g) derived from phytozome v7.0 (chr-ID scaffold05126; pos 45101 to 45741)
taaattcgaaggagcaatactcaatcaaggtaagctaattactttattattataattatttttcactgtttattttcaaaagatatatttcattaaaattctaaatgtttatgttcacttaaagattctatcaaaaacaaaggactacatcataatttactctaattttttaaattgtagcaaattagaaatgtttggcttttttaattatccaagattttaaaacttttactgtaattgtacaatttgtaatatttagacattttttcctctaataggcattttcaaaatgcatttcctaattatatttttgtgttaaattaaacaaataatagcaaaattaatattatatttcatttttttagccaattgaattgtttgatattatcatataatttgttttcccatttgttatatatgcgataggcttgcctcatctgcaaataattggagcaatgtcttctcttaagaaattatcattgggtagttgtggacttaatgacacagagtttctaaaccaaggtaaaattaatattaatccctctttatttgatatttatttcatctttaagattctggctaaaggttttgcaaatgaatttacaggtgtgtgcaaattaaaacaacttcaagaattagat

SEQ ID NO: 43173 - DNA, 469 bp, Manihot esculenta
  Intron number 1 from transcript cassava4.1_008040m (locus cassava4.1_008040m.g) derived from phytozome v7.0 (chr-ID scaffold07571; pos 69952 to 70420)
ttgaagaaaagaagctcaaattgacctccaatctggtaatctattaccctcatttttctttccattatttcagtttacgctctatttagattataatagaaattctgcgccccctaaacttaatgcaaaccatttgatgtaactgctataatttcccatttgctattaaatggaccaaagtctcaatatttatttctttaagaaaaatgtttgtcttcttttaccgctgtatttgtatttgtcttgtctttactatgcttctgtgtggctataattctttactatgctttgatatgcatctatacatatgtacgtacgacttgacatctaagtttagaaacttttcttttgtcgaaaaactctgtttgaggtgctattttatgagccaaagagagctgaagaactttgttttacttattctcttgtttctgtatttagttgatcacaaaagaagaaggcttagaactat

SEQ ID NO: 43174 - DNA, 759 bp, Manihot esculenta
  Intron number 2 from transcript cassava4.1_016885m (locus cassava4.1_016885m.g) derived from phytozome v7.0 (chr-ID scaffold06891; pos 1289 to 2047)
ggtaaggtatcatttatcgaaagcacaattgtaatttgctatttcaaaaaattatatatggattcattattatggtgatgcagctcattccaagttgttagaagtggaaatgttctttgagtgaattcttattgtcatccaggtttaatgtcacttgaagaatgttatatgttttctgaaattaactattgaaatggatgaaaagaaaaagtaatgaaatgcaattgcagctctttgttgatagatttttctaattgaattctcctgaacaacatttacccagaatttcctttccgtacatcagcagagagaagttttaccaattgcttaacttatattttttttctctccctcaagacgatacattcctttcattgtgctgactacatgaggatttgtgattgtaacaatatgcaaagttcaaacattaacatgattactttcaagagattagacagctctgagtatgtgtttcttttgcatgttaattcttttacttgtaaaactttagcttcgtttagaatgattcatttttataagaaaaaaattgaaatatattattgcaaaatcatgtatgatttcaaatttctaaattaaaaagaatttaatttttaattccagacaagaaaagaaatcaatagaattgaatttttgtaaaattcttgattccaaatgagggtatctgtctcctactcatttgaatcaaaccttgtttgttttgtaggcactctcttattatcccaaaatctcatttctctt

SEQ ID NO: 43175 - DNA, 992 bp, Manihot esculenta
  Intron number 3 from transcript cassava4.1_014241m (locus cassava4.1_014241m.g) derived from phytozome v7.0 (chr-ID scaffold01551; pos 1346625 to 1347616)
gcaagactcttgttacccgtacgcagggtactaaggtttgtatgccttacatctacattttgatatttatcacctccttattttatttggtcgttgaaagaaaaaagaggaaggttgccattgttatattgaatctaagttttgtataattgagtctgctggttaaaattcaacgactatttagtattagtactatttttaccactttggttgttcctagctgtgacgtcaatttgctctgtttgttagatgcttatgtctgctattgaagtagttgaacttgaaattagccatgggtctaatagtggctactctttgtgttagtttattctcggatttatgagagaagtgtggtgatggatgaaattgtttagaatcagctttcttttcatgtctttttttatggctgaattagatttgtgttatggatgatatgtggtgtacgtgttagtttcagtcagtatgagacagattaaatcttcagtgcaaccattatatactttaattttgttttgttgtaaatattgaatttcattgatagtatcaacagaagtttatctaattgttcatggtaaagaacaagtacgatagatataatgttttctgatatactttttgctcaatattgaatttcctttttctgatgtattttcttacaattgcagtgcacattctccttttctgtacctctctccctttttctgtttgcagccctgtttttaacttgttctgtgttatatttttgttatggtgcttttaattgtgtattagcctgccataacgactctttccttatctttcaagtttattctttgtgctacatggtataggtttgtgttcagtgtgtaatgaaatgcactatataattactgcttccatgatatatatatatgtatatatatatatcactaatccacattcttttgtaaacgttacatctcttctggtttctaacagattgcttctgaaggactgaaacatcgtgtgtttga

SEQ ID NO: 43176 - DNA, 611 bp, Manihot esculenta
  Intron number 1 from transcript cassava4.1_032891m (locus cassava4.1_032891m.g) derived from phytozome v7.0 (chr-ID scaffold02949; pos 78628 to 79238 reverse strand)
gctgaccctgtcgtcttggctactgggcaggttagagatcgcatttgctgttcaactttccgtttaatttctggtttcctttttgtttcttttgagggtgtacttattttcttcgttccttccccaagattgcctgtgaaattacatgcataaatttcactttattgggggatttcggttcaagggttttacgtcaaatttggtatgtgatcttctgttgaatattttgccatgcatttaaaacagattttaagaattctgctcacatgaattctggttctgcttcataatttgattttctgggttattgtgatactggagtttattatcataccttcttcctcgcctaattctgcaagaatcaaggttcttgaattaaaatattaatattttagaaaaaaataaattttaaaactattacatattagaaaatttattaaatccctttctgataattctttatgttccatttttctgtccaccttctgataattctttacgcttgaattctttcgatgtgatagctggttccattcttttctatgacttgaagactcattgtgtgttattcatttttgttcttcctcaaatgtgtcttgatgtgcagactt

SEQ ID NO: 43177 - DNA, 477 bp, Manihot esculenta
  Intron number 2 from transcript cassava4.1_011251m (locus cassava4.1_011251m.g) derived from phytozome v7.0 (chr-ID scaffold07762; pos 536717 to 537193 reverse strand)
gagaagtaagtttagatcgtaatactgaaatcttctacataaatgatcaactaagatcttccatttgtaattggctattctagaatgatccttttatgtatatttgatgcttttgttggaaatttttaatgtccctattgtgagtacaactttgtgaagtaaaactatactgctgttgagggaagtagggggattgcattggacttgactatttaagagactctgttcttattatagatttctattgcagggggtggagggacatttattattacctgtgattaacttttcgtacttaaactttactcaaatttatggttattataatatccacatgttgtttcttgctttatagctagcttatactgggactcctaattggtgttgatattccttctatttcttttcttttttggctgatttgggggcggattgttgatgattatagtggagtgtcctctttcaacaaattcatac

SEQ ID NO: 43178 - DNA, 800 bp, Manihot esculenta
  Intron number 1 from transcript cassava4.1_011251m (locus cassava4.1_011251m.g) derived from phytozome v7.0 (chr-ID scaffold07762; pos 537328 to 538127 reverse strand)
cgattcgttgataccgtccttgctgttaccaaagagtgagtccctcctcttcgaaaccttcaggttcatttatatattcacatttgataccttctttaaaaaaaattaaaaattggtggctgtttaattaattattgtttgtaagttcttttgatggtttctgtttgaattgttgaattttttttataattttgttggttttgattttttttttttggaatttaatggtcagggttttatttacttttcattcgctattctggaaataaaattttaagtgctgctgctggttttttgtttggtaatcgtttaattcatgtaattttgaggctccgatcaactgttgtaaggtgttcgatttgcagcctgactgattaattttggggttccgaagaaaatgttttagctatttttcttaaaaaaaatttttattactgggaatttcatttgatagtaggcatttaatttagcttagaaatgaaactttctacagagattggttaactcttagctgaagaatgtggttgagtaatgcagatgaattcttaataaacaatgctgctgtaattataaaaaataaaataaaataaaataaaataaagggttctgaaatctgaattctttaatatttgttaatggtatgttttaatccatattatttccccccttctgagaggggctataagcttggtgttggtagcaagttattggctgttgttagtgcatcttcattagaaaagttttttgttttggcttttagtgcaggtcagtaaagacattcacttacgagtctctgcata

SEQ ID NO: 43179 - DNA, 680 bp, Manihot esculenta
  Intron number 1 from transcript cassava4.1_007057m (locus cassava4.1_007057m.g) derived from phytozome v7.0 (chr-ID scaffold00080; pos 378177 to 378856)
aggagatcttttactgtgagttgtttgatcattgtttgtttttcttcttgtttatagctctcattgcacatttttccatcttgagggattaattggaatagaattacagaaaactatatagcagaaccttttaattaccttatttcagccacagatgaaagaacatacataagaaaatgagaagaaatttgttgggatctgattgagcaaaaatatgaattggcttttgagcattgtctctttactaatgtatttaaactggtgttagcttttcttcccatcaatggcgttatatatcattaatctttgagctattgcgtttgaattttactaggaagctatacacctatttgttcttaaatgcataatccggacatttcagtatctttacctattttagttttatattgctgtttgctttttgtctttctctgtattttattccttggcaagtttctgcatttgttagatgatcaaggttcaaaattgcctaatatctggagtgtatgagtagtaatcattgcccaactcaattatttttggaaaaggtaaaatgagaactgaataaaaccctttattcagatctcatatttctgttagtaggttatgatgttttccccttctttttttttttttttccttcagctagtgggtgtgcttctggtgcttgcactgttcag

SEQ ID NO: 43180 - DNA, 429 bp, Manihot esculenta
  Intron number 2 from transcript cassava4.1_022096m (locus cassava4.1_022096m.g) derived from phytozome v7.0 (chr-ID scaffold09876; pos 130628 to 131056)
ctgtccattatctctgaagaaatagtaaattgtgggtaaggcttcttccttatttgatcaaatcgtcagaccaaaaataagcccttggttctgggaggcctatgacctggttatttctttgcaggaaggtggagaaggctttaaatcatggtacgattttcttttttacctgcatccattttgtgatttgattccaccaaaactgcatagctgttaatgcatctccagatatggttgttcaatgaattgaaccaactcaatcataaacaattcgttcatgagaaattggcaaaatcatcgagcaataaatcgtttctaagtttattcatcagaagcagaaattttgacactcattttgtagctatgcagcacgcactcctgctatatatgcaaagatttttatccataaatgtcctgtgtttcaggcaa

SEQ ID NO: 43181 - DNA, 685 bp, Manihot esculenta
  Intron number 3 from transcript cassava4.1_014854m (locus cassava4.1_014854m.g) derived from phytozome v7.0 (chr-ID scaffold09360; pos 105705 to 106389 reverse strand)
ataaaggcaagcttctgggactccatccgatctgggtaatgtgaactttctatcttatatgcttcatgtgctaggatatagatgtatagttgttgacataaatcacacatttgcaattaaagcttttgtgaccatgttgttgactgttaaacttagaatgtctggttaattttatttctagaagaatgttgatatgcgtgacaagacagaagtgcttctcatggaacacatcaccaagtttgagaagttgcttgccccactttaaattgtcttatgccttagcttagcttaggaatgtatgctgtaactggtaaacttcaattattatatagggcattaaatgatcaaaaaatgttttttttcattgatttgatattttttgtttgttgggctagctaagtagcctatgttatactttatcttgtatctttagttaaacttttcaatcattaactggtgatatattgcaccatataagtgtataattggacccacttattttgcatttgagtcccacacgttttgtttttggtccacggtaaactgatctagggaagaaaatccatattgacaagttctttgattctgtgggcatctgccttatttgtttaattatatttggaagagtttttacagtgcatataccacaggttcttgaaggagaactcaacagaagtcattgaac

SEQ ID NO: 43182 - DNA, 785 bp, Manihot esculenta
  Intron number 2 from transcript cassava4.1_001013m (locus cassava4.1_001013m.g) derived from phytozome v7.0 (chr-ID scaffold00977; pos 191724 to 192508)
aaagaaggcaacttgtactacgtggtttccgccaggtcctttttctattcattcttgtttttttttagttgcctttctatctcatttatcgtggattttattctcaatttctctttgatttctggatgcatgttctaatctatgaatttgtgaattcgtatgttactttctgacttcgcatctgcgtggaaaatctttttccttctttttaatcttagcttcaccgatttggaaatatagcaattaggctgcctgttgtttgcacattgcgttctgactttgtatgcacgtcgtgcctggtaagctttcgtagattcttatgaaaatttcttctatatttgctttaccaatttagagcagctgggcggttgttgccttgtgcgttcctgacattatttcaatttgacttggacgttgttcacattttattgagtttttttttgagaaatcatttttatagaaatcttatgagtcgtggctgattgtgtaaccattactaagtgatgcttctgtaggaactggcttttccaacagtttgatcaacctgcagaacttttttttttttcaaattgtagttttctattacagtagttggtaagtttagctacaactacgcagctgaggcaaaattaactgtgatgaaaccggtgatttgacgcctgatagggactctctatcataatttatatagtttattattattattattattagctttagaattttataatgaacattttatgaactgctatcataatctgctgtctgatcaggtggttcacaaa

SEQ ID NO: 43183 - DNA, 614 bp, Manihot esculenta
  Intron number 1 from transcript cassava4.1_010941m (locus cassava4.1_010941m.g) derived from phytozome v7.0 (chr-ID scaffold06656; pos 435510 to 436123 reverse strand)
ggttgggctgagtttgctgtttcttcatccaacaggcaagacctaattgttccgacatataataattgtaaacataaaaattaacccgttacaaacacatacgtgcatgaaaattgttttcttaattattctatgtatgatgtatctctcctttttgaatctgcattgcatgggaggacatggtcgtcactctaggtaaattatttgaagaatagagaggagttggatcaagtgaaagagaagggtaggtggagtgagtttaaatgtcctgatactatatactgcatcttcttaaatatttctctgatcaaaattaatttcccagcgccccacagtgtcagtggatatttatactttataggttagctgaacttctttattttgttagggtgagattaaaaaaaaaaacattccaccttcatcaattgaaactcagatctagctacgatacatttcaatccaaaaattgaatcaaaatggttgaaatgattacctgtttcttcaacaaaatggtttatgaaggctaagcatacacttcgtatttttccccatctgcaaccgagcagattaaaaattttgtatgatttgataaattagggacaggaaagcctgtg

SEQ ID NO: 43184 - DNA, 960 bp, Manihot esculenta
  Intron number 1 from transcript cassava4.1_033155m (locus cassava4.1_033155m.g) derived from phytozome v7.0 (chr-ID scaffold06711; pos 21164 to 22123)
ctgctcatccaggtactttccaatatttcgcattagctttttgttgtcaatttagtacattttactgtctttcttatttttagcatgttactcaagcaagcaaaaccatggcctcaagaggataggctctgtcttaattgtgtgaccctgattactaaaatgctatatctttttggttgtttgcctttggcttttaagctgattgagtctgacattgtttgtaatacttttttggcttattaaaaaaaaagtcaaaagttaagaggaccagtttttcaatgggtgcttataagtactaagcttacaagctagtttgataaaatactttaccacgactctcatttaattttactgttcacatatttaataccattttagtattttgaaatgcttctgatgtttgactcagtgttgaaggaacagcttcccatgtaaagtttcttttccatttgagaatcagaatgttagtatgtcaacatttaatgtaattgcacaagtaaaatgggtttgattatccatttttttaacatcgcacacacacagagctgggcctttcccattcttgatgatattgtatgatagaaactatccaaaatctttgccattataagtgcaggtccttactcttttttttccccctttatggttttagtaaatgagttttagtagattttcaatgagttagttcattaagactggtttcattcagagcacctagcctttctatctctgggttcagcaaattagtttcagccaggtcagttttcctgaacccagggagtgaaaaagttgtgcatgtaagcttcacggacttccttacgaattgtggttggagattttttttgtattttgtgatttctttatatttttctttcactgttattcttttcaattttattcatcttattctactctctcccttcaggctcggcacagaaaggttggggagaaacattttct

SEQ ID NO: 43185 - DNA, 499 bp, Manihot esculenta
  Intron number 1 from transcript cassava4.1_017284m (locus cassava4.1_017284m.g) derived from phytozome v7.0 (chr-ID scaffold07571; pos 150666 to 151164 reverse strand)
gacgaggtaaggaacttaagccacgggatcaaaaacgaggaagcaatctgtccctagtaatggagttgaaatctatacaaattatcgtattattataaggaggataatatttaaatgatattctggtgagaagataaaaaatagtcgttaattattatatcatatgttcaacaaaaaggttaaattataaaataactcatggcatttggcaaaaatcataaatgagtcctctctttctaatgagtattttagtctctaaatttcagttccctcaatcataatgtcttggcaaaactcgtagcgaggatgtggaaaattacctgttgagtttatcttttttgtccttgaaacgaggatgcacttaggatatacttgcgctgctgtaggctttttggatttgatgtatgtttttacctgttaaggacatataagatcaactcagctgttgatttttccaatgacaggctttggaatttaaggaaaattgcttgtccgggca

SEQ ID NO: 43186 - DNA, 447 bp, Manihot esculenta
  Intron number 1 from transcript cassava4.1_015960m (locus cassava4.1_015960m.g) derived from phytozome v7.0 (chr-ID scaffold12147; pos 81164 to 81610 reverse strand)
agtctccaccgcccccacaaagttttgttataaaggtttcctcatcctctctctgtttcttttttctttgtttttactgggagatcctctctttgtttctcttctccgttgtagtgtataatatcattatcatacaagcgcattgtctctcgcttctactgcttaacttctaattcgttgattttcctgaactctctgatcatgcatttataagcaaatgaagcggagcaagttttgaatctgtaaattatgattcttatataacatcaaatcttttgcttttgatcgtccatttactgtttctttttcatttatgtatttatttttaataaatttttagggggacttcaggtaattactttgctcaagtgatagcttcgagaatgcattccttatagattgggctttcgattaaagggaaataggctgcggcagtaaattttacaa

SEQ ID NO: 43187 - DNA, 594 bp, Manihot esculenta
  Intron number 1 from transcript cassava4.1_026380m (locus cassava4.1_026380m.g) derived from phytozome v7.0 (chr-ID scaffold06859; pos 71291 to 71884)
tcaaaactgctacatcagccttttcaatttggtaagctcatatccaaaatcaccatttttgtatctgtttgcttcagttgctttccagttaaatgacttacaggacaatgtctgtacagtgtcgacgtcacagcttgggattttatgctgtgtctaggcttcctgtctgctaccaggtctggatttactgtctttttgttgttaaccgtctatcacttggccatatgaacttatgaatccagaatagtctaaaagtatatcaaaatggaacataaagtaatcaagaaaactaattcttttcttgtacaactatataaatctaattttatatgagactgagtagtttaataattattaaattaattatttgtttattcgatttaaaaattattgaacgtgttccatgaaagatttgagttcatattagatacacccatttcttaattacatttggcgtagactttaaaaccaaagaccagttagcattaatgccgaacttctatatatatgtgtgttcttcttccgagatcaacatctggtcagtagctaagacatcaaggaagagaggcttcttgctaaatcagaatctagtga

SEQ ID NO: 43188 - DNA, 523 bp, Manihot esculenta
  Intron number 1 from transcript cassava4.1_031056m (locus cassava4.1_031056m.g) derived from phytozome v7.0 (chr-ID scaffold01551; pos 659066 to 659588 reverse strand)
tgaattctgagcgggacatcgaacaagtaagttcttttcccgttttttcccattgttttattcttttccttttggtacccaaagggcattttctggtatagggacaagactaatgcaagggaatggatttgagtctagatcaccccttttataaacttggaagttagagaaataaaagtaatttatttgaaatgcaacaaatttgttgcattcagaaaatggaatcaccatatttcattcttgtaccttacattaccattagcatctggggaagaaggtatcttaatcttgtttgcttgaaaaaaattaaataacctgcttggtataataaagtaggtccatttaggggcacttggattctttattttctccttctgtgaagagtaaaaattttgggatataagaacttcttgtggtttccatttcttttggctatcattgtaatattacttagttttttttttggttcatttccttttcttttgaaggcacttattactttgaaaaaaggcactcagttaat

SEQ ID NO: 43189 - DNA, 940 bp, Manihot esculenta
  Intron number 1 from transcript cassava4.1_010089m (locus cassava4.1_010089m.g) derived from phytozome v7.0 (chr-ID scaffold04260; pos 138274 to 139213)
cttgtgttaagagtggcttagtgaaccaggaaaaagttagttccatttcactttcttcttcagcaagcgaccaattttctatattacttcaatttttttttaaagcattttctcgggcgggtttaggttaatttgtgttgtattttttcgccatgcaaatagcactattggctgcacttactctaagttcttccctgctgatttttctgcaaatacttgaagttcttcctgctgattttttacttttgatagtcatagaaatgtgattattctttcaatttggcgagcagatattttattagcactagaaggaattagatctttccgttctaaccaactaagcagcttaattttgtagcttgatttttatacaagagattttttttttttttggtaatgcagttttgttgtagtctagcctgactctgtaatctatatttattcaggtaattcctgcagattcaaatttagatcatcgttggattagtaatcagcatttgataattaatcgatattttgaactctctgatttttttaataaatttttcctatgtttctttttaaaaaatagctactattgctgtgacttatcgaagtttcatgcggcatataatttttcaaatccctttttaactcttaatcattaagatctgttaatatttgcagttttcacgtctagtttgtccttattgcttttaggatggtccttcaaacacagtaatttgtgatccgaagggagtttggttaaattaggccaatcaactgtttgtgatttgagttgattgttattcacatatttgtcttttatttacagattcaatgtttttgtgtatgtgatgagcttctttgaattttcgaatggttatattttctgaggaagaatatttatgcaatgcttctagcaggttacagagaattctgagtgtttttcttcttcatt

SEQ ID NO: 43190 - DNA, 209 bp, Manihot esculenta
  Intron number 2 from transcript cassava4.1_031782m (locus cassava4.1_031782m.g) derived from phytozome v7.0 (chr-ID scaffold08071; pos 2028 to 2236)
tgcttctcttcgacggccgagaccttcaactccaggttaatccaatatccgtttttcttttcttctttacaaatcatcaattattatttataatgtggtattatatatacatcagctagctactgttttattttcttttgatatgacttggtgggttagcttttaataatgcaggaaaaccacaaggtgacgctccttaccagggaagc

SEQ ID NO: 43191 - DNA, 570 bp, Manihot esculenta
  Intron number 2 from transcript cassava4.1_027838m (locus cassava4.1_027838m.g) derived from phytozome v7.0 (chr-ID scaffold05335; pos 431701 to 432270 reverse strand)
ctaagtggggaaacaggtacgtaaatatatataatattctaagtttttcatatataataagctaaaaaataacataaaaatacgtaaaacaacactaaagtgtttaaactttgctacacttctcttctaatggtggaaagctagggaagagagactcatataatacttggtttctattcatctaagctcgattatttcatcagaatccctatttgtatagctttcgagtggagagagagagaagtagagatgtgtggttggagtttttcctagccatgaaaatggattagcaacacatgggggttttagaaacttatggctagaaaaaaattttgattttgccaatggtgttcttgaatttttcttggctattaaaaatccatgattattcttaatttcttcttttggtttttgaatttaagtttctcatttttctatattttttgttttctcttttctatttcataaattgattataccatgtagtcctaacaggaatctttgttttccctcgaaaaggtgatttctccttttttttatttttctttcttttatttccactctagttag

SEQ ID NO: 43192 - DNA, 816 bp, Manihot esculenta
  Intron number 1 from transcript cassava4.1_015354m (locus cassava4.1_015354m.g) derived from phytozome v7.0 (chr-ID scaffold04151; pos 259103 to 259918)
aattcggagctagacaccaaccatcgtttttcgtcgacaacaccgaagaaagattaaaaaaaatgtcacatcatgaaaaaaaaaaatatgcacccaaaagatgcaaatgattaaaaggaaaaaacagcaaacccagaacaatatacaactaatctaacaattaatcagaccttatgataggtgataataagaactcaaaaaacaaagatcacatctcagaaaacttaatgattaaaattataaaatactctaaaaaaataaaatttacaaaaataaaaaaaataacagcaatataaaaaataaccgtaatatttcatgatttattatttaatcactttagataaaattttaattaggatagtgacaaacttttttctaaaaattatagcgggtggaacttactttatcaaaaaaactctaaaactagataaattttaaaaaacattgtacaccccaatgatttggtagctaataattttagcgtgagtattttaaattttattatcaattgatggtaaatatttatttatcgtggaaattaaaaattgaataatttgtcataagatggggtagatttgcttgttacccagcctggattatttcatagaaactttcctagttgtgcagatttccaaaaacagagctctaaaaaggcaaatccctttgcgctcggtaccttccaaatccacatgtctcttcttgagtaagaaagcggaagttaaaagaccgatgcacccttgttcgctacaaaactctgatttataagtgacgtgccacgcagccagttgaactcagaatatatcccggttctggatc

SEQ ID NO: 43193 - DNA, 461 bp, Manihot esculenta
  Intron number 3 from transcript cassava4.1_015349m (locus cassava4.1_015349m.g) derived from phytozome v7.0 (chr-ID scaffold03049; pos 953259 to 953719 reverse strand)
tgcgctactttcttcatcagcacacgtgaggattttcttttttgttggcaacttgtgatttgtgataatttttcaagtttcatcaattctcattagcttgccctctgtttggtgtcttcttttttttttttatcagaaactatcaaagagttggaattgaattgaattcatttctattgatttaactttgacatgtttggaaatatttaagtgataggaagcggatgccctgctctcttattctttaccctaaatctaatttaaaagcatatgcaacattcttatgtgtttgtaattgtattggtttggtcataattggaactgtctactttgattgaccagtttgcaatatattagtcatttgtcagcatttccttttcttgatacgttgcacttttttcattcatcaattatctttatgtacagaatacagctgggtcagcctgcaactgtcaaggttg

SEQ ID NO: 43194 - DNA, 654 bp, Manihot esculenta
  Intron number 2 from transcript cassava4.1_015882m (locus cassava4.1_015882m.g) derived from phytozome v7.0 (chr-ID scaffold03055; pos 87010 to 87663 reverse strand)
acaagcgtgaacaagttgtttgggtcagtttcaaccactcacaagtttttgtggtttttagaaatgtagcaacatataattttgatccttcagtttggttggttttctctgtgcttacctgttcttcatattgcttccgcgttgcagtttctcagctgctttgggtacttcactttgctgcattaggctatatttggcggtactagttgttctagtagttgttagcctagtgctaggaagagtaacattttatgatccactattaatcgctctatgaagtgttttgaccatatcttaaaagttgttgctgaagaggactttagtttccagtgttgtgcagcatttagcgatttagcaattattaattaatcattcttgagcttcacacacttaacacaggcctttcatgttacacgaacatttttgtgatcatacttggagtatactaacctcagcgtaattatttagtaagttgcttttgtggctggcttcaaaagctatataaaatttaagtgataaacataatgcagatgcatatattgctgattattttattatatttgttgctgtctggagtgagtttttgtgatttaactcttaaccttattttcttcttcagcttcacttaggggtgaatagtggggctttaagatt

SEQ ID NO: 43195 - DNA, 627 bp, Manihot esculenta
  Intron number 1 from transcript cassava4.1_015882m (locus cassava4.1_015882m.g) derived from phytozome v7.0 (chr-ID scaffold03055; pos 87923 to 88549 reverse strand)
aagcacgacgacggcaagcggtcgtgtattccgaggtcactttcctctttctcaagttccctgtgtgcagcttttgtgtttctcttttctttgttggtttctgatattgcttgttttttttttcctttctatttcacttgttttttaatgaagcaagtggaaatcagtctaactctgaactgattctttgagttgtgaagttcacaatcggagttggtttagattactggtatattctgttttaactctgcaactacaaattcaactctttctgatggtcttaggtggtttgttcttgaaaattcgtgtttcccacttgaacatgtgttgtgattttgattttaaagatttcagcttggaatctatgaaataatttagttgaaatgttgtggatttatttgttattagtgtatcttttttattgggaagtagttttgctggtattctttgccaattcataacacctttagctggaaagactgtggtaaatgatgttgtcactggttgaaaaaggaaaaggaaaaggaaaagttatatataatcatggaggtttcctgctttttttgaaaattggatttggtgaattacgcaggcttcatcacctgattgaagataattgggaattgc

SEQ ID NO: 43196 - DNA, 859 bp, Manihot esculenta
  Intron number 1 from transcript cassava4.1_004117m (locus cassava4.1_004117m.g) derived from phytozome v7.0 (chr-ID scaffold06446; pos 276292 to 277150)
tcttaccgttgttgttgtctttgaattcagtataggtaattctcttttggttttctgtttggattgtttgttttcttatctgggtcgttgttaattatgtctgattgtttgtttgaattcagtattgcttgtttgaattctgtctcagctgagggtttataaagatgaaggttgtagactacttgtaatgttatgatacacttgagattctttttattataaacaatgggggagacagattaaattaaatgtgtgtgctctatttgtgtataatctgttctgttttagtttaatacttgatgttcatttgtagatttttgtttaatttatctgtttactggcatattcaaaatgtcttgcttttgagaatcatattaattttctactttatgattgaattccttggtttggatgacagttgaagatgctataagttagaatttataatttctgctgcatgattcttattggtttggcatggccgcaagtatatttggaatgaaatatcagaagaattatttgtgtaaaataaaggattcttagtgtgtactcatagacttttcacatttattttgtcatttcagatatcctaatttgtcggggattcaataaatttcctgggtttgaaatttgaatcctagtatgcagggggattccagttccatctttagttcgtaatcattgcacatgaccaaaccacctttgctaaatttctcagcattgcatttgagtttgtatggtgtagcttttaatgaaggaatggcgtgcaaacttgaaatatttgttctttctgtttgctcaaatgttttgctgtactttttcaggagctactcttagcaaaggacttaatcgagggatt

SEQ ID NO: 43197 - DNA, 716 bp, Manihot esculenta
  Intron number 2 from transcript cassava4.1_027552m (locus cassava4.1_027552m.g) derived from phytozome v7.0 (chr-ID scaffold00080; pos 537797 to 538512)
tatccaatctccgtcagccgtgtctaaagaagtgggtaagtacgctgaaaatacggaggaaattttgaaaaaactccagattttaaattcagaaattgatttattttaatatgtaaaaattgcataataataaagaaagaaggaaaatttagaaaaaaaaaaaattttcaaaagtttgactaattatttacttttaaactaatggaaaaatgggtagatgaattttagatggaatgaaaaatagagaaatttaaatatttgatttaaaaatataaaaattaatttattaattataatatatgtaatttatttttttaataaaggtaaaagatcatgtattgaaatagtaggcgtgaggcccaatacaaatcagtggatccaaagggtccaacttactattgcaggccaggcttctagtaaaaatagtccaacctcacaactacgccatcaaccacacagagaatttagtatttactgggtttaacatcagacgcccttgcgatttgattgtataaaaatttgatgctgtaaaagcatggagatgctgctaactgctcttctgctgatctcctctccatgttttagtaaatgttattaggttgttatcacccgaaatgagctgcaagggataaactgatagttttgttttcattctctttcatggaactgattctttatcacccacagggactgcacaagtacatcacagccttcac

SEQ ID NO: 43198 - DNA, 493 bp, Manihot esculenta
  Intron number 1 from transcript cassava4.1_017722m (locus cassava4.1_017722m.g) derived from phytozome v7.0 (chr-ID scaffold06853; pos 61382 to 61874 reverse strand)
aatcgttcgcgccttcctcgatttcctcgactccggtaatcccccctctctctctgtgtattcttcatatatatgttggtatgacattgttgatcactgtattttgattgtatcctttcttgcaatgatgttagtcgggcattggtttaattcgcctgatatactttattctctaatatttagtgggcactagttaattgtcttctttaacttattgttctcgaggttttgtgatcataattatcaagtattttcttacttcaaagcttaaattcttgaaatttcctgcttaattttgactagggtttgagggtttttttttttttttttaatatctaattgatgtggtatagttctttacgtagtggtttattatttattatgcaagcattgatctttgttttctttctttcttttttattatatttgatgttttttttttcctccatgtgttttagttgagcctgctccaggggttgatcttgaaggtcta

SEQ ID NO: 43199 - DNA, 995 bp, Manihot esculenta
  Intron number 2 from transcript cassava4.1_022485m (locus cassava4.1_022485m.g) derived from phytozome v7.0 (chr-ID scaffold04314; pos 31051 to 32045 reverse strand)
cattcaggtattgtcatctcctaaaactatttgtttctgggttagtacgtgtgtgagtgtcactagagaaggaactaaactatagctgttttttttttattcttatgatgcatatgttaaactggtaaggttttgtgtaattatttcatttcatgaagacacttgtgcttatggagaagtggtttttgtggtattgatgtgctcattttgagtgccactgtaaaaatcgccaatacttttggtagtttattgaacttttaggctttaaatgtgttgcagtagcaaaactgcgtgcggttgaagctataggtagtgttggaaagttatgagttgtataggctgaatctaattgtattgcttgatatttttcgatttaaactctaacatctcttatgaagccttaataagagtggaaatgattgttctgtttggttcctactccgaatgctgtgaagctgtctccctgacttggttgggccttggggcattaaatgctctgcaactgtcacattacctgcataaacttaatttaggactgatctaggatcaccctctgatccgcatgcgtttcgttttataacctttgtaaataataataataaaaatcagatcttcaagtaaaatcgagcaattttacactaaggttggttgcttggttaagttcagtaaacatgttgcaatcctcattcaaaggaattaaactcattttaattttcatgcatacacacatatgctctcatgctctcacatccacccatgttacatttgtcttagaatagtttataattattcaagcatcgttatgtagataactgtctttgtgtgcatgtgtatacactgtcaagtgggctcgcatgatgctcattggtttgaagtttcatttaaattattgtttatgctgtgattgtgcattgttgtattgattttggtgtgctatcattgggattcttttgtgaatagattggttttcaccggctacagtgaatcagttggaa

SEQ ID NO: 43200 - DNA, 838 bp, Manihot esculenta
  Intron number 1 from transcript cassava4.1_011995m (locus cassava4.1_011995m.g) derived from phytozome v7.0 (chr-ID scaffold11668; pos 52582 to 53419 reverse strand)
ctcccattcgcatctgtggtcagcttcccgccctcctcctaatataatagcatgatattgattaatattattgtgcagtagtttgatgttgtatgtgccattgtgccttttattcttatttttgtctaaggatttttggtttgcttgatgtgaaactgaggaagcaaatcatcttagttcggatttttacatggaaatgaatattgatttgcatggttggctattttgagatctcgttgttgcatttaaattctggaagggattgtaattgtggcttggtgttttgtcgggatcaatattctatttgattattgatagggaagactgatgtggaagtaccacttgtggttcttgataatcgtcattgcatattcaattttgcctccccacatttgcatttggctgtgtggagacaatgtgaagaatcaaaacttggtgctggagagtatcctactattgttttgagtcttattctctcttcagagagctgctacaggaataatcaaatccaaaaatttaaggtattggtttgagattttgttggatcaaattgattggctcttactcctttgttgctgtcagagtctgtgttcagccataaatgtagagatccagaatgctaagggaaagcaacgtgtttttctttgaattttaatggccatattgtgttagtttcgtcactgcatgttaataatccatttcctttgttgaataatttagattaataatgctgatttgtataggtgagaagaaagaagaattgtatctattgtttatctccttaatcctcactctgtgcctttatgcttatattgtttgtctgttacaggtgatatac

SEQ ID NO: 43201 - DNA, 897 bp, Manihot esculenta
  Intron number 1 from transcript cassava4.1_010954m (locus cassava4.1_010954m.g) derived from phytozome v7.0 (chr-ID scaffold06711; pos 432378 to 433274)
ccctctcggcaagttaaccatccttgttggtgcaggtccgatacaagtcatcccatctctatttttgcatgcttctattttgtttcttctcttttcatacgatcataattggtcccgaacgatttttttttttaaatttttttgggggttttgttatagagcggagagcattagggctttcgataaagcctaggtttgatttggtacatttattaatgtggttggattcgtgaaggttaggattttgctttaatgtgatctctgggttcaagactaattaccagctaattttgctagctatgtctctgtttttgcacttcttggtaactgttccatttgtgaggatcgctattgaatgcctacacttgtttaaaattgtatggaagtataaatttatgtagacttggaacaaacaaaaatctctaagtggaatttagctcattgaaaagtacgatatagtacttctttcacgtattatttgagatatgcacttttaggcgttttaacggttttatggtctttgttcttgtatttttgttgctgcatactattttccatatttacatgaagctttaatgcactctttttttctgtttaaccggagttgtttttagacatagagggccatgttgggaagttgaaataatattattttcataggagataggaagtggttgagctttgtgggcaatgtgacattatggcctatgtgtttcttcttttttcctttccaatcccatttattttctacttcatctttgtttgttatttttaatttttttttaaattactattgaaattattttcttgtcaaatggaatagttttatggctcactgaattattcatcttatgcctttcaggtattcttggctcagttcttgcaaaagaagggcga

SEQ ID NO: 43202 - DNA, 956 bp, Manihot esculenta
  Intron number 2 from transcript cassava4.1_010954m (locus cassava4.1_010954m.g) derived from phytozome v7.0 (chr-ID scaffold06711; pos 433285 to 434240)
tgactgatttggtttcaggtgcattcaaggtaattgtaggaataaagttattttgagctctttgaattgcataaagtcaaatttcctattagtctttatgcagagtaatattggacttgtttgcaggtttcttaactatttatgggtcatggagttgcatatacatctgtcatagaaaaactttctgcattttgtctcttaattatcttttagctaggaagatacatgtgcttttaggatgaggaagtttggaaattagttgtttgtcataataatcattttttccctcttatttggtgatagagcattctataatccatgctggttctgatattggcttgagacatttcctgagttcagttgtggagagagaatgtgtagttggtttcatattctttataatctaggattctatagcattcatttagtttttctgtatgttataatcttatatccttttccatgatgacatgatcctttcaaccctttgtgcatttaggtttcatagtttgtggtttacgtaggatagataaaaactgatatttgatggacatattgcataaaatatgtagcctataagttctgtttgatgattattccattatcatctttatcttcttaaacattatgatttcattcacttataggctttgtttggtctgtgtaaaatattttcctggagagcattttttggtgtttgtgttctataggaaagttgatggtggaaaaagttttttcctagtggaagcatgaattaagtcattatttgacttctacaaattcatatggaagaaccactaagttcttgtggttgattttgtgttacaactagagaacataatattttgtttgtcgaaaattttattctcccgagtggtttttcacatagatttagaatgttgaatactaatcaatttgtgttttattgcagattgcctttaaacaaattaaacgag

SEQ ID NO: 43203 - DNA, 652 bp, Manihot esculenta
  Intron number 1 from transcript cassava4.1_028198m (locus cassava4.1_028198m.g) derived from phytozome v7.0 (chr-ID scaffold06550; pos 89394 to 90045)
ttcgttattttccggcggtggacattcaagaacctgtgagtccttatcttttcttcatgcattactgcttagtatttactatatgaggattcagaaaccctttttcctcctattttgctgattgtttccaaattagaatttggaatcactgaatttttattacttgtttttcttttcttttttttttgggtctgagagaaaaagtcatgttgatgttttgatttgtggtaatttagcgtaagagcaaagttgtgttgttttctgttttctagtttcgatttaggggaaaaaaacaaaaatgaaagagaaatcaaaactctgtctgcatatatttccttgaaaacatggaatcctaatgacaaagatgtttttttttagttattttcgcctttttttaaaatttttttgagaaaataggagttattcaacttgtatttaaggtaatttggtgggggcaacagtggttaaattaaagctactctgctccctctcttggttaaaaatgtaattatatatgacgtaataaattatctttaataagcttttactgttgtcccaatttaacaatttcgacagatttaacttaaaaaataataaattattggagttactgtttttaatttttgagatttttgaaaattgattttccaga

SEQ ID NO: 43204 - DNA, 807 bp, Manihot esculenta
  Intron number 2 from transcript cassava4.1_021432m (locus cassava4.1_021432m.g) derived from phytozome v7.0 (chr-ID scaffold06631; pos 407414 to 408220)
ttgctttaggactctcaagctcactaccccaagttgtaagttgtaatccaactttgatccataagctttaatctttgattcatacatatactgatttgtttcttgaaatattacacctactcatgggtgcaaatcgaaaaattgcttctgatacgaaaactcataggtctagagatagcaccaatactaatcagttaaagctcattggtaatcatactaagttaaaagcattgtttgacctagaattagacttgaaatatgtgcatctaattttattaatggattcaactcgaaaaatgtttcaaactcaagatcgtttagagatgacttaatattgcttagtttaatctcattgataacttcatggactaaattttttaattttatatgcgctaaattctgaaaaatgagatgaaatgatacgaatctcttatctcttgactactagtattaagtttgagtaatgaatatgaaatacttttaaaatttaggagagagcatttttttccttcacggatcaatccgacaaattcgaatgagtggagctaataaatttcagatgtatcggatggtatataacaagaaaataaaactatcttatgcagtatttgcatgtaaagttgagacatatgcatctaattttattcatgagtctaactcataaacgattcaaatttgagatctcacagatttaatccaattgcaatcatttatttgattaacaaataccaatcttctgaaatctttttgttttttcttctcttttggtcatcagttggagacttgaatcatttgatatcagcaaca

SEQ ID NO: 43205 - DNA, 827 bp, Manihot esculenta
  Intron number 1 from transcript cassava4.1_017796m (locus cassava4.1_017796m.g) derived from phytozome v7.0 (chr-ID scaffold00341; pos 348216 to 349042 reverse strand)
atcggttcgtacattttatactctatttctcgtttatgtacattgattctttgctctgctggaggaaaatatcggaaatatttgttttttggggggcaagagaaaactcgcatagtattaaaatgctctaggaaaaattccaatataattttaagtttttcattaaattttaaaattttaattattattacatagaataaaattttctaaattaatgtgaaataaatttaaaacataagtgaagcatagtaatcttattatcatgactagtcattccattcttaacccatgacaagtccttgaactctgatttctagttgttgatcctgtcatcattcattgtgaaaataagaccatgttctgaggaagtgtaatcgttttgaattttgatgctttccacttgagttttcatgttatgtctcttctcattttgacttggagctggttaacagtttgtgagagttccaacaagctttttgtcaaataattacctgcaagtattctgttcatttcttgtcagtcatagcattgggagtagatggagtgccaaaagaagttttattgtgaagaacagtggactagcgagggcaagttcattaatttttatatggtgcaagttcatatggtattgtgaagtataagttaattgttgaaatttggttaaatctatgttgtgttaattctcatctctattgaggcaatatgaattgatttgttttctatactgtcattatgcagtgagaaatagtttgtgaaaaatattagcatttctgacagtatgttttaattgtgcgctattgcagagtgggatccttggggcgttccag

SEQ ID NO: 43206 - DNA, 1006 bp, Manihot esculenta
  Intron number 1 from transcript cassava4.1_011025m (locus cassava4.1_011025m.g) derived from phytozome v7.0 (chr-ID scaffold06446; pos 535945 to 536950 reverse strand)
tcaaggtcctcctcttgcccccctctctctctctctctgtgtccttcttgctagatggcagacaatgtgggtcttggtagattctataggtttgtgcttgtaaaagagttgaaacacggggataattttgaatgtgattagcataatataggccaacttatgaaattattgtggatttctgtgaatcaaggcctctatatttctgggatatgggctttgtggtttaagagtgtaattctaaaaggaagttgatgcaattcaaaatgttaattcttctttcatatagaagatcgcttcaaggctgataaccttgtttacattcattttgatggctagcttacgattttttagctgctttctggtgtatttatggtttctttacgcttccatccagtggatttaaccttaattggatctaaaatcgttgttttacattggtcaaattttaaaggtaggatttttggatcttttctcattatggttgacaaatgaatggaatggaattagataattttcatgccactaaaatcagaactatctagtgttttccttctttgcatgttaatttgtttagtttttatacttggattgtccatatgggcagattctaaaccatttgttgtatagaatgattagtctttttaaaaaaaaaattgtctcccactatgctacgtttatggggaaaatgaacgagacctgaaattataggattattgtactcaaattgtagaaaattttgtgctttcatttttcactatgtttttttgtcacttacatttgtagttcatatattcttgaaagggagcttctttgtgcttaatttggtgtttttgcattgcattactattcttaagtgtttctcatgtagtaggaaatttacttctggaaaattaaagatcttctcttggtttggcatacgattgtccttatattatgcatgtagaacactgttaatatatttggcattggcatatttttcctttaggctcaacgaggagaggtgtca

SEQ ID NO: 43207 - DNA, 893 bp, Manihot esculenta
  Intron number 1 from transcript cassava4.1_003326m (locus cassava4.1_003326m.g) derived from phytozome v7.0 (chr-ID scaffold12795; pos 21557 to 22449)
aacataacagtagtctttttggtgtttacaggtgaggtttttattttttgtatttatccctctaactatgttatggattttggtcttggatatcttatggtgggtttggttttttcataacaggttttaggtacgattatttattttaatggttgaaacgatcaatttatggagtaactttaacttctcaactgatagttttggatgattatggtgagctgttttagggttctgtaggagaaacaaaggaggagttagtttttgcatcgtttctgaactttattgttgtgtcagagttgggtttccgggcttgctgttgtctgttctgtctcatatccatttttctgtctgtgtccccttctctaactacttccctgtcagagtttgattgttgtgtacttgggtttttcttctcttaccagtcgaaagataggtgtttcttcatttttttttatttggcttcttggactgagctttactctgtgcagcactgaagccaggttccctcgtgcttgtctctcccagttttgtttcccatttgggattaattactagaaggtcatctataaagttctactttggggttggagtttatggtaatcaaatgaggcttcttttttctttaatttttttttttttgtggttcatgactatcttaggagttatgccttttctgcttagttaaactctatgccactggtatttctgcttcttacctctgctacttccgcaaatgtcatgtcttttcaaaaaaccagctgattttagaatatagttggttatctacatgattaagcattagaagaatagtttcagtttgattctcaagttcaactgccaattgaaacccagataatctgttgattacagaggacaaggtgatataaggttca

SEQ ID NO: 43208 - DNA, 896 bp, Manihot esculenta
  Intron number 4 from transcript cassava4.1_011845m (locus cassava4.1_011845m.g) derived from phytozome v7.0 (chr-ID scaffold03614; pos 2611365 to 2612260 reverse strand)
gctgttgcattggcggggttgattttgttaccttggtatgctatatgctttagctaatgtcaattactatgcatcagagccattgggcattgtgatataccttgaaaacatatcaaataaattgctaaatgatatcttaacatatcactgcaatgaaacgttgaatccatgagaccggtaactgaatgcaagaactttggaacatgtaatggatgcagcaggctggtttggattctgtgtttgatccactgctgactttttatgaggggcttgtgggcctgtgtttttcaactcattccttttaacattatgaggagaaacatgttctcagtattaactgattgagattgaaagcacaaaatccagagattgccaagttttagagttcattagttataatttctcactgagcgataaccatggggttcataaaatatatatcttgatcagaagagaagattccataatgtccctgttgcatatacatccatgactcccttccactcctttttctgttggtgttaataactctattatctctgtatgatgaaggtaaagtgtatgtgcagttgtgcaccttgcttggagaagttaaaaggttgtacattttgatttctctcttttttgtacactaattttttttctcagatcatctgcgtttctccatgttgttgcctagttcttgcacataacaatcgtatgttttaatgtaccatatcaccaatgccaaataaataaggaaaagcttccatgtcttgtatatgttatgattctagagccgttccaagatttttagatgttaaaagaaaatttgatatttgaatgtcaaatctttgattctttccttgcatattatgccagatattcacactatcagcagtgccattcaatagaat

SEQ ID NO: 43209 - DNA, 411 bp, Manihot esculenta
  Intron number 1 from transcript cassava4.1_001261m (locus cassava4.1_001261m.g) derived from phytozome v7.0 (chr-ID scaffold07088; pos 306182 to 306592)
ctggaggtttggtactttttttttagttaaatcattgagatctcgtgctgtttttgttgtttacattttggaaataattctattatagaggaagttcgaatgctaagtaattggtgaagatagaacattgcgttattagaaaattttgaatgttcgctttgttttaacagcttcttttaattgatttgaacagagaatttgaattcttctgtctctttttcttcttggagttgtgagaattactttgctagaactgcttgcgtatcatacaaatgtagatcatcacaaattttataatgatgcaattatgtcgatgcttgaaagagatgaagtattacttttgccttattcattttctaatcttggttgcgtatagttcctggaagagttagggtagctgtaagattgcgg

SEQ ID NO: 43210 - DNA, 557 bp, Manihot esculenta
  Intron number 1 from transcript cassava4.1_006476m (locus cassava4.1_006476m.g) derived from phytozome v7.0 (chr-ID scaffold04175; pos 682303 to 682859)
attctaaacgctaatctgtgacgtttctcattgtaagtagccattctccttcgccgtcgacgccttagggtttcttacaaatcgtttgatttcgattttagtattttttttttttctgtttagatccacttcagtaatttgttaaaccatatgctttgattgttaaatcggattcgatgctataatgcttgagatattaaggaagaaggttttgagtttcgaatttcaagttagatgaattagagatcgtctgtttgtaaaggttttttggggattgtataagacgaaagtattcgaatttttaatctagaaaaaaaaaatgaaacttgtgccggttttgaagtctagttttctcgtatttctgattgtctttgtagttttgtggctgcaatgggctatgcacttttcattagggatcatgaaattttacggctatttttttgctatctaatggttacacatatatagcttaccttagtttggaattaatacacattgtatttatttatttattttgtataggcacctattaggggcatttttacattgcacagagc

SEQ ID NO: 43211 - DNA, 336 bp, Manihot esculenta
  Intron number 2 from transcript cassava4.1_016189m (locus cassava4.1_016189m.g) derived from phytozome v7.0 (chr-ID scaffold03049; pos 497152 to 497487 reverse strand)
ttgacccaagtgagcatcacgtcaagacagagcttgtatgtcctctcaatttttaaatttgagaatttgggttttggtgtttaaattgctgctggaaatttcagttagtatttgaattatgaggctcctgatgttccttttgttgccacattacgcatatgtttttgaaatttttcttcgcccttttgtatgtttttctccttcaatgttgctttctctatttgcattaaaagagcttatgattagagattgtatctgtatggctcaccaataatctgatctttgggttttgtatctgtaggataggttgaatttgtatcaagacaagcttgaacg

SEQ ID NO: 43212 - DNA, 973 bp, Manihot esculenta
  Intron number 1 from transcript cassava4.1_017875m (locus cassava4.1_017875m.g) derived from phytozome v7.0 (chr-ID scaffold02815; pos 21316 to 22288)
gatacctgcagcctcctcccgctttcaatccacaggtgtgatttttctgtaaactatatatgcgtatgtgaatttattgttatacatacacagacactttcattgctatcagtagaaccttgggattatggagcccaatactgaaaaatttgctttaatcgagtgaaattttcttctcaacatttctatgcactgccctttttttcttttatctttccttaacttttgtggctgtttgtttaaatctttctactatcaaaatagaggcggttgtcaatttgctgataattcctgcgtgtctctagattttttgcaagattactggacaatttaatcaagtgaatgcccttgacatagacatattttgctttctgaaagtacatttttactcttaaaagtactgcatctggaggtatccgtggttaatacttatgcttgaatttgaaatacatatgtgcaaggtttgaaatacatatgtttttgtctttgtagaaggaaagcataaaagataatatatcctaggtttctgagatataatcgaggtagaagtgaaatttctatggaacatattaaactccacgcttgaatttgaaatggcatcccattttattatgcccaaaggaaagctgacaaaagttggagtttctttatggttgaatgtacattgtcgttgaaagttttagtcccagggaaagttgaaaagatgtaaataattcatgtaagagacaccaataaaggattcataagctgcctcgtcctaattttagacagaggcttaatgagttgaattgagtaattatagctgaatgtgttcttctcaagggaccttggatttgaataatttgtcatgtataaacattgaaggaaatgcagctgctttttcttcttaacatttttttttcactgagaaataaatttgccaaaatttccctgtccaggttcccatcgttcctctgccaagacctactgaaat

SEQ ID NO: 43213 - DNA, 407 bp, Manihot esculenta
  Intron number 1 from transcript cassava4.1_004273m (locus cassava4.1_004273m.g) derived from phytozome v7.0 (chr-ID scaffold09565; pos 559614 to 560020)
agctgcgtgttgcaggtggttgggttcgtgataaggtcagtcagtaattatatgagaaatatcgtcgtttggttttaaattccgtctactgttcaagtaggtgtttttgcttattagaattttggcagaagagccccatcatgtgtttgattaaagtccgtattcacgacatgggagaatttaagggatgagaggatgttgccttgttgggctcttctggccatgtgagttaagcatgttggggcaatcgatgaaaagtttctggtgttaaatactggaaggacatttttttgttattgtaatccggaaacctttttttagctctctaggagttgtatatgataatttatctgtatactctttttgttaatattgtcgttttctcatttgcagcttctaggcaagga

SEQ ID NO: 43214 - DNA, 422 bp, Manihot esculenta
  Intron number 4 from transcript cassava4.1_031187m (locus cassava4.1_031187m.g) derived from phytozome v7.0 (chr-ID scaffold00080; pos 404640 to 405061 reverse strand)
tcttatcctctgtgaggagattgaagatcacaagggcagatttatataactgatgcttttgttcatatcatccttcatgaagtcgcttactcgcttttatttctcagctggggatcatggaaaataattaatagataagctggaagatagtcatgataatgtttgagaatcatagatgtatattcctataaaaagaaatgatagaaaagaaaaaaaaaagtttttgccttttgcttgtagattgctttcttcaattttttgtaattgtattggacgaacttttgcgcatccattctatgagctactgagaatacattcccatttgattttttttttttttttggttatgaaacgtagctaaatattttctagttgtagaagtagatattgcaatgcagaaggaaaaggaaccaagtctttga

SEQ ID NO: 43215 - DNA, 591 bp, Manihot esculenta
  Intron number 1 from transcript cassava4.1_010371m (locus cassava4.1_006626m.g) derived from phytozome v7.0 (chr-ID scaffold04175; pos 112478 to 113068)
tctgctctcagaactcgcagctaactcttttagaggtacctcacctacccactttcactccataatattattgagtcattgatgttctgattcatttcagctattagattcttttctttgttgatggtggacaacggtcaaattgggttgtaacgacttccaggttttgagttttctgggttgtgtaatatttgtattactaattctggattgtttgattttgtagtatttatattaaacgccgaaaagggtagataggatatgcagagattattcatcatttatccattcattgccttttttattgatttgattgttcttcagtctgattctaaaaaaaagttataatcttgaaaatttatactacttattggatatgagctctctccgattctgtgtgatttcagttttagttatttgaggaatttgagtttttgcaattcgatgattgttttatattattgggtcatttgcttatgtttgatagtggtgtgaccatctttatgtttcattgatggcttggttttaatcctttgccttccaatggaattgtcaggttgataactgagttcattttctcaaaaagaaggc

SEQ ID NO: 43216 - DNA, 395 bp, Manihot esculenta
  Intron number 1 from transcript cassava4.1_002122m (locus cassava4.1_002122m.g) derived from phytozome v7.0 (chr-ID scaffold01551; pos 3322735 to 3323129)
catatttttgatcttagtggccgtatcatctattggtgagtttctgatttatttgattttttgcacgtcttgtagttattaatttttgtttgattggttgggaaagagagggtttattatgcgttagaatggcttttcggtattaatgttggatggaagtgtagattgctggattggattatgaattttcttggtataaatgagaaagataaagctttgacttggagttccattgttaattaatgttgaatgagtggtttctggctttaattagaggtcggtttcaatatcattaatgcatcgaatttggtatacttagtttttatccattcttccgtcaaaacaaaagtttactattacccgattctgcaggaaccgaacggctgaaatccttt

SEQ ID NO: 43217 - DNA, 724 bp, Manihot esculenta
  Intron number 1 from transcript cassava4.1_005450m (locus cassava4.1_005450m.g) derived from phytozome v7.0 (chr-ID scaffold01127; pos 426200 to 426923 reverse strand)
tggtggttatacaacctacagttctgcaactgctggtatgccttaaacttttttttccttggccttgtacatatcaatagaacatttccattttaggattaattatcaataaatattgaattaaaagtataaatgaatgagaaaattaatggttttttctttttcaggtcttcaaaaaatgtttttttttcttttttgacataatcaatttgatttagttgggtacatataattatataggtatctatttccaataaaattaaaacaattcttaaatttgtttttgaaaaaaaaaatcagaaatcaaaatagtaatcacatgttattgttatcagttgtgcctttttagcaatgaaagtaactttaaccttaaaataagagcacagaaagggcttttgctcccttttatcaaataataataataatgatataataactttgatggtttgacctcataagtgaccaaagatgtcaagaatagatagacagttataacaaacaagtcctaataaattctcagacgtttcattataaatgcaattaatatactgttatcacgtgaactgatacatgatttcatcccagaagtttttagccaagcttgtgaacatccacaaggatgcttttattattattattattcgtaaatccatatttggtggtgcaaaaccgaaagaaatgaagactccaatatccccataacgtgattaatctgcagggattg

SEQ ID NO: 43218 - DNA, 810 bp, Manihot esculenta
  Intron number 1 from transcript cassava4.1_005945m (locus cassava4.1_005945m.g) derived from phytozome v7.0 (chr-ID scaffold06550; pos 761149 to 761958 reverse strand)
gagcctgaggtccccaggagagctcctagtgccaggtcagttttggaagggaacttgctttgtttttgctttttggtacatttaacaattctggtttcagtttttgtggtgaaattctatgtttgatatggtcactcttcattgtgttttgaattgtttaggaatggggttgaaatagttgaaccaatctttcttacacccctcaaattctgaaattctctagttattgtaattgctttatatcttccttcatcttcataatatattaaagggaacttgtctttattactttcatttgatttacagtttcacttgtttttgttgatgtattttccttttgttggtttgattatgtaataattaaattgataaagtctgttggaattcatatttgaaactttgatttaagtcacctttggagattgagtattgtctttaattgtaaacctttcacaatcatgtgacattgcccaatctctactcatatctttgccagctcatacaggacctgttaattatgtggcttgtatttttggtatattttcttatgagccaaaactctctttttttttatctttttttaacttatacaatttttatattcaaaagaaatgaaaacttgcatgattttataagaattcatttgaattcctttcttgcaaaatgaatcatgccaaacagagggacatgatcaggtgtagagattgtcttttatatctgataatctaacagctcctgaggtatcgtctagtatttgactaattgccttttatctgtagtgcaactgtttttggggtttcaactgaatcc

SEQ ID NO: 43219 - DNA, 781 bp, Manihot esculenta
  Intron number 1 from transcript cassava4.1_004116m (locus cassava4.1_004116m.g) derived from phytozome v7.0 (chr-ID scaffold03614; pos 459702 to 460482)
ccttctcctaaattctccaactccttcactaaccggtactcatctctctctccctctgcacactttatgcataatgattggttttgtcatttgtgttctcttctgtaatgttttgctctgctcaaaatttctcgagagattaagtgatgatgggatttaagtttttttttttttgtaattacgattggctgtttctgagattttgaaccttgaaattaaactcaaataagctaaaatccataggtgatgattcaatcattagtcatgttttcttgttataacatgaagatctgtctgtgttcatttaccgtcgtttgtttttggctttttgctgtgcttggactagaatatcaatcataatggagatctgttaccttgtcgtttaatgttggaggtattcttctaaacgcgaggggttgatcattcctttcgtaattaagccaaaaagaagtaattttttttaaaaataaataaagacgtattttctattgataaattgaaattaaaaaaaaataaaactaaaataaaaaaccaccaccagtcttcactttcaccgcaaacctgagtctctgggtgggtatgggagtagcaatccggaccctgacaggccttcttgtcattactacatggagcaatcctttatattatgattcacggatgtgaacagtttcagttctgtaatttcatactttgatttttccctgtaaacatgtttgcattctggtttgaaaatgctcgtaattgattttgtttttattattttcctgtagaatcttttcag

SEQ ID NO: 43220 - DNA, 464 bp, Manihot esculenta
  Intron number 1 from transcript cassava4.1_029840m (locus cassava4.1_029840m.g) derived from phytozome v7.0 (chr-ID scaffold06914; pos 805128 to 805591)
ttcaagaggtgatttttaatgctctggtcctttttttttcaataattaaatgggtttttgaggcttttaattgtttggtttatttctctatttgattcttatactctactgtttgtagtgatttgttatatgcttttgaaaattgaatgatttcattttgagggagcttaagcttggtgttggtttctggttgtagaaaccaaattcttgttagttttgccctcttaactttgagattactgttttcttttagcggaagaagcaaaatggaggggggaagtatcagattgataaaagtgtagcatatgcaaattttgaatatacccaaaaaaagggaaaaaaaactttctagtgttatttgagccaaatatagggaataagcttctttcttttataatattttgtttcttgatcctgaacactttttttaatgagaaacttattgttttgcaaatgaagcctgg

SEQ ID NO: 43221 - DNA, 993 bp, Manihot esculenta
  Intron number 1 from transcript cassava4.1_002226m (locus cassava4.1_002226m.g) derived from phytozome v7.0 (chr-ID scaffold09501; pos 527977 to 528969 reverse strand)
tgtgcgagcgcctctgtgctgagttcccctctgaggtactgttccccttaaatattccaattttcctttttacttttcttttttgaagaagattttctggtgcattctgtttggccactaagaaatttcaaaaggattttactttctcaaataactgtagacaggtgtattgcacttgttttgtgtcttattcttactgtttatcggcaaaccagaaaatggagcatatttgttagccgataaggtcggcttctgatgcgtttttgataattttagttatttctgccgctaattagtttgaaattttcatttttctattaatcccttttcatttgtagctcaaatatcttagctttagtttaagctccgttttcttagaaatatattgaccataggaactattagaaacactggtcatattcacttgaagtaatggctgtacaggcatgctaaatagcagcattgctagaaagtcaaaatttcaggagtatagttgtcaaattgggattcccatggagaattaaaatcttgtttgtgacttgagaatcagttgaattgtaagataccataaaaattcctcaaattaatttaaatactattcatatgttttttaatgatcctttagaaatatttttaaggagattaatgagagaaaaggaaaattttgaattctttcggtgttttcttgaggtaaagtatttttttaatacatttttaataaattttatttataaatatctaattatttgttttataaatattatagcattactttttgttgattaacaatataaattagcataaattattatatacttaattattagcgtctcgttgtttttgctgaatgattatgttatcttaaggaaagatgcatcttcatacaagaaaacatcactcacttgtttttcttttcattctacctagtttgcctaaccctgtgattaatttttctcatgtgaaactgcagacaaatttacaattgttagctag

SEQ ID NO: 43222 - DNA, 164 bp, Manihot esculenta
  Intron number 1 from transcript cassava4.1_028470m (locus cassava4.1_028470m.g) derived from phytozome v7.0 (chr-ID scaffold10173; pos 687048 to 687211)
gtatcaattcttctccctttctgggttttttgtttttttttttttcaatttatgtttgaattcatattctctgaaaaaggagaatttcttaatgttgttgattcaatttctttatttatataaaaaaagttagagatttgtttgttgatattggcttaggtagg

SEQ ID NO: 43223 - DNA, 512 bp, Manihot esculenta
  Intron number 3 from transcript cassava4.1_019775m (locus cassava4.1_019775m.g) derived from phytozome v7.0 (chr-ID scaffold10173; pos 692672 to 693183)
gaggaagaggtgagatattttcctcccttttatcatttgtttactagtattttgatttttattctttagtttttttaatgtgatcatagcttctagatctctttgccatgtttttaggatgcccaagaaatattttcttgtactgggtttttgtgttaattatgaataatcctcatgcaatgacatttttctactatatgtaataaattgtgggaacttttggtcagcttttttttttaggttattcatggttctctcactcactcactctctctctctctctctctacacacacacacacatacatacatacatcagtttgttttttataaacaaacgtaactagaggttctcaaatttgtggcttgagtaattttttatttcataagataatagactctattaatagtgaatcattgttcttattttatagttcaaatagcactgagttatttcttgtcattggttatctttttatgcttatctgtgataattgcttcagggtagcaaga

SEQ ID NO: 43224 - DNA, 628 bp, Manihot esculenta
  Intron number 4 from transcript cassava4.1_013475m (locus cassava4.1_013475m.g) derived from phytozome v7.0 (chr-ID scaffold03614; pos 1560558 to 1561185 reverse strand)
gtgttggtgattatctttccgttaagggacccaaggtacgtgtctaattgcaagtgaactaacaaattatttgtggtttgcattctttgacctaattcaagttgttttcttcgatgagtgtgcatatgggaacaagaagatggttgataaactttatctagtagtcctgatgattctattgtgtaacccagaattcagattttggtcaatactaccacctgatactttatccgcattttacttccatggctattaactaggatgcagaaacagcgtgtcactttcttttataactttttaagtttatcagatatattatggaagctgttaggattcaatttaacagttacttagaaaaagtcacctactatttttgtcgggtattttgttctaaattagattttgcttttgtatatacatattttatttaactaaataaagccgaatgacaaaaaaatccaattagctgatcccactggcttgggattaaggcttagttgtgcttgttgtttgccgtacatattttatataattactaggcaaaggtaaggctctcattgggatgctgttgtttaaaatgttatttgtaacagggtcgttttaggtatcaacctggtcaagttagagc

SEQ ID NO: 43225 - DNA, 290 bp, Manihot esculenta
  Intron number 1 from transcript cassava4.1_013475m (locus cassava4.1_013475m.g) derived from phytozome v7.0 (chr-ID scaffold03614; pos 1561762 to 1562051 reverse strand)
tgctatctttctattttcctccaaaaaacccaaaggtttgacctcctactggactctcctattccttttttttttgtttatctattgattttctgtttctgggtatggattgaacttctatcttgtttcttcctcactgatttctggggtttttatgtcgtcaatgttacaatcaatattatttctgtgcgaacgatagtattctcggtgtgcgttatgattgatttgatttattgctgtggcgtgtgatttcaggctgtctagatcctgagaatttcaaggaatttaaa

SEQ ID NO: 43226 - DNA, 738 bp, Manihot esculenta
  Intron number 2 from transcript cassava4.1_033774m (locus cassava4.1_033774m.g) derived from phytozome v7.0 (chr-ID scaffold04882; pos 524496 to 525233)
ctcttgggagactcttgtaagcaccgcttttaattctatgttattgatgcttttcttctttattttttttggggtttaattttggtgttttcatctcccctattagatcattttattgcttgcaaagcatgcgaatttggcgtttcgactcttaatttagctttcttctttatattgctttatatccagttctgggtgctgctttgtacgcctagagaaatgtttgtacgatatggttaatcgatgttggactgtatgaaagtcactgaatttctcaggcaggttggcgaactacaatatctattttttgtttgtgcgtgttccatacagtgaaaaacttggaatttatttattcattcatttttttaagtggacttttaaacaacacttgttgatattgctatggttctcgttgaagttgagaagggtctcattccaccggcattaaatttcaacagcgctcatcagaagtgggccaaatggtgagaccaagtacaatacggggaaaatattatgctgctctttagttttctttcatgcattcccccatcctcctccctcctttcttttgattagaacaaaaggttggatatgtacataggtctttacatttaattctgttctgctggacgacaatcttttcttttcttaataagctagagatggataatattaaagtatgtgttttctttaatattttcaggacacgcattttgcgccatagggcttctgagttaa

SEQ ID NO: 43227 - DNA, 672 bp, Manihot esculenta
  Intron number 1 from transcript cassava4.1_033379m (locus cassava4.1_033379m.g) derived from phytozome v7.0 (chr-ID scaffold03332; pos 442313 to 442984)
agagttaaaatttacattcttccagggatttacaggtttgtatatgcatttcataatggaaatctctttttatttaatatctaaatacagtttcggatctccatgacgattgatcagcgttcaaagttccactcggcattatgttcttatacagctcatgctgaatcttcctgggtaaaaagaaaagggtaatctgtttcaaggaaaaaaattaatgtttgatattcataaatgaataatctttctttaaagcaactccctgtagctagcagaaccgggaaggttagattttgaaatcctgcactttttaacggttgtttttttaaaaaaatattttgggttaatgaagtgggcacataattttagctacgtggtgaatttgaggtagttacatggagcctgctgtggttattgaatttttttttcctccaaatcaaactgaaaaataagaagggtcaattttctaatatctatctatctacaagtatttctaaagcatgtgggacccaccaaatgtaaaattactctttttttttaattattcaattaaaaaaatatagaagctgtacattgaattttccaagttgtaagtaacaaattcatgtgcagttaattaatccatttaaggttgatgcagagaaaaggtagttgtaccgagtatcaagccttata

SEQ ID NO: 43228 - DNA, 912 bp, Manihot esculenta
  Intron number 1 from transcript cassava4.1_016863m (locus cassava4.1_016863m.g) derived from phytozome v7.0 (chr-ID scaffold03329; pos 246771 to 247682 reverse strand)
tttgagtacgttagaaggtagagtcacttcctatctgagttccttattccttagaaggatttagagaataatagagtgaaaataaagactttcagtttcctcctacagttaatcccgttttgatttttcttgcattttcatacttttatcatatatgcttttgtaattaatatattagtcctctgattgttaaggcagtgttggagactgaatgcaatccgttcaaggcatttcattgcactggggattctttggatagcatctccagttaacttttcttaatttttttcttttttaatatttggttcctcttaagggcagaaattgtgattctttagttcaaatcaagaagactaattaaaaaatgtaaatgaaatgcaaatcttttctttaccattggctttagaccttggtttgttactttggtggttccatcaaatcccatcattgtacttgcattctggtttctggttatccataacattctcttggctcttgcattctgctgggaagataaaagttattagtgcttgctttgtaaaaagtgcttgtggtgaattgaatgtgaaatatttgggtttcattcatagtattaggggttccattcatagctaatgattgaatttatttcaaaaaatacaaaaagatgtatggtgggtgccactaaaaatattgcaagctacctcatgctccacttttgttgtaccaactagaggggaaagaaaaagaaaagaaatgcatatattgaatgttaatggattttggcccatttgttttggatctacttttgatgttctgatgaggctgttctatgtggtggtgctctcttgctcatcatcttcttaaatttttctttttttgtttttttgggtaccagttgcaccttcactcaccacattgaggagctgaaca

SEQ ID NO: 43229 - DNA, 913 bp, Manihot esculenta
  Intron number 3 from transcript cassava4.1_010063m (locus cassava4.1_010063m.g) derived from phytozome v7.0 (chr-ID scaffold07430; pos 28895 to 29807)
gagatacaattcgctatcttgttcagcatcatgtgagaaattgatgttttaatatgatcatatattatattttatgttttgatctaataatttaaagcctgaactctttgttttttttttttttttgagagatttaaagccacttaatagtagtatttatggattttgttggtttaaatacttaaaaaaggactcaacccatggaaacctgtttagtttatatggagttatgtgaatctttacaatcaaagacaaagaagagtgagccaaaattttattttattaatttgatttgatcatcttctgctggatgcgagacaagaggaaaattttagatgcaaaatagaaaaattttaaaaaatttttgcttgttagtaatttgatgaattcttctcatggtgctggatttgagaagatgggaaagaaagtgcacatgcaaaggagtcattgaaactttttcatggttagtaatttgatgagttctgctctaagtggtggtcttgaaaagaggaacaaatatacatggtcctgcattgcagtttctcctttcttatcttctggcagctccttaaatacagctttctttttatttcttgtttttcctctgtgttgctattaaaaatgttttgagctgctctactatagtagtaaaattattctgactatctaggaatgcttcataatgagagagtctatgtctaaagctttaatactggacaactggcgaagcctctgatcaaatgtcatcctgtctaacaattttacatcaaactttggctgtgattcatgtaatagtttaggcggtccaaccttttaattagatttgccacatatctcaactacataaaatgaaagaactgtttataatgtgactgcaggttgacgtagtggttacaactgctggtggcataga

SEQ ID NO: 43230 - DNA, 348 bp, Manihot esculenta
  Intron number 1 from transcript cassava4.1_001479m (locus cassava4.1_001479m.g) derived from phytozome v7.0 (chr-ID scaffold05335; pos 187435 to 187782 reverse strand)
gatttggcttctcgctacaaggtgatcatctctctaacattcaatctcaatctcgttttgattcccagtggtaaatgatcgatgcaaattatattttatggtttatgttactttttttcttattctttctggaattcgatttcttttgatggtgtatgatcctgttttttctttttcttcttgttgcactataatcgcaatgcacgttctagagttgatcaatttatgatcatttggacttttttagcatgattgtagttcatagttttcacaattatatctgtgtgaccaagtaacaaattattggtgacagggagtcgttgggcttgtttttggcaacgagaattc

SEQ ID NO: 43231 - DNA, 365 bp, Manihot esculenta
  Intron number 2 from transcript cassava4.1_024292m (locus cassava4.1_024292m.g) derived from phytozome v7.0 (chr-ID scaffold05162; pos 480130 to 480494 reverse strand)
ctctacctcgccttcctccttatctgcctgcagctgtaagtgattcataatccctttatctctatcttagattttgccttcttgtccttttccatgaaaagaaagtttttaagggcaagaacaaaataatgggaatttgacaattggagttgaataagaatggaagaatcaaatgaagagatgtgagctgagaaacagagcaatccaacagtttcaattgatacttacttttcaacttaaagattactttttttttttaaactcaagtttcactcaacaaatgcatattattcgaggagaaattttgattctgaattttagttcttctagacgctagagcttctggcagaagtagcagttttgga

SEQ ID NO: 43232 - DNA, 922 bp, Manihot esculenta
  Intron number 1 from transcript cassava4.1_023967m (locus cassava4.1_023967m.g) derived from phytozome v7.0 (chr-ID scaffold00802; pos 57240 to 58161)
aaatcaaaagctcctacagaaagcttgctcgtaaggttagtttgcttgcttttgaaaatttgctatagtttttttaattgtttggttgctgagaaaatagatgaaaattcaagaatttaagaattttctttcttgataacttcagtttccagcatatgaaatatgattaatttgtactaagtggggtaatcttctcgactgaatggatgctgctctgtagagtttaattttctcgttttgtttcagaagtttgtagttggtttctgcttgtttctgttaccgtagagggtagataatacacatccaacttcaacttagcgttctcttttttttttttttttttttctttttctttttcaaatattttacaagagcgaagtttctttagctctctagtaatttagtgaaggtattaatacgttgagattgtatggacttttgaatgtggtccttacgaaattacattattgactccccttgttgcaatacatcaaggcgtgggtagtgcatgaaacccaaaaagaagctaaaagtagtatttctcattttagaaaatgaatgcctttggaggacttcctagttgttggtggcaagaaacttgttcaatcaggagtttctaagataaataagctaaaatgatttttggcaataaaccacataagatactaggcactaattcttgtcattttattgggaagttaatcttttgtgagacaaactgaaattctgtccttttcttaaggtgtgtctgatgtgaatgacttgcaagactaaactgcataatgaatggttgctataaaatgcagtcattcagatgtgaaaagctttggttaagtgcctgcaataaatgtaaaatttctagatatatctctctgcttttttaacagtatcatccagatctgaacaagggccctggggcaga

SEQ ID NO: 43233 - DNA, 784 bp, Manihot esculenta
  Intron number 2 from transcript cassava4.1_009072m (locus cassava4.1_009072m.g) derived from phytozome v7.0 (chr-ID scaffold04151; pos 67857 to 68640)
tatatcaagggagttgctgttaccaaatataagaggtaagtcatgttctgctctgccctagagtgcagatccttgcagtatgcttgttttgcatgcaaaatgaattatatgctgaagaattatgtaacaacgacttttctttgcaaagatgccagtaactgaaatttttagtagcatactggtgattccatcgatttttccatttgatatcatgtttaagttgcttctagaaataggaaactgtagcccaaaagagaaggtttgattgttaaagaaatcataaacaagtccctggaaaaactgaaaaaaattatttatttatttgtttttttttcttgatgattttctatgaaggacactgaaaatggagcctgtagtactaaacaaataataaagaacactacttctactcgctaaaagataaggagtaaaattcaatttggttttcttcttaaatttcatcattgttaagatactataaaaatcgagtattatatcatatcaaaatatcttgggtcattaataagatattattagatgaatgagactgtctcattcattgtgcgactatattttaattaacttgtcaatcaggttgtgactgtaataagttatatgatgacaatgtatctaacggaatggaagatcagggtattggtgaacttttcgcgacttgatgcatctctcttcagatgagatatcagtttttattatactgatttccacttgcagaatgatcttaaacgttaatcacagtggagtgttgtttacaggtctgccataa

SEQ ID NO: 43234 - DNA, 970 bp, Manihot esculenta
  Intron number 1 from transcript cassava4.1_030267m (locus cassava4.1_030267m.g) derived from phytozome v7.0 (chr-ID scaffold08420; pos 85302 to 86271)
gcagcccactgcctgtgacttgccaaggtgcgtattctgggttttgtctcgtgaagttatacacctttttgtttcctggttgtgaggacaagctttttccagcttcttttgagttgtattgcatatgctaaaaaggaatggatatacgagtgcaattctcaggaaggcttatctttatgatcctatcattattaatgccataattgaatgctagaaatcaactgtcttacgtctcattctgacaatcagaggttgttatacatctcgtatagattgagagttctgtgaacaagcatcaaataatgaccttggtgtgagggtgataggttaaggttgcaatgtttaagatgtgcacgtctaattctgggatctctcaacccactcttcttctaaaacaataatattgcatgccttgcccttttctactacttccacattttagccttgtcatcctgtactctttttattcatttataatcttattgacttgaaaaagttaaaatataaaagatgtatgattatttaaaatttttataattaaaatctattaaattttaattaatatatttgaaaagatatttaattttgcaagtaatcgcactacagttataatgtgaatcaaacccgaaaaaagtgtgttgtctggtcacagtaactttcttgtgaaatgaggttttgtcaaacgccggaaataagtcagcctcctttatcccagttcacaactgataagaaagtgattcagtctaatgttttgtcacttttgctacagccttaatatatatatatatatactaggattcttttctttaagttgcttctccgtctgcttccaacaaccttcgaaatgcataagcaatgggctttaatttacatgggccacagttcagacatacctcgtaacattttccaagtagcctttctcatggcctcattcttgtcttttttattgcataataattttacaggtttg

SEQ ID NO: 43235 - DNA, 613 bp, Manihot esculenta
  Intron number 1 from transcript cassava4.1_001820m (locus cassava4.1_001820m.g) derived from phytozome v7.0 (chr-ID scaffold06914; pos 538285 to 538897)
ctagtaagactcttacccctttctcttttgtttacttatggaagctaggatctagatgcaaatttctctacaattgtttacttgtggaagctataaaatagatgcaaaagatgaaaatttaagtgatagtgtcttctgggtcttgctgagtcaggggcgaggatagtgaatattctttgagaaaagagattgaatggatatgaaatcttcaattgcatataaaaaaattcctattagttccccatggtgaatactgataatttccgaagtacatttactctgcaatctagaacaaggacttcaaactcacatagcattctggtcatgctctggtgattcaaggacttttgattgctcatgtaaataaagactttgtaacttcataacatataattcaagaacactgagcagtgtaaagagcctcggcttatttgtttattctattatgtggatattaaagctggttacttgtgtgcatcatgtaagttgtttattctgaatatgcaaaggaatttgtaatattttcaagaaaaatcgtgtcattcttctgtttgtttgatcttcctgttcaatttaatctcttgacagaggcagtccaagaaagagttaattc

SEQ ID NO: 43236 - DNA, 880 bp, Manihot esculenta
  Intron number 1 from transcript cassava4.1_028647m (locus cassava4.1_028647m.g) derived from phytozome v7.0 (chr-ID scaffold03332; pos 1171833 to 1172712 reverse strand)
atctaagaaattggttgtgaaaccgcaatcaagtaggacaatttttatgtgtttcgctgtttaattgaatcattattagtgctaattagttagcaatagggaccgtttgctggcgactggtctatagattggtctggtttggttggggtaagtaaatggaagtgtcacaaaaagctctcgcattttaacttcctggaactattggttaggtggaacaaacttgcattttgttatattgaacttatcaattcatctcttaatttattacatttgaaattatattatggatattatcttttaccactaagaaataattttagtgtattttctgggaaatatacctcccgagtttaggttattttgaatcaaacaaggcctaagctgctgcatggtattggttggtttgaatgatttcatgagtattgttactctggtcatttcaatccccacttacggttggcatttcgagatggagacttgtgttttgtgttaatttatgtctaaataattcgaatggactagaaactagtcattaaatttcaactctataagcggttcttagattgctttcatgttgtgtttggattaattggtttcatgtcaagagtggttttgtgttcaggtgttgcgccttaaccactacttagctgttgtgctgtgggcaccataatattcttttagcatgatatgccaggatattttcttttcaccttttgagcgcccgattagtgtttggcacttaaattgttttagaatgttttcttatctatgggaaatgtaattagcttaaagtttaatttagcccagcactttggaaagtttgtactagttcatgtttttgcaactatccactttgcaggtcttttatttgagcctgtca

SEQ ID NO: 43237 - DNA, 965 bp, Manihot esculenta
  Intron number 1 from transcript cassava4.1_000492m (locus cassava4.1_000492m.g) derived from phytozome v7.0 (chr-ID scaffold06914; pos 915399 to 916363)
ctgatcttcgtagacaggttcaattgagattcgttttgtgttttatttttatattttcttgttttgtaatcaattctgcgaggatttcaagttttttttttccaacgaattcttgggaagggtaaactttaaaaaattcaagttttcacttaactgagcaactagttgatttgttttttaatttcctaaaaaattttaatcaaaaagtggtggtctgtacttaattttttgggtgatcagtgattttacttaaatttattcggggatcgatgaaagctctcttcctcttcttttgtatctctatttggtaacagagaataatttttttgcttctcagggtcatttctgatgaaattgtagcatttctctttgtttctattaggttctgggaattcaaaaagttaatgatacttctccccttacgggctaaactttcttttcactttaccttttgttttagactcttttaacttaaacttgagagagttgtgatcttcattggttttggtttgggagaagtaaaaggttttatttgtcaaaattaaataatttcccatttgggattatttccaattcaaagatccttagcctgtctgttttgatttcttttttcttctttttctccctttcttaggaaattgtttttctttacttggaatttaaaaaaagttacctatcgtgttaggtaaaggaggtgggcaactgcctaactagggatttgctcctgtttgaacttttgttttccagtttttcaagttttcctttcctcatggataaacaagaaagaaagagggagaataaataattagttctcatgtgctccgttttttctccctcttttaatatgttgtaactttatttttgtggttttgttttttaattgaggttctgtaatattgttttttcaaagctctaattattttgaatgatgtttttctggttacttatttgagtgcagcaattct

SEQ ID NO: 43238 - DNA, 449 bp, Manihot esculenta
  Intron number 3 from transcript cassava4.1_017904m (locus cassava4.1_017904m.g) derived from phytozome v7.0 (chr-ID scaffold01551; pos 3230414 to 3230862 reverse strand)
gttataggaaacagaggccttggcaagattaagaggtagatattgaattatccatctttgtagtgcttgtttgtgtttattttagctgtttgtttccttggaaatcatttcgtgtgaattcactttgaagtgtgggttttttctttggtttgatggggatttggactcggtgaagtaatcctaattgaactttgttttttggaacccaataagctatgattcctctatattatccaaccaagaaagaaatggacttctaattagttttcttaagggaatgatttggaaatttctgttctacaagttgcagctaataactttgttagtgctataattaatttgaatgttgatttcaaattttagacccaaaattggtcgatcagttcttcttctttggagatggagttggctttcttattcttgtttgtacacacgtttgcagggttata

SEQ ID NO: 43239 - DNA, 998 bp, Manihot esculenta
  Intron number 3 from transcript cassava4.1_016785m (locus cassava4.1_016785m.g) derived from phytozome v7.0 (chr-ID scaffold09120; pos 557398 to 558395 reverse strand)
ctgtattgggcattttgggtataagcgttctactcgtaagttctatagaatacatttgttctctctgtttatatataatttttttctctctctcctgctcaaaagtatttgtgaattcactcaaataagaatttattcactcgcgagaggggatatgctttcttttttctgagattgagcatttatgattggtttttccgatattctgttgtggcatctttgttggattttgaaagtaggcataacttctcaagctttgatggtaaaacactgttctgtatgaagacaattgtataagaatgtactgtgatatttgaagtttcttgatatcggtgaagctatggagagtgttgaagtagtcctccaagcttggcagagggcttatgagaagttgtaaacagaaaagatactcattggcatccagtgtttagcttttaaattgctcggttattgtaaaatcctttaatatattcaatagattgagcctcttggagagagtgcttgtaatttaaaacttaatccttaactacggattatgtcttaaacgtatgaaggctgtgataaatcaaaacttatgtgctttaaaggtttgaaggccgtaagatatcaaactattcttaagtaaggagcacgtgttcaagatatgaaggccataatagtaatgtgttttgaaatgcaaactcagaagtctctgtttagcttttttaacagtgccttgaacatctatagggatcctgtcttcagttttgcttagagaactgtatttggtaaacattgttcctctgaatttgatttgtttacgcagaagttggttctaatgacggggaactattatccatcttctaaaatttgaactttgttttcttattttgacttcattgcagttaacttctacaattggttcattttaacttgtctgaaaacacttgggatattgcttttcattgttattctctaagttttcataatgcatatacttgtacaatattgcagcctac

SEQ ID NO: 43240 - DNA, 1022 bp, Manihot esculenta
  Intron number 1 from transcript cassava4.1_012968m (locus cassava4.1_011138m.g) derived from phytozome v7.0 (chr-ID scaffold01551; pos 1379772 to 1380793)
ccttattagttctcctcacctcgtccgaagggtactctctctcttttttcatatcttttatcatcttattcatgtttattaagttttaaacatgagctcatagcgttattgtattattctactttttatttcaactttttttctagcttttgatgagtttgaaaataaatttgaagtagatatttcaggttattgaaattttctattttctaaatttccgtatgtttttttcccccgatacatacaagatgccgaaagttgcgtcgtattataaccgaaacacaagttactgatgaatccaggtattgtaagcaaagtgaacgttgttatcttctgacaaatacgtgggcaaagcctatcttgtctagcttatgccctttttttatggtatcatgcggggtttttgcgacacttgtctttttcatgcaattaaaatattataaaatatagaaagtgaatttttaaaaataatatactgtatttattgtgtaatttttttatgtataatgtataaatatactttttacatgccttagattattttgtgtagaaaatattttttataagaaatgctttgtatgataaatattttccataaaataatttatttttattttaattttaattttaaaatataaaatatatacataaattttattgctagaaaatatattttctttgatttaaaaaatataaaaaatattttttgttggttatattttaggaatgcctcaaacgtaaataattaaagaatatgtttttctagcaaagatttttcgtgaaacaaatcttatcttaaaataagattttatttcagccatcaaggagaaagagattatcatactaaggtcttaagtaaaaatatagtattaagtaaaaaatttatattttttaatatatataaaaaaaaagatggagaagaaataataattaattaatttttgatttcattaacacactaaattagactttatttacatgtgataggtacacctggattatctagacgctggggcaaatat

SEQ ID NO: 43241 - DNA, 273 bp, Manihot esculenta
  Intron number 2 from transcript cassava4.1_007306m (locus cassava4.1_007306m.g) derived from phytozome v7.0 (chr-ID scaffold06550; pos 110627 to 110899)
atttgataccaaatctgctgctgccatctccaagtgtatacttcttcttttgttctcatctgtttgatagtattccataaagattctcatatattatgagcagctgaaaagcaaagatgaaaaggggatctctaaagtcatagctcttttgttttttgcattgattttgtgataaaaactggaaaagtatcacttttttctccattttttctccttcgattaactatgatgtgattttgattggctttattaagttaatgaatggctgcaggt

SEQ ID NO: 43242 - DNA, 473 bp, Manihot esculenta
  Intron number 3 from transcript cassava4.1_018261m (locus cassava4.1_018261m.g) derived from phytozome v7.0 (chr-ID scaffold08848; pos 3873 to 4345)
cagcacataattccacaggtttggtgtattattcttctgggctggagattctacatgctgtgtaattgtcatttaattgctttccccccaccccccacctatctagaagctaaaacttcacctaactatctaaggcttcgggtgtttacacatgaatattcagagaagttaggcctgtggctaaggttttttttttttttttttttttttttttttgagggggtggtggtaatggggaggataaggtggttttgattggaatagttattttgctatgacctgtcccatttctgtctggtcattttgtcatcacttgatatgtttgtaatgctaaaaaaggtgtcaacaaacccctctatatgcttcaggtttatctgtattcatcatttgagtaatattttccttttcctgttgctttgatatttgtagctacccattttgttctaaaataataactcatgcaggtgttggag

SEQ ID NO: 43243 - DNA, 615 bp, Manihot esculenta
  Intron number 1 from transcript cassava4.1_030556m (locus cassava4.1_030556m.g) derived from phytozome v7.0 (chr-ID scaffold05162; pos 124605 to 125219)
tttggttagtctcatactctctaagaattcactatttttgaaatgcatcatctcttctcctgttcatcatgtcttctattattgggaaaaattattatttagttttagatatttaatctaactaatcatttgatttctttattttcaaaaacattttgcccattatttgtttaatctattagtaaggtgtgaaataacaccttaatttttaatatttttaaaattgcaatatgctagaaaaattaaatagttaaaaataataaaatctctacttatttatttattttataaagaactactttatataaaaaaatttaataaaaaaaattatttaaattaaatctacacaaacatacagataaaagaatagtgagtccatttgaaaatatatgtaatttttatttagatcgtattcatatgaacttataatataaatttatagaattttatgtggtttactattattttatactataaatctatataaatttgatctaaataaatttttttcataaattaaaataaaaaatattggtatttaatttttcatggtatagctaatcaaattttcatgtgacagaatttaatattaggggcaagcgagacaacagcagt

SEQ ID NO: 43244 - DNA, 272 bp, Manihot esculenta
  Intron number 3 from transcript cassava4.1_015491m (locus cassava4.1_015491m.g) derived from phytozome v7.0 (chr-ID scaffold04681; pos 341077 to 341348 reverse strand)
gagaaggcaagcgtttcatccgcacccttgtgaaggtagttttgtaaacactgaaattcttgcctataaaattatattaatctcaaatacaaatgattttctaacaattggtatacggtaatttttgatttattagtttggtttggcactcactcatataaacgaaatgaaatatttgaaagtatgtttatacaaagaagagaaaaagaaaatatgaacacgggttcgtcttacccattttacaggagaagcaggatcttgctgaaagagtg

SEQ ID NO: 43245 - DNA, 437 bp, Manihot esculenta
  Intron number 3 from transcript cassava4.1_014368m (locus cassava4.1_014368m.g) derived from phytozome v7.0 (chr-ID scaffold03049; pos 381542 to 381978)
gctccaagttgccccgtcaaaaagaaggtatagactcacatatacattgatctcaagttctctttttcgccaatcaatctcttctttaattgtattaggagacgctctactacattttagagaggtaatagtttgttagcaacaatataaaactattatttaaatattattaaaaaaaatatcaaaccgcttctttatattaggacaataaaagcatatgtaatggtgcttaaactgtgttactgtgtttgtaacttaagtatatatcatagcaatttgcagccgctgtcttacatccattatgtagcagtgacgtttttcttttttttttaggccgcctgaactcctacactgcatactcaaacactgtacacaaatatatatacatatacatgagtagctaagtgttaatttcttgggtttttgaaggttcaaag

SEQ ID NO: 43246 - DNA, 776 bp, Manihot esculenta
  Intron number 2 from transcript cassava4.1_019721m (locus cassava4.1_019721m.g) derived from phytozome v7.0 (chr-ID scaffold04151; pos 512897 to 513672)
ataagcccacaactgttcgcctctaaattgtgagggtaatagacctcaccttttatcttgctagttttcttccaaatggaaatttgctggggattgcatctcagtctattttatggatttaaatagtttggtattatgggtgctgcatcccagcaattttagtgcacgttagtgtttggttgtgttcctgttaaattggatcgttggaaacatgccgagctaagcaatttctaatctttcatctcagcttggtaatgtattcttcttgtggtttgtaatcctagaactctcttgtttaaaattggttgagtatttacaccttgaaatccatttcatgcgtgtccattatgttttagaaagttgtaaaaacatattaatttgagtagaacatgtaatcagcaaaattaaatgaaatggtttttaggtgttcattagttggttcaatgttattggcatatgattttgcagttctgtttgaactcaaaagacgcctattcatttttgggatgagtgcgctgtgttatgttgaaaattttcttgcctaaagacagaaatgatactatgttgtttttgcaccaaatgggagcaaagtacaaaattcaaaattcacatgctagcaaatatgttaagatggcgagttcttttccaacttctgtttcataagaagcttaattataatgaagcaagtcctattgattatataagcttatttattcaatttgatgaacaatgtagctgtagccaaggagactggaggagagagaggaagcctctta

SEQ ID NO: 43247 - DNA, 503 bp, Manihot esculenta
  Intron number 3 from transcript cassava4.1_026231m (locus cassava4.1_026231m.g) derived from phytozome v7.0 (chr-ID scaffold06631; pos 398977 to 399479 reverse strand)
gggctccctcttcaaactgcagtacactactagaggtctagtctcttatcttccttgtctttctctccatagagctacataattacaaagctattaagctttgattatgagcatatcattgcgagatatcttctttttctaattttataatcacaattaaaaacaaaaattaattcttttgtatgttgggaactgaaaagtgttcaaaagctgcattcttcctttctgtcggggctgctgctgctgctgcgaaactcgctgggtttcttgcttttggagtatttcgtaatatttgtagttatattgttttttttttctttttacgctgttcaggctacttatcctttgaattaagggtacccatcttgttgaaaagacacttctagccctaacacaactccttgtgtcccttattataagggcattgtgaagaattgagttctgttattagggtatttaactgcaaatcttgcatggtatgttataaaatttttcaggaagac

SEQ ID NO: 43248 - DNA, 144 bp, Manihot esculenta
  Intron number 1 from transcript cassava4.1_026231m (locus cassava4.1_026231m.g) derived from phytozome v7.0 (chr-ID scaffold06631; pos 400073 to 400216 reverse strand)
tggcaacgatttcttttcactaaatcatcatctgggtaagctttattttctttcattttttcttctcatctcttacttgggttagatttgatttctttgaatccgtcatgtgtataaattactgttttttgttgtgcagctacc

SEQ ID NO: 43249 - DNA, 500 bp, Manihot esculenta
  Intron number 1 from transcript cassava4.1_017370m (locus cassava4.1_017370m.g) derived from phytozome v7.0 (chr-ID scaffold08379; pos 107407 to 107906)
tgtcgatctttacttcaacttggctgccggcgaaggtacgtccatgcatcttagcacttatttctatgtttttaaataacatcaaaaactagaaaattattttaaaaaaatatattttttccttaatcaaataaagttaacattccttccaaaccatttgcggtcaagaattttgataattataataataaaaaaatttattatttgttccttttaataaattataattttaaaattctgactattaattaattaattaaaacttttggtggttgcttgattgaaaccttttgcttcaccttcaaccaaagaattgttcttcctaaactgttcattattttgattgtttaactttcactttctctaaactattaattattatttctggaatgactttttgatcaaataatattccaagtgaaggaatttggatttagcatctaattctgatactgtgcttgggcatatatatgcaggtgcatttttgccagacctgtgtg

SEQ ID NO: 43250 - DNA, 960 bp, Manihot esculenta
  Intron number 1 from transcript cassava4.1_016711m (locus cassava4.1_016711m.g) derived from phytozome v7.0 (chr-ID scaffold03049; pos 491922 to 492881 reverse strand)
ccgcaaaactcctgccttttcctctctctccttctgtaagttgcttttttccttctggggtttggatttctttagtaattcttaatgcactttgttatggtatggattgtttttggtttatttgctattgcttattgatgggtcttgtatattgctatgtgcttcaattgaaaattctcacctcttctttttgttcttcttattaccattgaagaaaattcaaattccctttcaatttgtctgaacttaaactcaaggcgttaaaccctcttctgcccaaatgcgcaacccgttttgttgagaataaatttgtaagcaaaatttaaaggatctgagtttaattgctttaaggaagtcccattttgcacaagcagatgaagagaataactaggtgcatatgacttgtcagagattcagagattgttggcttcctcattttggtcctaatagtcctcctttaggttttatctttctcgttatttgtagttaagccttcaataaaatggagtgatactaattttatgtataatttgactggcccttggagaaaattgtgagccagtcataaatggtgaagtagctgaataatgccagctaagttatcactttttgtcattccttaccatttataatggcaagcataattaggcttgaaaggatctgaaaccaataactgaagccttgagttaacaatcattcattaccatgccttttttttgggttacatataagtatacccactttaagttttatatcttcttgttaattcagagaatccataagttcacttgtcaaagtttctgctggctctacctatttcaaacctccttatatgctggataatgatgttgtttatcatgcatgtcctttatttcctatgtgcttatgttatgttcttatgccaaaatgagatttatgtttttctgctggattcaggcaaagtaaactcatttgcaaatc

SEQ ID NO: 43251 - DNA, 853 bp, Manihot esculenta
  Intron number 1 from transcript cassava4.1_008226m (locus cassava4.1_008226m.g) derived from phytozome v7.0 (chr-ID scaffold03614; pos 4059426 to 4060278)
tggacatcaatttcatttgggtaagtcaggattgtaattcaattttgattattattttttttcctaggagaattttggaccttttgttttgggttggaaattgtcgagatctgggtacaatgttgtgagtagtttaactttatcctttttagcttgatgataaaataattttttgtgattttgtttttgagctactagatgcaattttgcaagttccatgaagaagactaattttatttttttgttaagttgaatggagataaatgttaataatctaacagtttatatccagacagatagagagctatgaaagaattttcattggtgatttttttcttttttgagatattccaggtagatttttctttttgagatcaggtacttaataattttttgtttgtttctttgttcttctgctgctggcttactttgcacttagaatcaaatcagcatttctgctggattttagatgttgccatttggatttggagattttgagaagtcagcaacgtttgtatgtcagagtaagggaggggtaagaattaggaaaacaaatgctgaaaagcatgcataattccaacatcaaaatatgaattctgttttatatattcagctgttttttgctaagaccctcttttggagtaaacaatatattctttttattgggcgttctcttcagaaattggtagctcaaattgctttctctctctttgttaggacttctactttgacctgggcttatggatcattgctttttcacttaatatagtttggatgcctattttgattatagtttacttggtcttgaatattctcagattgcattggttcagcatttaatataaagggagct

SEQ ID NO: 43252 - DNA, 596 bp, Manihot esculenta
  Intron number 1 from transcript cassava4.1_012206m (locus cassava4.1_012206m.g) derived from phytozome v7.0 (chr-ID scaffold01127; pos 207705 to 208300)
gtcctggtaattcgcttttgtctccatctccaatgttttccctttttcaacttaaattttatttttgtgattattacttagctagctgtggacacataattatagttgttgattttagagattaagtattctgtgttttgttgcaaaggtattattagtgagtgaaagtcatgtcttgcaatattagttacatgtatggatttttaatgatcatgggtattttggcataaaatttgctggatatattccaaatcattaagtaggttattttaatactttcattactgttatgtcctctagcttcaatctattaaaccaaaacctaatctactgctcttttttcttaataaaaatacaatttctcttgacttggaaaaatggcatttgaattgatttgttctgttaaggatagaattggatcgtgtactaggtcttcttcttctgttccttattttagcatgccctttggtttcattttttttccctaaagcattggccttttgcatcaatgaggttttatgttactatttttacatatgttcatttttgcccttttaatagggaatctggcgaaccaaacaagaggaagtcttact

SEQ ID NO: 43253 - DNA, 705 bp, Manihot esculenta
  Intron number 2 from transcript cassava4.1_030563m (locus cassava4.1_030563m.g) derived from phytozome v7.0 (chr-ID scaffold01551; pos 727150 to 727854)
gcctgcccctgttagaggtatgaggtatctgcaaaaaaggatgatacttttccttttttttttttttcttaattttttacttttggtcctcctcagcttttattcttatttattctttaatatatgacgtattttgttgcatgcactgggtatatatatactatgcatatcattaagttgggttttacttgtttgcttccattgatttttggaaattcagttcctaaaattgagtttgttgctgtttaggcgagcccatgattcttgcttacttaaaattgcgaatgggagaatattgggattttagtttaggcggtgatttgtttggaagatctagggagattctcacagaattttaacaagaaacaatactcgctcaaattgcattctagaacattctggatgtcttatgcatataatagtacgttatcaggaaaaagagagcatgtaatagatgctatggatgtcttaaaaaacacttcgacgtaatttcaagggtctatctattttattgatgatggtgttagaggtctttgctttgcattaatgtcatatatcaaattctcacgctcattgatttcagattaagattgcctggattttctttggttctcaattgtaatcgagatactgtgttagatacatttgtcatggacattaatgttttttccttatttgactcgccaaaaggccgactttggattc

SEQ ID NO: 43254 - DNA, 721 bp, Manihot esculenta; identical to SEQ ID NO: 42188
  Intron number 1 from transcript cassava4.1_003104m (locus cassava4.1_003106m.g) derived from phytozome v7.0 (chr-ID scaffold07012; pos 687422 to 688142)

SEQ ID NO: 43255 - DNA, 776 bp, Manihot esculenta
  Intron number 1 from transcript cassava4.1_030388m (locus cassava4.1_030388m.g) derived from phytozome v7.0 (chr-ID scaffold06711; pos 470103 to 470878)
agaggaaagctgtacgagttttgcagtagttcaaggtatatcaccaaaacaaccaaactttgtacccaaacaatacactaaaaaaagcttctcttttttccttatatctctcttaacccacctcacagctacctagattctctcatttctttgattcttttttcttgtttcgaaatctgactttagatcttgagagctttgtgtggtgatttttgctgttttcagtgttggtttctttgagcttttgttttggaagtaaagaaaagaaaagagaaaacaaagacacacagagaaataaaagtttttctttttatctctgtcgaagttttccgtttccgtgaatgtctcggcgtttatagtaggttgagcttatggtgttagatctgcaacttgaaaaaccaatgaaagagagtgaagaagaaggaggaggacgagagaaaatcactgttatattgactatttaaattatttttttcaagtctctgcctttcctttccagtttccatcttttttttcctcttttgttgaatctctgaattttctatttttgtttcttgaatttctctgtgtttgaaaaagaataaagtttgttcgatcgatctgttcctattcaaaccctcctgaaagcctgatcatagctgatttggagttttctcttaattaaacaaagctcagaaatttttgcttcttaattctttagaagcaacaagttgtttatggaatttgtttactttctttttgtttcttttcttcaaggtttcttcaggattcaaagg

SEQ ID NO: 43256 - DNA, 734 bp, Manihot esculenta
  Intron number 1 from transcript cassava4.1_001477m (locus cassava4.1_001477m.g) derived from phytozome v7.0 (chr-ID scaffold02620; pos 121324 to 122057)
ttttcttcggggttttatcagattcctagtgtaaggtacttgtctgatactaatctctgtatgtatcttttgatttcatttcactaagagatctgcttcttatttttcatttttcatttctttttgcgtttgtgtggttttgtgtttgatgttgtggcgctacagtgggctttgtgactttttggggttttgggttttgttactacttgaaggatcctgttcctgactcttgtttttatgaaccgcctcttgttgctgttgtttttttttttggactgttcatgacttgcttgctagtatttttttcgctgctagtactgtttgtctaagagaagtgattgctttgattcaaatccttggttgtcattatgatatggatcatttgtagttcattttgtaatctgctgaagcgtgcttttactgtttatttatttttgtagaaatcgtagcattgcattgtagagaatttagatgtttaatttcaaccaggtggaattagattgtaaaaaatgtgtgcatatgctatcgtaactggatataatttaaagtcactttgtcattagtggggatttatttttatccatgtactcgtttgcttcttagctattctgtagttctccaacttctggaatttttctttgctctgttagttttgttcatctgtgttcccttttattattagtatttatgtttattgaattttgtgtatttcttttgttacagtgttgaaagaa

SEQ ID NO: 43257 - DNA, 594 bp, Manihot esculenta
  Intron number 2 from transcript cassava4.1_026074m (locus cassava4.1_026074m.g) derived from phytozome v7.0 (chr-ID scaffold07488; pos 182745 to 183338 reverse strand)
cggcaagcaccaggtagttactttatattcaaaatattgcagattttcagcgatagtggctttatatgcattagatttatgaatatcatttgaattacattatcagcagtaaagaaatgggaaaagacctaagttttccagttgaaattggctattgcattctggcctgaagaatcaattttactgtttcaggaacagctaattttgaatgtattataggtgattttgtgtttgagccattcaggttatcgccttagatgaatccgtttttgcttccttaggttgggagctaaaagatagttgaacagtagaaaaggttctcaatttgtagatttttctaagagtgataaaagaaagagaatgaaacagagagaatggacgaatattgttgtcaggaagtctagttttgaaatctcttgatcaggtccacgcctttaagtgcaaagatttggagcgggaaaatgagtagtttgagtttatattttgtgtttgtccaaactatttgcattgcagaatcggaaataatctccttttttttccgtcttcttacatacaccaggatccgaaatttcagccagaattgtcagtctccta

SEQ ID NO: 43258 - DNA, 828 bp, Manihot esculenta
  Intron number 1 from transcript cassava4.1_010048m (locus cassava4.1_010048m.g) derived from phytozome v7.0 (chr-ID scaffold00341; pos 98316 to 99143)
gaaaaggcaagtatattaatcttcgactctgttgttccatttgatataaatatgttttccttgtctttcatttttcacgatttctcgggaaccaaccggatcttctaatatttattttcccctgcattttttgttgatcgggcttgtttaatttaacccccttttttctgtttttaaaaaggaaccgagattactttttcttgtctttaatactgtcaagtacatgagttcagaaattattttttattttactatttagttttgacccttttttttgctgttattattttcgaatttcgtgatattgttgaaaaattgaaagctttatgtcatttaatcgaggcgggaatctgcatttgttgccaaaaagcgaatatatatttgcgtgatttcattaaggtttctggctttagttgggtaatgatcaaattgtattgaaaatcgttatgatttgtttttgtgaatatttattagcctattaggtctctattcaatacttacctagattataaatctatgttattactttgcctttttgatgatgggttctgtttctataaaatgagttgctttgcttgtcgctacactcgcttgagacttgagagttctggtaattttcattaatattttcctccctctctctctctctcctgctccaacagtgtgttttctctttttaaacggtgttacttgtgcttggaattttgttgtcattgagcatatattgttaaccctcatttttgtttttgttttttgttcttctgattcccgtgagtatataatgatatcctttgcagaggctggagccggagaagaaaaggataatct

SEQ ID NO: 43259 - DNA, 566 bp, Manihot esculenta
  Intron number 2 from transcript cassava4.1_022555m (locus cassava4.1_022555m.g) derived from phytozome v7.0 (chr-ID scaffold06512; pos 467341 to 467906)
cttggttttaatattaaaaccatctcttaccaaaagtaagattattttttcacatatattttgcttcttgttgtcacaaatagattatgtttggtgcaccttggattagtatttttcagatgcgctattattctaccaattagagccatgggagtaattttatcatgttcacattatctacagatgtaagtttggctttctgttgtatacattctgatgagtgcaaacttttgattcattattccaatttacaaaagtttggagacattgtgttagcatttttagagaactccaatagctatggaatttgccatatcttatttaaggaatggagtaataaattttaagaatgccctcactttatattgatatatcaaattgttcgatttatcaactatgctttttgttttttcctattattagtgtggcactacagttctcttctttgttgttgagtcaactgaatttaaaagaggtcttttattagaatttcattttgaattcctgtggcttttattgcgatgcaatatttctaacttgttatttggcagatataccttaaatat

SEQ ID NO: 43260 - DNA, 844 bp, Manihot esculenta
  Intron number 3 from transcript cassava4.1_028159m (locus cassava4.1_028159m.g) derived from phytozome v7.0 (chr-ID scaffold02911; pos 188894 to 189737)
cgtacgcttcattgttttatttatttatttctaaaagattcttattcattaatgtgtatttgctttattacattttgagatattatttgagcttgaattatacttagtcaagtttgaattttaggagcatttggtatcataagtctagtaattatggaaaatgggaagcaaatatatgctaaattacattgtgaattagaagtttgaagttcaatacaaggttaattttttttgccccttggacttttgaaagtgacggtgcagtgggttcaaacaacgaagctgcctccttgcaatggtcagacctgcctagattctacagtgggagaagcctcatgcattgaagtgtgctagtttcaggaatgctttttaaatgcatatgttggtaacatttaatgtataatgtgattgattgtacaatagggaagtatgtgcaagagaaatagaagacgaaaagcatgtgaattagataattcaaagaaaaaagacaagagtttgatgtcaattttcttgttaattcagtgttacttcaaagaagggtaatctaaatagattaataatctaatgtgtagcttttttgtgtggttagcatcatgaactttgcccctaatagttggactgttgactgatttctttggcatgtacttctttcctctacacctgtgctggttttattttaacaaattgtgtaaatggactaatccagacagtttactgggtcaatttaacatgcatctttttttttttattatgttttgtttgttttttcttttttccccaattgtttgatatcagatgggcaattctctcatgctttctctattttttaaaaaattttgtgtag

SEQ ID NO: 43261 - DNA, 444 bp, Manihot esculenta
  Intron number 1 from transcript cassava4.1_011727m (locus cassava4.1_011727m.g) derived from phytozome v7.0 (chr-ID scaffold07571; pos 787728 to 788171 reverse strand)
ggaccgtcttttccttactacactcagtggcccaagtaagttttcttttcgtttgttttcgcatgaagagctgaatctttaattgtgcttatttgcttatctcttttatttattttccattacttttgatcatctttctccattgatcatctttaaggttttttatttaaagttaaatgaatacgattagtgaattaataaattgatagatgccgggtcaacaagtaatcttgacgttagtgctattggtaataattcaatgtgaagtgttaggtaaaatcgagcaactgtaagcaactgcttattttattttgctgtctttaggaagcaattaaaattttaaaaggtcttaggtcgatttttcttgttatcagtcattgaagaaatttgtctgtaacgcttccccttttttaatttttctattttttttttaccttgcagacg

SEQ ID NO: 43262 - DNA, 1015 bp, Manihot esculenta
  Intron number 1 from transcript cassava4.1_012751m (locus cassava4.1_012751m.g) derived from phytozome v7.0 (chr-ID scaffold08271; pos 35407 to 36421)
ccggcattcgtatgctttcttttccatttagtttgttcttctggttgtttcaataatttttttcggttgataaattagtatttttatctgcaaaggttgatgtggtgtgagaatcttctgatttcattgaagctgaagttatttaaacgtgatttccattatggaaattttaggaccttggaatcatagctagaaaaattgatgctagcaattgtagaaacatgtattaagttgtatgtggcccaaaatttttaaattaattacgatccacaaaacatttgaccctttccttgtgtttgaatgttgataaatttattatttatgctacaaaatcatgggtgacatttgttctgctgttgtttttgagttccaaatcatacaagtggtggttagtatggtgcttttattttctctattaaagctgcttattcaaatgctatgttttaaattctataattgtattatattgttgtcttggcatgctaaactatgtccttttatactaatgttctttgttgacatgtgatactatagcttttacattgatgccaacacaaaatgatatagaacggtacttattttatgccaaactagtttcaggtcaaggtttagttgttgtataaaacctagaattagttcaagttgctggtggattgtagctgtgttgatttgaagtgtttgttattaattcattttgaactggaatggatttagtctgtgacagatctcatgtgtttaagttccttaatttttttgaggtcctggtagagctttcatattttggtcattcccttcccgtttatggttctgataagcatgataacattgaacctgaataattttgatctgaataattttggtttaataggaaaaattgatgcgacttgcatttaaggaaatatatgatggatttatttgtttccctaaagattcttgtagtggtaaacattttccaacacaagttcattacctttatcatctgcttgaattgcaggactagcaggtgctactgctg

SEQ ID NO: 43263 - DNA, 506 bp, Manihot esculenta
  Intron number 2 from transcript cassava4.1_011531m (locus cassava4.1_011531m.g) derived from phytozome v7.0 (chr-ID scaffold09151; pos 624822 to 625327 reverse strand)
aggctcatcaggctggagtcaaggttgttccccaagtaagtcttttgtaaactcatgtttcatatttagtacattcaactactgaatgagagcaccctgaatcaatattattgttcttttctgcaaattgacttccccatgaatcaaaaacttgctatcatcacagatcagatcgttttatttgaagccttgcttgtttataagttgagtacaataatcttggctatatgcttaatgaagaagcataagttacccacgtaatcatttcaaaaacgtattccgaacagataaatagaagaaatggttaattcatggatatattgtatagcaattacaactttcacgggattgcaagaaatagaaatggggtgttttaacatggcaattgaagacctttatagatcaaatagtttgattttaagatagttgtgggtgtttgccttgtgactttcttggagttatgaactaattgcgtgtatttccactggaggttgggagtgttgaag

SEQ ID NO: 43264 - DNA, 820 bp, Manihot esculenta
  Intron number 3 from transcript cassava4.1_001823m (locus cassava4.1_001823m.g) derived from phytozome v7.0 (chr-ID scaffold01895; pos 188551 to 189370 reverse strand)
tagattgcagcctcttctgaatcagcttctcgaaggtgcctctacttacctcaacattcctacattttcgtcaattttatgcaaaatttttggcagtccttcgctgttgatgtggaaaagaagttatatttccaatgcttaaatttgtgctgcttgtgttgatcaataatgccatattgccatgtgtacccaaccccgtccttttattttaccacttgaggtaaagctatacaaccttctttataacacataaactcgaggaaaataagaattttgggagattgtttgagctaaacaacgcataagatctatgcccatgctgtttatgtaataatttctaaatttgatagttgggggaaacttataggaagtaccaatcacaaaagtttcatctgtgatccttctttgcacccatgaagcacatctaatgcttgctagttactattttgttgatctctcatgacacacaaattttatagaacagaggacaagggaaggttagttctttgagctttcaccaccagttctatcttctgtaatgatacctgttctaaggaatctgggcctctctttttaggtatcccacagtaataattcttccaccccatgagaatcagctctgtgtcttattaaactcgatttagggagaaccttaagtgattttctaaatattagccttacgtgcttatattctaattgttaattttgttgccttgttagacctgattatgcatgtttgaattgtataaatcatcattttaatatggggtaaagtaaccagaatggtgatgctgcaggccccccagaaacgaaactgtcc

SEQ ID NO: 43265 - DNA, 642 bp, Manihot esculenta
  Intron number 1 from transcript cassava4.1_001823m (locus cassava4.1_001823m.g) derived from phytozome v7.0 (chr-ID scaffold01895; pos 190299 to 190940 reverse strand)
agggtttttgtttagccatcagcactgacagacaggtatggttttgactttctctcaacttgcatctcaggtcaattgggttattgggttttccgtcctctatttatcttcgttgtaaatggaaggatttttttgatgggaatgttctgttgcttaatttgtgccttttcatgtagattcaatcccttttcgtattatcaactgaaattttcagattataggtttccttatttgggagcagtagttccaatttggcaagcagtgactggctctaccgatctgctcggcatttatagtttgttagtccttccatgtggcagcctagatattggaggttgagaaaagaaaatttagaaatttggattggtttctaccaaattatgagaatttgcaccgtcggcaaagctttttttttcccctaactttattatttcagttccatcttcaaaatgtttttctttagtagcgtgttgttcctgatggctagtttacttttctgtttttttttctcctcaatcttgaggaagcttaattttctcgtttggtactgatactgcttagcgaaagtgaactcgtgactattggcacactcttcattactgttttgcatattatttttgttgcagtgggtttttgaatcag

SEQ ID NO: 43266 - DNA, 425 bp, Manihot esculenta
  Intron number 1 from transcript cassava4.1_013974m (locus cassava4.1_013974m.g) derived from phytozome v7.0 (chr-ID scaffold03777; pos 198518 to 198942 reverse strand)
tacctgactttcctagaggttcctggactttaatgtcctaattttctgatagtttaccgagaaaactgagcaaatatgagaataagaaactgaatttgataatattttcattttttctcaagtttaatttgtgtggtgaattcaccagtatgggcgcatcacagttaacttttgctgttcttgagggggaaagggtgatattgactttaaagtagatatctttattttttaaaataatgaaattcgaatttagttcaattgaatcaaatggttatgttgcacatattgggtggatgctgaagaggctgataatttgtaacataattttctttcaaagagccgaacaccccctaagcattttttgttttactgattgctaaatgtattcaggtggaggaagttcactgagtcaaagagaacgtgag

SEQ ID NO: 43267 - DNA, 309 bp, Manihot esculenta
  Intron number 2 from transcript cassava4.1_028350m (locus cassava4.1_028350m.g) derived from phytozome v7.0 (chr-ID scaffold07571; pos 110172 to 110480)
gacgagcttggcagcgcatagaaggttatattttgcaatgattctttgacttccctttccttgttgttttgttcaattattaccaatgttctaactgtttctcttcttcttttttctttttaaaaaaaattttaatttatggtctaattatataattaatgtaggggaatgatctggctattcctgttaggaatgccttataatgctatttatttactcttaattggacatctgtctcttctcttctttgtgtttctttcttggtggtgtgcagaacatatagggacaaagactgctgtgcagatcagg

SEQ ID NO: 43268 - DNA, 654 bp, Manihot esculenta
  Intron number 1 from transcript cassava4.1_017990m (locus cassava4.1_017850m.g) derived from phytozome v7.0 (chr-ID scaffold02994; pos 126749 to 127402)
cttcctcggcgccgctgccgctctcgtcttctcctgtaaccataactctataatttacctttgtttattcatctctctctcgtttttgaatgacatatttatagttttagatcgcacttgtgattctgttagttttaactttcataggtttggtttcgaagtatctgatggaatatgaagtttaggtttctgattgttagatcgatctgatgcaattatatgcctacgcgatctcatcttgtttatgattgaaattcttaatcttaattccaggtcctgtcatcgattgtgagtgttattgatgttgctgtagatccttggttatattgcttattagtattatcagagatctttgtttttgtgcattgtataagtttgcttactttgggatccattgattgtttctctcgattacttatggaagacgagagacgcatatcatttagattcaaaatgcacaaagtttttttttttttttgcttgtgattagttttattctattggactagagatggacttcacaacctcaattcaccatttgcttgaaacattgtactcaagttctttaaaatggcaaaatactagaagttccagtctctttaatgtgaactttagagtttaagtcaattgggtgttcaggtatgggagcagcat

SEQ ID NO: 43269 - DNA, 701 bp, Manihot esculenta
  Intron number 1 from transcript cassava4.1_016386m (locus cassava4.1_016386m.g) derived from phytozome v7.0 (chr-ID scaffold03827; pos 134863 to 135563)
tctttctgttccttctccttctcttcttcgtctaggtgagctttgatacatcacttttacttcttcttcatcattttttttatggtgatgattatcagaaattagtgggtttattgctttattgtgataggtagatagatggctttctcttgcttttttacttttgcttttatatgtaaggttgatagatctttggtgctgtattttctttctctttacctctgtttggattgagattgatagaaaaggagagtaagaaaagaaaagaaaaggaatagttttttctactatttgtcttgtttggatagaagataacaaagggggaaggaggaaaaagaagtatgaaatttgatttctgaaattcttttcctttgaccaaaacatttataggaaggaaaatgtgcagaaataaatagtatttatatttaaactactcatgcatctttaacacagaataactcatgcaattaagtaattctattaagagatgaaatgaaagatctctgggcccaacttcagctattgactgaggagcatttattatttttaggatttgattaaataactttttcaatatttcagcagactgctgagactcatttgggttctgaatccaaagtcaatatttgtacatttggtcaccctggagatgcagcattcacccatattgaatatgaccaatttcttgttctacaggaaaa

SEQ ID NO: 43270 - DNA, 600 bp, Manihot esculenta
  Intron number 3 from transcript cassava4.1_020290m (locus cassava4.1_020290m.g) derived from phytozome v7.0 (chr-ID scaffold06512; pos 862329 to 862928)
aacctacaggtgctatctcatttttaagtttcttagttacgtatttcaatttttgtttggcttatgggtagtaggagaagtataactttagctgattattgaacaactggcccagttgcgttaaatctatattttagagctcatattcacaatctttgcacaacggaggctttgtgtggttagcaagtgaatgcttgggacttgtgagctttaagatcagcagggaaaatggttacccaaatttacatctgtgtatagctttaagaacgcaacccattgtgcccaaaagagagaaaaaaagaggaagaagatatgttaaacaattttagaccatgtgaatacaagaaaaggaagagaggatagcttttcttgttgcaatagtgaattgacttggaggagaaggatccatatatccaaccatcaaccagatagggattaagtcatatttgactctgatttagtattttagtatttaccctgtgtaaccaatttagtggaataaagttatttcagctgttttccttgttggtttgtgttgtttctgacattttctgactgatgaaatctggtttcagctaggcaacactgaagaatatattg

SEQ ID NO: 43271 - DNA, 766 bp, Manihot esculenta
  Intron number 2 from transcript cassava4.1_029186m (locus cassava4.1_029186m.g) derived from phytozome v7.0 (chr-ID scaffold01551; pos 3610081 to 3610846)
tggtgggtaacgttatttctttcccatgtttcttatggcttgtttgagcttatttatcttcaacgttactttcacaaacatcatacacaaggaaggggtaaaaaaaaaaagaagatttctgccaccatataacgtctggctctcgctcagtatctcattgatgtatcttaagatcgctttagtattttgggggaaatatgctgcagattattttgttcagctcttcccttctcataatcatgtcccgttaggaacttatttctattgccctctttggcatttgcctttttgtttcttcttcttagttctaattattcttctccttccactttcccctgtttagtatatataaacatatggcagtaatcaagaacgcattgtttccgttgtagtttttctcttagctttcttccggtagtgatgatcaatatctgcttaaactatttgtagtccatattttcttgttatttttatctctttgctctcacaactgatagagataccaaaaatggtggtgggatcccctctcaattactactactcaatatttcatgtatgtcatgctcttaatttacacttttaaagtggcccattttacaacctatctaatttgaggtgctttgataaaaggaaaaaaaaattgaggtgcttatgaactaggatgctggattccagttgcattgtcaagaagtacttttatgcagtaattcctgcagtttaccatatggtattgcagtacttcttaaagttttcttcattctcagat

SEQ ID NO: 43272 - DNA, 913 bp, Manihot esculenta
  Intron number 1 from transcript cassava4.1_008234m (locus cassava4.1_008234m.g) derived from phytozome v7.0 (chr-ID scaffold06292; pos 73059 to 73971)
cgaggcaaggtaattgtttcttgctcaaagttgaggtctttataagtgagaagttgcgcggatttttgtatattattagctttccttcggtagaattcctagtttgcagtgaattgagatcagttacaacacaactgttgtaatgtgctagctaatcatttcttttgccttttttttaatgaaaaacctacctgtgagttaaatgttaataaatgatacttctgtaaaatggagaatcctacttcaatggtgggtcacatataaagcttttctatgttaaagtgaaattggatagtatttttaggaatgtatacggtagtataattcagggggatccttccccttttttttcttcttttcttccttgccaaaaacgtttcaacctggggagtttgcagtagcttaaacatggtcatatctagcttcattatgttatatgttgtctgctctttttcacttgtgttagttaagataccattactacatggaaattcagccacaactactcaactagttagatttttctttttttgtttacctccatgcacaaaaaaaaaggtaaattgctgattctttcataaagatgataaaaatttttaagtttccaattctttgattaggtgattattcctttgatttgaataaaggtcttgaaaattaacaatgcagtattgttttcttgtccctgtgatttggctgaccatgttcatcaattttgcttgtttggtgtagtcctacttagtttgatatgagcgtctgcaacttatggggcaaacttttgttgatgactttgctgaaccttgtgtagcagtgttggtttaatggattaagttccttatctaacctttaattaggttcctttctgtaacagtatattatgttcctttttttattttattacagggaacatcct

SEQ ID NO: 43273 - DNA, 647 bp, Manihot esculenta
  Intron number 1 from transcript cassava4.1_014704m (locus cassava4.1_014670m.g) derived from phytozome v7.0 (chr-ID scaffold03614; pos 3614465 to 3615111 reverse strand)
gagccagaggtatagaatcctcaacatggaatgtgttttttctcaaatatagtgttgcaagtctagttttgaaattttgggtcttaataaaatcaattttgaaatgtgggtgtgtgtttcggctgcgtagataatgatttgaaattatgcatgataattgatgacttatatggtgattgtagcatccatttcatcgatccactattgcaaaaattgaaacccttattatcttacatttcttataattagtgttttgaagggaaatttagctatctagtaccatgatcttttggtaagggtcttgagctggacttttttagagggccaatacgtgttttgccttttcttcctttttaatatcttgcaataaaattttccagttcaggactcctactgtaaaattttcattgataagaatagtttttgtttcaagctattcgttttgttttctttccagatgcgtgaatgattcatataggtcttgatgaattttcaagtcattgatgacagtaagctttaaaaattgcgattttaaaagcaagttcattatttcattcagtatcttggtttgtatgaatactaagttcaaatattttcattgcctttgttgacaaatgccgataattttcattgttttcaggatttca

SEQ ID NO: 43274 - DNA, 936 bp, Manihot esculenta
  Intron number 1 from transcript cassava4.1_019037m (locus cassava4.1_019037m.g) derived from phytozome v7.0 (chr-ID scaffold09501; pos 312994 to 313929)
gcagtgtttgggcccagagctccagcttccctcaggtctttctatgcatcacgtttttgtttttatttaactaacccatgtgttctttggatccatggaaattgattcttctgtgagatttggtgcttacatctgatctgaccgacctcttaacaaagactattcgttttcttcttctctgtttttattaattagctgattgatatactggatggaaattggtcatgctcaactgtgttcccaattgaattggcgtttttattattatgattattatatttgggcttgaagttggtgcctttatgatcggatttgatgattttgtggttactttatttgggagttatttgaatggttagcatacccatgtggagtaattagggattgggcgctccatatggtttatttcatgatcgttggcggatctagtgatgggtatgtttgacccttggatcaggttgattcctgcttaatatggtgttcttctctttatcttccatcaattaagctgaaaatctctattcgtggttaattgagagaaccttcgcgttatatcttaagcaatatagtatccctcaatagatcagggtgccctctgatcgtcccagctttccatcttaaaatggtaatgaaatgagatgatgggagtgactagctagtaaggatctaccgtctatctttaggaaaagtaaaagagtagataaggaatggaggggaacctttcaaaatttaaaggtatatgcttaaaagaatgaggactacgatcacaaatttacttatcttattcagggtggggagactgaaatccattaaaatttgctgcaaatggacaaacctaacaaaatctttgaatgttatgtgtgttggacctaactcattaccgtctttttactttgatgtttgcttcagttcaagcctgaagaaatcactggcatt

SEQ ID NO: 43275 - DNA, 930 bp, Manihot esculenta
  Intron number 2 from transcript cassava4.1_015585m (locus cassava4.1_015585m.g) derived from phytozome v7.0 (chr-ID scaffold00080; pos 516129 to 517058 reverse strand)
agcagaggtctacgctgataacatctggcaccatcgtaagtactatcttcttttaaattttcccggttgcataaaaaaattaagcatcatcatgaggtaaaccatctttctttttatgagggttttcttttttgctctttagattaaatttcccattcttgaaagatggtcttttacactctctgtaatggactcagagacagcagaaacttgagtcgttattgctactccgttgttaacaaaagtatggaagaaaatttttctttggttatttttcttcagaagctcggaatcacatgcaatcacagattcactaactgggcaaacaacttgattagctcagctagttcttaagctgtaactatgaccgctattgaaatttcagctgtaggatagtttgttttgattgcaatgacaagatacttgttggtaacttattcaagaatttgtcaggacttagttcttcaattttattttaatgaagtaaacatgggatttgtgggaatggttgaatgtttggaggaaattggagcagtctatttttcttcttttccttgatagaataatttcattttgtcttttgcccaaaaagaaatgcgaaagaaaaagtaagaacagaataactcctttacattgagaaacatttctcagatatgaatgaggatattctaaattgttgagttttgtggacttaagagaatttttgcatgaaagttgactatctctatttattgggaggagctgaggaagataagtaattgctccgtagaatatattggctacatgaattacggacttggagagcttctctttttatctccttatcggcataaagctttttacataacaccagatgcgtatgctattcagattctgacatgcaatcgtactctttgcaaacaacagtcaaagttagttccagtttcacag

SEQ ID NO: 43276 - DNA, 320 bp, Manihot esculenta
  Intron number 1 from transcript cassava4.1_011232m (locus cassava4.1_011232m.g) derived from phytozome v7.0 (chr-ID scaffold06914; pos 1207752 to 1208071 reverse strand)
tgttgccttcacagagtagtcattctttgtctcaggtcatctctccctcttaattattgctaaaagaattttgcgtttggttgacgagaaatacaaggaaaactttgcttttttatttttattttaatccaaattcagagaaagaagaaatttgttgaggtatttgaatcatgtaaaatttggaattccaagtttttctttcttttttcttttgtttgttgaaaatccagcaggagtttatgtcatctttcgtgatttcgttttcttttaaattttgggtggcaggtcaaggaatcttttgattagaactgggcagtgtt

SEQ ID NO: 43277 - DNA, 619 bp, Manihot esculenta
  Intron number 1 from transcript cassava4.1_016960m (locus cassava4.1_014557m.g) derived from phytozome v7.0 (chr-ID scaffold03614; pos 4032994 to 4033612 reverse strand)
caagtctttgtttctggtttgtctttatgttgctgtgtttgcttttagtttaattttccgttcttctgtcttcaccataatttttcaaaattcatcttgagttgttagctattattattttatgttctcaatttaccaaactttgtgaagttcatcttgatttgttagctattattattttattttctcaatatatcaaacttgagagtagtttacgagtagtttctggccgtgttgatgctctgtttgcttaatgctgttgttggagggttaggtcactcgtttgatgattaaaaatcagtaagccagtaaaatgcttgcaatgcaataaaaaaccaattctaagttcccttttctcactctattctggcggtgattctgtttgggctttagtttacttgactggctatgtttgtggtttacccatgttaatttagagcttatgagatctaggtatctattttttaagtttttgatagaggaaggtttcatcatgtatggtcttatccatattttttcattgatggttattcatttgagtctttatagtgtggagttctagattatgccttttgtggtcttaacactgctagcttggattctttcttaatgattagaa

SEQ ID NO: 43278 - DNA, 700 bp, Manihot esculenta
  Intron number 1 from transcript cassava4.1_004474m (locus cassava4.1_004474m.g) derived from phytozome v7.0 (chr-ID scaffold02960; pos 272751 to 273450)
atcaggttagaattgtgaaattttcgtttccccatttttcacttgatgcgttgtgctattgaattgcaggtgcaggaagcggccatttgttaagtgtgtaccaggataataataggatagcctgggggaaactagtttatttgggaaatatacttcatttttttgttacttctgtttcagtcatttactttcctctttcttaaggagatatatatatatatatataaggaaaggaaatgattgaaaaaaaaaagaaaaagaaaaaaaaattaaggttagcatatcggaaccataaaatattttctgtacattttgtgccataatactatgcgggtcctgcttcatggattttcagctattttaactttttttaggaaaatttgttaaactctttgaatttgtaccattttataggggaatgagtagaatgggcacaagtgggacaaaggctcttcataagtattttagacatatttactgtcgtgctgcctcctagttaatgtgttataatgcagccactttatgttttagatagtgaaccttctatccaatttcctttgtctgtctctgacattgtaacattagaatgattacgtctatatgcatatatagtgtttatccgtgagtggctttacagagttgtgttggttttttgttttgcataggtgtttgtgagagactttatcccaagcgcattagc

SEQ ID NO: 43279 - DNA, 547 bp, Manihot esculenta
  Intron number 1 from transcript cassava4.1_017229m (locus cassava4.1_017229m.g) derived from phytozome v7.0 (chr-ID scaffold07595; pos 154006 to 154552)
aagatcctcgatcctctcaaccaaattcttagcaggttttgtttctgatcttcgtctgatgcgatcgttctttttgttttaagcttcctgcttgtttgaatttgacgtatagatattttgcctgcccgtcgttcctttcattcaagcttaagtttgataaagttggaaattttgatcttcttaaactaatggatttttttttctgttggaatagtatttcccagacagttgcagacatgaatttcaatttaaaacagccaaatccaacattggaacaggaataatagaatattgaaatatctttatttatttattttggggatgggggagattgggattgtgaaggagggataatgaagttttgaacttgattgataggaattatctaggctttgaggtcttagacttcagaatatctcaagaatacatattcgctttttcattttttttatatgtctagttggtagcttttatcgtgatttattattaattgttgctttaacattttgcagaggtacagagccgaagcaactggcattttctgcag

SEQ ID NO: 43280 - DNA, 969 bp, Manihot esculenta
  Intron number 2 from transcript cassava4.1_017229m (locus cassava4.1_017229m.g) derived from phytozome v7.0 (chr-ID scaffold07595; pos 154587 to 155555)
tggtatgaagttcttacatcaactggaagtattgcttttgattctgaaatgattagaagttctagaaatatctgctaatgtggggagcactactgttgctcatcttgattgcaatctgaaaaggggttttagttttgtttagatgtcattccataatttggagtccatggtgcacttcttttgagtgatatagatttaaatgcttgatgtggatttgtagttgggtttacaactgatgaaagttttttcattaagagttttggcgacccgattgcagatgtgcaaggtgctatcttacaaatactgtttatgcattcagtatcttgtatttcaccttttttgtgtctaacagcatggagcacgttggtataatgctgtgacagttattttgggcaattaagatagttgtcaaggaatagatggaattcttttgccatataattcacgtcatagggagatcaggacaaaaccaacctattgattgtaaattacacccacaacccagttttagcttattgtgatgatagtcatagagtgtgaaggggaaaaaaaacagacttaatagttgtaatttctgaaagacataagtattttttttatccgtttgagagttgaacaattgctaataagtaaataggcatgaaaaaatccagtgacaagctcgaattttgtacgggagcttgattgattgttacaggtcaacttatatcgtggatcttgtgcagatttctttctcattttccacatcaggattctgggtgcttgtctttgactacctttgtgacggagcagtgttaagtggttgtatgagttggctaatccttttaaatacatgctaccttgcatttcttatagcttgtgctgtaattttctgatgtttagagaagataaaatatataaggttattaaatacaggaagaatatttagaatgagcttatgttttcattctcaggagtcactgttctgct

SEQ ID NO: 43281 - DNA, 486 bp, Manihot esculenta
  Intron number 1 from transcript cassava4.1_015914m (locus cassava4.1_015914m.g) derived from phytozome v7.0 (chr-ID scaffold06914; pos 627576 to 628061 reverse strand)
aggacaactctcaccttcccaccatctctatcaaggtgcaatcatttcacctttttttatttgagttaaattttgaaaatgcctgcatatctaatggatttctgaagagtcagaggattgtgttttggtttctatgagttgggtttattctaaatcgctagaaaaagaaacccttttttagaaatgattttgcgacattgaatttgatgggattagatgtatgaatgtatctgaaatgttaaggatatatttgttcatgcatgcactattgcctggttgctctgtggctggcggattggtagttggaataaagcaagttcttgttgaacctttggcaaatgttcatagataggattggcattggtttttataggcaacagttctctttcgtttgaacttgtatgacgaattataaactgattctgttacattttatggaaatcaacttctctcatatcattttttttctataggtctcctcaccat

SEQ ID NO: 43282 - DNA, 842 bp, Manihot esculenta
  Intron number 2 from transcript cassava4.1_033401m (locus cassava4.1_033401m.g) derived from phytozome v7.0 (chr-ID scaffold03614; pos 1376335 to 1377176 reverse strand)
cagtagaatcccagattgattactgtcaaaagaaggtattatactaccatctgatgctgttttttattgttattctttgtcctgtgcttgcaatagtgattaaaatagcaagggatgtgttatatcttctactgttttggaaggcaattgttcattttgtaagtttatcataccagtaatagtttgagcagcagaaagaaaaaaaaggaaatcaatgaacagttcagttataaatttgtgaattttacagttaattttaaccatataagcctaatatcctaatattatcctctgtcattcaattgcaccattttgcttcatttgggtggtaataattgctattacatttcctttcatgcacaattaaggcaatggaaaatttgttgggttggagtttctcaatgaggtcaacaaaagagatgatatatttgctaagacaacaagttcatcatttattaattgcattcttgagttacactgttggattcctgatgttatcgaaaatattttcagtaatgtgaatgtgggttacattttatagctttcctgtgacttgtgaggtcacttagcgtatgccaatgtgaaacttccctccattttccccatttttaaaaaacaaaaggtgaagaatatgagaagcgaagaaaaagaacataatcatttggttttccgatttttctgctatgtaggcaatggaacactggtttcaagataatgattgtttgatgcactgaatttctgtagctgcacaactaaatttgaattatgattcataatttctgtttttgctcccatttttttctttagggtgaggtgccattgttatccttagaagctctaca

SEQ ID NO: 43283 - DNA, 782 bp, Manihot esculenta
  Intron number 1 from transcript cassava4.1_030836m (locus cassava4.1_030836m.g) derived from phytozome v7.0 (chr-ID scaffold02853; pos 619542 to 620323)
atcctcactccatccataatttcctcaaatccctggtgcttccctttctcttcttcttttatccttgtaacctacttttgattattgctcatttcaatcgaaaattgcatgtactgctgaactattcacctttttctttagctcttcagtgtttttgggattttttttaagccatgctccatatttttaggttcattagatttcccccgaaattttggtggacttttgggttttagatgttcatttcgtagtactgtagattttcacttctttgctgtttgtttttttcccttccatatgggttcatttagtgctgagaaattggtgcttcccttcagttgaagtgaaaagtgagtaaaattttaatcaagttaccctagcttgaatttccttggatttttatagacgttctattgatatctactttttgtcaaagctgtttcacttctatttactttggaaattatggatttattggtttcggggtttatgtgtagctctaattaacgtactgttccatgttccatgggatggtatatggaatttaatgtttctaagagattaagccccgtattcagatgttaatttataagctcatagtttaggttttgtttggctgctgaatggggaatattatgctgctcctgttccttatttgagaggaaatgaaaacaccagtttttccatttaaccaagttaaatgaattgatttttgcccttctttgcagttattaatttcatgtgtgtttaactttcagcctgtacaaaatcctggtaagctt

SEQ ID NO: 43284 - DNA, 717 bp, Manihot esculenta
  Intron number 2 from transcript cassava4.1_003680m (locus cassava4.1_003680m.g) derived from phytozome v7.0 (chr-ID scaffold08847; pos 325879 to 326595 reverse strand)
acggtaatgtccctaatgtccttgattttggttcataatttagattcttctctgtctaatacaaaagagtggttaaaagatttattcttgaggatgcttatttgtttagctttttcgatcagatgttatttgttatttggaattggacgattttaactctttttcatgctaaaaagtgaagtaacctgactttttttatttagaaacatgatctgaggattaaccctttttaaccccagtgataggtttgccaagaagagttagttattaaatggtcaaattctacataagctataagtggaaactgggttttgctctttttttttctagggaaatgttaaagttttcttgtttgttctttttcaaagttttatatttatttagatcttagaccatggtcttattgatttttgcctaacttttgttggattcagagtatttctgtgcttagctattttaactccttatgtgagaatataaaaatgattcaatgattcttcctgtaaactcatgatgagacatcctggttttctcgttgatcttattggtttctttctttcatcatgtgatttttatttttgactcatctgacaattcaattggacttgtacataaacttcccaataccgtaactgtgcttggaaatctatatttgagattgatgttctagtaaagttgtttttactgcagtatccaacaaaggcattggctcctttg

SEQ ID NO: 43285 - DNA, 578 bp, Manihot esculenta
  Intron number 2 from transcript cassava4.1_006826m (locus cassava4.1_006826m.g) derived from phytozome v7.0 (chr-ID scaffold07762; pos 427569 to 428146 reverse strand)
ggaattgctgtggtggtgcttgacgctctcactaggttggagctgtacttgcttactttcatttttttaaaagaatttaagattgatatttcatttttccagtagtagtaactatctgttttgatgggctaataagaaacgtttttaatgtttatctgagtgaaacaagacgcggggttgcaaccattattcatttacccaaattttagttagcattttggagtttgaattttgaatttcatttgggcgtcgtactgggaaccagtgatcactgttgggcttgcttgcttgactaagttgtgattggcttcttgttaaattggcatgctagattcgacccaatgctctaattagcaacgaatcttctttttgcaatctatactgtctttttggtcacttttaagaattttttcatgttgaattcttgtagttttctgcatgctctatatgtgggtgacattaaaatcgtttttctattttgatatattttgtagagttgggggccccaaaattcttagtatgtaatttgtaattgtaatttttttttttttatatatatgttgtatttgcagacgaca

SEQ ID NO: 43286 - DNA, 759 bp, Manihot esculenta
  Intron number 1 from transcript cassava4.1_027742m (locus cassava4.1_027742m.g) derived from phytozome v7.0 (chr-ID scaffold10322; pos 253144 to 253902)
atctcatctccaaggaatctgggtatcaaaagaaggtaagattagtattagtacaactattgtttaatttaatttttgatcccttgattccatgaaaattaatttattataactgaattatgatttcaatgcaactttactatatcatttttctattttaaaactatttttttaatgttacttcattaatggaagaagacgatcacatcatcatgatcaacatcatcatgtgtaagagatgaatgaattttcttgaaactcgagtcttctacacaacatacatagaaaggatctgaggtattagggtttgacagaaagctgcgtttagtgagtgagattgtgagattgttcactgtctttaccaaaagaaacataaaatcttgatgggttcaatttcatcaacctgaaaaaaagctagccatgtgttgtcataatattattcacagacttagctttcatgcaggtatctcaatctcaaaagtcttatctttcctcccttctataactgtgtgatcttgattagtattaatgttccatccctttcatctttctcagagaaaattatccaaatcgttaagacatattcttgcccaaaatggaatttattaatttctggatcttcaacatcagtgaattatttttctctccataatttctctcctcctggaaatggcaaaaaccaagtttctttaatttttttttcttttgggtattgttaatacaggaagagccaggcaaagaaggttgtttgtattccag

SEQ ID NO: 43287 - DNA, 248 bp, Manihot esculenta
  Intron number 1 from transcript cassava4.1_018496m (locus cassava4.1_018496m.g) derived from phytozome v7.0 (chr-ID scaffold04175; pos 164458 to 164705 reverse strand)
aggaggctggtggagctgtcgtccttactgcctaggttaggcttttgcaatttttttgatataatgatgttttggaattgtgtgagaggttacttttgttattatgtctggagatttagagattaacaatgggatgacttaatagcctttatgattttaatttttcttcgatgatatatctatttggattttgcttatgaaactgactttatgcttggtgcctgttttgattttgttttcataatcag

SEQ ID NO: 43288 - DNA, 890 bp, Manihot esculenta
  Intron number 2 from transcript cassava4.1_007742m (locus cassava4.1_007742m.g) derived from phytozome v7.0 (chr-ID scaffold00853; pos 199878 to 200767 reverse strand)
aggtcagtactatgtcctgcattttctttttatgttttatctggaaatttatttgcataccttggtgttatggttgcgaaagcagtgtgattttatcaggatgtcttgtttgcacaaggaagtaattgattacagaaatgcattattgagctagcctacttatataagatagcgtttttcagcctgatgtgatgcaatgtgccaaacgttataatgaataatcgagaattgagttaaatctatgatttttagttcacatagcatcaactaaagtcgaatggatttatttatgccattattttcctgtacatttgctagaatattacatacgctctatatagtatgttgtgtcttatgcactgggatgcctctttaaaaataattgtactgtaataaatcataatgatcctcttgtcatcattcagttgtcatgttaacaataccttggttctgaaagacactggttgcacgagttgcatttatttagagtttgactttttaacttattttttggtgactatttatactgtagaacaggatccatattcccatcaatattgcataaaaagaaacatcatagttatgtctgcccctagtaagagatggaaaataaagccattattcatgtttcggtatttttcaattaaatattgatggttgaactaataaggtgtgtcaaactcctggtatgtcaagatgttatgaaacatatttttgcttgtgttgcccgtttcttcagcccctagtgttttgttggaattcaacatctctgaactaatggttctagttgcatctaatggatgctaatattttagttatattggtgtattaagaattcccagactgtctatccatcaggttggcagctcggcattccagggcagccacta

SEQ ID NO: 43289 - DNA, 972 bp, Manihot esculenta
  Intron number 1 from transcript cassava4.1_013455m (locus cassava4.1_013455m.g) derived from phytozome v7.0 (chr-ID scaffold07991; pos 141786 to 142757 reverse strand)
aggaagaaactcgacactcgtttcccagcagtaatctccctctcttatttgtttttttttttttttttttaaaaaaacttactctgtttcgcgttcatgttttccgagtatttggttttttctttatgggcttcgtctttgttaagtatattggattctttctgaagactgctatttagtagtaatatgactgtttacggcggtgggatgtcattactcgttagtgttccttttggttctattttttgttgttgagtgtattttatttgagtggaaattggcttttgtagtttacatgatgttttaatttgcttttctgctgtgctcgttgttctactgccaattagtttatatggaatccaaactgttagagataaaataccacaaaagcttatatgatgttttgcctcccacccgatagcttagccatttgagttggaccgagacatatgatcggaacacatcaaagttcttaccactgaattgaaaaaaaactaaaagagttggacaaaaaactaaaaataatactacccatttgaagatgctaaactaaataaaggttttgttgttctgatatttctctgaagcgtgctcttgtagatgcttcttttgtttaattctcgttaatgttgttcagaacggttcaccattttattttgttggttgatctttacttatttacttagcatcaacatagtaagaatgttatagcaatgcagcttttaaacgtcaaatttcattcttagccagaaaggagttgtgtacttatcttctttcttctagttccttatattttcatacactgccaaagtgggaaagttgttgggttttatttatttgtcctatttaaattactacatgcagttgatttaattcatttatttatgtatttttgtgatttcattattatatttcgagtctgattatttgcttcttcttgctattttttatcaggctcggattaaaaagatt

SEQ ID NO: 43290 - DNA, 567 bp, Manihot esculenta
  Intron number 1 from transcript cassava4.1_022000m (locus cassava4.1_022000m.g) derived from phytozome v7.0 (chr-ID scaffold08847; pos 398788 to 399354 reverse strand)
aaataaccagaaatcagatcaaaactttcttccttgtgagtcctttgattttcttcttccaggcatttatatacaatctttgctttctctgtatataagttcttataattacccacgtgaaaaattatttttcttctaaatatgtctaaatatagtgaatatgaggaaatgagtaaatacagagatctcgtattttactctttaattttttttttaaaaaaatttatctaaattgtttaaaataaattttaaatttattttttattagagttaaaataattaatttaaattatttaataatttttaaattggttaatatatatcttttaaattttctttaatccaccgatgtttctattttagccccaaatcttatgataaaaaaatgtgtgacattacgttcaataatagtaaaaaagttctctttgtttgtaaaataattaaagcaaagaattggattagtacaaaaaggagatgcatgtatattattatacaaattttaatttgagcttattgtaatcttgattggcaggaaatattcttggccggcgtggacactactgcagc

SEQ ID NO: 43291 - DNA, 999 bp, Manihot esculenta
  Intron number 2 from transcript cassava4.1_007242m (locus cassava4.1_007242m.g) derived from phytozome v7.0 (chr-ID scaffold03614; pos 2438410 to 2439408 reverse strand)
gagaggaagttggcataaagctggtatgaaaccagtcttaattatagttgacatgccacattattttttttttactgttaattccttttttttttggaatatattggccattgaagggaaagaaaaaagtaattagtgataagaaaagaaaaaaaaagatagatagagagagagagagagagttcaatgctttgtggcttttaagtagttttgtcttatgcattgtgctttgagttggcattaaattttcttatgtttgttagttgttttatccgcttcatcgttacctcattgctgcaacttgagtggtttaagctcttattctttcagagaataaatgtttgtacctataatgttgttaagaaaattttaccatattttagcagccaaagagctctcggctagaaataataaatgctgggcatgatttattttaaaagagtctagtgcaagaggcgcaagtcaagaattaagtgaggtagataacttataatgtggctaggcgcattgaccttacaagcagaacttggatgagtattgctaaagttgtttatgaagttgaaacatcttaagttccatggcatcttccttggtagctaaagtagtgtcatgttcatgcatatgtatgcatatgcatatatcaaatggtttgggaggacttcattttgtacagtgttgacctgtgatcgcattgcatagtggagactgtggatactcccgttcttacctgttattttaaggttgaaaaacttctccggaagggcatgtgtacatgatgctttatttagtactgctctttgtcatttcttatgaaacaaattgtctgttattcctctgaaattgtatgcactgatgcttacatactgcaaattgtgcagcactgaaacacaaagtcagcctactatttggaacatatttaatatttttcaggctctcaacatattttcttctactcatttttcaggaacctgcaaggaccaagcaccctcagcttcacta

SEQ ID NO: 43292 - DNA, 658 bp, Manihot esculenta
  Intron number 2 from transcript cassava4.1_032246m (locus cassava4.1_032246m.g) derived from phytozome v7.0 (chr-ID scaffold09501; pos 350228 to 350885 reverse strand)
gtctgcggcttatctctgaacagaagaaatctcgggtaagtttgaactaatttgtaattatttgtatatgtcagtctctttaattcacatcctttttagttctttttcagtagtttgaattgttgtttaattaatcatggctacctaaaatgagtattacgaattagttagatgtgcttgctttgctatttaccaatttactcgtagcagatttcacttcttttaatgatcaatttaaattgtttgatcagaaaaggttgtttgtgaaaatatggctgtgagtttcctctaacaaatacaaggataacaatagtactcaattacttgggcctttaaaaacttgaatatgtagcattctgctatcttgtagtcttaattgtgtgccttttgcttttttgcgttaacaatgatatctcactcatcatttctgaatattgtatgactgctttaatcctcctggattgcatttgtattactatcctcttctttgtgagtaattgttgttaaaatggtgatgcaattgccaatatttccaattgtaacaaaagattattttctttataccttgtttatgaacaatgtagaaccttcaatattttattttctcctctattcttggacagccttcagacagcaaggagcttgattttgaattctc

SEQ ID NO: 43293 - DNA, 505 bp, Manihot esculenta
  Intron number 1 from transcript cassava4.1_001577m (locus cassava4.1_001577m.g) derived from phytozome v7.0 (chr-ID scaffold07571; pos 777660 to 778164)
ggtcgaaatcaagcgactctgcctctaagctcaaagttagttcctctcttagctcttcatatagttttctttgtatctcgaagtttctccttatcctttaatgatagttcgcttttgttttggttcagttgggtgcaaaactaacgataagaattaatcgtaattcgacgtttttaccctacgaataatggggattaatctaattcctgatcccatttgtgtttttgagggactaggatgtgcaatttttttttttatcttggacttaaaattgatgtagaaaaacaatctctttgcagtgagaatttgttgcacttaagccctgtttgattgttggtgcatcacaggggaaaaaaaaaataatacaattaatttggagttaggtcttctttcctaataatgattttataaaattaaaaaccttgcagaattgttttatcatatcgtgttattttctggcctgaatacattggtctctgttcttttatacattggcagaaatctc

SEQ ID NO: 43294 - DNA, 661 bp, Manihot esculenta
  Intron number 1 from transcript cassava4.1_003016m (locus cassava4.1_003016m.g) derived from phytozome v7.0 (chr-ID scaffold04681; pos 454588 to 455248)
aattttcttttgcagcaagagagtgatccccaaaggtattttgagattacccattttaccttttagcattttctcaagttgtcagcactctattttgatgaagaatacttagaattctctctgatgtgctatgtatttcacattttggttttggcgtgcaattgttacgtgttattattattattattttttgttatgtctttcttatgatttttttgtatttatttgagtttgaatttgttttggtgttgtgttttttattctggcatggcaaatcttcttatttagatgttattacggtatcagtcttgctttagattttagagaattcgattgccttctacatacttgttatgtgatgtacagattttcccctttccggccccttactatcttgtttcaggactgttggtctgccttatgaaaataattatcctgaggatgtcttttatttatgcatagatttttttttttttttggtcttttagggtttgtttttgggctggttgttgatgttatttggacttcattcagttctgaagggatgatatatgatataataatggacatatgtatctgtagataatattcaaaaatgctaatggtgtactttggggggtgggggtggtttgaccatttcagaattggggcagcatcagtg

SEQ ID NO: 43295 - DNA, 937 bp, Manihot esculenta
  Intron number 1 from transcript cassava4.1_030940m (locus cassava4.1_030940m.g) derived from phytozome v7.0 (chr-ID scaffold06656; pos 90671 to 91607 reverse strand)
caaagctacgtagcctactaccaagcacaacaaaggtaatcacagacatatgcccgtaaaaaaattttaacaataacctatgaaaatattgaactattgaaatttacacaaccctccctaagaagtcctcgcgtgttcaagcatgcatgtgcataaatattaatattgcagatgtcgaatgccttttttttttgtattacaagagccccttttttctttctaacagtcgagcttgccaaagattttagttaaatggcttgtctctcatgccatgaaaacctaccctttagatatgaaagccagtaacatttttcttactttttcttttcatctttttaaatcctatgactattgtttttccttttggtgtattccttctctgggacttgtggtagttccgaggaaagaaaaactaaaagaggaataagcgttaatgtcgctcagttgatatgataaagagaaaccaagaagcagttgaaaagcttccatggaaatttcttgccggatatcagtcaaagtaataagagatatataatatataaaaaatgggagaaaaaaaagatacaaagacagacaaaacttgcattcttgtcggtcatatagccatgccctaatcctcctttacaactccactattaggaacctagctatttccatggcatgaatcatcacgtagactgtaaacttcttatccaatctctttttcctcacacgccaaaagattctgttctatataattaggacggaaaaaaaatcaacttgcgtactttctggttaatctacatttcttccttttttgttttcttgatttgtttcgataatttaatatgtaaaataaaaatgatcaccagctttagcattgcattgattgtcttcttgttgggtttttgcctatggtgtagacagacaaagcttcactgcttgcagaggtaatcca

SEQ ID NO: 43296 - DNA, 665 bp, Manihot esculenta
  Intron number 1 from transcript cassava4.1_018810m (locus cassava4.1_018810m.g) derived from phytozome v7.0 (chr-ID scaffold03614; pos 2341558 to 2342222 reverse strand)
ttggaagctcttttgatttgtgaataaaaatacaggtactatagcgcaacgaatctctctctttatttttcctgcaattccatcttattcaagaacggtttggcaattcagatgtgggttttgtattagttcttgctttgttcatcttcagttttatgttctatcgtttcaatccttttttataattgtatgggaagggaagggaagggaactactgaattgaaatttgttgctttctgcggattttctaactccaatttttgttatttctgtaatctttagccaggtagaatctgtgtttgtttgcttcgttattctgatttttcagctctatgtatgtcttgtttagttttgtgctaagtttaaagacgaattactaggtatttatacgctttcatgttttcaatttctgacctaaacacaaaaaccaaattgcacgtcttcgtttctctccctctttggtaatttatgtgccttgaaatctagttaggctgcaagcatgtattttcatcatttgcaaaatgtcagctgaactttttttgctatttcaaagtcgtatatttcaaatcaaaatataagttagtttactttattagaatcctccgctgtctaatgtaagatgctgattttcttcttcatttttaatctatcttttgttttccagc

SEQ ID NO: 43297 - DNA, 903 bp, Manihot esculenta
  Intron number 1 from transcript cassava4.1_019922m (locus cassava4.1_019922m.g) derived from phytozome v7.0 (chr-ID scaffold03049; pos 518048 to 518950)
tgctgttcaagctttcaaattaaccctctcgcgtaattcgatttcttctctttttatttttccctgttttcttttttccctattaactctttcttgccattttttttcccgggaaagttagggtttttcatttccttccttcacatactgcttcatttatcgttttgttcctaataaagccttttttttcctgcaaggcgtagcatctggtgtgttggttctctaattagtaatttctattgaaaattgcatatttaatgaggtggttcttgtttatatattgtgctactggttcgcggctttcatttataggtttttttgaggatttgaggtcattatttgttctcatgctattcaaaaaattgaaatcatgtgaagattgattcttggtgtttgaactgggatttgagtatgcaaagacatgggctttgtagctgctagaaatttagtatgtcagtagaatatattgctccaactagcttcgtcattgaatattgatgatattctcattttgcatagcttaagggagctttattttatcaagttaatgcaatgaatgcgattttttccccagtaactaatgcactctatcaaatggttgataaaccaactaaaggtaaagcatagtttatgctgtagcctgcagggattcgcaggtagctcctttttgttggattgtatgtcttggaatacttacaatattacagttatttggtgattgaaaacctctgagttttgtccacgaggccttttatgcttttgcagaatggaattattatcaataatgcctatggagtttcttggccttttcatcatgtgagttgttatatcctcttatcttgctaggttactgactgattgttttctgttcttatgtaggctaatagacataccatcattctg

SEQ ID NO: 43298 - DNA, 985 bp, Manihot esculenta
  Intron number 1 from transcript cassava4.1_005329m (locus cassava4.1_005329m.g) derived from phytozome v7.0 (chr-ID scaffold04681; pos 407312 to 408296 reverse strand)
gctcctagccagctcaattccactgtattcaatcattctctttctatatatgtttgcatgcgagcttttctatgcttttgtttttgtttatgtctggggacttgatttttgtgcttttgtggcttttagtgttactgatcatgacttttggatctgtttgtaagtttatgattgttttcactaactaataattgttgccagtagtgtcagatgggcattttctgtattttgaatgatttctgcatttgggttgttgaattccgttgtatttctgcaattttatagacagtgccacctggaggtccaatgcaatggtttttttttgtgagttgaggacctctgtatatagaagtaattgcttggaatttttaaaaagctgtgatggatatcgttaggaattaggatgacaaagtgggataattacattattctagtttctgcggtcaaattttggttatgaaacatgttattttattcctggaaaaatcttgttgttctttttatcttgttgactcagtgtttattcgtcaaaggctatgggtcttctttgtgttccgcaagtccatcatcacaatatgcataaatgattgaaagcctagtatagtacgtgaactttttgagcttcaggttcctaatttcgtaagttttttaaggtttaacttttgactgttataggttcgtttacgaattcccgttatttaatacgatgaatcatgaatttgtaagtgattgaatgagcaaatgataaactagtgcattgtttgctgagcatagttgtgttttattgcttctcaatcttgcatcaacagtgtgctttttgattttcttttcccaacatccactgtcagtcatccccttttctggaaactatatttagcgtttttcttcctacatttcccggtgttcagtcatgtattgcatctcactggtaaaatgacttgtagattatgatatatcctttctgtttgataggattcttgtggaa

SEQ ID NO: 43299 - DNA, 739 bp, Manihot esculenta
  Intron number 2 from transcript cassava4.1_008384m (locus cassava4.1_008384m.g) derived from phytozome v7.0 (chr-ID scaffold05009; pos 76819 to 77557)
gctgtgatcttccaaggtcttgtttcttctctctactaaatctctccttatttctatagaacctttatttatttgataatggtagatttatgattcttatgaaattttaatttcctgagcatataatttgcttctttctgtttcaccattttgattggtgttgggttagtgaacaacatcaagttatatgctcaggaaataatatttaattaatatttataaatataatgctgtactcgatcgtaaagaaaacaattatataaagattataatgattaagatttaagactaattgtatagtaaagctttataaatttaatgcatggtatgaacatttcagtatcttaattaagattaatgtataaattaatcaatatatttatattatgctcacattgagtttgggcttagcaatgtgttgacccgtcgtcttcagaatttttggctcgccggcttgcttgttttctccacccgatgccggcaagttcaccggctccctgcgtttatagcgttacacttgtcatacgggccaccctcttaatggtttgtgggaccaactcagagagctaattccctccccccaatacgaatgtcaaaaattaaacctcattacttgtgaatagctgtttatacgttttgatgcggataaaaatatttctgtttttacgttagattaaagcttgtttctaatgctctatacgacattaattaatgtcgtttcaaactatatacagtttca

SEQ ID NO: 43300 - DNA, 818 bp, Manihot esculenta
  Intron number 1 from transcript cassava4.1_015943m (locus cassava4.1_015943m.g) derived from phytozome v7.0 (chr-ID scaffold06512; pos 1226662 to 1227479 reverse strand)
tgtcattcccagatttccaaaaatcggacatagaggtaagtttgttattctttgtttatggtacttcaatttctattattatgtaattaatttcgtttcttgtattccttcatttgttagtttaatctctagataactcatctacttggatttttattttctttgcctggcaatagagaatagcattttcattagaatttctataaatttatgatgaaatcttgtgggaaatcatccaacttttgcagtttctgtaatttggaaagatttcaacttccttgtcgaaaacggttattgtaattgttgtaggagattctttctgtaatatgcttttctgcttcatagactcttaaattgacttggttcaattttttgctaaaaaaattctaaactttggtttaatagtaaattactgccaggtccaacctttttgtcaaaattaattgcttagttcctctttctgtgaaatcaaactctaggaaattttagttcaaaactactaaatagtatttatagttaaacttataggattatagaggcgacattaatcgatagattctaacaaactttcttccaagtcctgtaacaatcctaccggtctaccggtttataaataattgacatagttatgtatataattgacaaaattaaagcattggtgagagttcggttttttatattaacccaaaacaaaattttattttcactgtcattactagcttaatccctctctctcaattcatgattagtgactccgtgtatttattattgggttgttaccagccaaggctaaggcacaagaatctgaagtcagttta

SEQ ID NO: 43301 - DNA, 623 bp, Manihot esculenta
  Intron number 1 from transcript cassava4.1_009068m (locus cassava4.1_009068m.g) derived from phytozome v7.0 (chr-ID scaffold12639; pos 10030 to 10652)
acagaaccaggaagaagaatgtaagtacttggatatgatctatattctgttttatcactaatttttggaaaatatttattatttagtcctgtaatataaagaaacttgttagttaattttttagttttgaaaaacatattaaaatatttttgagattttaaaaaatctattaattagtacttctattaattttagttataattattaaatattttactagagagatatagaaaaatttattagttaatttttcggtttataaaaatatatactaattaatccatccatattgagtgcatttaaactgtttttgcaacatttaatatttaaaattaatggaaggactaattagtatactttttaaaatcttttgaagagattttagtgtatttttcaaaattgagaaaccaacgaatttttctatattataaggatcaaatagtaactttttcttaattttttttcaagttttgagtttgattttagagaaatttttgggtttggtttgtttttttgccccttgagatttgagattatcagatacatttatgatttagctaatggacatgttaatcattctgcataatcctgataaaagtatttgatataaaaatttcagattc

SEQ ID NO: 43302 - DNA, 618 bp, Manihot esculenta
  Intron number 2 from transcript cassava4.1_014937m (locus cassava4.1_014937m.g) derived from phytozome v7.0 (chr-ID scaffold01551; pos 226641 to 227258)
gagctgtgtgggttccttgattcaaagaaaataaagtaaagtttcgcttctcttaaccctttttctcctttaagactttgcttgtttacttgcgaatattcatttgtcagagcttattcagtttgttactcaaattttattgcttcttttacaatgtggcttgtttatctacatttttgtttccagtactagagtttttggaagttttaagtggtgggctgggttggaagattgggtctgatttaatcttctgtttagaaggacatcttttcatgcttgatttgcacgagtatcgaataatctgactggctttgtgaagatattctagttttagcttgaagtacttagttgtgcatatgtgataggaagtggtacttgctagtgttttccttcatttgtttttcttgggagttattaacggtgaattccttttggtggtgtcctgatcccatacatttttagaatgttatcaaatcattgacttgtgcttacgaagtttcaaatgcaaattaatttttgtcatgatgatggtacttgtagacaaattttgcaatggtatagacatataataacaaattgctttccctttgtttttcagaagagggttaattacccgaa

SEQ ID NO: 43303 - DNA, 502 bp, Manihot esculenta
  Intron number 1 from transcript cassava4.1_001630m (locus cassava4.1_001630m.g) derived from phytozome v7.0 (chr-ID scaffold06914; pos 1236775 to 1237276 reverse strand)
agagccacagaatatttctactgaagaacttcctggtatggttctggttctaagctacagttttaaaacttgtttgtttgtttgtttgtttttaaatcaatccatttgcttgtttaatcaacttactctgttgttctaaagataaatgatgatgatgataataagaataataataaattaatttcatcagttagccttttagaactgctttgattattgagaatgtgcttgtgtgtgtttgattggcattcttgaaggcaatttttgctaacagtttcatgagagtttctcaaggttttcttctttttttgcttctaagttataattatgactttgagtatatgctagtttgaagttgaaaaactagtcatagacggttacaattctttgtttgttctttctttttccttttaatcattaaaacaaccttgaaaaaatctctggctgaaacatgatttgatattttttctttatttttttcacagagcctattgttccagca

SEQ ID NO: 43304 - DNA, 695 bp, Manihot esculenta
  Intron number 1 from transcript cassava4.1_029934m (locus cassava4.1_029934m.g) derived from phytozome v7.0 (chr-ID scaffold09305; pos 149082 to 149776)
aacttctgtttattcttgaagtaagcaatacctatttctttgtttgcatttattatgatgtacattgcacatttactttatgatttctgtttatttaattgtttaggaacataatttttttcaaagaatacatgtgggttactgtcaagtcttgatttgatatcggaactgttgtgttcttttttgtattttaatcgattccttcattttatttatgctttaaatcaatttcaaacccgccctctccccaaggtttggagggttggaggtgtattttagaaaaatcaaataaaaaaactgttcttttactattttatgaagacttttgatagaatggaattcactggtagtttctagctatttggggtatctgttaattttgtgactgtttaaactttgctgtatgtggtccagttttggtacttggcattggagataattgaatatggctactaattagaattgagaaacgttaagaaaatgagaatatgtttttctccggtatataatacattagaacttgattttttttttggtctaaacgtggcaggattgcattgaatattttcaatagagtattcctgatatcaattttcttttccactttatttttgatcctgatacttatggtatcttctccctctttgttctatgttttagagaattgaggtttctctctcacaggtggagcaatc

SEQ ID NO: 43305 - DNA, 812 bp, Manihot esculenta
  Intron number 2 from transcript cassava4.1_017361m (locus cassava4.1_017361m.g) derived from phytozome v7.0 (chr-ID scaffold02960; pos 687641 to 688452 reverse strand)
gggtaaaatcttcttcttttaatcctaaagaatgatcaagggttgataatcagcaaaatctagttaatattcagcagctctaaaatctttacttgcttgatattcttgtcaatcttctggttcagctcagttatataattttcttctatcatgtaatgatggcctactgttcgattagttgcatattagattatgatttgtcagtttgttaccaatgaagtcaagtcctcgttcatcgttaaagtaaaggggggaagaggaggggaggaagttcatagctaatcttccgtgctcttttgcgactggatttgatatgtttaagaggaaataccatctcttttttttttattttgaaaaaaaaaaacaaaataagaccgttgttagattcttgagaaagaaaaattgatgctcatcatttgactttctgaaaaaggattctcaaaggtatttgcttatatatcttgaaatatttacataatgaattttcttttttcatcggtctagtttctcaagatagtattttcttctccattgctatcaaaatttctcattgaatgtctctgttgttatgttgaatgactgagtttccactctgaacttacattgatagcttctcagaataggaactaagctgcatcgacgataattttggtagtggatttgtgcccatctattataatctctgctctgcaacaattcaatcatgtgcatatacttaacatgagttttggattacattgatctccaacttattgaaatgtttttggtcatgcgcagattacatccaccctaatatttgcagctgctagtgc

SEQ ID NO: 43306 - DNA, 505 bp, Manihot esculenta
  Intron number 1 from transcript cassava4.1_010814m (locus cassava4.1_010814m.g) derived from phytozome v7.0 (chr-ID scaffold00341; pos 812654 to 813158)
ttgagagacaatcctctctttggtccttccgccacgtaactaaattttcttccttcctctgctttaattttctttccttctctgttctcttccttgaatgcttctgaggaattttggacttttatggatgagtttttgttggatttatacgttttaaaacatcaacctttgtactcttaattacaatttctatgatgggattgctctgacgtattgctaaattactttgaattagtctcgttagcttttgaatatcttaaattcagagtggaaaactcaacggtttgtgaataattttggttgtatcacattctgttacctgtggttcttaatggattttcatagttcaaatgcctggcagtgaaactcatttcttcagtatcaggtgtcttctactgaatctaaatacatatttattggttcttcattaatcttccttgaggtgaatgctatctgacataaatttttgtatttttggctgtgttggacactacatattttagtg

SEQ ID NO: 43307 - DNA, 386 bp, Manihot esculenta
  Intron number 1 from transcript cassava4.1_033905m (locus cassava4.1_033905m.g) derived from phytozome v7.0 (chr-ID scaffold03055; pos 17996 to 18381 reverse strand)
tgctcaaatttctcatttggccctcgatattggaggtgatcttgcagctttatgtatatataattttttcttcaattcaagtttaattcactttaatttactatttgactagatttctctatttcatggaacttgggttccttcaatttcttgtcattcctttattctcagtcatgaattatttgtttttctttttcaaattattttttatgtgatcccattttctttataattcagtagctggagtatgaggagaagcattcaagtgaagtgaaaatggatgctactcttgctaaatgattattattagttggggtgtgttcactataataacaaaattcttgctttcaggatctctgatcaaggtggtttatttctcaacaagt

SEQ ID NO: 43308 - DNA, 637 bp, Manihot esculenta
  Intron number 1 from transcript cassava4.1_004330m (locus cassava4.1_004330m.g) derived from phytozome v7.0 (chr-ID scaffold04233; pos 273605 to 274241)
tgtcacagtgttcacttctgcaggactaggactgggtgagttttgttcagtatttcgtttattttattttctttaattcttttgggcattttgatttcagtattttaacattgttgctgctttttaagtatgcatttttcagtttatttggtacttcaagctgaaaatatcttcccatttcttcaggcaatcaatactataagcttgatgttagctttactcgctcaaattcaatctgtatgaataaaatcactttgattttgcttttttgcaaacatctaaattaacttctttattttaatgatgttctggaaaatgaaatcaaagttgttgatttggcctatttcattttgttatttaattcaccttaatattttattgcaattaggcagtgaaagacatttgacattttctgttaggcctatttagatgaaaaaattctgaactttttgcaattttgcaatttaatctaaaattttaaaagtttggtaaaattgtttgaaattgtaaattttattatgattatatccaagtttaaaacttgaatgggagaatgtatgatttgctgacctgtattgattttcttttttatttttatataggctctgaaagtgttctttcacaacctacatacaag

SEQ ID NO: 43309 - DNA, 865 bp, Manihot esculenta
  Intron number 6 from transcript cassava4.1_012394m (locus cassava4.1_012394m.g) derived from phytozome v7.0 (chr-ID scaffold09761; pos 203026 to 203890 reverse strand)
gaagagaaccaaaagagtagggaacccaaattggattcatatcaccaaagattttgtcttttatcaatcatgtcaagttatgccaattatcttctgaggttgttgctttgcacatgttgcaaactcttatagttaaaatgcagtatcttgttagaaaaaattatgatagtagtgagctatatttcaaaaattcatttatgaattaatgtgttaaatgacatatttgttacccccttttttgactcgctattggggcctcatttgtttcacacaatagcatgagataagatagatataggatggtattttatgtggaatagctttgggtcaacttttaaatgtggaacaattattacatgtaataattttagttaaagttttatttgtgcgataattattagtgaaaattattatttaattcatgtggtgtgggaaactaaactaactggttagtctctgtgtttttaaaactgcatcaaatagtatttatggttttgaacattcaactaaaagttcactcccattaaattttagcattgttaatgttagttctatactgttttactgtaactaaggataagaaagttaaaacataggggaggatcttttacttgagttttcaaaattactgggactatttaatatatatttaaaagaacacagtgattcattgagtagtttcactataccatatggactaaatagtaattttctctaattatgatatagagtagatatttttcaaatttatggaataaaaattgcatatatagttgctgtgctaatatatccagcgtattttactttttgattgaacatttgtttctctagttcattatggtggttttggttttacttttggtag

SEQ ID NO: 43310 - DNA, 584 bp, Manihot esculenta
  Intron number 2 from transcript cassava4.1_026744m (locus cassava4.1_026744m.g) derived from phytozome v7.0 (chr-ID scaffold06853; pos 263462 to 264045)
agtccctccccaaaccagcgctatcattactaacggtatttgctattctagggtttcacattgattttagtttatcccccccccccggccccgccggaattcttcattctcaggattctggattattatgtttttttttttgttagtgatctgatttggggaataaagatgctaattttcttcaagcaattaattagtcctgtattagtttttctttttatctttcgtaaattctagtttttaattatattttcgactcagtgatctgccttgaatccttatggttggcattgggatgacaactgattaacccggctggatcagaagagattgcagaaataaaatttacaaagaaaagtaaaaaaagtttttggtgtcataagtgaattaatcatactaatcccgcttaaattgcattcttgatttgagctttattagattaaaaatttccctatctcctcttgctttaactagcctatattataatgcataatttagtcaaattctacatgttttatcaaaatttcttactcatcctatggtactttctgttacttacatcaaactgttctgttgacatccag

SEQ ID NO: 43311 - DNA, 967 bp, Manihot esculenta
  Intron number 1 from transcript cassava4.1_003381m (locus cassava4.1_003381m.g) derived from phytozome v7.0 (chr-ID scaffold04151; pos 551714 to 552680 reverse strand)
tattgtttccgttgtcagatctcttatcataatctgtacgtttttttttctttgaaattctttttttttttaaatttttgaaatttatttattttttcttaaaagtatagatttgatattggcgcttggttttgcatgtttcaatcgaaattatggatttttgttcctcatttattttcgcttgcacatttagattttttccccctttaaatcctgtatttttgaagttatcacgttgagagttaagagaagaaatattttaaatttcattatttgctcattttttgatcgtgacttcgttagtgaaattaggaaggaaaaagaaaagctcgcagtgcagtaatctaaccctttgctgaataacatcttttgtgccttatttgtgcaatgttatgtaatgattatgtgaatgtgtacatatttcttttacgccatttccatgttattgaattttatgtctagttgcagacaacttgaggggaaggtttcatttttgtgggttctacatggtggtacagaaggaatcttgactttaagtttcttaatttcttaatactttctgaatgggtggaataatatggttttaatgctttttcaaaagctgatgggtttcttcttttctggagttgctaagaaaatttaagttaatgaactgcgttcatatggaatgaagtatgataacaagcacttagatttgtcaaatggaacatactgaatgatgacaagcacttaaaattgtcaaatggaatatattgattttctattctaattctttgtccagaaattttgctatagatttttattagtgatcatattttatgcatttaggagaaatggttgagctgatataccttccgtgcatgcgattctttaagttttatgtgatatgtttatagtagcagtaatgatcattatttgtcatctcttttgtgatcttttgttgtccatgatcgcaggtgtttatttg

SEQ ID NO: 43312 - DNA, 802 bp, Manihot esculenta
  Intron number 2 from transcript cassava4.1_000304m (locus cassava4.1_000304m.g) derived from phytozome v7.0 (chr-ID scaffold01551; pos 2334287 to 2335088 reverse strand)
ttgacaagtcgcagaagagcaagcttctacaagaagtaaggctgtaaaggtttcttgtcgtgcttggtgatttgattcatgttactcggtgtgatttaatttcttagtgcttttttttggtgggtgtgtgtgtgtgtggtgaggtgggggggaggttagtggattaagtttacataccaagttgctacgtgtttcctttgcattttgatttcccccgtttttttcccctgaaagttatgcattattttgaggactatactgcatgtttaagcgactatgtagctgtttactgcttttttctactaaattttcttctgcttttttttttttcctttttttttccaaacttgggttcttagatatcacaaacatccaactaattttcacttagtgatcagcgcattaactggaaatattatttggaatgagagtatatttatatttcaggggctaaacgggaaatatatagtcatgccagtcagtacatacctttgttttacaagttttttttgggtatggattagtttgcttttacttatttttcagaaacattctttactatactataatatgttcccaagaagttataggacaacgactcttagcttgttgcataatttttcatttttttccatttactttcaccaattgttgggaaatagagcaaagaaccaactgtgtgcatactcttcgctctcttacatgctttcaactgaatattgggtatccttattttatccattgatgcccttctattatcattaattgcaggttaggattcttcactccttagatcatccaa

SEQ ID NO: 43313 - DNA, 624 bp, Manihot esculenta
  Intron number 2 from transcript cassava4.1_013862m (locus cassava4.1_013862m.g) derived from phytozome v7.0 (chr-ID scaffold03307; pos 879 to 1502)
tcctgattttctctctcaactccatcagtaaacaggttagttcctccccttctttattctgttcttctctttcctgcatcttttgattcaatcttgtttcatttttccttgctcatttctctttcttcttcttctgttatgcttctttttttttttttgtagttggattctgcttttgtatctttaaacctagacctgcatgtaatctgtatttctatggcaatctccttttttaaaaatgcttgatttgaacgcttgattgaggactgtaattgaatatcattacgttttatccgatgaatgcctcttgaagattttcttgttcaattgagattggcatggaaacaagcaaattctagggtatttaagcttcattttgagaaacatacccttgtttactctgttgctaacctctctctccatttggaacttgtcatgccttatttgaaagaagagtatttaactctctactgttgattcttatcttccctcaattggcatttatttcctgtgaatttgtttaagcgttacgctcgcatttgttgatggtatggttcgtgaattgtttcattcttcttgttattttaattacttgggatttaaccctttttttttatagccacc

SEQ ID NO: 43314 - DNA, 849 bp, Manihot esculenta
  Intron number 2 from transcript cassava4.1_002247m (locus cassava4.1_002247m.g) derived from phytozome v7.0 (chr-ID scaffold04681; pos 515740 to 516588)
ctgatccagcttgccctgaggagtaagataaccttgtaattttattttcttttcatgcataataacaaggacaaaatataggctctaatgtgtctctgcttcatatccactcaaaagtaggattttttttggcttataattaatggattaagaaatagacttatatcacttgttggaattcatttatttatccaatccccacagagactaaattcagtgtagcttcatttgataattgcatcaatgctatcgggaatatgtacaactaaattaattaatataggtgccttttcttttagcatcactcaactaccacacgtagcttgctttcagatttcaacctaacacttccctttatcgataaaagataaagttgaaaatgtataagataagaatcaaatgtcttaggaacattcacaagcacacagttaccttcatattgacttgtgaaagttccccacattttttacatcgtggaatagtgttgcgaattagaaatgtaatagttgagatcgtaaaaagggagaggttgatagttaaacgagaactgattaaccttacccttgatgtagacatttcaatagtttaagcctcaccctttttaatgaagctagaaatccaatgtgaaaggacttcactttgtagcctaagagggacaaagtccctgagtttcttagacataattgcatgggaagaataccatatctcatctaccaagatgacgttttcatatgatgaatcagttatgaatagcaataggctattccactttcatggatgatcatctgatctttattttttatcctccttaaagtgatttgtttgatcatgctttttgaaggtgggaag

SEQ ID NO: 43315 - DNA, 489 bp, Manihot esculenta
  Intron number 1 from transcript cassava4.1_014263m (locus cassava4.1_014263m.g) derived from phytozome v7.0 (chr-ID scaffold03213; pos 15278 to 15766)
tccgaagctaaacaataatcctttacaaaaagcaggtgagagttaatatataaaactatgattcaaaatatcttctaactgtttgtgttatactttatttttaatccaagtggataagtactctgtttccttaagttcaaaaagtgtttttaaattcactctcacgaatgatttaatttataaaatctgccactttttttttattttatttttgttacggaagcttcattaattcactttttcttttttttatttagaatatttgattgtattataaatatagtcaactaatgttataatttagattatcttgaaaaaaaatttaagggtaatgttataattttttcatatagtaatttaaattatgtttttttttccaaggaaaaatgattatcctaattagttattatctgcacttatggtaatttgatatttctcttatatctctggtcagaagaggctggttcaagcacatccctgagttgagca

SEQ ID NO: 43316 - DNA, 342 bp, Manihot esculenta
  Intron number 3 from transcript cassava4.1_030500m (locus cassava4.1_030500m.g) derived from phytozome v7.0 (chr-ID scaffold06011; pos 108801 to 109142)
ccagcttttactttcatacttggagtcgtctccaggttagtgctggctctaagcttatagagttagacaagatttaggttaatcaatcaggttctcatttgatgcaaatttacagctcattcatggatgtcgccttgacatgtagaggtcttttgatcaacgtttggcatgtaaaattgacacttgttcacttgatcaacacttggcatgaaatcagctcagcaaattgcaagaaagaagaacctgattaattagcttgttggcttgatttttgtttttaacagcaaatttcattttctcttttaaaggactaatgaggcttaattcaaatttggttttagg

SEQ ID NO: 43317 - DNA, 471 bp, Manihot esculenta
  Intron number 2 from transcript cassava4.1_005767m (locus cassava4.1_005767m.g) derived from phytozome v7.0 (chr-ID scaffold00341; pos 798016 to 798486 reverse strand)
gagctgacgtgaattcaaggaattactgtggccaggtacctatttctatgaattttattttattttttttgagcttttttttgggggggctacagatatgtgtcatttgatagaattgaaatgtgatttggtcaaattgtggttctaattgagattctcagatacatgtgaatttcttttcctttttcttttttggagaattgcatcgattcgggaatttggaattggaatggaagccatgactgcttgggaatgggaattaaaatttagtggtcgcaaaatcacccagagaatctgatgatctaatttggactttcctaattttctatgatttagaaatagaaaccaaacacgtaaataggagagattatttcattttataaactggaggaaaaaataaaggacattgatggatatctctcgaactaactaattcaatcatattgttgcttctctttgaagacggcatta

SEQ ID NO: 43318 - DNA, 959 bp, Manihot esculenta
  Intron number 1 from transcript cassava4.1_029684m (locus cassava4.1_029684m.g) derived from phytozome v7.0 (chr-ID scaffold08316; pos 461391 to 462349)
gagggttgtcggcaaatttgccttttggagttagggagtacttgtaccatcagtttttctgtagtagatggtagtcactgtttttgcagagatacctttgtttcaaatcagggctatgattgaacatagtgattggttgctgcagagaatgtgctctagctggtaaagaggatgaatataaccttgtacaggcttgcttgcaatgcattatgtgcttgttctcttcttaaatctcgagagatggacaaattactgaaatacaatcctaaatggagacaagcttccaaatttcctggaaaatgataatttccttacaaagagataaaaagaatgataattaatcaacaaattgtctaaaaatcaggaaaccattgagctttctagtatatgattcacttccttatctttctattttttttcccaatcaaacatgtaaagaaaattttaataattaaattacagaaataaaatgttgaatggcacaaaatttttgaaataagaaaatacaaaaaaaaaggttcggaattttaaaatcaggttcgggaggtccgccttctggacagctcagctttggaaagccgttaatacttccagcctccacttacttcctaccgtctttgccttcaatttcttctctctttacctcttcttttcatttttgtctccttcgccccctctctctccctgtctcattttctttgaataaaatcttaattacacagtccagtttgacagagatttcctcatttcagctgttcctccatgattcaatttcaattataagtagttgagaaccttttcttctcaaattttattgcaaaccctgaaagcgaaacccttattatacccgaattcccttctttacctttatatttcatcttcatttctggggaatcttcaattttgcagaactacagattcttgaatgtaatggttagataatgatgaaaggtgaaaga

SEQ ID NO: 43319 - DNA, 514 bp, Manihot esculenta
  Intron number 1 from transcript cassava4.1_006559m (locus cassava4.1_006559m.g) derived from phytozome v7.0 (chr-ID scaffold00455; pos 110897 to 111410)
ggtgaagaacaggtaataccttttttttatttttatttttaacttatctaaaatttgttttcaagtatacattaatgatttttgctctttcagcaaaattctgtttgaatgaagtaaaaaattctgaatttgtttaacactgcactcctagtacttcagctatcaagctcaaaggagtcagtttggcttctatgagactcgtggatttatatggtggatatgattcattgggtgtcgattttagatcgatactagaaaaaaagattttttaaaaatttttttttattggtggacactgtattcttgtcagtgattatctaattgatcgcactgaggtaatcaactgtatttttagtgtcactttgtttggaatttaaatctctgggtggtctgtttttaatttgtgtttttggttaatttccatatgttgtatggagttggtctgataaagttggtgttttaaattggaaatgctttgtaatgcaggtttttgatctctcagctgtgaagcctc

SEQ ID NO: 43320 - DNA, 880 bp, Manihot esculenta
  Intron number 1 from transcript cassava4.1_014629m (locus cassava4.1_014629m.g) derived from phytozome v7.0 (chr-ID scaffold02960; pos 557322 to 558201)
ctagagcgtggcatatttttacgagaggtccaacatcgataagaggatctgataccatattaaatttgagacagatctaactcacctcagatcaaggggaggagcccatagcctttataagggtacattaattgtaaatcattttcattctattatctaaccctagattgtgctgctgaacaaatgatgggtctattcggttagaattttggacatggatgagccttggctgggcgcttcccatcttcactccccccccccccaccctcctttctttccctaagctcaaacttacttcatgcttataaggaagtaactgctttagagcctcactcagcatcatcatgttctaaatgaagtttttactatgaaaagttgagaactgtacggatatctggtggtaatttatgttttattaaataacaaggatatatttggtaaatctgggttatttttagttagcataatgttatctagcgttgtcagagtttgtgcttcactcttcaaaagaaataggatgagtttgtaactgactgatttttgtattatttgctctaaaatttatatattgcatcacttttggattgcaatctaattgcaagtttatatgttatgtataatgtatggaacaagacaaattggtaattgtaaaagatgtaattacttttgggttagacacttggttcctttgtgaatgttaagatggcattatccaaagccaacaaaaatataacttttgctttcttctaaaattttcttttctattctagcaagttgaaatctcgtcttttttaatcatataatgcctgcaactgaggtctcatagctggactacggctttgcagttacaccaccaaaatcggaggaaaaattgattgaa

SEQ ID NO: 43321 - DNA, 1014 bp, Manihot esculenta
  Intron number 1 from transcript cassava4.1_029573m (locus cassava4.1_029573m.g) derived from phytozome v7.0 (chr-ID scaffold07956; pos 45774 to 46787 reverse strand)
acttctctagcttcattcgccagcttaatacctatgtgagtaatgttatatatctgtaatggctctaacatttaactggaaccttaattagttcttatattaattgttttcattcaatttttaaaagccgtttaagattttctttaatatcataagatttccatggttgatataagctaacattgatgtttgaggcagtttcatggtttgatctgcagaattcatctgcatgacgtaaccaatgctgaaaattctcgagaaaaaaaaacatatcaatggaaaatatttcatttccttactctttgaagatttagtttgtcaaaacaagtatgctaggtattatgctaattagtatttagaagatggagaaattagtttctactatttatactaagtgattacccattttaatgaaattttttctcaaaccccatctattatgaaatcaaatcatgataactatggtagatgtacatgtggtacttacgtatttgaattcacaatgaacaagaagttattttagttggtcaaaatataaatgtgaaacattggacttaaaatctgtgatgtttttgttaatttgtaatagtcaaaacaagcacacaagcctattcaccaaactagacttagtctgagcttcataattaataatcactaaatgaacattaatcaatccttaagcacacttatgctaattgatgaatttttatgattttcgtccatcaatacttttactcgattattttttttttttaatttttatgagtattggatgggttattcgacattttttttcaaggattttatccattctcatagataaagtaaatacttaatataatgggtaaatcaggtatgaactctatttaatcctgagctaatgggctgaggatatctgtgtttgaaaaatcttaaaaactttgcacttgcatacatattgtgacattttaatggtgaatctgactacaattcaaaaaattcaatgtagggattcaagaaaacatcctccaagca

SEQ ID NO: 43322 - DNA, 457 bp, Manihot esculenta
  Intron number 3 from transcript cassava4.1_034424m (locus cassava4.1_034424m.g) derived from phytozome v7.0 (chr-ID scaffold01551; pos 29623 to 30079)
ttttttcctcccctcaaattacattcaaatatgtatgtatttgcattttaccctaagaatttgcccataattaggattccttgttgggagagaaatcagtttattcaaatttaatgctatcttctattgaatcaagatggttcaagttaattccgcataaggtgtcgcatgatttgtatcgttttgatgcttatgataattaaagaattattttatatttatttatatataaaggatggaacttctgcttgagaaaaaaaaaatggaatatcgatatagacatctatgtcagaccaataactaagaaattaactgaactttaaaaggttatccaaatttacctgcgacagattactcttgtctttcctgatgtcctgaaatctgttgctttgtttaacattcttgttgattttttcttgcaggtgaagtttctcgtattggtgctgggtaatctctg

SEQ ID NO: 43323 - DNA, 409 bp, Manihot esculenta
  Intron number 1 from transcript cassava4.1_005514m (locus cassava4.1_005514m.g) derived from phytozome v7.0 (chr-ID scaffold00341; pos 624834 to 625242)
ttgttgcgctaactttccccaatactatcgaggtttgatttatatatatatatcttttgaaaaaattgttttgatcgcagcttatctcctgtttggaagggggacatgaaaagaaaatcgagttttgttgtttaaagtttgattattgtttggttaagtatagttggtctatttttaaaaaatctgtcaaatttgtttctgcaactctcaaaggaattaattttatatattttcaatcagtttcaagaacagaaattttatgtatagataaatggtttttattctatttggtttttttaatcactacatccaattttatattagttcgctgatttttgataaatacaatgctaaatactccaaagatgtcgatttatttgtcgttttgtgataattgcagttcgtaatt

SEQ ID NO: 43324 - DNA, 355 bp, Manihot esculenta
  Intron number 1 from transcript cassava4.1_008475m (locus cassava4.1_008475m.g) derived from phytozome v7.0 (chr-ID scaffold06708; pos 335080 to 335434 reverse strand)
ttcacccccatcaatcgcgatctctaccattccaggtattgcttcctgcttcttcccttgacatgaatcagtttactgttatgttatgttgattcttcctaattgtgaaagatttatgttaactttacaacttttatattctttttttgtttttaataaatttttctcacaatttgaagattttgagattttagttgaatcctggttaacaatggtaaaggtggtacctgttttattgaaagcaaaattatttgatgcttttgttcaaattaattaactggaaggatgatgggtttttcttaaacattcttattttgcagtatcgatttgttagagcagataaaggcattggttc

SEQ ID NO: 43325 - DNA, 642 bp, Manihot esculenta
  Intron number 1 from transcript cassava4.1_012166m (locus cassava4.1_012166m.g) derived from phytozome v7.0 (chr-ID scaffold07012; pos 1168072 to 1168713 reverse strand)
atcaagtccccggtgaccgcggtggctccatacccgtaattaccctcttgttaaagcacttctcttgattcaatttcgtaatgttttgcttgatcttggattggctttgcttaattttcttgttacgtagagatttctgctttttagaaaatgggtattataatttcatcattttgacctttttctcatctgtgtatattctttttggactttttttatatgttttgtttacccgtttgtgtcttctgctatgttttttaatcaatgggcacatgtgagctcgaataaccaagctttaatgagggaatgtagcgttcttgctcagctggtatcactttaagtaactaaggtgtcttagcatttagtttctgcttgtagtttcaatgagttttgattcgaatctcaattttatctggacttcaaaattccagttattacggttgtctttttcttctttataatattttagtggttgtttttcaaactttgcaaaatggtctctgttattgatcttccccacatacacggatgacttttttattcttgattttacatgtcactattatatgttttgaacaaaaattgtagatttgttggggttgtgtaggttgcaatcgaagaacttcagcacattttaggaga

SEQ ID NO: 43326 - DNA, 762 bp, Manihot esculenta
  Intron number 1 from transcript cassava4.1_030951m (locus cassava4.1_030951m.g) derived from phytozome v7.0 (chr-ID scaffold06512; pos 250200 to 250961)
attcctcatctgacgaggcctggtatgatcactggtgttagcgatatgcatttttttgcaatgcagtttatgctctttgtctttagttgtcttgtttttgtttcaagtttacactactcttttagctttttctaaaacatcggaatactgtagatattattaggattatattgggagctttacgggtgcggaagagagagattgccaaaggagctgtttattgtaaggtatcgaattttgaccgaaaatgtaacttcactggtcacgaaaattaagtgatcttgcgtccaagtgtggtttgtgaagtttaagcttagttgataagtgttctgttggcaaatttgtgcaattcttgcaaaaattgatgttcttttttgttcttcattgaattgattgattatgaattttttttctttgaattttaaggggttatctgttgttagctctgtccattgataaattacttgtgcccctatgaagggcttatctgtagttttagaaatgatttattttgcccgtaaaatattgatacttatatattgctatatgctgccgtcagctggtttatggggaattgcaggcagtctattttagtacatcttttggttcttcttttatggtttctttttgtctttgccttcatcgagtagtaaaagtaagcatttaatctgtctcctccaaggatgtagagaattgatggtagcatatggtttttctgtttcctcactcatagggctccagcagaagctgaaaatctatcag

SEQ ID NO: 43327 - DNA, 710 bp, Manihot esculenta
  Intron number 3 from transcript cassava4.1_004022m (locus cassava4.1_004022m.g) derived from phytozome v7.0 (chr-ID scaffold09876; pos 673048 to 673757 reverse strand)
agagctataactgaatccaccgttactgaagtgaggtatgtcctattgatttagcttgtattcgttcttctaaagtcaggattatatatatatatttttttttgcttgtatcttttattccccttgttgctttttctctcgcaaccctgctgcaatgacctctcttatacttgctgacgcatcttttgtaacatctgttggaacttggctttgtttttgtttcttttttcaccctcaccagatggttatccattggaaggaaaaaaaaaaatcttttcctatgtatattggggtctattttgtcaacagaattatgaggatggttgcgttgagtatctttggttctttcattttactttcttcctgtcactatagatcctaaacctatacaatgccaagaaattacgaggatctattttcgtataagagcccagatcagcaaacaaatgataacttattgtgtttgaagggttcatttcttatcataacaccttaatttcattgctaaatgaatattttaatttgttttgattgtaaatccattttggagagaatgttggttacttgggttacaaaattagaagcatctcttagtgttattgttggatggtgaaactgaagttttgtttcttagtttttcaagtttatgatttattttacttgaaagagatataggtttctgcatctggttctctatttggcggagagag

SEQ ID NO: 43328 - DNA, 993 bp, Manihot esculenta
  Intron number 1 from transcript cassava4.1_007337m (locus cassava4.1_007337m.g) derived from phytozome v7.0 (chr-ID scaffold02960; pos 97431 to 98423 reverse strand)
aactgaaaagatatataaacaaccatttgtcattggtgagtcttctcattcagttttatgtcagatccttctaagttagcctgaaggcacaagtatgggaattaagtagtgcagttaattcttaatgatcagcgtgtactttggagtgctgaaaagtcattttcttctttagaagatcaatgatagcctgtgtggtcttgcagtgattatggagtgattaatttaagacatcattgtaaaatgagtgcaagatcatttatttatttttatttactttttcacgtgttaatatattttgaactttccataatggttaatctaaggatggacatacagaaagagtaaaagatgggggagcttgagaagcattgcatttgttcgctattagcttaagcgtttatcatgttttaagtgtagatcttgctgggtgctcagtgctgtctgtgtgtgtgacaactttgttgttgttgtataagtgttcttattgtctgttttctggacaaaccacatttttctattttcacttgctagatgtattcctttgttgaggtatttttatgacctttaaatattaccttcctctttaatgctacctgatagcaatgcatgattgtttaaaagagtacttgtggccttgcatattgcagttgtccaaatcattgtaagattgcaaaaatcctaagagaatggagtaattataatttggtcatgggtaaagaagtggttgaagttggtttatgtatatgtaaactttttggtttagcaggtgaagcaatttgcagaagagaaaaataaaaggatggttgctgatttggattttgatgaatgcaaaaaattaaatggaactagaacaacactttttgccattagtcgtgattccaccttaacatttattttaccgatttgatttcttggcttgagatatgcatgtttattattattattattattgacacaggggttgctgggggagcagcttctggaaagactaca

SEQ ID NO: 43329 - DNA, 689 bp, Manihot esculenta
  Intron number 1 from transcript cassava4.1_002518m (locus cassava4.1_002326m.g) derived from phytozome v7.0 (chr-ID scaffold01551; pos 2615721 to 2616409 reverse strand)
atcttttccattccctttcttttttatacttggaggtaatttatatgtttttgtgctatctgattttctaatcgaactttttgatctatttctcttcattgtttctgcattctgtattggttgttctttttcagtagttgataaattcttaaataacatctgttttcgagcttcaattggaccatttgcatcgtttggttactgagaaattgcggaaatgaagagtgggattggagtatgtatggcagctacactgatcatcacctgaaactcgatttgctggtttctctaattagcacttccatgtggcttcttgttttgcgaattaagaattacgttttaggtggagagggatgggatttactgtgataattgttttttcctttgtatttgaagtatatttagggtttttggtggtgatgaacaataatttactgctcttcgttgctggtttttctatgtttgttcttgaagttatctttactcgtgctacacattgtgcttgttattaatatttttgaagattttaaagttgtgaatcgagtttgtttttaggctctgcgcgagtctaagaagtaattgggctttgtacaaaaatgtgaacttagctgcggtagtgattctaatgaacgacttgcatttaatatcatgcagatattggtgtggagatttgagaattagagtctcga

SEQ ID NO: 43330 - DNA, 742 bp, Manihot esculenta
  Intron number 1 from transcript cassava4.1_010681m (locus cassava4.1_010681m.g) derived from phytozome v7.0 (chr-ID scaffold03332; pos 946663 to 947404)
taactcttcagcaaaagcttgactcgttcattcaggtaggttttcttttctttatcccctatttagaatccataatgtaagaattcaattcaattgatctattcattgtcaactcatgttgtagctttaaaacaaattcattttaaaagaaacagaattttgtatgtttgtgtgagaactcatttgccaaatgaccctatgggtttttggaattttttttaattgggctgtctactcggactgtagaagttggactctgttggatttcttagatgatgtaggagagcaaatgagtatgaaaattgcgcactctattgtattagggttttacctattgctaaaatacgcatgatgtatctgtctagagctgctaattagtcaggatcttgatgattttgtctccttgcttgaagaattgtaagaaatgcttgcttgataagctggtggaagagttgaatgtacatttaccttatcatcaatttgacttgtgtttaaaagtggaagcggataatacttaggcttgtaataagtgaaaacatagtttgagttatatattttagttttctataactgattaaaagaataaatatggaggtgattcctttgctttttggcgatgtcttacctgctctttatcctcttttcttcctttatggatttattgggcgttaattgattagcccgcgggttagcgggcggcaaaatggtgggcaggttgaagccaagtccttaagtagattga

SEQ ID NO: 43331 - DNA, 723 bp, Manihot esculenta
  Intron number 3 from transcript cassava4.1_010594m (locus cassava4.1_010594m.g) derived from phytozome v7.0 (chr-ID scaffold03614; pos 1348453 to 1349175)
tgaggctgtccgtgaggcaaaggtgctggcggaaggtattcgtctttgttgttacttgtgatttagtttttggtgcttgtgttgagtatatgacttgctatgatttaactgattaatccaaactcatctataccataagaagtatgaaactggctagcttggttttaagatttgtttgacaaggttaaatgtaatggcttgcaattgtcaatttccctataactatatcgggctgcttttatggctctgttctatcctggccttcttgagagagaacagaaaattatcctgagaagtgtgaacatattgcttttgttcaaatctacaaggtaaaagctcagaagcttaacatccaacttctttctcttgagctataacagcctagatcaaactcaataattaggcagcccacatatgaaaattgcccaagttttccgcacttagaaggtttttgtgagaattttccaaaaagctatgagaaatcactatgcaacctattgttcttttctgaaattttgcacaagtgtaaaatcatatttgatgatttccttttccttacttttctcctaacgcttccatcctttgtcatggttagctttgattctctatcaaacacacattcatatgctttaaactgccttatgccaactataagctttatctaaaaccttaaaacatgttattttaggtgggactttatccttgattggtcactcagcagga

SEQ ID NO: 43332 - DNA, 653 bp, Manihot esculenta
  Intron number 1 from transcript cassava4.1_015286m (locus cassava4.1_015286m.g) derived from phytozome v7.0 (chr-ID scaffold03332; pos 149739 to 150391 reverse strand)
ttgttaccgatctcaattcataggctacccgatcggtaattttctggatgataggataataagatatgtgaatttcaatcaatgcattgtaaatttatctgatagtatttgttctggatttgacgagatctttagggttgttcacgtggttttatgagcaacagaagcattttattctttctgttatgttgatcaaggttagggtatctgcctgaattttagggttttgatttctttcccccttctgtgttattttggagatttgcaatttttgttcaaattctattataagatttgagatcactatggtttctgggtttccgtttttggtttttattagaggagatcatgatgtcccttaggatttgttaccttttaagctcttcttcttagtatctttgaggacataagaggaaattaaagaaacaaatattttgcgacaattggataatgtgcttttaaaaattgagcttcatttatcttgtatcgggtctaatactgccttatgttatttttttccatgatggatattcaattgctttcttttttcatcccttttaattgagagccattttaattcttttattggttaatggtttttatgcattgatttatagtaagattatctgttgatcagctatcattcaggtaaa

SEQ ID NO: 43333 - DNA, 361 bp, Manihot esculenta
  Intron number 1 from transcript cassava4.1_005390m (locus cassava4.1_005390m.g) derived from phytozome v7.0 (chr-ID scaffold06512; pos 2101307 to 2101667)
gagccgatccttctccggtattgttcaggtggtattttatttatcactttttattttattttattttttaacttcaaaattttcatgtcattagataagaataacaaatgggttgacttttttccaaataaaaaaaaaaaaacaatctcagaacacaattttgaattttggaacaattactgcctctttggaaggaactattcggttagccatgctaattcccgtactagtgcagtaattttatagattctatttgcttgtgatgtagtgatttacctactcttaatcattgtcactcctgtttgattggtggaaatttttggcagtcctctttcctttggggatatctaatttctccgat

SEQ ID NO: 43334 - DNA, 329 bp, Manihot esculenta
  Intron number 2 from transcript cassava4.1_006608m (locus cassava4.1_006608m.g) derived from phytozome v7.0 (chr-ID scaffold01551; pos 2569598 to 2569926 reverse strand)
ggtgtcggttcaatcacccgcgtgaacggggcgcggtaaagctgattccttttggttttgtctttaattgagttcgaattagtgctttatgatttgttctttcgaattgtatcattgaatcatttttttgggaccatttgagtttgatcttgaggtttttctattgaagttggatgattatttgcgtaattcgatatgttttttgttatgaaatgagtaaattgttaaatagtttggttagtcttcggtgttgctgtaaaagatctgtcatactaaagtgttttcattgcttaggcaatagcacctgcaagagctggtgctggggagtt

SEQ ID NO: 43335 - DNA, 414 bp, Manihot esculenta
  Intron number 1 from transcript cassava4.1_020919m (locus cassava4.1_020919m.g) derived from phytozome v7.0 (chr-ID scaffold01895; pos 91516 to 91929 reverse strand)
gtggagactccaaagctctgagaatccatgccaaagagaaatgaactcttgattctaaaacccacttgcaggtgaattcatcactcgttgctctacttctttatatttgtttctttaagccctttctttttctgtttcacctacacatcattgattaaccctttgtttggatccttaactgtataagggaattcaagagaaattaatgtttgattttttgaggtatagattctacataactttattatttgttaaaattgcttcattccttgcaaagcctgtgaattttgtattgcaaaaggcagaattacggccatcttcgactttccaagtgctttaactactatttattggagttctcatatgatcttggcttggcattaatttgcttttcacataattgtgattaggttc

SEQ ID NO: 43336 - DNA, 613 bp, Manihot esculenta
  Intron number 1 from transcript cassava4.1_023105m (locus cassava4.1_023105m.g) derived from phytozome v7.0 (chr-ID scaffold12147; pos 87710 to 88322)
gctagtactccactatattacatattaataatgaatatatagtttaattttgtaaaaaaaaaaaagctcaggaacaacttctactaacatttcatttactcttccatgaaagcgtacaaatcctaactttctcttcatcctcactcgatttcatacttctaaattttaaaaggctcaactaatcaggcagatgcccagtcgaccattactatctcaactgtgaaggttggtcccaagcaccactgatcaccatgaaactcttagcttggaactatgtagttctggggacctacaaactattcaattccttaaaaaatacaagcataatttatattataaaaactcatttgaagctgtgtgaacttaatcatggcttaaatggcaaattagtttttgtcatggtttgggtgtggataatttgggtactaataatcaacacaatggtggtttgatgttattataggactccttaatggatttttctttgaatcatttttcccattatcatatttagattgtaatcccttgttattttcttttttctacatggttctttacatgaacctatggttggccagaggacagtaataagcattgtacttttcaattgttg

SEQ ID NO: 43337 - DNA, 988 bp, Manihot esculenta
  Intron number 2 from transcript cassava4.1_004266m (locus cassava4.1_004266m.g) derived from phytozome v7.0 (chr-ID scaffold01701; pos 268807 to 269794)
gggacgtggaacacagctcaaggatattccaagtactcctcagttgtgctctctgctaattttctctttgactgttttatgtctcgtgtgtgcacggtacaccaatttgaggttattcattattgagagcataagtctgaatcctgagtgtgcttgatttcattaacattttgccattaggaaattgatatcggcatcatcaagtgaaaggcaagataactttgtttcttaataatgtcaattcccagtaaccgttaggaaagtaacatttttctcattaataacttacagtttcatgaaagtcgtgtgtctctacttctttctttggttcttggcagactaagatggatttgatttgtctgaggattcgtgtttctacaatgatgaagcataacataaacgtattgatgctatttctattacactttgtcttctttccacttccctatgccgatggccatatgtaaataataccaacattcttacttgcattgcccaagtgaacttggttaattttcttgctgggtataactgttaaggtaagtgcattatgaaattatataggttgcctttaaatcaggggtagtatcaaattcagttggaaacctgcatttttgtggttctagaaatccctaggaaatgacaacagaagatcttaatttgaactcttctcaatccccactcccttgttaaagttttttattgactttttgtattttattatcattggcaagattctgtgcgacaattcaagttcccaaactttggcccttgaggctaatttaaatttcaagtgatcttgcacatgaaggaaaattttcatgcatataaacgtgcagaaaattattgttgttgaccaaaagaaaattagtttggatgatgatattcactttttactcaacttttctttttacagcaggctggtctatttttgttctgatattgtgaactgtttcagtggctttcaagttgtccaagagaaaacctg

SEQ ID NO: 43338 - DNA, 418 bp, Manihot esculenta
  Intron number 1 from transcript cassava4.1_023289m (locus cassava4.1_023289m.g) derived from phytozome v7.0 (chr-ID scaffold04681; pos 389998 to 390415)
gggctttgagatctgctgttcaaactctgctttctgttagtctctctctctctccttcatctgccttgtttttgcgtttttaagtggtctgcttaatcatcaagaatatatgagaatagaaataataattatggttctgttcttcacagagagcatagaaagaaaaatgaaatttcttttctcttcttcattaaaaaaaaaatcaagattcaaatttgtgtatgaaaccagggagaattctgcctctgctcaaagcaacactgccataagctgcattactgtttagtttttgcctaatatcggccgaaaagtttgttttgcgtctatcttttctatttagttctttacttgggaaagggaaagtgaggattttggtaacttcttttcttttgtgcttggtttgtaggggagagaaagg

SEQ ID NO: 43339 - DNA, 822 bp, Manihot esculenta
  Intron number 2 from transcript cassava4.1_013344m (locus cassava4.1_013344m.g) derived from phytozome v7.0 (chr-ID scaffold09631; pos 82272 to 83093)
ctggagaatcttctccccaatccattccatttcaggtgaattccatgcggtctaaacttacatgttctttgtgtttggttgtgtagaaggaattgaattggatttttgaggtcctgattctgattgaaattagctttggttaggttagccctaacttggagcatttttggatgattgatgtgaatcaaatacaggttaatagtttagctcagtattaatgtgaaattacgtatttatgtttttaaaacaagctaattcataaccgaagttaacaaatataatcttagaatgatcacgtttgttttagaactgggtaaaatacacggcttcacctgctataaggtgataggggttaatggaaaaatgaaatattttattatagttattatcttctagaggaaagagaaaattctaggttcaatgttgaaaagaaagttaatttaactcgtcttgatgcttaattatatatatataagattggaagatgataaaatgaagataggaggaagccaaaagaagaaaatataaattaaaatgaagttaaacttccaaatacttggctcattagggaaattttgaaatacgcggttaaatggtaattttatttttgaacatgctaatgcaagtcatgggaattcatttttgaatatgctaacacaagcctaaatcccaatgaatttctgcagttaaatgagtgaatggtgatactgggatgccttatgttcacctatcaatgtgttgtatgatttatccaattctggtgttggtctttttgctcgtattgtaggttttaagctggaaaccgagagccgtttattttcc

SEQ ID NO: 43340 - DNA, 743 bp, Manihot esculenta
  Intron number 2 from transcript cassava4.1_030803m (locus cassava4.1_030803m.g) derived from phytozome v7.0 (chr-ID scaffold00977; pos 178366 to 179108 reverse strand)
ctagtcgaagagtataaatttctctttgattcttttgcttagaagaatgcgttctagacctttggaagagaaaaaccatagtatgttgaactttgggtaggctgtttaggtttaaggaactccactaagtctaagaccaaattgtttattagattagtttcaaaagggcgaaactttagattaaaaactttatattgcttggtaaatttttatttatatatacatatttttgagttcgggtcatttttgtggtcgatccggatccatagaagtttttacaagacaacagaagaagaggattttttcccttaaattccagagaaatttaatcagttgttgaatatatttttggtgaaaatatttttcttcaagaatactagctagtgaaacaaacatggtggataggatatttgcatgccatgtattttggtttttgtgcaatatgacttatttattgctgggaaaatcaaggaataaagaaggagagcacgtggaatttgaataatgtattttgtggtgctcgggctttgcaaagcatggaaaaaaaaggaaaagaaaaaacaaaaccaggttttgttatgtctcaaatggtgaaaatttgagtttttggaattttaatgggctctttgcattcattggcttgactattcaacgaggtataggatcatgagatcatgatacacagtatttatgggtatgtttgttgcttccagaagaaaaacaataatcaagagaaacggagg

SEQ ID NO: 43341 - DNA, 513 bp, Manihot esculenta
  Intron number 1 from transcript cassava4.1_000859m (locus cassava4.1_000859m.g) derived from phytozome v7.0 (chr-ID scaffold10173; pos 653131 to 653643)
tccattacaacaagaacccatctgcaattgaccaggtttgtgcccctacctttatgggatatgtttctatttggtttgtgagaaattagaaggaaagtgtcagaaaaaaaatattttccaaacgttacgtctgctgctgtttattctagggcaacattactgcagttcgatttgatttagccaaataatcatataatgcttgcttgaattttatgcttagatttttttttcttccgcttttaaagttgttgaggttgtcattggtttctgataaaattggggtaaagtatttggaaactttagtttctgctaactcattgcaagatgcaaatttacaaaatgggtttggcactatcaacatttgtacaatattagttcacttgatgaggcatagcattttctttctgagagaatttgacatctttttcattctttatcttctgtgtttgataagattttatttcatgcaaaaatgcaggagacttttgctgaatacaccgctagaacatcctt

SEQ ID NO: 43342 - DNA, 575 bp, Manihot esculenta
  Intron number 2 from transcript cassava4.1_033747m (locus cassava4.1_033747m.g) derived from phytozome v7.0 (chr-ID scaffold09151; pos 884719 to 885293 reverse strand)
aaattgtggctttcaccactgctttatacattcttgtaagtttcttcatcttcattcttatgctcatttcagctaaattattaatgttactttaaattttattataatttatgtatttacggacttagtttagtttgatattaagtgtatctaagtaaatttaagagatttaagattctattcccctattctctcaattctcttttcaaaaaaaaaattattataatttatatattttattcatttatgtcctaataaaattcatggctataattaatactaatatttaaaattaggttaaattagttaaaattaaaaatgttaggctataattgtcaaaaggtaaaaagtttttgggccaagaaaatatatttttaagtgttgaagatgaaattcggcctatggcagtattgttaagtgttgaagatgaaattcggcctatggcagtattgttagcacatacgtctatagtttacatacgatttataaatttttttctttttacttaacctcatttacactatgtctccaatgatacagggattggtgctattgatttttgctcctcatactgg

SEQ ID NO: 43343 - DNA, 832 bp, Manihot esculenta; identical to SEQ ID NO: 42209
  Intron number 1 from transcript cassava4.1_017310m (locus cassava4.1_017279m.g) derived from phytozome v7.0 (chr-ID scaffold00080; pos 161779 to 162610 reverse strand)

SEQ ID NO: 43344 - DNA, 1019 bp, Manihot esculenta
  Intron number 1 from transcript cassava4.1_020783m (locus cassava4.1_020783m.g) derived from phytozome v7.0 (chr-ID scaffold07519; pos 869916 to 870934 reverse strand)
agagtattgtagtgtctttctttttggttctcaatgtgagtatccatatctatgagatgggaatgtttccagtttttgggcttctaattggaattgctgaattttatgtaaaatatttttaattgtcaaggctattgatgttttatgcctatcctccccccccccctcccccacatgcagttgtaggggatcatttagtaatgtttctagttgcacagatacctgaacatggtggttcagactatgaacaaccaaatgtgtgtgcattaacttgcttatgttcagttggagttcgacattgatgtaactaaatgtttacatagagttttgaggctgtttacatgaacgaggtgggtgaaaagaacagcagaactcctatgcaattgcgcttaatgggatttacctatatgtgcataaagcttgaataacatttacatctaaacacgtacctaaactgaatggataatgaaaaccagataaatttgcacctccttctattccatatttttttggtgttgggacttgggagtgcatgaatgatcaaatcaaattgtccttgtatggattctctttcagtgtaggtaaaaattgaatttcctgcattgccatcttgaagtatcagaacatgctataaaaagaaaatgcctatgtgtttgcatgttttcatttgttctctgttttgtagttatgctgtcttagaaatattgagtagcactgaggttgccactagaagcttttgtttatgattgcagcctctagtcttatgttcaggaacttcttttgttgttctgttgtagttcttagttgagcacaactatgaaatgatgttcaatagttctccatgtaagttctcatatttgctcactcacaccacaaatgtgtgctcatgcaaaatatcactgatgagctttgtttgtatctcaaactggttactgttctgtttctcatctgtggatgcaccttttctcttttaattaaatttagggcggacgaggaacccgttgatcaaaagaagtatc

SEQ ID NO: 43345 - DNA, 461 bp, Manihot esculenta
  Intron number 1 from transcript cassava4.1_009212m (locus cassava4.1_009215m.g) derived from phytozome v7.0 (chr-ID scaffold06512; pos 1252345 to 1252805)
cagagactgcgccgcagataagcttactttctattgtgagtttctctttatttttctgcctctttatgttactggttatttagttccaaatcctttccgttgttgggctctaaatcactcaggaattttgtatgtgctgcagtgattatctgtatgatttatgactctgaagtggggaatgtggacttacatttgaccctcttcttcatcttcttctttttcttttttgtttgcatttaaccaacccatgttaaatttttctgagcagtattagcatagggttaatggtcattttgctgttttaagtggatatggatgttgggtttctatttcaggcatcaatttttcttagtaatgtaatggctgatgaaatttaggatggaagcttcagttttattcatttaatagcgtgtctttgaattgtagggggaagactggtggaatttattggaagaaggaaa

SEQ ID NO: 43346 - DNA, 871 bp, Manihot esculenta
  Intron number 1 from transcript cassava4.1_025194m (locus cassava4.1_025194m.g) derived from phytozome v7.0 (chr-ID scaffold04151; pos 539432 to 540302 reverse strand)
gagtcaaaagttgcagctgaatctgcaatatccaggttgcaaaagagatgcctagtgttggcagatgggagttacttcattcttttggtttcttcatgttccttctgttacaaataaataattagcaagaaactaaatcaattgaattcttacaaaatcatgtatgttttttctcaaatggtctttttttaagttaaaacgaaattaaatacttacattccgaactccatgagaattaacaatacaagaaatcaattgaatgaactcttgcaaatttcttaatttccagatgaggcgattttgtctcaaattcccctttttggcaaatggtggtttcttcaaattcttctttgaagtgaactcaatatcctctgaataattcatatatgcctcacttcgaccctcttttaagcaagagggattttatcttttagaaagtggaatggtatttaataggttaaaatcagacaccactaacagagtattttctcggttgaattcttcccagttcatctgattttgaagtgagaaattttttttttctgtttcagaataccatgtgtatgactgataccatctgattttgaaataatcatcagacacctctatgttggagtctgtgtctttgttgctgaagttcacaccccttgtttccttgtactcattgatcaagtccttatttgttgaaatctgtcggaacaaaatcaactcaatcctctttaataacacaatgataatacattcttgctaatttgtttttcttcaatgatacagttttctgatgattagcatatcaagtgtgctgtctgcgatgtacttttttgctctatttgcagatctgttgtttgcaggagggtttctttaagggatc

SEQ ID NO: 43347 - DNA, 794 bp, Manihot esculenta
  Intron number 1 from transcript cassava4.1_001063m (locus cassava4.1_001063m.g) derived from phytozome v7.0 (chr-ID scaffold02815; pos 86515 to 87308)
attcctcctccgtcctttttctccagcagctcaaagtatggcctttttcttttgtagaaattattcttctttttatgggaatgtttggctgttgagcaaatgcggacaatgaaagcacttcagtttcctctcgattgcgttatgtgaaacgaaattaaggttatggaatgttggattttaacgtaaattttcttttgcttttttttttttaagcaagctttaggatccattcttctattctgaagtatttctatcttcctctttagctgatttcaaatgttcataccctgatacccctctccattttagagaatttcccacgtaccacagggagatggaaattggatttagacttcttcgtttgtaacagcattattttgtttgagtttaatcttttattttgtctttttagacactcaatattcagtttttggttttgcttgatattttggaatgttttgctgctgacggttgagaaactgtagctaagatacagaaagctttgaatggaagagcctttactttatgggtagaattcgttgattgattacaatgtcatttcatgttctctttcctttaaaatcaaacttaatgtttagtttttgtggtgaattctcaattttttatatttgacactgtggaaaaaagatcttaagcatataatttctttacttaaaactgcacttttatcatcaagaatctatcaaggatagatcatttttggcattgcatttcatttcttttttcatgtgggatgaatcagcaacgcaacttccttgtgactattggagagg

SEQ ID NO: 43348 - DNA, 463 bp, Manihot esculenta
  Intron number 1 from transcript cassava4.1_000800m (locus cassava4.1_000800m.g) derived from phytozome v7.0 (chr-ID scaffold06711; pos 511319 to 511781 reverse strand)
gcaagaacccttctgctattgatcaggttactagatctcctttcatatcttagctggtttctaagtccgctagaataataattttccatatgcaatccttacttgccagactattttgtatttttcttctctggaatgtgaactttatgtctgtattttaatttgcaaactagacttgatccattagctcattcaattagataaggtaattaatcatgcacctgcctgcaattctataattccagtggaaaattcagtttcttccaggttttacttaaacaggaaattagttcaaaatcttaaatatgcagaatttgcttgtggtttccattttggaattaaagcttagtcagaagcagatctgggttcttttgtatatgatcactattgtcaagtcaaaaacacaaactaactttcagaatttatagaggacttttgcaaggtatacagaaagaactgcttt

SEQ ID NO: 43349 - DNA, 938 bp, Manihot esculenta
  Intron number 1 from transcript cassava4.1_003329m (locus cassava4.1_003329m.g) derived from phytozome v7.0 (chr-ID scaffold10367; pos 10001 to 10938)
cttctccaaaccctaaccgcgacggcgatattcaggtacttcttcttcaattggacgtagtcgagttttctatgtgttcttctctagcagttggttgtgtgtttaagttttaatctaattacaaaatttaaattagattctttaagttagctgcaattccttctttatttgttaatctagttttacgatgagaagaggttgcacattatcagatttttgtctgccatttcagatatgagaagagcacattcaagatgattaacattttatgaagcaaaatgggggacaactaaagcactagggacttgtttggttagataggaattgaatagcattcttttatattttgaatttgtataataatatttttaaaaatatttacttcatatgataatgggcatattttaaaatttaacataaaaataaaagtacgaaattactatttctttccgtgatattccatatttaaatttaaataaaatctttgaataactctttatgttgtcccatttaatactgggttactttgacgctctctctaaatcataaaggcctctgttgattctttaataatcctattaatatgttatataattatgaaatatggttagtttggcatgcttgtcaattcctttcctagaaaggagtaattcggttgaatataagaataccttgatccattggttttatgtctatggttgcattatatttgctattattggtatgaaacagagatgctttcagatctcaaaactcataaaaatagatgggagtagcctgtaccacaacttctatcaaaacttccttgcgagcatttgaccgagcttttccttccgacttctgaccatcttccgttacctgagcttggacaataattttctcttgtttttgctcttcgtacagccattggcattattgaggagtgaagagtatcgaca

SEQ ID NO: 43350 - DNA, 698 bp, Manihot esculenta
  Intron number 2 from transcript cassava4.1_016884m (locus cassava4.1_016884m.g) derived from phytozome v7.0 (chr-ID scaffold06512; pos 197820 to 198517)
ctcagcggaacacgttcatccattcccaactgctggtgggtacgaaaacttgacctttctcctccaattgattagccttttacgtgatctgtgattgtattgatcgaattgttttccatctacttgattttggaatgcatttgtgttgtccctgtccgacgatttatttacgcaacagcactggggagagtaattcatgtaacatttgaagtagcatcgctatcaagcttttgtttgaaaaggaattgaagtaattacctatttctgcagtagaagttcgtttgaaaattcatgccttcgagaaactggctgttttaaataattcttcatttttaagaagccattgaaaataagttcggtggatggtagtattagttctgttgtgtgatccagttgttcgatcaaatgcttcaaagagatactgcattgtttctaaaattcttctgtaacctgcaccaaattaatggttttcttttatgaaagttgactaatttaatcttttgatgcttttgattgttactgggatgatagttcgcatgatctgatgaagattgaaggcttcatatctatatcttcagaattgggttagagcatttttttttggtggtgtgtgactgtgtgttgtatagtctctaaccggtgtggatggtcttccactactaggattccattgctggtcccgttcacaaaatccaaat

SEQ ID NO: 43351 - DNA, 849 bp, Manihot esculenta
  Intron number 3 from transcript cassava4.1_023286m (locus cassava4.1_023286m.g) derived from phytozome v7.0 (chr-ID scaffold06512; pos 1883069 to 1883917 reverse strand)
ttgaacgatatcagtggcgctatcaatcctggaaggtgatcccttttcttttcatgataaattattggtcaattgaatagtataaacctcaaccttttatgtagttaaaaaaaaaacactttatgtgtttaattttttattttgatttaaatgtgtttcaactttactttttggttatttaagtgtaattttaattaaattttaatttatgtatgatatcaaatgttataagtgaatattttatctgatatgctatgtatataaaaaatcaaatttcgaactttgatttttatttaaaatttttggttaagattgaactcaattaaaaatgttggattataaaatagaatttgaagcactccgatgcttagcctgtggaaagtgcatccttgtagacttgtgaggtctaaggttctattcccccaacccctatttcaaaaaaaaaatatataaacgtcagacatttattgtttaattagcctaagcctatgtttgcattgagaggctcttatgtttggttaagaggagattgaagagaaaagaaatttttaggaggaaaataacatttatatcccacccctattttctctccaattgagaggtggtagacaacttcttttaattactaaaatatccctatgttttatagatcatttttaaaaatttaaggataaaattataatttaaccattcaaaaaactaccttgttttcactattttcctccctctatccaaacataattccaaaaagaatttttcctcccttctatctaaacacaatttttaaggtttttttttttaatttttttttccaattcatcagttggataactatctgtgtttcgtagg

SEQ ID NO: 43352 - DNA, 353 bp, Manihot esculenta
  Intron number 1 from transcript cassava4.1_005577m (locus cassava4.1_005577m.g) derived from phytozome v7.0 (chr-ID scaffold07012; pos 1517871 to 1518223 reverse strand)
ctccgtctacttctgaggtacttaccaaggccacttctttgccataaaatcatttatgtttccttttctgtgaagttaggttagattgtatcattgtaacatgcattagatcatgtctcttatgtttttggttaaatcatgcacatttttcagaagacagctgatagagcttagggaatgcatatatcccttatatggagattgtaactttgacttttgttactaacaagagtctctgaataaccttggttgaaaatttcaaagttaaatctgattcctaatttactcttcttcctttgacatttgttttaatgctgaatattgactgtaggttgtgtggtcagagcaggaga

SEQ ID NO: 43353 - DNA, 767 bp, Manihot esculenta
  Intron number 1 from transcript cassava4.1_018828m (locus cassava4.1_018828m.g) derived from phytozome v7.0 (chr-ID scaffold03933; pos 4441 to 5207)
aaacaaatctggtcctggcaaacctccttatactcgtaagtccatatccaatatctcttttcatatttatatatatatattaataacatagaaaatatttttatcatagttatgaagctgtaacttttcagaggtttgatccctaattctgatattatacttattggaatgagtaattcaatagttttttttttaagtgaaattaaatatttgattgtagtatataaagcaaataatctttttaataaattgattcggtaaaaataagactcataaaaaatattttttattgcctcttaattaggaatatattttctctaaaataaaatgaatattaaatttttattttctcaattaaaatcagctctaaatcaaataataaattaaaatattaaaaaataaaattacattacatatgtgcctcttttaattgcaaatatttatttaatgataaaaataaagtaaaaaacaacaatgaaatttacgtataaattatgagaaagtaattgataaagtataaattattaaattttaaaatatatatttagaattcaagaattatattaaaagaatgcgactcttcatatttagcctaaaatatatattcttttgtaagaacatatttttttgtaaatttatattctttaagattatatcttttatgaaattaaattgatttacacaggtgatccatttcaatttttaactattttctatcacgaactgataaagacgatgttttggttttgtggcagcttcaaagtgct

SEQ ID NO: 43354 - DNA, 428 bp, Manihot esculenta
  Intron number 2 from transcript cassava4.1_012251m (locus cassava4.1_012251m.g) derived from phytozome v7.0 (chr-ID scaffold03777; pos 243469 to 243896 reverse strand)
ttcaggtgcagcccattttgctctttttactttgaactttgaattcaatagttgttctgaattcacaacccctctatatttggtgacaatagaatatccttgtagtagttattcagtgctggtggggtttggggcttccttttagatttttctgtttcatgcagattgtagccttttgaaaaattttcatttgggtcattggactgaattttccgaattggttcatttgaagagtggttgatcttttgaacattttcttttgtatctattattccaggtgcagtatgtctttggctactgaaaatagtactcaatttttcatgcactttagtgtcaaactacttaataataactagtaaaatattaattttcccatttttccctgtatcccagcctgtgaaaagccctgtgacaatctgtggtgatat

SEQ ID NO: 43355 - DNA, 828 bp, Manihot esculenta
  Intron number 1 from transcript cassava4.1_001268m (locus cassava4.1_001268m.g) derived from phytozome v7.0 (chr-ID scaffold09151; pos 76123 to 76950)
ttgtaagttcctcctcttctgtaatttatttatgtctatactgatctatatttatatctgtggatatggtgctagatctttggatctattaggtaatgcgtatagcaatagttgaatcttaagggcgtgtgtggattcaaaatcagaaacagctagaaatattggtggagaatgtgtatgcagcttatatttcatgaggtatagtgtgtatcctacattgagtttttagtagcgtttttgtggaggaagacgtgtgaagtaatgaatatatgcgtttctataagcctctctgtcatttgatatttgagaaggtgagattagtagcgcattgcttcagttgatggtacatgtgcataatgtctatgtagatgtggtaggttgctcatcattttgatacgatagtcttggaagggaagaaattacatggaaggaatgttggaatggcttctcttcagcataaggatgtgagttatggaaatgggttatgttcaggagagtacctactttcaaagtaaaaccatgtaatttgcaatatgcagtaggatgttaattaatgcttctgaatggcttttcttgtggattgctttgaaaatgtttggatgaattaaaagaggtaaacaggggaaaaatgaaaccaaaaacaatagaaagggaaagagaatggtttaaggttgaactagtgaagctttctcttttgctttctttctcgaaggatgcattttatgactattttgatgaagatgctatgagatattttaatatatgttctcccttttttggacatcttgagcagggtgctggtaaatctgctgtgttgaatagtcttat

SEQ ID NO: 43356 - DNA, 448 bp, Manihot esculenta
  Intron number 1 from transcript cassava4.1_021105m (locus cassava4.1_021105m.g) derived from phytozome v7.0 (chr-ID scaffold06550; pos 798551 to 798998)
aactggataaacggtatatatctttctcttctttattttatatttagacaataaattcagacaagtaaaattaattaagtttatattacaaattagatataattttattttgataaattattactttgtttgtacgtgaaattattactttaaatatatttaaaaaatattttctttttatcgactattccgattttgatttaataataaagaaggtctaattcaaatcaaacgcatgtccaaatatattaatgggttgaacaattaaagttgtttaattatttaaaatttctattaaattttatttaaagtatgcagctaatatgttcaagatattattattgttcaatcttgaagatgaagagctaaccttttttccccttttgtggaatatgtcatacattgactgctgatgtattgggtacaattacacttgaaatagatccaa

SEQ ID NO: 43357 - DNA, 730 bp, Manihot esculenta
  Intron number 1 from transcript cassava4.1_004626m (locus cassava4.1_004580m.g) derived from phytozome v7.0 (chr-ID scaffold09151; pos 762176 to 762905)
caactgctagaacagctctccccagtacccagtgagttctattttgttcctattttcctctttttcgttattttgttgaaattttgattgtttaacatgttataacgcttttgggttttcatgttattggataaaattttcaattttcttttctttctttgatttccctattcgttaatttccagtcaatggtttctttctttgattcattcgttcttctgtgatgatgaatggtcaatggtcatcaaatttagtattgttggatcagcttagcttttgttacctcatggtgtgttttattagattaaacattttcatgaagtttactttagaagaagaatttctagaaaggatatgaacggagcttgcttgatattttgctcaagcaacgagctgttcctgttttggttggcaatggctaaaattatttattttatgaacagtttggaaaacaatcaatcctccaagtatttgcacttatcttgtgacttcatcattgataatagtttttgttctcgcaaatttgatttagtttttgaaaaaagattgttgatatatcatatatgtatgttcctgtgagaattatggtcaactgatttagcttagcttcatgaattttgttctacaactgctactagattccttctcctattgtttattattttagacaataaaatgttttttaccccttcctttttacatagggcacggaggaacttcaaatttttca

SEQ ID NO: 43358 - DNA, 633 bp, Manihot esculenta
  Intron number 2 from transcript cassava4.1_008316m (locus cassava4.1_008316m.g) derived from phytozome v7.0 (chr-ID scaffold03332; pos 496614 to 497246)
tgaaagacagggttgctgtgaaaataattgaagaggtaaactattggaatgtcttcatcaattataacaatttgaagctggaataattattttcaggtttttggcatgtagatgaggctgcagattgaataactttgggctgtgtaggataggtcacaatagttatgactttcaaggttttttgttcccaattgtaaaagaagtttttttctttcttttcttttaatagaatgcactcacaagcatggtactgccatgtagcttaagctaatagttaacttttatctccagacttatatggctgctcaaagttattttttgagattgaaactagatggtttaaacttggattttccatgacaggattcttgaaaataaaaatctagaagacatgatgatttttagttattttgaatggtaaatgggaacttatgccacaatttctcattggatcaagtcttgtcttctcatgttccacaaattgccattttaattttgcaacagaaacacgcctaattccttcagttagttccatagatgtatgtaattttgcttatgtggcatgcccttattccccccaatccatggtgctgtacaggctctggagtctacacagctatcccaaggtggagt

SEQ ID NO: 43359 - DNA, 997 bp, Manihot esculenta
  Intron number 2 from transcript cassava4.1_033822m (locus cassava4.1_033822m.g) derived from phytozome v7.0 (chr-ID scaffold09876; pos 500094 to 501090 reverse strand)
aggcaacaggaaacgcggttatattggggagaaaggtactttgcctttccttcatcaatttctcttcttacttcttagggcgtgtttaatttgtttcaaaatattttattttttatcaactgctgtgttggacctcaaactcagtagcagactcaggctatggaaaattctttttgtatgtacaatagttcaagatggagccttggcattttctaaaaatattagatagatgtattatgtacttgtttgaaaataatgatgcatttggtctttttctttagaaatatatataaaactaaactaatacatacctcaataatttttacatttttcaaaattttaatttgtgattaattattaattcgtctcaagattgttttttagccaaatttggtaataataatatatccaatttattatttgaaaagtagttttatcacctatcatgaaaataaattaaatgactaaaataaaaaatctattttttactgtgtaaaaattaatctctatttcttttatccttaaggagttaaaatgtttagttacaatttattataataattataatgtattaaatattgattaattcataatatctctacaaatatataacatgggtcctcatattttaggaagtcttaatgttgtgtgtacgagatatatcttctaacataggtataatatatatattgtttataaagtttttcttgattatttaaaatttaataaaatgtatgatttataaggtgaattatcgtttgattgaaatgcaatttataaatttttattaataatattaatatttgactatttatatttttatctctccgtaagaacatagttattagcatttctgtatttaattctatttccttttgtcggtcttttggtttttaaagaagggctgtcacctgcatctccaaaattgttataacgaacgtttgcttttggttgctatgcaggaattgggttcaagagcgtgtttctaatcagtgct

SEQ ID NO: 43360 - DNA, 414 bp, Manihot esculenta
  Intron number 1 from transcript cassava4.1_032824m (locus cassava4.1_032824m.g) derived from phytozome v7.0 (chr-ID scaffold06711; pos 266697 to 267110 reverse strand)
cctttccttaaatctctaaatctccgatcgatcatgttagtaattacttgcattcgtcgattttttttttaagaattcgtctgtcttgttcatttggattgtgtcattttggtttttctttggtttttgagatccgttttacataaggacgacaaattaaaagttttgattttagttttctttcttttatataaaagaaaaaaacaataataatgtgtttgatttcagagaaagtagaatatttctcttggttgatactaatagaaaagaatttgaaggaatggaaataaagcaaagattgattcgatgttgtttatttgttttctcattactgaatgtttcagctgaccaatttgacttgttttggtatttggaacagatatttgtgctgtgagccatatccacaagagaatt

SEQ ID NO: 43361 - DNA, 881 bp, Manihot esculenta
  Intron number 1 from transcript cassava4.1_003232m (locus cassava4.1_003232m.g) derived from phytozome v7.0 (chr-ID scaffold02853; pos 277639 to 278519 reverse strand)
tcttgtttccgttgtcagatctcttatcatcatctgtacgtttttttttttgaaattcattctttctttttttatagaaaatacagattcgatttgctgcttggttttgaatgtatttgagtagaattatgtttttttcttccttaattcttttagcatgctcattatgatttttccccttctaaatgctctatttgaattttttatgctgataattgagagaagaaggtttttatatatcataagttgctcttcttttaatcgggaactggaaaaagaagcttacattacggtaacctagagcaatgcttaatcaccaccttttccccttttatgtgcatcaaatgtaatgattgtctgtgtacatatttatttatcttcaaatttatatgttattgatttttatgtttggttgcagacaaattaagtggaagtttttttgaaactattacttttaaattttttaatgcgacagaagggattctggagttttaagttctaatttcttaatattttctgtggtttcaaaagtgacgacttctgcttttctgtagttgtttagaaaatgtaagctcaaaactgggtttatttcttttgattggagaatcgtagtatggcaggaagtatgaaaacaagcacttaaaactgtcaaatggaatgatagtgattttttcatctttttttttttggctagaaactttacagtagattttttacatgcttttatgcaaataaagaacatggttggacagatgattctgtgcatgccaatctcttaagtttgttgatatgtttgcagcggcagtattgactatttatcaattatctcatttatgtgctgaactgctcatttcttgttgatgacggcaggtgtttatttg

SEQ ID NO: 43362 - DNA, 588 bp, Manihot esculenta
  Intron number 2 from transcript cassava4.1_003479m (locus cassava4.1_003479m.g) derived from phytozome v7.0 (chr-ID scaffold08962; pos 81015 to 81602 reverse strand)
tttgtcaagctttgggtgcatttcttgacaagaaggtagattttttgctttgcttgtaactgttgggggcatctcatttccatgttctgtgtctttactctgcatcttttactaggtttgataattcttcaacctgttattgcattggttctgtcatttggtatgttcatatattgttaatgggtatagctattgtcaataatcactctgaatttgtagctaattggcctgttttccttctttgttttcaatctgatctttaaaactttgatgaagtttttcatgaagtaaccttttttcttgcttagtgtcatgtcacatggtatctcaattggtctcaaggacagactttttagatgctggttaattggttactacagatttaaatgcaggttctatgcagatgaaaatccttaaaattctactgtctggattcttcatgaccaaagatgtcaaatttcattaagttgtagtgattttttaatgttcgtaaattacatgccattactattatttggtgcaagtctaaagaattatctgtttatgatgctaggttgtcacttgccttcgtcaaccatcacaaggacc

SEQ ID NO: 43363 - DNA, 563 bp, Manihot esculenta
  Intron number 1 from transcript cassava4.1_010727m (locus cassava4.1_010727m.g) derived from phytozome v7.0 (chr-ID scaffold05749; pos 51824 to 52386)
ttcttcttcttctgctgctgctgcttctttgtgaggtatatgatttttgtatggcaatctgttagagttttgttttgtgtggtgggttttatgttggaggaattttggggttttgttttctgattaatgttcagcattttgagggtttgagagttttgagctcaggctttgttcttgcaaatgtttgagttctgttttaaatttctgggtttcttatttgtctagtattggcatgcattgtgtcaccactaataaggttttagaggtttttctgtttgtttcctgagaaaccttgggaaaagggaacgcccaatttacacccatatccatttttgaaactgaagtatgaaaatgtttgtggggtagcaagcaaacagaattttaaagagggaaatgtgtgtgtatgtgtgtgttttgttttttttttggctaattgggagcaggttcattacattgcataattttacacatttggaagattttgtttgcagcaatttctcataattgcatttgatttatgacttgcaggaatttggagataattttctttggaaaacagagga

SEQ ID NO: 43364 - DNA, 584 bp, Manihot esculenta
  Intron number 2 from transcript cassava4.1_010727m (locus cassava4.1_010727m.g) derived from phytozome v7.0 (chr-ID scaffold05749; pos 52386 to 52969)
attttcctcttcatttcttgggaaattaataaaaggtattgttctaaattccctcaaatttctcttcctccattcttcagaggtcaatcctgaaccagcttttgatattttccccccatcaaattccttgttcaattttttgcattttcttgggaagagaaaaggaaagaaaagaaaaaatgaaaaagaaaacaatcttgaactttaatctttataaaaggtaaagtagataatgattcatttcttggttcttgccctttttgacccttaacgattactttaatggccagctggcttgagctacagaatccgtttctgagaacttctgggaattacagaatcgaatttccttcattttcagaattctgattctaaccgctgtttttgaaatgggattttctttattttttaatttaaaaaaaaaaactagcatttgccacacggttcacactctggattgacacagtttcccagtaaccaaacaaaatttacccacagaattgcgaaaaccccttttaagtacactcatttatctccaaaattttccaggaaaataaagaaattgcagtctgaaaaaagaacca

SEQ ID NO: 43365 - DNA, 530 bp, Manihot esculenta
  Intron number 2 from transcript cassava4.1_011972m (locus cassava4.1_011972m.g) derived from phytozome v7.0 (chr-ID scaffold02305; pos 52981 to 53510 reverse strand)
caattgccttatccttgggaaaagctggttgtaaggtcagtgaagttcccttatttcagagctcttcgctttggtgttttagttgaaatgcttcttactcaactgcattgttgcagtgccggaagttagttatttgtttgtttatttatctatgtacaaataggcatatgcagaagatcatcatctctatgcattgtaaatttgtaactttcaaatgtttgaattttgaacgccttctaataatgtggtgacaaattatttgctaatgtggagttatgcttgccattgtgttttatttggtttcttgaagatggatttaatactgaattttctagctgttagttttcttatcttctgaatagttttctaaatccttcattgcacatttcctattattaactgtattctgaatattgtaaagtttagtgtgcatttattcatttttgtttacttcttaattcattattcgtaaaatcgatttgtttgccaagcctaaaattgaattttgctattacaggtgttggtaaatt

SEQ ID NO: 43366 - DNA, 1013 bp, Manihot esculenta
  Intron number 1 from transcript cassava4.1_000640m (locus cassava4.1_000640m.g) derived from phytozome v7.0 (chr-ID scaffold01551; pos 896720 to 897732)
cagagcttgcccataacccatttcacaaagctcaggtttgtatctccattcgatctgaacgttgtcgttcccaattcctctttttgtctcttttctctctatatatttttttgggggggttttttgtacgtttttgctctgtgttttagggttcggcttgatcgggggttttgggatttttcttgtgaattcgatctcaagtttctggttcgggattgtgaagggttttaactagcgtgcgtttaatgccatagggtatatggattgcttattttttttttaaaacgcgttttatttttatttacacttttttcccaatcagttttatttttttcgcttgagtttttttctttgtattttattgagagattgggatttattgcaaattggtttttggatgtgggtttttgaatttgaggattgtgtatgttgggtctgtttgtatgcctggcaaatcgtgggattgagaattaaagagttaacatgaatgcacccgatgatgttttggtgtttgggaatccaagtctctaagctgaatggttgtttaaaattctgtgaagtgatggtttctcgtttcttgagttccccagtgatatataattgagaaatgcaaagtttattcgccattccgctcatgttcttctaaatattgtttgtttttttttttgtggatcttcacttgaagcagtttagttagtatgctttgatttgaggatttattatcgtttttcaaaagaaaaaggtgaaaataatcctttgaagtgctcaaatgtttattgtcattcaaattaattttcaagagctatgttttactaaatggttatgtttatgaaattcgtatgatgtttcttgccatttaacttgctatgttttactaaatggttatgtttatgaaatttgtatgatgtttcttgccatgtaacttgataagcaatggctaattttgtttatctcttatgagtgcttcttgttatgcagtgagtggagttggaaggattgtggggaaggagttt

SEQ ID NO: 43367 - DNA, 473 bp, Manihot esculenta
  Intron number 1 from transcript cassava4.1_011231m (locus cassava4.1_011231m.g) derived from phytozome v7.0 (chr-ID scaffold01551; pos 1005160 to 1005632 reverse strand)
cttcgcaaggtacacttcagaattccatttttacccaaatctcctgcgtctttcattttcggcactgggataaacccccgaagaaaaaggaaaagtttatacatgctagatttagggttttgtgtgttcaatcgacttgttcttttttttttttaaatattattttttcaagtagtgaattcagtttctattcccttattgaataaggattttgcaagaattttaattctttatgtttcattaaaaatatatatatatataaatcgtgtataagaatttatttatttattattattattggctttgattttgtaatgattgtggtggaaactttttgtgtcatttgcctctttttatttagtgggggtgataagagcggttgggtcattgtattgtgtttcattgaaaatgctaaatgcaagtgttaattccctctaggaacttcctcctgaagtcagagaggctcaagagaa

SEQ ID NO: 43368 - DNA, 537 bp, Manihot esculenta
  Intron number 1 from transcript cassava4.1_022325m (locus cassava4.1_022325m.g) derived from phytozome v7.0 (chr-ID scaffold06656; pos 1283174 to 1283710)
ttggtaagaacatgaaatataactttaacacttaatatatttgtctatgagattatgctaagctttaaccttgttccagggatgggctatgcaatgaaaatagctttctcctttttcataacccttctcatcccaatcttagcactagggaggattaagacctagtacttgatggtaatctaaactatttagaaactatgtgttagatttgtgactcataatgctaataaagtttgagaagtagtttcaagcatttacaatgtatttgttcaaatcaagattacaaatcttgatctctgtttttatttttataaatttgatatgctctgtaagaatcagatgctatattgtttgggtttattgagatttcaagtttaaatatctaatctaacacactaatcttctctgttatttgacaaggcaattctatagttttggttagtatttaaacattggtacccagtcaagaatttgatccgtagtcaaatatggtgttgatatttatagaagcacatgaaattctctgcaggaactcca

SEQ ID NO: 43369 - DNA, 886 bp, Manihot esculenta
  Intron number 1 from transcript cassava4.1_000471m (locus cassava4.1_000471m.g) derived from phytozome v7.0 (chr-ID scaffold03614; pos 538517 to 539402)
cgataaaccctctcatcttgcttccttgctctctggtacgtttatccttttttcttcgtattttgctctttttttggggtttcatgtgaaaaatgaaaattctctatttttctagattttaggttatttaagcgcattttaggtgataattggttcttggggctgattctaatttttcttttgtaatttgggttctacaaaaactctgattttgtttttaagtacgggtgatatattagttcatgtttgtcttgcgtgtttttagttctgtcacgttttgccgataagggatccgtggccatttgttgttttctggatcgatgagtgattcgtcgacattttgtttgaatttgaatcgaggtttttcaagttttctcctttcttctccattttgcctatcttgtgggtctctctacttaaagggcttttgtccgtccgttttcgcgtcttgtttaaagccttcttgtaattgataatcatcatcttgttctagaacacctacactttgatttcttggtaagaaacactgagcattctagcttttttgttaagttgagaatgagctagatttgaagttaatttgatgctcaaggtgtaagtagaatgtgcttttgtgccatagcgggtcatggatttcagacaaatgagtcttagatttgagtcgtctggtttgcctggggtggaacctgaagctgatttgctccgggcagcaaatacttgctaatggttgctctaagtagggaaagatgtttgtttgattctccaatgtgatcattggagttatttatgacatctgtccagtcatagctgcagtcatcagatccctctgcgtcctcactgccttgccgctcttgcagatttggctccttgggtcatttccagccca

SEQ ID NO: 43370 - DNA, 682 bp, Manihot esculenta
  Intron number 1 from transcript cassava4.1_033607m (locus cassava4.1_033607m.g) derived from phytozome v7.0 (chr-ID scaffold10267; pos 21 to 702)
cagactatcagcgacggaaaaatccgtcgctgatagtctgttattttgtagtgaaagatcccaagaaacgatcagtctcctccactgcaatgactaaagctatcctttcttctttcttgaattgacatcagaaagattgaaggggaaggcatcagggcattcaaacctgtgaaagaattcgcattccaaataaaaggttgacgctgcagcagaggtgagttgttcatgtagttcgttgagcacctggaacccaatgccaggaaatatctattacaactaaaaacacaggcttgctaaataaaatttatagctagcttatgctgtatttatttattgttctttatgtcattttgaattttgttttttcatttacgtccatctattgccaagcaaaattcataactcgtaggtattgtatttatttcttttcttttttgaaaggttctttcttttttcttgaatctaagtctacgctacaggcacattcatatcccattaggtactattttttattagtttatttttagttcatgaagtttatttaaatcactctattaattttaatttatttttaaacctttaaaaagattatttgtgctgaattgttggtttttttttcctatggacatgcaaaaattagaatggaggattttcccggcttaaaattttgtccactgacgaa

SEQ ID NO: 43371 - DNA, 442 bp, Manihot esculenta
  Intron number 2 from transcript cassava4.1_004894m (locus cassava4.1_004894m.g) derived from phytozome v7.0 (chr-ID scaffold06314; pos 169314 to 169755 reverse strand)
cttctctgcctcgctctaccccaaccccacaacaagtaagttccttttcttgcttctgggtttacacaaagaaagcttcatctccccttttgtttttagaattttttgaaaatgatttttgattttccctggaattcacatgcatctctatcaattttgttaaaagttagtaaattttctttgccttctttttgggtttagtcaaagtattaaatttaaagtcatttaattagcatgtttatagcatgttatgcaaaagaagtgtcttaaattcttgctggttttcaagtcagctatggaaaattcattgcttttgccaaattcttcactaaataattgcaaaatctctgctaaattttcatgttgctattttttttttaatgtatcttctcatcttgtgtgaccagccatcaatagcaacactgaattcaagaaggtatac

SEQ ID NO: 43372 - DNA, 616 bp, Manihot esculenta
  Intron number 1 from transcript cassava4.1_011435m (locus cassava4.1_011071m.g) derived from phytozome v7.0 (chr-ID scaffold03403; pos 150604 to 151219 reverse strand)
gcttctgacaagcggattgtcaccatcgtgagtgattccttttcctagattttgtctttgcataattgcatttacttatccaccatttgcttttacttcagtttcgcgtgttttcctttctagtttccaattgtcaagaaagaaagattaatgctcctttttctatttaattatattcctgcgtagctggggctgcagaactatactagtgaggtttgcttttcccttttaagtgtacaaatggttacatttatatatttgaatatcttcctaacttcttctgtgttgtaattttttggacgctatatggcactttcgtagtttgcaatgaaaatttgactagcaaaagactacctagaattatccatatgtcgtgtttggcagctcagaaacaaagggaaaatgcaggaaagtggccaaaaagaaaagagcaagaaaagagggaaggagagaaaaatgaaaccaagagagcatcacattgcttattattctatcttttatggagaaaaaagtacagttagtgtagtgttattttatagcatgttctttcattttatgtattgaaaattataatgaaaaattgacaggttgattcttccaataatcatccattaga

SEQ ID NO: 43373 - DNA, 381 bp, Manihot esculenta
  Intron number 2 from transcript cassava4.1_020127m (locus cassava4.1_020127m.g) derived from phytozome v7.0 (chr-ID scaffold03614; pos 4073378 to 4073758)
ctaggtaattcttcttcttttctcatgttctgtttgattttgtttctggtcctgcctgtaatttctgatataatgagaaacagtttagtttaggttttagaaacttttgcaatagaaaatgggttctatatgatatctttataaatgtgatgctgtgattttgattgtgcgtagcttgtctgggtccttggaaccagtgcctgtaaatactaatatgcttttattgagtcttcatctaggattaggctaaaggaagggaaaaaaaattgaaaaaacttgggatctgttcggataacaacattcttctccatggtttttggctaaacttttggtacaataaatccaggttgcacgcacaggcgcttacgctggctgcactag

SEQ ID NO: 43374 - DNA, 748 bp, Manihot esculenta
  Intron number 1 from transcript cassava4.1_006239m (locus cassava4.1_006239m.g) derived from phytozome v7.0 (chr-ID scaffold03332; pos 288337 to 289084)
cctttaagtttggggagcctgggagtggttcactggtagggtgtttacttgtattctttcttcatattggtttgtgggtttggttgactcacgagttcagggtcttcctgttctttgatttgagagtgtgagttttgtagtccatgtgccaggtctcatttcttgggtttttttgagagttctctgtgttgaggtgagatcaggtttgactttgaatctgactgttgtctctcaggttagctctgctaattttaaggttaggttttggtttttgtcttggagctagaagtcccatttcatgttttctttttttttgtgaatttttcctgcactcagctcaaacgaggttcagcttgcttctcagtttggctgctagcttaatcagcaaaatttcttttttgcacttgggctctgattttcaagaattttacttgtttcagctgtggattctgctacttgggttctttgtgccgggttctaaagttgctagtttcataaaatatctagaattgagcttcattgtaggatctcaaaaacttaattttttgctaaaggtataagagtttctgcggtgtgatttgggattatgttcagggaattgatccttggcataattttctgggcttagggtttttgggatcagatggggaaagtagcagtttactgttaaggattttcgttaagtgacacattttcatatagatctttctttttttgtctttggcaggtccattttcttggcgtgata

SEQ ID NO: 43375 - DNA, 917 bp, Manihot esculenta
  Intron number 1 from transcript cassava4.1_005193m (locus cassava4.1_005193m.g) derived from phytozome v7.0 (chr-ID scaffold08420; pos 111026 to 111942)
ggaagtttgatttcgaggccaatttgaggcctaaggtatgcattcttttttagtttttgcttttaattttgctcgcttttgttatctgcgtttggttctggagtcttttttcaagtgcgtccatgttgacttgtcaattttggggattggcctgtttctagatttgtttaaggttttgccgactgttactcgattatgcattgccttaacaagcatacttttgggatctgttgttattatttgttttggctcccagaaattgagagcttggcgcagcttggttaagtcagacttagtgttgaaatattacgttgaatttttcttggttcttggtgaatgaataaaaacttgactaaactcttaaccatgtgaagtacttgtctttaaagctggttatctagaatacctttttttagcttgatttctcttagggaacttttgatatgtcctaaaaatggataaggaatttgattctagggatataatagaatactcttctcttgttcaatgtatttcaaatttttttttttaattattttttttctctttccataacttcaatttagatcaaaatgaaatcaaaattgtgatattggtttctaaagctgtccttgagttatacttaattatctgaaaaaaatgaaattataattatattcttggatgaggatgtctagattgtatccgtttccatttcaatgcaaacaagacatgccgtatagttgtaggtttcaactgttcttttactcgatgttggtatttagtggtttctgtcttttctccttggccattgaatatttgtggatgttgcttggatttagaatttcagtcttttataaatttaatttatcactgatctatttgttataacttcagtatttctgacccaatatggaaatgatactccttgtgcagat

SEQ ID NO: 43376 - DNA, 277 bp, Manihot esculenta
  Intron number 1 from transcript cassava4.1_028302m (locus cassava4.1_028302m.g) derived from phytozome v7.0 (chr-ID scaffold03332; pos 573826 to 574102 reverse strand)
catacaaaaagcaggtatatatgttttttcactctatccatcgcggattgttagaattctagttgattttgattctactcttaattagtacttcatgctttagctatcatggatttgccctttctaatagtgaagtggagtttacaaattataagatatgatttgcctcttgatttttcttttccgctttccctatatatatagaaatgatgaagtagataagtaacttgactgcttggttatttagggcctcatatctgctgagcatcgtttgcgg

SEQ ID NO: 43377 - DNA, 634 bp, Manihot esculenta
  Intron number 1 from transcript cassava4.1_020030m (locus cassava4.1_020030m.g) derived from phytozome v7.0 (chr-ID scaffold03614; pos 476954 to 477587)
tctctctgtcgccacttctgacgaatcttccagtatttaatcaatattttgtttttctttcatcgcatttgcttttgctcgttccggctggattttgttttcgtgtgtggcggtaacggagggatagcacggtcagtttgtatccagctcatttaactttgatttatcggctttttgagggagcagcttctctaatctcttcaaaagaaagaaattttgaagccgaagatgatgttcactcgagcaaaatttaacacgctgaaaaatatttgctgagaaaaaacgacatcgtttaggtggaaaaaagagggagtcatccacagatagcaccgaccatcgctttctttttctcttgcgttcagtaatggagtcgttttatcaatggaatttacctgatggctgcagtacttgtgattttggctattcagtaattttgatttccgatttaattcaatccgaaattgtcggtaataaattgcttggattttctgaatctgaatcgtccattgtcgagggtgtatgttagctgctttgatttgtcaatttattttttcttttttaaaaaaattggcactgttatgatgtgatctttattgcagtttcggcgaaactaggaagactttccattgtatca
